United States Patent Application Publication US 2020/0163878 A1 - sequence listing, part 33

SEQ ID NO: 123367 - RNA, 1758 nt, Artificial Sequence; identical to SEQ ID NO: 123025
  derived and/or modified CDS sequence (opt2) from hemagglutinin__InfluenzaB__AGX19612

SEQ ID NO: 123368 - RNA, 1758 nt, Artificial Sequence
  derived and/or modified CDS sequence (opt2) from hemagglutinin__InfluenzaB__AGX19623
augaaggccaucaucguccuccucauggucgucaccuccaacgccgaccgcaucugcaccggcaucaccuccuccaacuccccccacgucgucaagaccgccacccagggcgaggucaacgucaccggcgucaucccccucaccaccacccccaccaagucccacuucgccaaccucaagggcaccgagacccgcggcaagcucugccccaagugccucaacugcaccgaccucgacgucgcccucggccgccccaagugcaccggcaacauccccuccgcccgcgucuccauccuccacgagguccgccccgucaccuccggcugcuuccccaucaugcacgaccgcaccaagauccgccagcuccccaaccuccuccgcggcuacgagcacauccgccucuccacccacaacgucaucaacgccgagaacgcccccggcggccccuacaagaucggcaccuccggcuccugccccaacgucaccaacggcaacggcuucuucgccaccauggccugggccguccccaagaacgacaacaacaagaccgccaccaacucccucaccaucgagguccccuacaucugcaccgagggcgaggaccagaucaccgucuggggcuuccacuccgacaacgagacccagauggccaagcucuacggcgacuccaagccccagaaguucaccuccuccgccaacggcgucaccacccacuacgucucccagaucggcggcuuccccaaccagaccgaggacggcggccucccccaguccggccgcaucgucgucgacuacaugguccagaaguccggcaagaccggcaccaucaccuaccagcgcggcauccuccucccccagaaggucuggugcgccuccggccgcuccaaggucaucaagggcucccucccccucaucggcgaggccgacugccuccacgagaaguacggcggccucaacaaguccaagcccuacuacaccggcgagcacgccaaggccaucggcaacugccccaucugggucaagaccccccucaagcucgccaacggcaccaaguaccgcccccccgccaagcuccucaaggagcgcggcuucuucggcgccaucgccggcuuccucgagggcggcugggagggcaugaucgccggcuggcacggcuacaccucccacggcgcccacggcgucgccgucgccgccgaccucaaguccacccaggaggccaucaacaagaucaccaagaaccucaacucccucuccgagcucgaggucaagaaccuccagcgccucuccggcgccauggacgagcuccacaacgagauccucgagcucgacgagaaggucgacgaccuccgcgccgacaccaucuccucccagaucgagcucgccguccuccucuccaacgagggcaucaucaacuccgaggacgagcaccuccucgcccucgagcgcaagcucaagaagaugcucggccccuccgccgucgagaucggcaacggcugcuucgagaccaagcacaagugcaaccagaccugccucgaccgcaucgccgccggcaccuucgacgccggcgaguucucccuccccaccuucgacucccucaacaucaccgccgccucccucaacgacgacggccucgacaaccacaccauccuccucuacuacuccaccgccgccuccucccucgccgucgcccucaugaucgccaucuucgucgucuacauggucucccgcgacaacgucuccugcuccaucugccucuga

SEQ ID NO: 123369 - RNA, 1758 nt, Artificial Sequence; identical to SEQ ID NO: 123025
  derived and/or modified CDS sequence (opt2) from hemagglutinin__InfluenzaB__AGX19634

SEQ ID NO: 123370 - RNA, 1758 nt, Artificial Sequence; identical to SEQ ID NO: 122550
  derived and/or modified CDS sequence (opt2) from hemagglutinin__InfluenzaB__AGX19645

SEQ ID NO: 123371 - RNA, 1758 nt, Artificial Sequence; identical to SEQ ID NO: 122601
  derived and/or modified CDS sequence (opt2) from hemagglutinin__InfluenzaB__AGX19656

SEQ ID NO: 123372 - RNA, 1758 nt, Artificial Sequence
  derived and/or modified CDS sequence (opt2) from hemagglutinin__InfluenzaB__AGX19667
augaaggccaucaucguccuccucauggucgucaccuccaacgccgaccgcaucugcaccggcaucaccuccuccaacuccccccacgucgucaagaccgccacccagggcgaggucaacgucaccggcgucaucccccucaccaccacccccaccaagucccacuucgccaaccucaagggcaccgagacccgcggcaagcucugccccaagugccucaacugcaccgaccucgacgucgcccucggccgccccaagugcaccggcaagauccccuccgcccgcgucuccauccuccacgagguccgccccgucaccuccggcugcuuccccaucaugcacgaccgcaccaagauccgccagcuccccaaccuccuccgcggcuacgagcacauccgccucuccacccacaacgucaucaacgccgagaacgcccccggcggccccuacaagaucggcaccuccggcuccugccccaacaucaccaacggcaacggcuucuucgccaccauggccugggccguccccaagaacgacaagaacaagaccgccaccaacccccucaccaucgagguccccuacaucugcaccgagggcgaggaccagaucaccgucuggggcuuccacuccgacaacgagacccagauggccaagcucuacggcgacuccaagccccagaaguucaccuccuccgccaacggcgucaccacccacuacgucucccagaucggcggcuuccccaaccagaccgaggacggcggccucccccaguccggccgcaucgucgucgacuacaugguccagaaguccggcaagaccggcaccaucaccuaccagcgcggcauccuccucccccagaaggucuggugcgccuccggccgcuccaaggucaucaagggcucccucccccucaucggcgaggccgacugccuccacgagaaguacggcggccucaacaaguccaagcccuacuacaccggcgagcacgccaaggccaucggcaacugccccaucugggucaagaccccccucaagcucgccaacggcaccaaguaccgcccccccgccaagcuccucaaggagcgcggcuucuucggcgccaucgccggcuuccucgagggcggcugggagggcaugaucgccggcuggcacggcuacaccucccacggcgcccacggcgucgccgucgccgccgaccucaaguccacccaggaggccaucaacaagaucaccaagaaccucaacucccucuccgagcucgaggucaaggaccuccagcgccucuccggcgccauggacgagcuccacaacgagauccucgagcucgacgagaaggucgacgaccuccgcgccgacaccaucuccucccagaucgagcucgccguccuccucuccaacgagggcaucaucaacuccgaggacgagcaccuccucgcccucgagcgcaagcucaagaagaugcucggccccuccgccgucgagaucggcaacggcugcuucgagaccaagcacaagugcaaccagaccugccucgaccgcaucgccgccggcaccuucgacgccggcgaguucucccuccccaccuucgacucccucaacaucaccgccgccucccucaacgacgacggccucgacaaccacaccauccuccucuacuacuccaccgccgccuccucccucgccgucacccucaugaucgccaucuucgucgucuacauggucucccgcgacaacgucuccugcuccaucugccucuga

SEQ ID NO: 123373 - RNA, 1758 nt, Artificial Sequence; identical to SEQ ID NO: 123025
  derived and/or modified CDS sequence (opt2) from hemagglutinin__InfluenzaB__AGX19678

SEQ ID NO: 123374 - RNA, 1758 nt, Artificial Sequence; identical to SEQ ID NO: 122550
  derived and/or modified CDS sequence (opt2) from hemagglutinin__InfluenzaB__AGX19700

SEQ ID NO: 123375 - RNA, 1758 nt, Artificial Sequence
  derived and/or modified CDS sequence (opt2) from hemagglutinin__InfluenzaB__AGX19711
augaaggccaucaucguccuccucauggucgucaccuccaacgccgaccgcaucugcaccggcaucaccuccuccaacuccccccacgucgucaagaccgccacccagggcgaggucaacgucaccggcgucaucccccucaccaccacccccaccaagucccacuucgccaaccucaagggcaccgagacccgcggcaagcucugccccaagugccucaacugcaccgaccucgacgucgcccucggccgccccaagugcaccggcaacauccccuccgcccgcgucuccauccuccacgagguccgccccgucaccuccggcugcuuccccaucaugcacgaccgcaccaagauccgccagcuccccaaccuccuccgcggcuacgagcacauccgccucuccacccacaacgucaucaacgccgagaacgcccccggcggccccuacaagaucggcaccuccggcuccugccccaacgucaccaacggcaacggcuucuucgccaccauggccugggccguccccaagaacgacaagaacaagaccgccaccaacucccucaccaucgagguccccuacaucugcaaggagggcgaggaccagaucaccgucuggggcuuccacuccgacaacgagacccagauggccaagcucuacggcgacuccaagccccagaaguucaccuccuccgccaacggcgucaccacccacuacgucucccagaucggcggcuuccccaaccagaccgaggacggcggccucccccaguccggccgcaucgucgucgacuacaugguccagaaguccggcaagaccggcaccaucaccuaccagcgcggcauccuccucccccagaaggucuggugcgccuccggccgcuccaaggucaucaagggcucccucccccucaucggcgaggccgacugccuccacgagaaguacggcggccucaacaaguccaagcccuacuacaccggcgagcacgccaaggccaucggcaacugccccaucugggucaagaccccccucaagcucgccaacggcaccaaguaccgcccccccgccaagcuccucaaggagcgcggcuucuucggcgccaucgccggcuuccucgagggcggcugggagggcaugaucgccggcuggcacggcuacaccucccacggcgcccacggcgucgccgucgccgccgaccucaaguccacccaggaggccaucaacaagaucaccaagaaccucaacucccucuccgagcucgaggucaagaaccuccagcgccucuccggcgccauggacgagcuccacaacgagauccucgagcucgacgagaaggucgacgaccuccgcgccgacaccaucuccucccagaucgagcucgccguccuccucuccaacgagggcaucaucaacuccgaggacgagcaccuccucgcccucgagcgcaagcucaagaagaugcucggccccuccgccgucgagaucggcaacggcugcuucgagaccaagcacaagugcaaccagaccugccucgaccgcaucgccgccggcaccuucgacgccggcgaguucucccuccccaccuucgacucccucaacaucaccgccgccucccucaacgacgacggccucgacaaccacaccauccuccucuacuacuccaccgccgccuccucccucgccgucacccucaugaucgccaucuucgucgucuacauggucucccgcgacaacgucuccugcuccaucugccucuga

SEQ ID NO: 123376 - RNA, 1758 nt, Artificial Sequence; identical to SEQ ID NO: 123025
  derived and/or modified CDS sequence (opt2) from hemagglutinin__InfluenzaB__AGX19722

SEQ ID NO: 123377 - RNA, 1758 nt, Artificial Sequence; identical to SEQ ID NO: 123025
  derived and/or modified CDS sequence (opt2) from hemagglutinin__InfluenzaB__AGX19733

SEQ ID NO: 123378 - RNA, 1758 nt, Artificial Sequence; identical to SEQ ID NO: 123025
  derived and/or modified CDS sequence (opt2) from hemagglutinin__InfluenzaB__AGX19744

SEQ ID NO: 123379 - RNA, 1758 nt, Artificial Sequence; identical to SEQ ID NO: 122550
  derived and/or modified CDS sequence (opt2) from hemagglutinin__InfluenzaB__AGX19755

SEQ ID NO: 123380 - RNA, 1758 nt, Artificial Sequence; identical to SEQ ID NO: 123025
  derived and/or modified CDS sequence (opt2) from hemagglutinin__InfluenzaB__AGX19766

SEQ ID NO: 123381 - RNA, 1758 nt, Artificial Sequence; identical to SEQ ID NO: 123358
  derived and/or modified CDS sequence (opt2) from hemagglutinin__InfluenzaB__AGX19788

SEQ ID NO: 123382 - RNA, 1758 nt, Artificial Sequence; identical to SEQ ID NO: 123025
  derived and/or modified CDS sequence (opt2) from hemagglutinin__InfluenzaB__AGX19799

SEQ ID NO: 123383 - RNA, 1758 nt, Artificial Sequence; identical to SEQ ID NO: 123025
  derived and/or modified CDS sequence (opt2) from hemagglutinin__InfluenzaB__AGX19810

SEQ ID NO: 123384 - RNA, 1758 nt, Artificial Sequence
  derived and/or modified CDS sequence (opt2) from hemagglutinin__InfluenzaB__AGX19821
augaaggccaucaucguccuccucauggucgucaccuccaacgccgaccgcaucugcaccggcaucaccuccuccaacuccccccacgucgucaagaccgccacccagggcgaggucaacgucaccggcgucaucccccucaccaccacccccaccaagucccacuucgccaaccucaagggcaccgagacccgcggcaagcucugccccaagugccucaacugcaccgaccucgacgucgcccucggccgccccaagugcaccggcaacauccccuccgcccgcgucuccauccuccacgagguccgccccgucaccuccggcugcuuccccaucaugcacgaccgcaccaagauccgccagcuccccaaccuccuccgcggcuacgagcacauccgccucuccacccacaacgucaucaacgccgagaacgcccccggcggccccuacaagaucggcaccuccggcuccugccccaacgucaccaacggcaacggcuucuucgccaccauggccugggccguccccaagaacgacaacaacaagaccgccaccaacucccucaccaucgagguccccuacaucugcaccgagggcgaggaccagaucaccgucuggggcuuccacuccgacaacgagacccagauggccaagcucuacggcgacuccaagccccagaaguucaccuccuccgccaacggcgucaccacccacuacgucucccagaucggcggcuuccccaaccagaccgaggacggcggccucccccaguccggccgcaucgucgucgacuacaugguccagaaguccggcaagaccggcaccaucaccuaccagcgcggcauccuccucccccagaaggucuggugcgccuccggccgcuccaaggucaucaagggcucccucccccucaucggcgaggccgacugccuccacgagaaguacggcggccucaacaaguccaagcccuacuacaccggcgagcacgccaaggccaucggcaacugccccaucugggucaagaccccccucaagcucgccaacggcaccaaguaccgcccccccgccaagcuccucaaggagcgcggcuucuucggcgccaucgccggcuuccucgagggcggcugggagggcaugaucgccggcuggcacggcuacaccucccacggcgcccacggcgucgccgucgccgccgaccucaaguccacccaggaggccaucaacaagaucaccaagaaccucaacucccucuccgagcucgaggucaagaaccuccagcgccucuccggcuccauggacgagcuccacaacgagauccucgagcucgacgagaaggucgacgaccuccgcgccgacaccaucuccucccagaucgagcucgccguccuccucuccaacgagggcaucaucaacuccgaggacgagcaccuccucgcccucgagcgcaagcucaagaagaugcucggccccuccgccgucgagaucggcaacggcugcuucgagaccaagcacaagugcaaccagaccugccucgaccgcaucgccgccggcaccuucgacgccggcgaguucucccuccccaccuucgacucccucaacaucaccgccgccucccucaacgacgacggccucgacaaccacaccauccuccucuacuacuccaccgccgccuccucccucgccgucacccucaugaucgccaucuucgucgucuacauggucucccgcgacaacgucuccugcuccaucugccucuga

SEQ ID NO: 123385 - RNA, 1758 nt, Artificial Sequence; identical to SEQ ID NO: 123358
  derived and/or modified CDS sequence (opt2) from hemagglutinin__InfluenzaB__AGX19832

SEQ ID NO: 123386 - RNA, 1758 nt, Artificial Sequence; identical to SEQ ID NO: 123025
  derived and/or modified CDS sequence (opt2) from hemagglutinin__InfluenzaB__AGX19843

SEQ ID NO: 123387 - RNA, 1758 nt, Artificial Sequence; identical to SEQ ID NO: 123025
  derived and/or modified CDS sequence (opt2) from hemagglutinin__InfluenzaB__AGX19854

SEQ ID NO: 123388 - RNA, 1758 nt, Artificial Sequence; identical to SEQ ID NO: 123025
  derived and/or modified CDS sequence (opt2) from hemagglutinin__InfluenzaB__AGX19865

SEQ ID NO: 123389 - RNA, 1758 nt, Artificial Sequence; identical to SEQ ID NO: 123358
  derived and/or modified CDS sequence (opt2) from hemagglutinin__InfluenzaB__AGX19876

SEQ ID NO: 123390 - RNA, 1758 nt, Artificial Sequence; identical to SEQ ID NO: 123025
  derived and/or modified CDS sequence (opt2) from hemagglutinin__InfluenzaB__AGX19887

SEQ ID NO: 123391 - RNA, 1758 nt, Artificial Sequence
  derived and/or modified CDS sequence (opt2) from hemagglutinin__InfluenzaB__AGX19898
augaaggccaucaucguccuccucauggucgucaccuccaacgccgaccgcaucugcaccggcaucaccuccuccaacuccccccacgucgucaagaccgccacccagggcgaggucaacgucaccggcgucaucccccucaccaccacccccaccaagucccacuucgccaaccucaagggcaccgagacccgcggcaagcucugccccaagugccucaacugcaccgaccucgacgucgcccucggccgccccaagugcaccggcaagauccccuccgcccgcgucuccauccuccacgagguccgccccgucaccuccggcugcuuccccaucaugcacgaccgcaccaagauccgccagcuccccaaccuccuccgcggcuacgagcacauccgccucuccacccacaacgucaucaacgccgagaacgcccccggcggccccuacaagaucggcaccuccggcuccugccccaacaucaccaacgagaacggcuucuucgccaccauggccugggccguccccaagaacgacaagaacaagaccgccaccaacccccucaccaucgagguccccuacaucugcaccgagggcgaggaccagaucaccgucuggggcuuccacuccgacaacgagacccagauggccaagcucuacggcgacuccaagccccagaaguucaccuccuccgccaacggcgucaccacccacuacgucucccagaucggcggcuuccccaaccagaccgaggacggcggccucccccaguccggccgcaucgucgucgacuacaugguccagaaguccggcaagaccggcaccaucaccuaccagcgcggcauccuccucccccagaaggucuggugcgccuccggccgcuccaaggucaucaagggcucccucccccucaucggcgaggccgacugccuccacgagaaguacggcggccucaacaaguccaagcccuacuacaccggcgagcacgccaaggccaucggcaacugccccaucugggucaagaccccccucaagcucgccaacggcaccaaguaccgcccccccgccaagcuccucaaggagcgcggcuucuucggcgccaucgccggcuuccucgagggcggcugggagggcaugaucgccggcuggcacggcuacaccucccacggcgcccacggcgucgccgucgccgccgaccucaaguccacccaggaggccaucaacaagaucaccaagaaccucaacucccucuccgagcucgaggucaagaaccuccagcgccucuccggcgccauggacgagcuccacaacgagauccucgagcucgacgagaaggucgacgaccuccgcgccgacaccaucuccucccagaucgagcucgccguccuccucuccaacgagggcaucaucaacuccgaggacgagcaccuccucgcccucgagcgcaagcucaagaagaugcucggccccuccgccgucgagaucggcaacggcugcuucgagaccaagcacaagugcaaccagaccugccucgaccgcaucgccgccggcaccuucgacgccggcgaguucucccuccccaccuucgacucccucaacaucaccgccgccucccucaacgacgacggccucgacaaccacaccauccuccucuacuacuccaccgccgccuccucccucgccgucacccucaugaucgccaucuucgucgucuacauggucucccgcgacaacgucuccugcuccaucugccucuga

SEQ ID NO: 123392 - RNA, 1758 nt, Artificial Sequence; identical to SEQ ID NO: 122550
  derived and/or modified CDS sequence (opt2) from hemagglutinin__InfluenzaB__AGX19909

SEQ ID NO: 123393 - RNA, 1758 nt, Artificial Sequence; identical to SEQ ID NO: 123025
  derived and/or modified CDS sequence (opt2) from hemagglutinin__InfluenzaB__AGX19920

SEQ ID NO: 123394 - RNA, 1758 nt, Artificial Sequence; identical to SEQ ID NO: 123391
  derived and/or modified CDS sequence (opt2) from hemagglutinin__InfluenzaB__AGX19931

SEQ ID NO: 123395 - RNA, 1758 nt, Artificial Sequence; identical to SEQ ID NO: 123358
  derived and/or modified CDS sequence (opt2) from hemagglutinin__InfluenzaB__AGX19942

SEQ ID NO: 123396 - RNA, 1758 nt, Artificial Sequence; identical to SEQ ID NO: 123025
  derived and/or modified CDS sequence (opt2) from hemagglutinin__InfluenzaB__AGX19953

SEQ ID NO: 123397 - RNA, 1758 nt, Artificial Sequence; identical to SEQ ID NO: 122783
  derived and/or modified CDS sequence (opt2) from hemagglutinin__InfluenzaB__AGX19964

SEQ ID NO: 123398 - RNA, 1758 nt, Artificial Sequence; identical to SEQ ID NO: 122550
  derived and/or modified CDS sequence (opt2) from hemagglutinin__InfluenzaB__AGX19975

SEQ ID NO: 123399 - RNA, 1758 nt, Artificial Sequence
  derived and/or modified CDS sequence (opt2) from hemagglutinin__InfluenzaB__AGX19986
augaaggccaucaucguccuccucauggucgucaccuccaacgccgaccgcaucugcaccggcaucaccuccuccaacuccccccacgucgucaagaccgccacccagggcgaggucaacgucaccggcgucaucccccucaccaccacccccaccaagucccacuucgccaaccucaagggcaccgagacccgcggcaagcucugccccaagugccucaacugcaccgaccucgacgucgcccucggccgccccaagugcaccggcaagauccccuccgcccgcgucuccauccuccacgagguccgccccgucaccuccggcugcuuccccaucaugcacgaccgcaccaagauccgccagcuccccaaccuccuccgcggcuacgagcacauccgccucuccacccacaacgucaucaacgccgagaacgcccccggcggccccuacaagaucggcaccuccggcuccugccccaacaucaccaacggcaacggcuucuucgccaccauggccugggccguccccaagaacgacaagaacaagaccgccaccaacccccucaccaucgagguccccuacaucugcaccgagggcgaggaccagaucaccgucuggggcuuccacuccgacaacgagacccagauggccaagcucuacggcgacuccaagccccagaaguucaccuccuccgccaacggcgucaccacccacuacgucucccagaucggcggcuuccccaaccagaccgaggacggcggccucccccaguccggccgcaucgucgucgacuacaugguccagaaguccggcaagaccggcaccaucaccuaccagcgcggcauccuccucccccagaaggucuggugcgucuccggccgcuccaaggucaucaagggcucccucccccucaucggcgaggccgacugccuccacgagaaguacggcggccucaacaaguccaagcccuacuacaccggcgagcacgccaaggccaucggcaacugccccaucugggucaagaccccccucaagcucgccaacggcaccaaguaccgcccccccgccaagcuccucaaggagcgcggcuucuucggcgccaucgccggcuuccucgagggcggcugggagggcaugaucgccggcuggcacggcuacaccucccacggcgcccacggcgucgccgucgccgccgaccucaaguccacccaggaggccaucaacaagaucaccaagaaccucaacucccucuccgagcucgaggucaagaaccuccagcgccucuccggcgccauggacgagcuccacaacgagauccucgagcucgacgagaaggucgacgaccuccgcgccgacaccaucuccucccagaucgagcucgccguccuccucuccaacgagggcaucaucaacuccgaggacgagcaccuccucgcccucgagcgcaagcucaagaagaugcucggccccuccgccgucgagaucggcaacggcugcuucgagaccaagcacaagugcaaccagaccugccucgaccgcaucgccgccggcaccuucgacgccggcgaguucucccuccccaccuucgacucccucaacaucaccgccgccucccucaacgacgacggccucgacaaccacaccauccuccucuacuacuccaccgccgccuccucccucgccgucacccucaugaucgccaucuucgucgucuacauggucucccgcgacaacgucuccugcuccaucugccucuga

SEQ ID NO: 123400 - RNA, 1758 nt, Artificial Sequence
  derived and/or modified CDS sequence (opt2) from hemagglutinin__InfluenzaB__AGX19997
augaaggccaucaucguccuccucauggucgucaccuccaacgccgaccgcaucugcaccggcaucaccuccuccaacuccccccacgucgucaagaccgccacccagggcgaggucaacgucaccggcgucaucccccucaccaccacccccaccaagucccacuucgccaaccucaagggcaccgagacccgcggcaagcucugccccaagugccucaacugcaccgaccucgacgucgcccucggccgccccaagugcaccggcaagauccccuccgcccgcgucuccauccuccacgagguccgccccgucaccuccggcugcuuccccaucaugcacgaccgcaccaagauccgccagcuccccaaccuccuccgcggcuacgagcacauccgccucuccacccacaacgucaucaacgccgagaacgcccccggcggccccuacaagaucggcaccuccggcuccugccccaacaucaccaacggcaacggcuucuucgccaccauggccugggccguccccaagaacgacaagaacaagaccgccaccaacccccucaccaucgagguccccuacaucugcaccgagggcgaggaccagaucaccgucuggggcuuccacuccgacaacgagacccagauggccaagcucuacggcgacuccaagccccagaaguucaccuccuccgccaacggcgucaccacccacuacgucucccagaucggcggcuuccccaaccagaucgaggacggcggccucccccaguccggccgcaucgucgucgacuacaugguccagaaguccggcaagaccggcaccaucaccuaccagcgcggcauccuccucccccagaaggucuggugcgccuccggccgcuccaaggucaucaagggcucccucccccucaucggcgaggccgacugccuccacgagaaguacggcggccucaacaaguccaagcccuacuacaccggcgagcacgccaaggccaucggcaacugccccaucugggucaagaccccccucaagcucgccaacggcaccaaguaccgcccccccgccaagcuccucaaggagcgcggcuucuucggcgccaucgccggcuuccucgagggcggcugggagggcaugaucgccggcuggcacggcuacaccucccacggcgcccacggcgucgccgucgccgccgaccucaaguccacccaggaggccaucaacaagaucaccaagaaccucaacucccucuccgagcucgaggucaagaaccuccagcgccucuccggcgccauggacgagcuccacaacgagauccucgagcucgacgagaaggucgacgaccuccgcgccgacaccaucuccucccagaucgagcucgccguccuccucuccaacgagggcaucaucaacuccgaggacgagcaccuccucgcccucgagcgcaagcucaagaagaugcucggccccuccgccgucgagaucggcaacggcugcuucgagaccaagcacaagugcaaccagaccugccucgaccgcaucgccgccggcaccuucgacgccggcgaguucucccuccccaccuucgacucccucaacaucaccgccgccucccucaacgacgacggccucgacaaccacaccauccuccucuacuacuccaccgccgccuccucccucgccgucacccucaugaucgccaucuucgucgucuacauggucucccgcgacaacgucuccugcuccaucugccucuga

SEQ ID NO: 123401 - RNA, 1758 nt, Artificial Sequence; identical to SEQ ID NO: 123025
  derived and/or modified CDS sequence (opt2) from hemagglutinin__InfluenzaB__AGX20008

SEQ ID NO: 123402 - RNA, 1758 nt, Artificial Sequence; identical to SEQ ID NO: 123025
  derived and/or modified CDS sequence (opt2) from hemagglutinin__InfluenzaB__AGX20019

SEQ ID NO: 123403 - RNA, 1758 nt, Artificial Sequence; identical to SEQ ID NO: 123025
  derived and/or modified CDS sequence (opt2) from hemagglutinin__InfluenzaB__AGX20030

SEQ ID NO: 123404 - RNA, 1758 nt, Artificial Sequence
  derived and/or modified CDS sequence (opt2) from hemagglutinin__InfluenzaB__AGX20041
augaaggccaucaucguccuccucauggucgucaccuccgacgccgaccgcaucugcaccggcaucaccuccuccaacuccccccacgucgucaagaccgccacccagggcgaggucaacgucaccggcgucaucccccucaccaccacccccaccaagucccacuucgccaaccucaagggcaaggagacccgcggcaagcucugccccaagugccucaacugcaccgaccucgacgucgcccucggccgccccaagugcaccggcaagauccccuccgcccgcgucuccauccuccacgagguccgccccgucaccuccggcugcuuccccaucaugcacgaccgcaccaagauccgccagcuccccaaccuccuccgcggcuacgagcacauccgccucuccacccacaacgucaucaacgccgagaacgcccccggcggccccuacaagaucggcaccuccggcuccugccccaacaucaccaacggcaacggcuucuucgccaccauggccugggccguccccaagaacgacaagaacaagaccgccaccaacccccucaccaucgagguccccuacaucugcaccgagggcgaggaccagaucaccgucuggggcuuccacuccgacaacgagacccagauggccaagcucuacggcgacuccaagccccagaaguucaccuccuccgccaacggcgucaccacccacuacgucucccagaucggcggcuuccccaaccagaccgaggacggcggccucccccaguccggccgcaucgucgucgacuacaugguccagaaguccggcaagaccggcaccaucaccuaccagcgcggcauccuccucccccagaaggucuggugcgccuccggccgcuccaaggucaucaagggcucccucccccucaucggcgaggccgacugccuccacgagaaguacggcggccucaacaaguccaagcccuacuacaccggcgagcacgccaaggccaucggcaacugccccaucugggucaagaccccccucaagcucgccaacggcaccaaguaccgcccccccgccaagcuccucaaggagcgcggcuucuucggcgccaucgccggcuuccucgagggcggcugggagggcaugaucgccggcuggcacggcuacaccucccacggcgcccacggcgucgccgucgccgccgaccucaaguccacccaggaggccaucaacaagaucaccaagaaccucaacucccucuccgagcucgaggucaagaaccuccagcgccucuccggcgccauggacgagcuccacaacgagauccucgagcucgacgagaaggucgacgaccuccgcgccgacaccaucuccucccagaucgagcucgccguccuccucuccaacgagggcaucaucaacuccgaggacgagcaccuccucgcccucgagcgcaagcucaagaagaugcucggccccuccgccgucgagaucggcaacggcugcuucgagaccaagcacaagugcaaccagaccugccucgaccgcaucgccgccggcaccuucgacgccggcgaguucucccuccccaccuucgacucccucaacaucaccgccgccucccucaacgacgacggccucgacaaccacaccauccuccucuacuacuccaccgccgccuccucccucgccgucacccucaugaucgccaucuucgucgucuacauggucucccgcgacaacgucuccugcuccaucugccucuga

SEQ ID NO: 123405 - RNA, 1758 nt, Artificial Sequence; identical to SEQ ID NO: 123025
  derived and/or modified CDS sequence (opt2) from hemagglutinin__InfluenzaB__AGX20052

SEQ ID NO: 123406 - RNA, 1758 nt, Artificial Sequence; identical to SEQ ID NO: 123025
  derived and/or modified CDS sequence (opt2) from hemagglutinin__InfluenzaB__AGX20063

SEQ ID NO: 123407 - RNA, 1758 nt, Artificial Sequence
  derived and/or modified CDS sequence (opt2) from hemagglutinin__InfluenzaB__AGX20074
augaaggccaucaucgcccuccucauggucgucaccuccaacgccgaccgcaucugcaccggcaucaccuccuccaacuccccccacgucgucaagaccgccacccagggcgaggucaacgucaccggcgucaucccccucaccaccacccccaccaagucccacuucgccaaccucaagggcaccgagacccgcggcaagcucugccccaagugccucaacugcaccgaccucgacgucgcccucggccgccccaagugcaccggcaagauccccuccgcccgcgucuccauccuccacgagguccgccccgucaccuccggcugcuuccccaucaugcacgaccgcaccaagauccgccagcuccccaaccuccuccgcggcuacgagcacauccgccucuccacccacaacgucaucaacgccgagaacgcccccggcggccccuacaagaucggcaccuccggcuccugccccaacaucaccaacggcaacggcuucuucgccaccauggccugggccguccccaagaacgacaagaacaagaccgccaccaacccccucaccaucgagguccccuacaucugcaccgagggcgaggaccagaucaccgucuggggcuuccacuccgacaacgagacccagauggccaagcucuacggcgacuccaagccccagaaguucaccuccuccgccaacggcgucaccacccacuacgucucccagaucggcggcuuccccaaccagaccgaggacggcggccucccccaguccggccgcaucgucgucgacuacaugguccagaaguccggcaagaccggcaccaucaccuaccagcgcggcauccuccucccccagaaggucuggugcgccuccggccgcuccaaggucaucaagggcucccucccccucaucggcgaggccgacugccuccacgagaaguacggcggccucaacaaguccaagcccuacuacaccggcgagcacgccaaggccaucggcaacugccccaucugggucaagaccccccucaagcucgccaacggcaccaaguaccgcccccccgccaagcuccucaaggagcgcggcuucuucggcgccaucgccggcuuccucgagggcggcugggagggcaugaucgccggcuggcacggcuacaccucccacggcgcccacggcgucgccgucgccgccgaccucaaguccacccaggaggccaucaacaagaucaccaagaaccucaacucccucuccgagcucgaggucaagaaccuccagcgccucuccggcgccauggacgagcuccacaacgagauccucgagcucgacgagaaggucgacgaccuccgcgccgacaccaucuccucccagaucgagcucgccguccuccucuccaacgagggcaucaucaacuccgaggacgagcaccuccucgcccucgagcgcaagcucaagaagaugcucggccccuccgccgucgagaucggcaacggcugcuucgagaccaagcacaagugcaaccagaccugccucgaccgcaucgccgccggcaccuucgacgccggcgaguucucccuccccaccuucgacucccucaacaucaccgccgccucccucaacgacgacggccucgacaaccacaccauccuccucuacuacuccaccgccgccuccucccucgccgucacccucaugaucgccaucuucgucgucuacauggucucccgcgacaacgucuccugcuccaucugccucuga

SEQ ID NO: 123408 - RNA, 1758 nt, Artificial Sequence
  derived and/or modified CDS sequence (opt2) from hemagglutinin__InfluenzaB__AGX20085
augaaggccaucaucguccuccucauggucgucaccuccaacgccgaccgcaucugcaccggcaucaccuccuccaacuccccccacgucgucaagaccgccacccagggcgaggucaacgucaccggcgucaucccccucaccaccacccccaccaagucccacuucgccaaccucaagggcaccgagacccgcggcaagcucugccccaagugccucaacugcaccgaccucgacgucgcccucggccgccccaagugcaccggcaagauccccuccgcccgcgucuccauccuccacgagguccgccccgucaccuccggcugcuuccccaucaugcacgaccgcaccaagauccgccagcuccccaaccuccuccgcggcuacgagcacauccgccucuccacccacaacgucaucaacgccgagaacgcccccggcggccccuacaagaucggcaccuccggcuccugccccaacaucaccaacggcaacggcuucuucgccaccauggccugggccguccccaagaacgacaagaacaagaccgccaccaacccccucaccaucgagguccccuacaucugcaccgagggcgaggaccagaucaccaucuggggcuuccacuccgacaacgagacccagauggccaagcucuacggcgacuccaagccccagaaguucaccuccuccgccaacggcgucaccacccacuacgucucccagaucggcggcuuccccaaccagaccgaggacggcggccucccccaguccggccgcaucgucgucgacuacaugguccagaaguccggcaagaccggcaccaucaccuaccagcgcggcauccuccucccccagaaggucuggugcgccuccggccgcuccaaggucaucaagggcucccucccccucaucggcgaggccgacugccuccacgagaaguacggcggccucaacaaguccaagcccuacuacaccggcgagcacgccaaggccaucggcaacugccccaucugggucaagaccccccucaagcucgccaacggcaccaaguaccgcccccccgccaagcuccucaaggagcgcggcuucuucggcgccaucgccggcuuccucgagggcggcugggagggcaugaucgccggcuggcacggcuacaccucccacggcgcccacggcgucgccgucgccgccgaccucaaguccacccaggaggccaucaacaagaucaccaagaaccucaacucccucuccgagcucgaggucaagaaccuccagcgccucuccggcgccauggacgagcuccacaacgagauccucgagcucgacgagaaggucgacgaccuccgcgccgacaccaucuccucccagaucgagcucgccguccuccucuccaacgagggcaucaucaacuccgaggacgagcaccuccucgcccucgagcgcaagcucaagaagaugcucggccccuccgccgucgagaucggcaacggcugcuucgagaccaagcacaagugcaaccagaccugccucgaccgcaucgccgccggcaccuucgacgccggcgaguucucccuccccaccuucgacucccucaacaucaccgccgccucccucaacgacgacggccucgacaaccacaccauccuccucuacuacuccaccgccgccuccucccucgccgucacccucaugaucgccaucuucgucgucuacauggucucccgcgacaacgucuccugcuccaucugccucuga

SEQ ID NO: 123409 - RNA, 1758 nt, Artificial Sequence
  derived and/or modified CDS sequence (opt2) from hemagglutinin__InfluenzaB__AGX20096
augaaggccaucaucguccuccucauggucgucaccuccaacgccgaccgcaucugcaccggcgucaccuccuccaacuccccccacgucgucaagaccgccacccagggcgaggucaacgucaccggcgucaucccccucaccaccacccccaccaagucccacuucgccaaccucaagggcaccgagacccgcggcaagcucugccccaagugccucaacugcaccgaccucgacgucgcccucggccgccccaagugcaccggcaacauccccuccgcccgcgucuccauccuccacgagguccgccccgucaccuccggcugcuuccccaucaugcacgaccgcaccaagauccgccagcuccccaaccuccuccgcggcuacgagcacauccgccucuccacccacaacgucaucaacgccgagaacgcccccggcggccccuacaagaucggcaccuccggcuccugccccaacgucaccaacggcaacggcuucuucgccaccauggccugggccguccccaagaacgacaacaacaagaccgccaccaacucccucaccaucgagguccccuacaucugcaccgagggcgaggaccagaucaccgucuggggcuuccacuccgacaacgagacccagauggccaagcucuacggcgacuccaagccccagaaguucaccuccuccgccaacggcgucaccacccacuacgucucccagaucggcggcuuccccaaccagaccgaggacggcggccucccccaguccggccgcaucgucgucgacuacaugguccagaaguccggcaagaccggcaccaucaccuaccagcgcggcauccuccucccccagaaggucuggugcgccuccggccgcuccaaggucaucaagggcucccucccccucaucggcgaggccgacugccuccacgagaaguacggcggccucaacaaguccaagcccuacuacaccggcgagcacgccaaggccaucggcaacugccccaucugggucaagaccccccucaagcucgccaacggcaccaaguaccgcccccccgccaagcuccucaaggagcgcggcuucuucggcgccaucgccggcuuccucgagggcggcugggagggcaugaucgccggcuggcacggcuacaccucccacggcgcccacggcgucgccgucgccgccgaccucaaguccacccaggaggccaucaacaagaucaccaagaaccucaacucccucuccgagcucgaggucaagaaccuccagcgccucuccggcgccauggacgagcuccacaacgagauccucgagcucgacgagaaggucgacgaccuccgcgccgacaccaucuccucccagaucgagcucgccguccuccucuccaacgagggcaucaucaacuccgaggacgagcaccuccucgcccucgagcgcaagcucaagaagaugcucggccccuccgccgucgagaucggcaacggcugcuucgagaccaagcacaagugcaaccagaccugccucgaccgcaucgccgccggcaccuucgacgccggcgaguucucccuccccaccuucgacucccucaacaucaccgccgccucccucaacgacgacggccucgacaaccacaccauccuccucuacuacuccaccgccgccuccucccucgccgucacccucaugaucgccaucuucgucgucuacauggucucccgcgacaacgucuccugcuccaucugccucuga

SEQ ID NO: 123410 - RNA, 1758 nt, Artificial Sequence; identical to SEQ ID NO: 122644
  derived and/or modified CDS sequence (opt2) from hemagglutinin__InfluenzaB__AGX20107

SEQ ID NO: 123411 - RNA, 1758 nt, Artificial Sequence; identical to SEQ ID NO: 122644
  derived and/or modified CDS sequence (opt2) from hemagglutinin__InfluenzaB__AGX20118

SEQ ID NO: 123412 - RNA, 1758 nt, Artificial Sequence; identical to SEQ ID NO: 122644
  derived and/or modified CDS sequence (opt2) from hemagglutinin__InfluenzaB__AGX20129

SEQ ID NO: 123413 - RNA, 1758 nt, Artificial Sequence; identical to SEQ ID NO: 122644
  derived and/or modified CDS sequence (opt2) from hemagglutinin__InfluenzaB__AGX20140

SEQ ID NO: 123414 - RNA, 1758 nt, Artificial Sequence; identical to SEQ ID NO: 122644
  derived and/or modified CDS sequence (opt2) from hemagglutinin__InfluenzaB__AGX20151

SEQ ID NO: 123415 - RNA, 1758 nt, Artificial Sequence; identical to SEQ ID NO: 122644
  derived and/or modified CDS sequence (opt2) from hemagglutinin__InfluenzaB__AGX20162

SEQ ID NO: 123416 - RNA, 1758 nt, Artificial Sequence; identical to SEQ ID NO: 122644
  derived and/or modified CDS sequence (opt2) from hemagglutinin__InfluenzaB__AGX20173

SEQ ID NO: 123417 - RNA, 1758 nt, Artificial Sequence; identical to SEQ ID NO: 122644
  derived and/or modified CDS sequence (opt2) from hemagglutinin__InfluenzaB__AGX20184

SEQ ID NO: 123418 - RNA, 1758 nt, Artificial Sequence; identical to SEQ ID NO: 122644
  derived and/or modified CDS sequence (opt2) from hemagglutinin__InfluenzaB__AGX20195

SEQ ID NO: 123419 - RNA, 1758 nt, Artificial Sequence; identical to SEQ ID NO: 122644
  derived and/or modified CDS sequence (opt2) from hemagglutinin__InfluenzaB__AGX20206

SEQ ID NO: 123420 - RNA, 1758 nt, Artificial Sequence; identical to SEQ ID NO: 122644
  derived and/or modified CDS sequence (opt2) from hemagglutinin__InfluenzaB__AGX20217

SEQ ID NO: 123421 - RNA, 1758 nt, Artificial Sequence; identical to SEQ ID NO: 122681
  derived and/or modified CDS sequence (opt2) from hemagglutinin__InfluenzaB__AGX20228

SEQ ID NO: 123422 - RNA, 1758 nt, Artificial Sequence
  derived and/or modified CDS sequence (opt2) from hemagglutinin__InfluenzaB__AGX20239
augaaggccaucaucguccuccucauggucgucaccuccaacgccgaccgcaucugcaccggcaucaccuccuccaacuccccccacgucgucaagaccgccacccagggcgaggucaacgucaccggcgucaucccccucaccaccacccccaccaagucccacuucgccaaccucaagggcaccgagacccgcggcaagcucugccccaagugccccaacugcaccgaccucgacgucgcccucggccgccccaagugcaccggcaagauccccuccgcccgcgucuccauccuccacgagguccgccccgucaccuccggcugcuuccccaucaugcacgaccgcaccaagauccgccagcuccccaaccuccuccgcggcuacgagcacauccgccucuccacccacaacgucaucaacgccgagaacgcccccggcggccccuacaagaucggcaccuccggcuccugccccaacgucaccaacggcaacggcuucuucgccaccauggccugggccguccccaagaacgacaagaacaagaccgccaccaacccccucaccaucgagguccccuacaucugcaccgagggcgaggaccagaucaucgucuggggcuuccacuccgacaacgagacccagauggccaagcucuacggcgacuccaagccccagaaguucaccuccuccgccaacggcgucaccacccacuacgucucccagaucggcggcuuccccaaccagaccgaggacggcggccucccccaguccggccgcaucgucgucgacuacaugguccagaaguccggcaagaccggcaccaucaccuaccagcgcggcauccuccucccccagaaggucuggugcgccuccggccgcuccaaggucaucaagggcucccucccccucaucggcgaggccgacugccuccacgagaaguacggcggccucaacaaguccaagcccuacuacaccggcgagcacgccaaggccaucggcaacugccccaucugggucaagaccccccucaagcucgccaacggcaccaaguaccgcccccccgccaagcuccucaaggagcgcggcuucuucggcgccaucgccggcuuccucgagggcggcugggagggcaugaucgccggcuggcacggcuacaccucccacggcgcccacggcgucgccgucgccgccgaccucaaguccacccaggaggccaucaacaagaucaccaagaaccucaacucccucuccgagcucgaggucaagaaccuccagcgccucuccggcgccauggacgagcuccacaacgagauccucgagcucgacgagaaggucgacgaccuccgcgccgacaccaucuccucccagaucgagcucgccguccuccucuccaacgagggcaucaucaacuccgaggacgagcaccuccucgcccucgagcgcaagcucaagaagaugcucggccccuccgccgucgagaucggcaacggcugcuucgagaccaagcacaagugcaaccagaccugccucgaccgcaucgccgccggcaccuucgacgccggcgaguucucccuccccaccuucgacucccucaacaucaccgccgccucccucaacgacgacggccucgacaaccacaccauccuccucuacuacuccaccgccgccuccucccucgccgucacccucaugaucgccaucuucgucgucuacauggucucccgcgacaacgucuccugcuccaucugccucuga

SEQ ID NO: 123423 - RNA, 1758 nt, Artificial Sequence; identical to SEQ ID NO: 122644
  derived and/or modified CDS sequence (opt2) from hemagglutinin__InfluenzaB__AGX20250

SEQ ID NO: 123424 - RNA, 1758 nt, Artificial Sequence; identical to SEQ ID NO: 122644
  derived and/or modified CDS sequence (opt2) from hemagglutinin__InfluenzaB__AGX20261

SEQ ID NO: 123425 - RNA, 1758 nt, Artificial Sequence; identical to SEQ ID NO: 122644
  derived and/or modified CDS sequence (opt2) from hemagglutinin__InfluenzaB__AGX20272

SEQ ID NO: 123426 - RNA, 1758 nt, Artificial Sequence; identical to SEQ ID NO: 122644
  derived and/or modified CDS sequence (opt2) from hemagglutinin__InfluenzaB__AGX20283

SEQ ID NO: 123427 - RNA, 1758 nt, Artificial Sequence; identical to SEQ ID NO: 122644
  derived and/or modified CDS sequence (opt2) from hemagglutinin__InfluenzaB__AGX20294

SEQ ID NO: 123428 - RNA, 1758 nt, Artificial Sequence
  derived and/or modified CDS sequence (opt2) from hemagglutinin__InfluenzaB__AGX20305
augaaggccaucaucguccuccucauggucgucaccuccaacgccgaccgcaucugcaccggcaucaccuccuccaacuccccccacgucgucaagaccgccacccagggcgaggucaacgucaccggcgucaucccccucaccaccacccccaccaagucccacuucgccaaccucaagggcaccgagacccgcggcaagcucugccccaagugccccaacugcaccgaccucgacgucgcccucggccgccccaagugcaccggcaagauccccuccgcccgcgucuccauccuccacgagguccgccccgucaccuccggcugcuuccccaucaugcacgaccgcaccaagauccgccagcuccccaaccuccuccgcggcuacgagcacauccgccucuccacccacaacgucaucaacgccgagaacgcccccggcggccccuacaagaucggcaccuccggcuccugccccaacgucaccaacggcaacggcuucuucgccaccauggccugggccguccccaagaacgacaagaacaagaccgccaccaaccagcucaccaucgagguccccuacaucugcaccgagggcgaggaccagaucaccgucuggggcuuccacuccgacaacgagacccagauggccaagcucuacggcgacuccaagccccagaaguucaccuccuccgccaacggcgucaccacccacuacgucucccagaucggcggcuuccccaaccagaccgaggacggcggccucccccaguccggccgcaucgucgucgacuacaugguccagaaguccggcaagaccggcaccaucaccuaccagcgcggcauccuccucccccagaaggucuggugcgccuccggccgcuccaaggucaucaagggcucccucccccucaucggcgaggccgacugccuccacgagaaguacggcggccucaacaaguccaagcccuacuacaccggcgagcacgccaaggccaucggcaacugccccaucugggucaagaccccccucaagcucgccaacggcaccaaguaccgcccccccgccaagcuccucaaggagcgcggcuucuucggcgccaucgccggcuuccucgagggcggcugggagggcaugaucgccggcuggcacggcuacaccucccacggcgcccacggcgucgccgucgccgccgaccucaaguccacccaggaggccaucaacaagaucaccaagaaccucaacucccucuccgagcucgaggucaagaaccuccagcgccucuccggcgccauggacgagcuccacaacgagauccucgagcucgacgagaaggucgacgaccuccgcgccgacaccaucuccucccagaucgagcucgccguccuccucuccaacgagggcaucaucaacuccgaggacgagcaccuccucgcccucgagcgcaagcucaagaagaugcucggccccuccgccgucgagaucggcaacggcugcuucgagaccaagcacaagugcaaccagaccugccucgaccgcaucgccgccggcaccuucgacgccggcgaguucucccuccccaccuucgacucccucaacaucaccgccgccucccucaacgacgacggccucgacaaccacaccauccuccucuacuacuccaccgccgccuccucccucgccgucacccucaugaucgccaucuucgucgucuacauggucucccgcgacaacgucuccugcuccaucugccucuga

SEQ ID NO: 123429 - RNA, 1758 nt, Artificial Sequence; identical to SEQ ID NO: 122644
  derived and/or modified CDS sequence (opt2) from hemagglutinin__InfluenzaB__AGX20316

SEQ ID NO: 123430 - RNA, 1758 nt, Artificial Sequence; identical to SEQ ID NO: 122644
  derived and/or modified CDS sequence (opt2) from hemagglutinin__InfluenzaB__AGX20327

SEQ ID NO: 123431 - RNA, 1758 nt, Artificial Sequence
  derived and/or modified CDS sequence (opt2) from hemagglutinin__InfluenzaB__AGX20338
augaaggccaucaucguccuccucauggucgucaccuccaacgccgaccgcaucugcaccggcaucaccuccuccaacuccccccacgucgucaagaccgccacccagggcgaggucaacgucaccggcgucaucccccucaccaccacccccaccaagucccacuucgccaaccucaagggcaccgagacccgcggcaagcucugccccaagugccccaacugcaccgaccucgacgucgcccucggccgccccaagugcaccggcaagauccccuccgcccgcgucuccauccuccacgagguccgccccgucaccuccggcugcuuccccaucaugcacgaccgcaccaagauccgccagcuccccaaccuccuccgcggcuacgagcacauccgccucuccacccacaacgucaucaacgccgagaacgcccccggcggccccuacaagaucggcaccuccggcuccugccccaacgucaccaacggcaacggcuucuucgccaccauggccugggccguccccaagaacgacaagaacaagaccgccaccaacccccucaccaucgagguccccuacaucugcaccgagggcgaggaccagaucaccgucuggggcuuccacuccgacaacgagacccagauggccaaccucuacggcgacuccaagccccagaaguucaccuccuccgccaacggcgucaccacccacuacgucucccagaucggcggcuuccccaaccagaccgaggacggcggccucccccaguccggccgcaucgucgucgacuacaugguccagaaguccggcaagaccggcaccaucaccuaccagcgcggcauccuccucccccagaaggucuggugcgccuccggccgcuccaaggucaucaagggcucccucccccucaucggcgaggccgacugccuccacgagaaguacggcggccucaacaaguccaagcccuacuacaccggcgagcacgccaaggccaucggcaacugccccaucugggucaagaccccccucaagcucgccaacggcaccaaguaccgcccccccgccaagcuccucaaggagcgcggcuucuucggcgccaucgccggcuuccucgagggcggcugggagggcaugaucgccggcuggcacggcuacaccucccacggcgcccacggcgucgccgucgccgccgaccucaaguccacccaggaggccaucaacaagaucaccaagaaccucaacucccucuccgagcucgaggucaagaaccuccagcgccucuccggcgccauggacgagcuccacaacgagauccucgagcucgacgagaaggucgacgaccuccgcgccgacaccaucuccucccagaucgagcucgccguccuccucuccaacgagggcaucaucaacuccgaggacgagcaccuccucgcccucgagcgcaagcucaagaagaugcucggccccuccgccgucgagaucggcaacggcugcuucgagaccaagcacaagugcaaccagaccugccucgaccgcaucgccgccggcaccuucgacgccggcgaguucucccuccccaccuucgacucccucaacaucaccgccgccucccucaacgacgacggccucgacaaccacaccauccuccucuacuacuccaccgccgccuccucccucgccgucacccucaugaucgccaucuucgucgucuacauggucucccgcgacaacgucuccugcuccaucugccucuga

SEQ ID NO: 123432 - RNA, 1758 nt, Artificial Sequence; identical to SEQ ID NO: 122644
  derived and/or modified CDS sequence (opt2) from hemagglutinin__InfluenzaB__AGX20349

SEQ ID NO: 123433 - RNA, 1758 nt, Artificial Sequence; identical to SEQ ID NO: 122644
  derived and/or modified CDS sequence (opt2) from hemagglutinin__InfluenzaB__AGX20360

SEQ ID NO: 123434 - RNA, 1758 nt, Artificial Sequence; identical to SEQ ID NO: 122681
  derived and/or modified CDS sequence (opt2) from hemagglutinin__InfluenzaB__AGX20371

SEQ ID NO: 123435 - RNA, 1758 nt, Artificial Sequence
  derived and/or modified CDS sequence (opt2) from hemagglutinin__InfluenzaB__AGX20382
augaaggccaucaucguccuccucauggucgucaccuccaacgccgaccgcaucugcaccggcaucaccuccuccaacuccccccacgucgucaagaccgccacccagggcgaggucaacgucaccggcgucaucccccucaccaccacccccaccaagucccacuucgccaaccucaagggcaccgagacccgcggcaagcucugccccaagugccccaacugcaccgaccucgacgucgcccucggccgccccaagugcaccggcaagauccccuccgcccgcgucuccauccuccacgagguccgccccgucaccuccggcugcuuccccaucaugcacgaccgcaccaagauccgccagcuccccaaccuccuccgcggcuacgagcacauccgccucuccacccacaacgucaucaacgccgagaacgcccccggcggccccuacaagaucggcaccuccggcuccugccccaacgucaccaacggcaacggcuucuucgccaccauggccugggccguccccaagaacgacaagaacaagaccgccaccaacccccucaccaucgagguccccuacaucugcaccgagggcgaggaccagaucaccgucuggggcuuccacuccgacaacgagacccagauggccaagcucuacggcgacuccaagccccagaaguucaccuccuccgccaacggcgucaccacccacuacgucucccagaucggcggcuuccccaaccagaccgaggacggcggccucccccaguccggccgcaucgucgucgacuacaugguccagaaguccggcaagaccggcaccaucaccuaccagcgcggcauccuccucccccagaaggucuggugcgccuccggccgcuccaaggucaucaagggcucccucccccucaucggcgaggccgacugccuccacgagaaguacggcggccucaacaaguccaagcccuacuacaccggcgagcacgccaaggccaucggcaacugccccaucugggucaagaccccccucaagcucgccaacggcaccaaguaccgcccccccgccaagcuccucaaggagcgcggcuucuucggcgccaucgccggcuuccucgagggcggcugggagggcaugaucgccggcuggcacggcuacaccucccacggcgcccacggcgucgccgucgccgccgaccucaaguccacccaggaggccaucaacaagaucaccaagaaccucaacucccucuccgagcucgaggucaagaaccuccagcgccucuccggcgccaugaacgagcuccacaacgagauccucgagcucgacgagaaggucgacgaccuccgcgccgacaccaucuccucccagaucgagcucgccguccuccucuccaacgagggcaucaucaacuccgaggacgagcaccuccucgcccucgagcgcaagcucaagaagaugcucggccccuccgccgucgagaucggcaacggcugcuucgagaccaagcacaagugcaaccagaccugccucgaccgcaucgccgccggcaccuucgacgccggcgaguucucccuccccaccuucgacucccucaacaucaccgccgccucccucaacgacgacggccucgacaaccacaccauccuccucuacuacuccaccgccgccuccucccucgccgucacccucaugaucgccaucuucgucgucuacauggucucccgcgacaacgucuccugcuccaucugccucuga

SEQ ID NO: 123436 - RNA, 1758 nt, Artificial Sequence; identical to SEQ ID NO: 122644
  derived and/or modified CDS sequence (opt2) from hemagglutinin__InfluenzaB__AGX20393

SEQ ID NO: 123437 - RNA, 1758 nt, Artificial Sequence; identical to SEQ ID NO: 122681
  derived and/or modified CDS sequence (opt2) from hemagglutinin__InfluenzaB__AGX20404

SEQ ID NO: 123438 - RNA, 1758 nt, Artificial Sequence; identical to SEQ ID NO: 122644
  derived and/or modified CDS sequence (opt2) from hemagglutinin__InfluenzaB__AGX20415

SEQ ID NO: 123439 - RNA, 1758 nt, Artificial Sequence; identical to SEQ ID NO: 122644
  derived and/or modified CDS sequence (opt2) from hemagglutinin__InfluenzaB__AGX20426

SEQ ID NO: 123440 - RNA, 1758 nt, Artificial Sequence; identical to SEQ ID NO: 122644
  derived and/or modified CDS sequence (opt2) from hemagglutinin__InfluenzaB__AGX20437

SEQ ID NO: 123441 - RNA, 1758 nt, Artificial Sequence; identical to SEQ ID NO: 122644
  derived and/or modified CDS sequence (opt2) from hemagglutinin__InfluenzaB__AGX20448

SEQ ID NO: 123442 - RNA, 1758 nt, Artificial Sequence; identical to SEQ ID NO: 122644
  derived and/or modified CDS sequence (opt2) from hemagglutinin__InfluenzaB__AGX20459

SEQ ID NO: 123443 - RNA, 1758 nt, Artificial Sequence; identical to SEQ ID NO: 122644
  derived and/or modified CDS sequence (opt2) from hemagglutinin__InfluenzaB__AGX20470

SEQ ID NO: 123444 - RNA, 1758 nt, Artificial Sequence; identical to SEQ ID NO: 122644
  derived and/or modified CDS sequence (opt2) from hemagglutinin__InfluenzaB__AGX20481

SEQ ID NO: 123445 - RNA, 1758 nt, Artificial Sequence; identical to SEQ ID NO: 122644
  derived and/or modified CDS sequence (opt2) from hemagglutinin__InfluenzaB__AGX20492

SEQ ID NO: 123446 - RNA, 1758 nt, Artificial Sequence; identical to SEQ ID NO: 122644
  derived and/or modified CDS sequence (opt2) from hemagglutinin__InfluenzaB__AGX20503

SEQ ID NO: 123447 - RNA, 1758 nt, Artificial Sequence; identical to SEQ ID NO: 122644
  derived and/or modified CDS sequence (opt2) from hemagglutinin__InfluenzaB__AGX20514

SEQ ID NO: 123448 - RNA, 1758 nt, Artificial Sequence
  derived and/or modified CDS sequence (opt2) from hemagglutinin__InfluenzaB__AGX20525
augaaggccaucaucguccuccucauggucgucaccuccaacgccgaccgcaucugcaccggcaucaccuccuccaacuccccccacgucgucaagaccgccacccagggcgaggucaacgucaccggcgucaucccccucaccaccacccccaccaagucccacuucuccaaccucaagggcaccgagacccgcggcaagcucugccccaagugccccaacugcaccgaccucgacgucgcccucggccgccccaagugcaccggcaagauccccuccgcccgcgucuccauccuccacgagguccgccccgucaccuccggcugcuuccccaucaugcacgaccgcaccaagauccgccagcuccccaaccuccuccgcggcuacgagcacauccgccucuccacccacaacgucaucaacgccgagaacgcccccggcggccccuacaagaucggcaccuccggcuccugccccaacgucaccaacggcaacggcuucuucgccaccauggccugggccguccccaagaacgacaagaacaagaccgccaccaacccccucaccaucgagguccccuacaucugcaccgagggcgaggaccagaucaccgucuggggcuuccacuccgacaacgagacccagauggccaagcucuacggcgacuccaagccccagaaguucaccuccuccgccaacggcgucaccacccacuacgucucccagaucggcggcuuccccaaccagaccgaggacggcggccucccccaguccggccgcaucgucgucgacuacaugguccagaaguccggcaagaccggcaccaucaccuaccagcgcggcauccuccucccccagaaggucuggugcgccuccggccgcuccaaggucaucaagggcucccucccccucaucggcgaggccgacugccuccacgagaaguacggcggccucaacaaguccaagcccuacuacaccggcgagcacgccaaggccaucggcaacugccccaucugggucaagaccccccucaagcucgccaacggcaccaaguaccgcccccccgccaagcuccucaaggagcgcggcuucuucggcgccaucgccggcuuccucgagggcggcugggagggcaugaucgccggcuggcacggcuacaccucccacggcgcccacggcgucgccgucgccgccgaccucaaguccacccaggaggccaucaacaagaucaccaagaaccucaacucccucuccgagcucgaggucaagaaccuccagcgccucuccggcgccauggacgagcuccacaacgagauccucgagcucgacgagaaggucgacgaccuccgcgccgacaccaucuccucccagaucgagcucgccguccuccucuccaacgagggcaucaucaacuccgaggacgagcaccuccucgcccucgagcgcaagcucaagaagaugcucggccccuccgccgucgagaucggcaacggcugcuucgagaccaagcacaagugcaaccagaccugccucgaccgcaucgccgccggcaccuucgacgccggcgaguucucccuccccaccuucgacucccucaacaucaccgccgccucccucaacgacgacggccucgacaaccacaccauccuccucuacuacuccaccgccgccuccucccucgccgucacccucaugaucgccaucuucgucgucuacauggucucccgcgacaacgucuccugcuccaucugccucuga

SEQ ID NO: 123449 - RNA, 1758 nt, Artificial Sequence; identical to SEQ ID NO: 122644
  derived and/or modified CDS sequence (opt2) from hemagglutinin__InfluenzaB__AGX20536

SEQ ID NO: 123450 - RNA, 1758 nt, Artificial Sequence
  derived and/or modified CDS sequence (opt2) from hemagglutinin__InfluenzaB__AGX20547
augaaggccaucaucguccuccucauggucgucaccuccaacgccgaccgcaucugcaccggcaucaccuccuccaacuccccccacgucgucaagaccgccacccagggcgaggucaacgucaccggcgucaucccccucaccaccacccccaccaagucccacuucgccaaccucaagggcaccgagacccgcggcaagcucugccccaagugccucaacugcaccgaccucgacgucgcccucggccgccccaagugcaccggcaagauccccuccgcccgcgucuccauccuccacgagguccgccccgucaccuccggcugcuuccccaucaugcacgaccgcaccaagauccgccagcuccccaaccuccuccgcggcuacgagcacauccgccucuccacccacaacgucaucaacgccgagaacgcccccggcggccccuacaagaucggcaccuccggcuccugccccaacgucaccaacggcaacggcuucuucgccaccauggccugggccguccccaagaacgacaagaacaagaccgccaccaacccccucaccaucgagguccccuacaucugcaccgagggcgaggaccagaucaccgucuggggcuuccacuccgacaacgagacccagauggccaagcucuacggcgacuccaagccccagaaguucaccuccuccgccaacggcgucaccacccaccacgucucccagaucggcggcuuccccaaccagaccgaggacggcggccucccccaguccggccgcaucgucgucgacuacaugguccagaaguccggcaagaccggcaccaucaccuaccagcgcggcauccuccucccccagaaggucuggugcgccuccggccgcuccaaggucaucaagggcucccucccccucaucggcgaggccgacugccuccacgagaaguacggcggccucaacaaguccaagcccuacuacaccggcgagcacgccaaggccaucggcaacugccccaucugggucaagaccccccucaagcucgccaacggcaccaaguaccgcccccccgccaagcuccucaaggagcgcggcuucuucggcgccaucgccggcuuccucgagggcggcugggagggcaugaucgccggcuggcacggcuacaccucccacggcgcccacggcgucgccgucgccgccgaccucaaguccacccaggaggccaucaacaagaucaccaagaaccucaacucccucuccgagcucgagaucaagaaccuccagcgccucuccggcgccauggacgagcuccacaacgagauccucgagcucgacgagaaggucgacgaccuccgcgccgacaccaucuccucccagaucgagcucgccguccuccucuccaacgagggcaucaucaacuccgaggacgagcaccuccucgcccucgagcgcaagcucaagaagaugcucggccccuccgccgucgagaucggcaacggcugcuucgagaccaagcacaagugcaaccagaccugccucgaccgcaucgccgccggcaccuucgacgccggcgaguucucccuccccaccuucgacucccucaacaucaccgccgccucccucaacgacgacggccucgacaaccacaccauccuccucuacuacuccaccgccgccuccucccucgccgucacccucaugaucgccaucuucgucgucuacauggucucccgcgacaacgucuccugcuccaucugccucuga

SEQ ID NO: 123451 - RNA, 1758 nt, Artificial Sequence; identical to SEQ ID NO: 122698
  derived and/or modified CDS sequence (opt2) from hemagglutinin__InfluenzaB__AGX20558

SEQ ID NO: 123452 - RNA, 1758 nt, Artificial Sequence; identical to SEQ ID NO: 122644
  derived and/or modified CDS sequence (opt2) from hemagglutinin__InfluenzaB__AGX20569

SEQ ID NO: 123453 - RNA, 1758 nt, Artificial Sequence; identical to SEQ ID NO: 122681
  derived and/or modified CDS sequence (opt2) from hemagglutinin__InfluenzaB__AGX20580

SEQ ID NO: 123454 - RNA, 1758 nt, Artificial Sequence; identical to SEQ ID NO: 122644
  derived and/or modified CDS sequence (opt2) from hemagglutinin__InfluenzaB__AGX20591

SEQ ID NO: 123455 - RNA, 1758 nt, Artificial Sequence; identical to SEQ ID NO: 122644
  derived and/or modified CDS sequence (opt2) from hemagglutinin__InfluenzaB__AGX20602

SEQ ID NO: 123456 - RNA, 1758 nt, Artificial Sequence; identical to SEQ ID NO: 122644
  derived and/or modified CDS sequence (opt2) from hemagglutinin__InfluenzaB__AGX20613

SEQ ID NO: 123457 - RNA, 1758 nt, Artificial Sequence; identical to SEQ ID NO: 122644
  derived and/or modified CDS sequence (opt2) from hemagglutinin__InfluenzaB__AGX20624

SEQ ID NO: 123458 - RNA, 1758 nt, Artificial Sequence
  derived and/or modified CDS sequence (opt2) from hemagglutinin__InfluenzaB__AGX20635
augaaggccaucaucguccuccucauggucgucaccuccaacgccgaccgcaucugcaccggcaucaccuccuccaacuccccccacgucgucaagaccgccacccagggcgaggucaacgucaccggcgucaucccccucaccaccacccccaccaagucccacuucgccaaccucaagggcaccgagacccgcggcaagcucugccccaagugccucaacugcaccgaccucgacgucgcccucggccgccccaagugcaccggcaagauccccuccgcccgcgucuccauccuccacgagguccgccccgucaccuccggcugcuuccccaucaugcacgaccgcaccaagauccgccagcuccccaaccuccuccgcggcuacgagcacauccgccucuccacccacaacgucaucaacgccgagaacgcccccggcggccccuacaagaucggcaccuccggcuccugccccaacgucaccaacggcaacggcuucuucgccaccauggccugggccguccccaagaacgacaagaacaagaccgccaccaacccccucaccaucgagguccccuacaucugcaccgagggcgaggaccagaucaccgucuggggcuuccacuccgacaacgagacccucauggccaagcucuacggcgacuccaagccccagaaguucaccuccuccgccaacggcgucaccacccacuacgucucccagaucggcggcuuccccaaccagaccgaggacggcggccucccccaguccggccgcaucgucgucgacuacaugguccagaaguccggcaagaccggcaccaucaccuaccagcgcggcauccuccucccccagaaggucuggugcgccuccggccgcuccaaggucaucaagggcucccucccccucaucggcgaggccgacugccuccacgagaaguacggcggccucaacaaguccaagcccuacuacaccggcgagcacgccaaggccaucggcaacugccccaucugggucaagaccccccucaagcucgccaacggcaccaaguaccgcccccccgccaagcuccucaaggagcgcggcuucuucggcgccaucgccggcuuccucgagggcggcugggagggcaugaucgccggcuggcacggcuacaccucccacggcgcccacggcgucgccgucgccgccgaccucaaguccacccaggaggccaucaacaagaucaccaagaaccucaacucccucuccgagcucgaggucaagaaccuccagcgccucuccggcgccauggacgagcuccacaacgagauccucgagcucgacgagaaggucgacgaccuccgcgccgacaccaucuccucccagaucgagcucgccguccuccucuccaacgagggcaucaucaacuccgaggacgagcaccuccucgcccucgagcgcaagcucaagaagaugcucggccccuccgccgucgagaucggcaacggcugcuucgagaccaagcacaagugcaaccagaccugccucgaccgcaucgccgccggcaccuucgacgccggcgaguucucccuccccaccuucgacucccucaacaucaccgccgccucccucaacgacgacggccucgacaaccacaccauccuccucuacuacuccaccgccgccuccucccucgccgucacccucaugaucgccaucuucgucgucuacauggucucccgcgacaacgucuccugcuccaucugccucuga

SEQ ID NO: 123459 - RNA, 1758 nt, Artificial Sequence; identical to SEQ ID NO: 122644
  derived and/or modified CDS sequence (opt2) from hemagglutinin__InfluenzaB__AGX20646

SEQ ID NO: 123460 - RNA, 1758 nt, Artificial Sequence
  derived and/or modified CDS sequence (opt2) from hemagglutinin__InfluenzaB__AGX20668
augaaggccaucaucguccuccucauggucgucaccuccaacgccgaccgcaucugcaccggcaucaccuccuccaacuccccccacgucgucaagaccgccacccagggcgaggucaacgucaccggcgucaucccccucaccaccacccccaccaagucccacuucgccaaccucaagggcaccgagacccgcggcaagcucugccccaagugccccaacugcaccgaccucgacgucgcccucggccgccccaagugcaccggcaagauccccuccgcccgcgucuccauccuccacgagguccgccccgucaccuccggcugcuuccccaucaugcacgaccgcaccaagauccgccagcuccccaaccuccuccgcggcuacgagcacauccgccucuccacccacaacgucaucaacgccgagaacgcccccggcggccccuacaagaucggcaccuccggcuccugccccaacgucaccaacggcaacggcuucuucgccaccauggccugggccguccccaagaacgacaagaccaagaccgccaccaacccccucaccaucgagguccccuacaucugcaccgagggcgaggaccagaucaccgucuggggcuuccacuccgacaacgagacccagauggccaagcucuacggcgacuccaagccccagaaguucaccuccuccgccaacggcgucaccacccacuacgucucccagaucggcggcuuccccaaccagaccgaggacggcggccucccccaguccggccgcaucgucgucgacuacaugguccagaaguccggcaagaccggcaccaucaccuaccagcgcggcauccuccucccccagaaggucuggugcgccuccggccgcuccaaggucaucaagggcucccucccccucaucggcgaggccgacugccuccacgagaaguacggcggccucaacaaguccaagcccuacuacaccggcgagcacgccaaggccaucggcaacugccccaucugggucaagaccccccucaagcucgccaacggcaccaaguaccgcccccccgccaagcuccucaaggagcgcggcuucuucggcgccaucgccggcuuccucgagggcggcugggagggcaugaucgccggcuggcacggcuacaccucccacggcgcccacggcgucgccgucgccgccgaccucaaguccacccaggaggccaucaacaagaucaccaagaaccucaacucccucuccgagcucgaggucaagaaccuccagcgccucuccggcgccauggacgagcuccacaacgagauccucgagcucgacgagaaggucgacgaccuccgcgccgacaccaucuccucccagaucgagcucgccguccuccucuccaacgagggcaucaucaacuccgaggacgagcaccuccucgcccucgagcgcaagcucaagaagaugcucggccccuccgccgucgagaucggcaacggcugcuucgagaccaagcacaagugcaaccagaccugccucgaccgcaucgccgccggcaccuucgacgccggcgaguucucccuccccaccuucgacucccucaacaucaccgccgccucccucaacgacgacggccucgacaaccacaccauccuccucuacuacuccaccgccgccuccucccucgccgucacccucaugaucgccaucuucgucgucuacauggucucccgcgacaacgucuccugcuccaucugccucuga

SEQ ID NO: 123461 - RNA, 1758 nt, Artificial Sequence; identical to SEQ ID NO: 122719
  derived and/or modified CDS sequence (opt2) from hemagglutinin__InfluenzaB__AGX20679

SEQ ID NO: 123462 - RNA, 1758 nt, Artificial Sequence; identical to SEQ ID NO: 122681
  derived and/or modified CDS sequence (opt2) from hemagglutinin__InfluenzaB__AGX20690

SEQ ID NO: 123463 - RNA, 1758 nt, Artificial Sequence; identical to SEQ ID NO: 122681
  derived and/or modified CDS sequence (opt2) from hemagglutinin__InfluenzaB__AGX20701

SEQ ID NO: 123464 - RNA, 1758 nt, Artificial Sequence; identical to SEQ ID NO: 123025
  derived and/or modified CDS sequence (opt2) from hemagglutinin__InfluenzaB__AGX20712

SEQ ID NO: 123465 - RNA, 1758 nt, Artificial Sequence; identical to SEQ ID NO: 122644
  derived and/or modified CDS sequence (opt2) from hemagglutinin__InfluenzaB__AGX20723

SEQ ID NO: 123466 - RNA, 1758 nt, Artificial Sequence
  derived and/or modified CDS sequence (opt2) from hemagglutinin__InfluenzaB__AGX20734
augaaggccaucaucguccuccucauggucgucaccuccaacgccgaccgcaucugcaccggcaucaccuccuccaacuccccccacgucgucaagaccgccacccagggcgaggucaacgucaccggcgucaucccccucaccaccacccccaccaagucccacuucgccaaccucaagggcaccgagacccgcggcaagcucugccccaagugccucaacugcaccgaccucgacgucgcccucggccgccccaagugcaccggcaagauccccuccgcccgcgucuccauccuccacgagguccgccccgucaccuccggcugcuuccccaucaugcacgaccgcaccaagauccgccagcuccccaaccuccuccgcggcuacgagcacauccgccucuccaccaacaacgucaucaacgccgagaacgcccccggcggccccuacaagaucggcaccuccggcuccugccccaacgucaccaacggcaacggcuucuucgccaccauggccugggccguccccaagaacgacaagaacaagaccgccaccaacccccucaccaucgagguccccuacaucugcaccgagggcgaggaccagaucaccgucuggggcuuccacuccgacaacgagacccagauggccaagcucuacggcgacuccaagccccagaaguucaccuccuccgccaacggcgucaccacccacuacgucucccagaucggcggcuuccccaaccagaccgaggacggcggccucccccaguccggccgcaucgucgucgacuacaugguccagaaguccggcaagaccggcaccaucaccuaccagcgcggcauccuccucccccagaaggucuggugcgccuccggccgcuccaaggucaucaagggcucccucccccucaucggcgaggccgacugccuccacgagaaguacggcggccucaacaaguccaagcccuacuacaccggcgagcacgccaaggccaucggcaacugccccaucugggucaagaccccccucaagcucgccaacggcaccaaguaccgcccccccgccaagcuccucaaggagcgcggcuucuucggcgccaucgccggcuuccucgagggcggcugggagggcaugaucgccggcuggcacggcuacaccucccacggcgcccacggcgucgccgucgccgccgaccucaaguccacccaggaggccaucaacaagaucaccaagaaccucaacucccucuccgagcucgaggucaagaaccuccagcgccucuccggcgccauggacgagcuccacaacgagauccucgagcucgacgagaaggucgacgaccuccgcgccgacaccaucuccucccagaucgagcucgccguccuccucuccaacgagggcaucaucaacuccgaggacgagcaccuccucgcccucgagcgcaagcucaagaagaugcucggccccuccgccgucgagaucggcaacggcugcuucgagaccaagcacaagugcaaccagaccugccucgaccgcaucgccgccggcaccuucgacgccggcgaguucucccuccccaccuucgacucccucaacaucaccgccgccucccucaacgacgacggccucgacaaccacaccauccuccucuacuacuccaccgccgccuccucccucgccgucacccucaugaucgccaucuucgucgucuacauggucucccgcgacaacgucuccugcuccaucugccucuga

SEQ ID NO: 123467 - RNA, 1758 nt, Artificial Sequence
  derived and/or modified CDS sequence (opt2) from hemagglutinin__InfluenzaB__AGX20745
augaaggccaucaucguccuccucauggucgucaccuccaacgccgaccgcaucugcaccggcaucaccuccuccaacuccccccacgucgucaagaccgccacccagggcgaggucaacgucaccggcgucaucccccucaccaccacccccaccaagucccacuucgccaaccucaagggcaccgagacccgcggcaagcucugccccaagugccccaacugcaccgaccucgacgucgcccucggccgccccaagugcaccggcaagauccccuccgcccgcgucuccauccuccacgagguccgccccgucaccuccggcugcuuccccaucaugcacgaccgcaccaagauccgccagcuccccaaccuccuccgcggcuacgagcacauccgccucuccacccacaacgucaucaacgccgagaacgcccccggcggccccuacaagaucggcaccuccggcuccugccccaacgucaccaacggcaacggcuucuucgccaccauggccugggccguccccaagaacgacaagaacaagaccgccaccaacccccucaccaucgagguccccuacaucugcaccgagggcgaggaccagaucaccaucuggggcuuccacuccgacaacgagacccagauggccaagcucuacggcgacuccaagccccagaaguucaccuccuccgccaacggcgucaccacccacuacgucucccagaucggcggcuuccccaaccagaccgaggacggcggccucccccaguccggccgcaucgucgucgacuacaugguccagaaguccggcaagaccggcaccaucaccuaccagcgcggcauccuccucccccagaaggucuggugcgccuccggccgcuccaaggucaucaagggcucccucccccucaucggcgaggccgacugccuccacgagaaguacggcggccucaacaaguccaagcccuacuacaccggcgagcacgccaaggccaucggcaacugccccaucugggucaagaccccccucaagcucgccaacggcaccaaguaccgcccccccgccaagcuccucaaggagcgcggcuucuucggcgccaucgccggcuuccucgagggcggcugggagggcaugaucgccggcuggcacggcuacaccucccacggcgcccacggcgucgccgucgccgccgaccucaaguccacccaggaggccaucaacaagaucaccaagaaccucaacucccucuccgagcucgaggucaagaaccuccagcgccucuccggcgccauggacgagcuccacaacgagauccucgagcucgacgagaaggucgacgaccuccgcgccgacaccaucuccucccagaucgagcucgccguccuccucuccaacgagggcaucaucaacuccgaggacgagcaccuccucgcccucgagcgcaagcucaagaagaugcucggccccuccgccgucgagaucggcaacggcugcuucgagaccaagcacaagugcaaccagaccugccucgaccgcaucgccgccggcaccuucgacgccggcgaguucucccuccccaccuucgacucccucaacaucaccgccgccucccucaacgacgacggccucgacaaccacaccauccuccucuacuacuccaccgccgccuccucccucgccgucacccucaugaucgccaucuucgucgucuacauggucucccgcgacaacgucuccugcuccaucugccucuga

SEQ ID NO: 123468 - RNA, 1758 nt, Artificial Sequence; identical to SEQ ID NO: 123025
  derived and/or modified CDS sequence (opt2) from hemagglutinin__InfluenzaB__AGX20756

SEQ ID NO: 123469 - RNA, 1758 nt, Artificial Sequence; identical to SEQ ID NO: 122644
  derived and/or modified CDS sequence (opt2) from hemagglutinin__InfluenzaB__AGX20767

SEQ ID NO: 123470 - RNA, 1758 nt, Artificial Sequence; identical to SEQ ID NO: 122681
  derived and/or modified CDS sequence (opt2) from hemagglutinin__InfluenzaB__AGX20778

SEQ ID NO: 123471 - RNA, 1758 nt, Artificial Sequence
  derived and/or modified CDS sequence (opt2) from hemagglutinin__InfluenzaB__AGX20789
augaaggccaucaucguccuccucauggucgucaccuccaacgccgaccgcaucugcaccggcaucaccuccuccaacuccccccacgucgucaagaccgccacccagggcgaggucaacgucaccggcgucaucccccucaccaccacccccaccaagucccacuucgccaaccucaagggcaccgagacccgcggcaagcucugccccaagugccccaacugcaccgaccucgacgucgcccucggccgccccaagugcaccggcaagauccccuccgcccgcgucuccauccuccacgagguccgccccgucaccuccggcugcuuccccaucaugcacgaccgcaccaagauccgccagcuccccaaccuccuccgcggcuacgagcacauccgccucuccacccacaacgucaucaacgccgagaacgcccccggcggccccuacaagaucggcaccuccggcuccugccccaacgucaccaacggcaacggcuucuucgccaccauggccugggccguccccaagaacgacaagaacaagaccgccaccaacccccucaccaucgagguccccuacaucugcaccgagggcgaggaccagaucaccgucuggggcuuccacuccgacaacgagacccagauggccaagcucuacggcgacuccaagccccagaaguucaccuccuccgccaacggcgucaccacccacuacgucucccagaucggcggcuuccccaaccagaccgaggacggcggccucccccaguccggccgcaucgucgucgacuacaugguccagaaguccggcaagaccggcaccaucaccuaccagcgcggcauccuccucccccagaaggucuggugcgccuccggccgcuccaaggucaucaagggcucccucccccucaucggcgaggccgacugccuccacgagaaguacggcggccucaacaaguccaagcccuacuacaccggcgagcacgccaaggccaucggcaacugccccaucugggucaagaccccccucaagcucgccaacggcaccaaguaccgcccccccgccaagcuccucaaggagcgcggcuucuucggcgccaucgccggcuuccucgagggcggcugggagggcaugaucgccggcuggcacggcuacaccucccacggcgcccacggcgucgccgucgccgccgaccucaaguccacccaggaggccaucaacaagaucaccaagaaccucaacucccucuccgagcucgaggucaagaaccuccagcgccucuccggcgccauggacgagcuccacggcgagauccucgagcucgacgagaaggucgacgaccuccgcgccgacaccaucuccucccagaucgagcucgccguccuccucuccaacgagggcaucaucaacuccgaggacgagcaccuccucgcccucgagcgcaagcucaagaagaugcucggccccuccgccgucgagaucggcaacggcugcuucgagaccaagcacaagugcaaccagaccugccucgaccgcaucgccgccggcaccuucgacgccggcgaguucucccuccccaccuucgacucccucaacaucaccgccgccucccucaacgacgacggccucgacaaccacaccauccuccucuacuacuccaccgccgccuccucccucgccgucacccucaugaucgccaucuucgucgucuacauggucucccgcgacaacgucuccugcuccaucugccucuga

SEQ ID NO: 123472 - RNA, 1758 nt, Artificial Sequence
  derived and/or modified CDS sequence (opt2) from hemagglutinin__InfluenzaB__AGX20800
augaaggccaucaucguccuccucauggucgucaccuccaacgccgaccgcaucugcaccggcaucaccuccuccaacuccccccacgucgucaagaccgccacccagggcgaggucaacgucaccggcgucaucccccucaccaccacccccaccaagucccacuucgccaaccucaagggcaccgagacccgcggcaagcucugccccaagugccccaacugcaccgaccucgacgucgcccucggccgccccaagugcaccggcaagauccccuccgcccgcgucuccauccuccacgagguccgccccgucaccuccggcugcuuccccaucaugcacgaccgcaccaagauccgccagcuccccaaccuccuccgcggcuacgagcacauccgccucuccacccacaacgucaucaacgccgagaacgcccccggcggccccuacaagaucggcaccuccggcuccugccccaacgucaccaacggcaacggcuucuucgccaccauggccugggccguccccaagaacgacaagaacaagaccgccaccaacccccucaccaucgagguccccuacaucugcaccgagggcgaggaccagaucaccgucuggggcuuccacuccgacaacgagacccagauggccaagcucuacggcgacuccaagccccagaaguucaccuccuccgccaacggcgucaccacccacuacgucucccagaucggcggcuuccccaaccagaccgaggacggcggccucccccaguccggccgcaucgucgucgacuacaugguccagaaguccggcaagaccggcaccaucaccuaccagcgcggcauccuccucccccagaaggucuggugcgccuccggccgcuccaaggucaucaagggcucccucccccucaucggcgaggccgacugccuccacgagaaguacggcggccucaacaaguccaagcccuacuacaccggcgagcacgccaaggccaucggcaacugccccaucugggucaagaccccccucaagcucgccaacggcaccaaguaccgcccccccgccaagcuccucaaggagcgcggcuucuucggcgccaucgccggcuuccucgagggcggcugggagggcaugaucgccggcuggcacggcuacaccucccacggcgcccacggcgucgccgucgccgccgaccucaaguccacccaggaggccaucaacaagaucaccaagaaccucaacucccucuccgagcucgaggucaagaaccuccagcgccucuccggcgccauggacgagcuccacaacgagauccucgagcucgacgagaaggucgacgaccuccgcgccgacaccaucuccucccagaucgagcucgccguccuccucuccaacgagggcaucaucaacuccgaggacgagcaccuccucgcccucgagcgcaagcucaagaagaugcucggccccuccgccgucgagaucggcaacggcugcuucgagaccaagcacaagugcaaccagaccugccucgaccgcaucgccgccggcaccuucgacgccggcgaguucucccuccccaccuucgacucccucaacaucaccgccgccucccucaacgacgacgagcucgacaaccacaccauccuccucuacuacuccaccgccgccuccucccucgccgucacccucaugaucgccaucuucgucgucuacauggucucccgcgacaacgucuccugcuccaucugccucuga

SEQ ID NO: 123473 - RNA, 1758 nt, Artificial Sequence; identical to SEQ ID NO: 122719
  derived and/or modified CDS sequence (opt2) from hemagglutinin__InfluenzaB__AGX20811

SEQ ID NO: 123474 - RNA, 1758 nt, Artificial Sequence; identical to SEQ ID NO: 122719
  derived and/or modified CDS sequence (opt2) from hemagglutinin__InfluenzaB__AGX20822

SEQ ID NO: 123475 - RNA, 1758 nt, Artificial Sequence; identical to SEQ ID NO: 122719
  derived and/or modified CDS sequence (opt2) from hemagglutinin__InfluenzaB__AGX20833

SEQ ID NO: 123476 - RNA, 1758 nt, Artificial Sequence
  derived and/or modified CDS sequence (opt2) from hemagglutinin__InfluenzaB__AGX20844
augaaggccaucaucguccuccucauggucgucaccuccaacgccgaccgcaucugcaccggcaucaccuccuccaacuccccccacaucgucaagaccgccacccagggcgaggucaacgucaccggcgucaucccccucaccaccacccccaccaagucccacuucgccaaccucaagggcaccgagacccgcggcaagcucugccccaagugccucaacugcaccgaccucgacgucgcccucggccgccccaagugcaugggcaagauccccuccgcccgcgucuccauccuccacgagguccgccccgucaccuccggcugcuuccccaucaugcacgaccgcaccaagauccgccagcuccccaaccuccuccgcggcuacgagcacauccgccucuccacccacaacgucaucaacgccgagaacgcccccggcggccccuacaagaucggcaccuccggcuccugccccaacaucaccaacggcaacggcuucuucgccaccauggccugggccguccccaagaacgacaagaacaagaccgccaccaacccccucaccaucgagguccccuacaucugcaccgagggcgaggaccagaucaccgucuggggcuuccacuccgacaacgagacccagauggccaagcucuacggcgacuccaagccccagaaguucaccuccuccgccaacggcgucaccacccacuacgucucccagaucggcggcuuccccaaccagaccgaggacggcggccucccccaguccggccgcaucgucgucgacuacaugguccagaaguccggcaagaccggcaccaucaccuaccagcgcggcauccuccucccccagaaggucuggugcgccuccggccgcuccaaggucaucaagggcucccucccccucaucggcgaggccgacugccuccacgagaaguacggcggccucaacaaguccaagcccuacuacaccggcgagcacgccaaggccaucggcaacugccccaucugggucaagaccccccucaagcucgccaacggcaccaaguaccgcccccccgccaagcuccucaaggagcgcggcuucuucggcgccaucgccggcuuccucgagggcggcugggagggcaugaucgccggcuggcacggcuacaccucccacggcgcccacggcgucgccgucgccgccgaccucaaguccacccaggaggccaucaacaagaucaccaagaaccucaacucccucuccgagcucgaggucaagaaccuccagcgccucuccggcgccauggacgagcuccacaacgagauccucgagcucgacgagaaggucgacgaccuccgcgccgacaccaucuccucccagaucgagcucgccguccuccucuccaacgagggcaucaucaacuccgaggacgagcaccuccucgcccucgagcgcaagcucaagaagaugcucggccccuccgccgucgagaucggcaacggcugcuucgagaccaagcacaagugcaaccagaccugccucgaccgcaucgccgccggcaccuucgacgccggcgaguucucccuccccaccuucgacucccucaacaucaccgccgccucccucaacgacgacggccucgacaaccacaccauccuccucuacuacuccaccgccgccuccucccucgccgucacccucaugaucgccaucuucgucgucuacauggucucccgcgacaacgucuccugcuccaucugccucuga

SEQ ID NO: 123477 - RNA, 1758 nt, Artificial Sequence; identical to SEQ ID NO: 122644
  derived and/or modified CDS sequence (opt2) from hemagglutinin__InfluenzaB__AGX20855

SEQ ID NO: 123478 - RNA, 1758 nt, Artificial Sequence; identical to SEQ ID NO: 122719
  derived and/or modified CDS sequence (opt2) from hemagglutinin__InfluenzaB__AGX20866

SEQ ID NO: 123479 - RNA, 1758 nt, Artificial Sequence; identical to SEQ ID NO: 122719
  derived and/or modified CDS sequence (opt2) from hemagglutinin__InfluenzaB__AGX20877

SEQ ID NO: 123480 - RNA, 1758 nt, Artificial Sequence
  derived and/or modified CDS sequence (opt2) from hemagglutinin__InfluenzaB__AGX20888
augaaggccaucaucguccuccucauggucgucaccuccaacgccgaccgcaucugcaccggcaucaccuccuccaacuccccccacgucgucaagaccgccacccagggcgaggucaacgucaccggcgucaucccccucaccaccacccccaccaagucccacuucgccaaccucaagggcaccgagacccgcggcaagcucugccccaagugccccaacugcaccgaccucgacgucgcccucggccgccccaagugcaccggcaagauccccuccgcccgcgucuccauccuccacgagguccgccccgucaccuccggcugcuuccccaucaugcacgaccgcaccaagauccgccagcuccccaaccuccuccgcggcuacgagcacauccgccucuccacccacaacgucaucaacgccgagaacgcccccggcggccccuacaagaucggcaccuccggcuccugccccaacgucaccaacggcaacggcuucuucgccaccauggccugggccguccccaagaacgacaagaacaagaccgccaccaacccccucaccaucgagguccccuacaucugcaccgagggcgaggaccagaucaccgucuggggcuuccacuccgacuccgagacccagauggccaagcucuacggcgacuccaagccccagaaguucaccuccuccgccaacggcgucaccacccacuacgucucccagaucggcggcuuccccaaccagaccgaggacggcggccucccccaguccggccgcaucgucgucgacuacaugguccagaaguccggcaagaccggcaccaucaccuaccagcgcggcauccuccucccccagaaggucuggugcgccuccggccgcuccaaggucaucaagggcucccucccccucaucggcgaggccgacugccuccacgagaaguacggcggccucaacaaguccaagcccuacuacaccggcgagcacgccaaggccaucggcaacugccccaucugggucaagaccccccucaagcucgccaacggcaccaaguaccgcccccccgccaagcuccucaaggagcgcggcuucuucggcgccaucgccggcuuccucgagggcggcugggagggcaugaucgccggcuggcacggcuacaccucccacggcgcccacggcgucgccgucgccgccgaccucaaguccacccaggaggccaucaacaagaucaccaagaaccucaacucccucuccgagcucgaggucaagaaccuccagcgccucuccggcgccauggacgagcuccacaacgagauccucgagcucgacgagaaggucgacgaccuccgcgccgacaccaucuccucccagaucgagcucgccguccuccucuccaacgagggcaucaucaacuccgaggacgagcaccuccucgcccucgagcgcaagcucaagaagaugcucggccccuccgccgucgagaucggcaacggcugcuucgagaccaagcacaagugcaaccagaccugccucgaccgcaucgccgccggcaccuucgacgccggcgaguucucccuccccaccuucgacucccucaacaucaccgccgccucccucaacgacgacggccucgacaaccacaccauccuccucuacuacuccaccgccgccuccucccucgccgucacccucaugaucgccaucuucgucgucuacauggucucccgcgacaacgucuccugcuccaucugccucuga

SEQ ID NO: 123481 - RNA, 1758 nt, Artificial Sequence; identical to SEQ ID NO: 122719
  derived and/or modified CDS sequence (opt2) from hemagglutinin__InfluenzaB__AGX20899

SEQ ID NO: 123482 - RNA, 1758 nt, Artificial Sequence; identical to SEQ ID NO: 122719
  derived and/or modified CDS sequence (opt2) from hemagglutinin__InfluenzaB__AGX20910

SEQ ID NO: 123483 - RNA, 1758 nt, Artificial Sequence; identical to SEQ ID NO: 122644
  derived and/or modified CDS sequence (opt2) from hemagglutinin__InfluenzaB__AGX20921

SEQ ID NO: 123484 - RNA, 1758 nt, Artificial Sequence
  derived and/or modified CDS sequence (opt2) from hemagglutinin__InfluenzaB__AGX20932
augaaggccaucaucguccuccucauggucgucaccuccaacgccgaccgcaucugcaccggcaucaccuccuccaacuccccccacgucgucaagaccgccacccagggcgaggucaacgucaccggcgucaucccccucaccaccacccccaccaagucccacuucgccaaccucaagggcaccgagacccgcggcaagcucugccccaagugccccaacugcaccgaccucgacgucgcccucggccgccccaagugcaccggcaagauccccuccgcccgcgucuccauccuccacgagguccgccccgucaccuccggcugcuuccccaucaugcacgaccgcaccaagauccgccagcuccccaaccuccuccgcggcuacgagcacauccgccucuccacccacaacgucaucaacgccgagaacgcccccggcggccccuacaagaucggcaccuccggcuccugccccaacgucaccaacggcaacggcuucuucgccaccauggccugggccguccccaagaacgacaagaacaagaccgccaccaacccccucaccaucgagguccccuacaucugcaccgagggcgaggaccagaucaccgucuggggcuuccacuccgacaacgagacccagauggccaagcucuacggcgaccccaagccccagaaguucaccuccuccgccaacggcgucaccacccacuacgucucccagaucggcggcuuccccaaccagaccgaggacggcggccucccccaguccggccgcaucgucgucgacuacaugguccagaaguccggcaagaccggcaccaucaccuaccagcgcggcauccuccucccccagaaggucuggugcgccuccggccgcuccaaggucaucaagggcucccucccccucaucggcgaggccgacugccuccacgagaaguacggcggccucaacaaguccaagcccuacuacaccggcgagcacgccaaggccaucggcaacugccccaucugggucaagaccccccucaagcucgccaacggcaccaaguaccgcccccccgccaagcuccucaaggagcgcggcuucuucggcgccaucgccggcuuccucgagggcggcugggagggcaugaucgccggcuggcacggcuacaccucccacggcgcccacggcgucgccgucgccgccgaccucaaguccacccaggaggccaucaacaagaucaccaagaaccucaacucccucuccgagcucgaggucaagaaccuccagcgccucuccggcgccauggacgagcuccacaacgagauccucgagcucgacgagaaggucgacgaccuccgcgccgacaccaucuccucccagaucgagcucgccguccuccucuccaacgagggcaucaucaacuccgaggacgagcaccuccucgcccucgagcgcaagcucaagaagaugcucggccccuccgccgucgagaucggcaacggcugcuucgagaccaagcacaagugcaaccagaccugccucgaccgcaucgccgccggcaccuucgacgccggcgaguucucccuccccaccuucgacucccucaacaucaccgccgccucccucaacgacgacggccucgacaaccacaccauccuccucuacuacuccaccgccgccuccucccucgccgucacccucaugaucgccaucuucgucgucuacauggucucccgcgacaacgucuccugcuccaucugccucuga

SEQ ID NO: 123485 - RNA, 1758 nt, Artificial Sequence; identical to SEQ ID NO: 122644
  derived and/or modified CDS sequence (opt2) from hemagglutinin__InfluenzaB__AGX20943

SEQ ID NO: 123486 - RNA, 1758 nt, Artificial Sequence; identical to SEQ ID NO: 122644
  derived and/or modified CDS sequence (opt2) from hemagglutinin__InfluenzaB__AGX20954

SEQ ID NO: 123487 - RNA, 1758 nt, Artificial Sequence; identical to SEQ ID NO: 122644
  derived and/or modified CDS sequence (opt2) from hemagglutinin__InfluenzaB__AGX20965

SEQ ID NO: 123488 - RNA, 1758 nt, Artificial Sequence
  derived and/or modified CDS sequence (opt2) from hemagglutinin__InfluenzaB__AGX20976
augaaggccaucaucguccuccucauggucgucaccuccaacgccgaccgcaucugcaccggcaucaccuccuccaacuccccccacgucgucaagaccgccacccagggcgaggucaacgucaccggcgucaucccccucaccaccacccccaccaagucccacuucgccaaccucaagggcaccgagacccgcggcaagcucugccccaagugccucaacugcaccgaccucgacgucgcccucggccgccccaagugcaccggcaagauccccuccgcccgcgucuccauccuccacgagguccgccccgucaccuccggcugcuuccccaucaugcacgaccgcaccaagauccgccagcuccccaaccuccuccgcggcuacgagcacauccgccucuccacccacaacgucaucaacgccgagaacgcccccggcggccccuacaagaucggcaccuccggcuccugccccaacgucaccaacggcaacggcuucuucgccaccauggccugggccguccccaagaacgacaagaacaagaccgccaccaacccccucaccaucgagguccccuacaucugcaccgagggcgaggaccagaucaccgucuggggcuuccacuccgacaacgagacccagauggccaagcucuacggcgacuccaagccccagaaguucaccuccuccgccaacggcgucaccacccacuacgucucccagaucggcggcuuccccaaccagaccgaggacggcggccucccccaguccggccgcaucgucgucgacuacaugguccagaaguccggcaagaccggcaccaucaccuaccagcgcggcauccuccucccccagaaggucuggugcgccuccggccgcuccaaggucaucaagggcucccucccccucaucggcgaggccgacugccuccacgagaaguacggcggccucaacaaguccaagcccuacuacaccggcgagcacgccaaggccaucggcaacugccccaucugggucaagaccccccucaagcucgccaacggcaccaaguaccgcccccccgccaagcuccucaaggagcgcggcuucuucggcgccaucgccggcuuccucgagggcggcugggagggcaugaucgccggcuggcacggcuacaccucccacggcgcccacggcgucgccgucgccgccgaccucaaguccacccaggaggccaucaacaagaucaccaagaaccucaacucccucuccgagcucgaggucaagaaccuccagcgccucuccggcgccauggacgagcuccacggcgagauccucgagcucgacgagaaggucgacgaccuccgcgccgacaccaucuccucccagaucgagcucgccguccuccucuccaacgagggcaucaucaacuccgaggacgagcaccuccucgcccucgagcgcaagcucaagaagaugcucggccccuccgccgucgagaucggcaacggcugcuucgagaccaagcacaagugcaaccagaccugccucgaccgcaucgccgccggcaccuucgacgccggcgaguucucccuccccaccuucgacucccucaacaucaccgccgccucccucaacgacgacggccucgacaaccacaccauccuccucuacuacuccaccgccgccuccucccucgccgucacccucaugaucgccaucuucgucgucuacauggucucccgcgacaacgucuccugcuccaucugccucuga

SEQ ID NO: 123489 - RNA, 1758 nt, Artificial Sequence; identical to SEQ ID NO: 122644
  derived and/or modified CDS sequence (opt2) from hemagglutinin__InfluenzaB__AGX20987

SEQ ID NO: 123490 - RNA, 1758 nt, Artificial Sequence; identical to SEQ ID NO: 122719
  derived and/or modified CDS sequence (opt2) from hemagglutinin__InfluenzaB__AGX20998

SEQ ID NO: 123491 - RNA, 1758 nt, Artificial Sequence
  derived and/or modified CDS sequence (opt2) from hemagglutinin__InfluenzaB__AGX21009
augaaggccaucaucguccuccucauggucgucaccuccaacgccgaccgcaucugcaccggcaucaccuccuccaacuccccccacgucgucaagaccgccacccagggcgaggucaacgucaccggcgucaucccccucaccaccacccccaccaagucccacuucgccaaccucaagggcaccgagacccgcggcaagcucugccccaagugccccaacugcaccgaccucgacgucgcccucggccgccccaagugcaccggcaagauccccuccgcccgcgucuccauccuccacgagguccgccccgucaccuccggcugcuuccccaucaugcacgaccgcaccaagauccgccagcuccccaaccuccuccgcggcuacgagcacauccgccucuccacccacaacgucaucaacgccgagaacgcccccggcggccccuacaagaucggcaccuccggcuccugccccaacgucaccaacggcaacggcuucuucgccaccauggccugggccguccccaagaacgacaagaacaagaccgccaccaacccccucaccaucgagguccccuacaucugcaccgagggcgaggaccagaucaccgucuggggcuuccacuccgacaacgagacccagauggccaagcucuacggcgacuccaagccccagaaguucaccuccuccgccaacggcgucaccacccacuacgucucccagaucggcggcuuccccaaccagaccgaggacggcggccucccccaguccggccgcaucgucgucgacuacaugguccagaaguccggcaagaccggcaccaucaccuaccagcgcggcauccuccucccccagaaggucuggugcgccuccggccgcuccaaggucaucaagggcucccucccccucaucggcgaggccgacugccuccacgagaaguacggcggccucaacaaguccaagcccuacuacaccggcgagcacgccaaggccaucggcaacugccccaucugggucaagaccccccucaagcucgccaacggcaccaaguaccgcccccccgccaagcuccucaaggagcgcggcuucuucggcgccaucgccggcuuccucgagggcggcugggagggcaugaucgccggcuggcacggcuacaccucccacggcgcccacggcgucgccgucgccgccgaccucaaguccacccaggaggccaucaacaagaucaccaagaaccucaacucccucuccgagcucgaggucaagaaccuccagcgccucuccggcgccauggacgagcuccacaacgagauccucgagcucgacgagaaggucgacgaccuccgcgccgacaccaucuccucccagaucgagcucgccguccuccucuccaacgagggcaucaucaacuccgaggacgagcaccuccucgcccucgagcgcaagcucaagaagaugcucggccccuccgccgucgagaucggcaacggcugcuucgagaccaagcacaagugcaaccagaccugccucgaccgcaucgccgccggcaccuucgacgccggcgaguucucccuccccaccuucgacucccucaacaucaccgccgccucccucaacgacgacggccucgacaaccacaccauccuccucuacuacuccaccgccgccuccucccucgccgucacccucaugaucgccaucuucgucgucuacaugaucucccgcgacaacgucuccugcuccaucugccucuga

SEQ ID NO: 123492 - RNA, 1758 nt, Artificial Sequence
  derived and/or modified CDS sequence (opt2) from hemagglutinin__InfluenzaB__AGX21020
augaaggccaucaucguccuccucauggucgucaccuccaacgccgaccgcaucugcaccggcaucaccuccuccaacuccccccacgucgucaagaccgccacccagggcgaggucaacgucaccggcgucaucccccucaccaccacccccaccaagucccacuucgccaaccucaagggcaccgagacccgcggcaagcucugccccaagugccucaacugcaccgaccucgacgucgcccucggccgccccaagugcaccggcaagauccccuccgcccgcgucuccauccuccacgagguccgccccgucaccuccggcugcuuccccaucaugcacgaccgcaccaagauccgccagcuccccaaccuccuccgcggcuacgagcacauccgccucuccacccacaacgucaucaacgccgagaacgcccccggcggccccuacaagaucggcaccuccggcuccugccccaacgucaccaacggcaacggcuucuucgccaccauggccugggccguccccaagaacgacaagaacaagaccgccaccaacccccucaccaucgagguccccuacaucugcaccgagggcgaggaccagaucaccgucuggggcuuccacuccgacaacgagacccagauggccaagcucuacggcgacuccgagccccagaaguucaccuccuccgccaacggcgucaccacccacuacgucucccagaucggcggcuuccccaaccagaccgaggacggcggccucccccaguccggccgcaucgucgucgacuacaugguccagaaguccggcaagaccggcaccaucaccuaccagcgcggcauccuccucccccagaaggucuggugcgccuccggccgcuccaaggucaucaagggcucccucccccucaucggcgaggccgacugccuccacgagaaguacggcggccucaacaaguccaagcccuacuacaccggcgagcacgccaaggccaucggcaacugccccaucugggucaagaccccccucaagcucgccaacggcaccaaguaccgcccccccgccaagcuccucaaggagcgcggcuucuucggcgccaucgccggcuuccucgagggcggcugggagggcaugaucgccggcuggcacggcuacaccucccacggcgcccacggcgucgccgucgccgccgaccucaaguccacccaggaggccaucaacaagaucaccaagaaccucaacucccucuccgagcucgaggucaagaaccuccagcgccucuccggcgccauggacgagcuccacaacgagauccucgagcucgacgagaaggucgacgaccuccgcgccgacaccaucuccucccagaucgagcucgccguccuccucuccaacgagggcaucaucaacuccgaggacgagcaccuccucgcccucgagcgcaagcucaagaagaugcucggccccuccgccgucgagaucggcaacggcugcuucgagaccaagcacaagugcaaccagaccugccucgaccgcaucgccgccggcaccuucgacgccggcgaguucucccuccccaccuucgacucccucaacaucaccgccgccucccucaacgacgacggccucgacaaccacaccauccuccucuacuacuccaccgccgccuccucccucgccgucacccucaugaucgccaucuucgucgucuacauggucucccgcgacaacgucuccugcuccaucugccucuga

SEQ ID NO: 123493 - RNA, 1758 nt, Artificial Sequence; identical to SEQ ID NO: 122719
  derived and/or modified CDS sequence (opt2) from hemagglutinin__InfluenzaB__AGX21031

SEQ ID NO: 123494 - RNA, 1758 nt, Artificial Sequence
  derived and/or modified CDS sequence (opt2) from hemagglutinin__InfluenzaB__AGX21042
augaaggccaucaucguccuccucauggucgucaccuccaacgccgaccgcaucugcaccggcaucaccuccuccaacuccccccacgucgucaagaccgccacccagggcgaggucaacgucaccggcgucaucccccucaccaccacccccaccaagucccacuucgccaaccucaagggcaccgagacccgcggcaagcucugccccaagugccucaacugcaccgaccucgacgucgcccucggccgccccaagugcaccggcaagauccccuccgcccgcgucuccauccuccacgagguccgccccgucaccuccggcugcuuccccaucaugcacgaccgcaccaagauccgccagcuccccaaccuccuccgcggcuacgagcacauccgccucuccacccacaacgucaucaacaccgagaacgcccccggcggccccuacaagaucggcaccuccggcuccugccccaacgucaccaacggcaacggcuucuucgccaccauggccugggccguccccaagaacgacaagaacaagaccgccaccaacccccucaccaucgagguccccuacaucugcaccgagggcgaggaccagaucaccgucuggggcuuccacuccgacaacgagacccagauggccaagcucuacggcgacuccaagccccagaaguucaccuccuccgccaacggcgucaccacccacuacgucucccagaucggcggcuuccccaaccagaccgaggacggcggccucccccaguccggccgcaucgucgucgacuacaugguccagaaguccggcaagaccggcaccaucaccuaccagcgcggcauccuccucccccagaaggucuggugcgccuccggccgcuccaaggucaucaagggcucccucccccucaucggcgaggccgacugccuccacgagaaguacggcggccucaacaaguccaagcccuacuacaccggcgagcacgccaaggccaucggcaacugccccaucugggucaagaccccccucaagcucgccaacggcaccaaguaccgcccccccgccaagcuccucaaggagcgcggcuucuucggcgccaucgccggcuuccucgagggcggcugggagggcaugaucgccggcuggcacggcuacaccucccacggcgcccacggcgucgccgucgccgccgaccucaaguccacccaggaggccaucaacaagaucaccaagaaccucaacucccucuccgagcucgaggucaagaaccuccagcgccucuccggcgccauggacgagcuccacaacgagauccucgagcucgacgagaaggucgacgaccuccgcgccgacaccaucuccucccagaucgagcucgccguccuccucuccaacgagggcaucaucaacuccgaggacgagcaccuccucgcccucgagcgcaagcucaagaagaugcucggccccuccgccgucgagaucggcaacggcugcuucgagaccaagcacaagugcaaccagaccugccucgaccgcaucgccgccggcaccuucgacgccggcgaguucucccuccccaccuucgacucccucaacaucaccgccgccucccucaacgacgacggccucgacaaccacaccauccuccucuacuacuccaccgccgccuccucccucgccgucacccucaugaucgccaucuucgucgucuacauggucucccgcgacaacgucuccugcuccaucugccucuga

SEQ ID NO: 123495 - RNA, 1758 nt, Artificial Sequence; identical to SEQ ID NO: 122681
  derived and/or modified CDS sequence (opt2) from hemagglutinin__InfluenzaB__AGX21053

SEQ ID NO: 123496 - RNA, 1758 nt, Artificial Sequence; identical to SEQ ID NO: 122644
  derived and/or modified CDS sequence (opt2) from hemagglutinin__InfluenzaB__AGX21064

SEQ ID NO: 123497 - RNA, 1758 nt, Artificial Sequence; identical to SEQ ID NO: 122681
  derived and/or modified CDS sequence (opt2) from hemagglutinin__InfluenzaB__AGX21075

SEQ ID NO: 123498 - RNA, 1758 nt, Artificial Sequence; identical to SEQ ID NO: 122681
  derived and/or modified CDS sequence (opt2) from hemagglutinin__InfluenzaB__AGX21084

SEQ ID NO: 123499 - RNA, 1758 nt, Artificial Sequence; identical to SEQ ID NO: 122681
  derived and/or modified CDS sequence (opt2) from hemagglutinin__InfluenzaB__AGX21095

SEQ ID NO: 123500 - RNA, 1758 nt, Artificial Sequence
  derived and/or modified CDS sequence (opt2) from hemagglutinin__InfluenzaB__AGX21106
augaaggccaucaucguccuccucauggucgucaccuccaacgccgaccgcaucugcaccggcaucaccuccuccaacuccccccacgucgucaagaccgccacccagggcgaggucaacgucaccggcgucaucccccucaccaccacccccaccaagucccacuucgccaaccucaagggcaccgagacccgcggcaagcucugccccaagugccccaacugcaccgaccucgacgucgcccucggccgccccaagugcaccggcaagauccccuccgcccgcgucuccauccuccacgagguccgccccgucaccuccggcugcuuccccaucaugcacgaccgcaccaagauccgccagcuccccaaccuccuccgcggcuacgagcacauccgccucuccacccacaacgucaucaacgccgagaacgcccccggcggccccuacaagaucggcaccuccggcuccugccccaacgucaccaacggcaacggcuucuucgccaccauggccugggccguccccaagaacgacaagaacaagaccgccaccaacccccucaccaucgagguccccuacaucugcaccgagggcgaggaccagaucaccgucuggggcuuccacuccgacaacgaggcccagauggccaagcucuacggcgacuccaagccccagaaguucaccuccuccgccaacggcgucaccacccacuacgucucccagaucggcggcuuccccaaccagaccgaggacggcggccucccccaguccggccgcaucgucgucgacuacaugguccagaaguccggcaagaccggcaccaucaccuaccagcgcggcauccuccucccccagaaggucuggugcgccuccggccgcuccaaggucaucaagggcucccucccccucaucggcgaggccgacugccuccacgagaaguacggcggccucaacaaguccaagcccuacuacaccggcgagcacgccaaggccaucggcaacugccccaucugggucaagaccccccucaagcucgccaacggcaccaaguaccgcccccccgccaagcuccucaaggagcgcggcuucuucggcgccaucgccggcuuccucgagggcggcugggagggcaugaucgccggcuggcacggcuacaccucccacggcgcccacggcgucgccgucgccgccgaccucaaguccacccaggaggccaucaacaagaucaccaagaaccucaacucccucuccgagcucgaggucaagaaccuccagcgccucuccggcgccauggacgagcuccacaacgagauccucgagcucgacgagaaggucgacgaccuccgcgccgacaccaucuccucccagaucgagcucgccguccuccucuccaacgagggcaucaucaacuccgaggacgagcaccuccucgcccucgagcgcaagcucaagaagaugcucggccccuccgccgucgagaucggcaacggcugcuucgagaccaagcacaagugcaaccagaccugccucgaccgcaucgccgccggcaccuucgacgccggcgaguucucccuccccaccuucgacucccucaacaucaccgccgccucccucaacgacgacggccucgacaaccacaccauccuccucuacuacuccaccgccgccuccucccucgccgucacccucaugaucgccaucuucgucgucuacauggucucccgcgacaacgucuccugcuccaucugccucuga

SEQ ID NO: 123501 - RNA, 1758 nt, Artificial Sequence; identical to SEQ ID NO: 122644
  derived and/or modified CDS sequence (opt2) from hemagglutinin__InfluenzaB__AGX21117

SEQ ID NO: 123502 - RNA, 1758 nt, Artificial Sequence; identical to SEQ ID NO: 123494
  derived and/or modified CDS sequence (opt2) from hemagglutinin__InfluenzaB__AGX21128

SEQ ID NO: 123503 - RNA, 1758 nt, Artificial Sequence
  derived and/or modified CDS sequence (opt2) from hemagglutinin__InfluenzaB__AGX21139
augaaggccaucaucguccuccucauggucgucaccuccaacgccgaccgcaucugcaccggcaucaccuccuccaacuccccccacgucgucaagaccgccacccagggcgaggucaacgucaccggcgucaucccccucaccaccacccccaccaagucccacuucgccaaccucaagggcaccgagacccgcggcaagcucugccccaagugccccaacugcaccgaccucgacgucgcccucggccgccccaagugcaccggcaagauccccuccgcccgcgucuccauccuccacgagguccgccccgucaccuccggcugcuuccccaucaugcacgaccgcaccaagauccgccagcuccccaaccuccuccgcggcuacgagcacauccgccucuccacccacaacgucaucaacgccgagaacgcccccggcggccccuacaagaucggcaccuccggcuccugccccaacgucaccaacggcaacggcuucuucgccaccauggccugggccguccccaagaacgacaagaacaagaccgccaccaacccccucaccaucgagguccccuacaucugcaccgagggcgaggaccagaucaccgucuggggcuuccacuccgacaacgagacccagauggccaagcucuacggcgacuccaagccccagaaguucaccuccuccgccaacggcgucaccacccacuacgucucccagaucggcgacuuccccaaccagaccgaggacggcggccucccccaguccggccgcaucgucgucgacuacaugguccagaaguccggcaagaccggcaccaucaccuaccagcgcggcauccuccucccccagaaggucuggugcgccuccggccgcuccaaggucaucaagggcucccucccccucaucggcgaggccgacugccuccacgagaaguacggcggccucaacaaguccaagcccuacuacaccggcgagcacgccaaggccaucggcaacugccccaucugggucaagaccccccucaagcucgccaacggcaccaaguaccgcccccccgccaagcuccucaaggagcgcggcuucuucggcgccaucgccggcuuccucgagggcggcugggagggcaugaucgccggcuggcacggcuacaccucccacggcgcccacggcgucgccgucgccgccgaccucaaguccacccaggaggccaucaacaagaucaccaagaaccucaacucccucuccgagcucgaggucaagaaccuccagcgccucuccggcgccauggacgagcuccacaacgagauccucgagcucgacgagaaggucgacgaccuccgcgccgacaccaucuccucccagaucgagcucgccguccuccucuccaacgagggcaucaucaacuccgaggacgagcaccuccucgcccucgagcgcaagcucaagaagaugcucggccccuccgccgucgagaucggcaacggcugcuucgagaccaagcacaagugcaaccagaccugccucgaccgcaucgccgccggcaccuucgacgccggcgaguucucccuccccaccuucgacucccucaacaucaccgccgccucccucaacgacgacggccucgacaaccacaccauccuccucuacuacuccaccgccgccuccucccucgccgucacccucaugaucgccaucuucgucgucuacauggucucccgcgacaacgucuccugcuccaucugccucuga

SEQ ID NO: 123504 - RNA, 1758 nt, Artificial Sequence; identical to SEQ ID NO: 122719
  derived and/or modified CDS sequence (opt2) from hemagglutinin__InfluenzaB__AGX21150

SEQ ID NO: 123505 - RNA, 1758 nt, Artificial Sequence; identical to SEQ ID NO: 122644
  derived and/or modified CDS sequence (opt2) from hemagglutinin__InfluenzaB__AGX21161

SEQ ID NO: 123506 - RNA, 1758 nt, Artificial Sequence; identical to SEQ ID NO: 122719
  derived and/or modified CDS sequence (opt2) from hemagglutinin__InfluenzaB__AGX21172

SEQ ID NO: 123507 - RNA, 1758 nt, Artificial Sequence; identical to SEQ ID NO: 122681
  derived and/or modified CDS sequence (opt2) from hemagglutinin__InfluenzaB__AGX21183

SEQ ID NO: 123508 - RNA, 1758 nt, Artificial Sequence; identical to SEQ ID NO: 122719
  derived and/or modified CDS sequence (opt2) from hemagglutinin__InfluenzaB__AGX21194

SEQ ID NO: 123509 - RNA, 1758 nt, Artificial Sequence
  derived and/or modified CDS sequence (opt2) from hemagglutinin__InfluenzaB__AGX21205
augaaggccaucaucguccuccucauggucgucaccuccaacgccgaccgcaucugcaccggcaucaccuccuccaacuccccccacaucgucaagaccgccacccagggcgaggucaacgucaccggcgucaucccccucaccaccacccccaccaagucccacuucgccaaccucaagggcaccgagacccgcggcaagcucugccccaagugccucaacugcaccgaccucgacgucgcccucggccgccccaagugcaccggcaagauccccuccgcccgcgucuccauccuccacgagguccgccccgucaccuccggcugcuuccccaucaugcacgaccgcaccaagauccgccagcuccccaaccuccuccgcggcuacgagcacauccgccucuccacccacaacgucaucaacgccaagaacgcccccggcggccccuacaagaucggcaccuccggcuccugccccaacaucaccaacggcaacggcuucuucgccaccauggccugggccguccccaagaacgacaagaacaagaccgccaccaacccccucaccaucgagguccccuacaucugcaccgagggcgaggaccagaucaccgucuggggcuuccacuccgacaacgagacccagauggccaagcucuacggcgacuccaagccccagaaguucaccuccuccgccaacggcgucaccacccacuacgucucccagaucggcggcuuccccaaccagaccgaggacggcggccucccccaguccggccgcaucgucgucgacuacaugguccagaaguccggcaagaccggcaccaucaccuaccagcgcggcauccuccucccccagaaggucuggugcgccuccggccgcuccaaggucaucaagggcucccucccccucaucggcgaggccgacugccuccacgagaaguacggcggccucaacaaguccaagcccuacuacaccggcgagcacgccaaggccaucggcaacugccccaucugggucaagaccccccucaagcucgccaacggcaccaaguaccgcccccccgccaagcuccucaaggagcgcggcuucuucggcgccaucgccggcuuccucgagggcggcugggagggcaugaucgccggcuggcacggcuacaccucccacggcgcccacggcgucgccgucgccgccgaccucaaguccacccaggaggccaucaacaagaucaccaagaaccucaacucccucuccgagcucgaggucaagaaccuccagcgccucuccggcgccauggacgagcuccacaacgagauccucgagcucgacgagaaggucgacgaccuccgcgccgacaccaucuccucccagaucgagcucgccguccuccucuccaacgagggcaucaucaacuccgaggacgagcaccuccucgcccucgagcgcaagcucaagaagaugcucggccccuccgccgucgagaucggcaacggcugcuucgagaccaagcacaagugcaaccagaccugccucgaccgcaucgccgccggcaccuucgacgccggcgaguucucccuccccaccuucgacucccucaacaucaccgccgccucccucaacgacgacggccucgacaaccacaccauccuccucuacuacuccaccgccgccuccucccucgccgucacccucaugaucgccaucuucgucgucuacauggucucccgcgacaacgucuccugcuccaucugccucuga

SEQ ID NO: 123510 - RNA, 1758 nt, Artificial Sequence; identical to SEQ ID NO: 122681
  derived and/or modified CDS sequence (opt2) from hemagglutinin__InfluenzaB__AGX21216

SEQ ID NO: 123511 - RNA, 1758 nt, Artificial Sequence; identical to SEQ ID NO: 122644
  derived and/or modified CDS sequence (opt2) from hemagglutinin__InfluenzaB__AGX21227

SEQ ID NO: 123512 - RNA, 1758 nt, Artificial Sequence
  derived and/or modified CDS sequence (opt2) from hemagglutinin__InfluenzaB__AGX21238
augaaggccaucaucguccuccucauggucgucaccuccaacgccgaccgcaucugcaccggcaucaccuccuccaacuccccccacgucgucaagaccgccacccagggcgaggucaacgucaccggcgucaucccccucaccaccacccccaccaagucccacuucgccaaccucaagggcaccgagacccgcggcaagcucugccccaagugccucaacugcaccgaccucgacgucgcccucggccgccccaagugcaccggcaagauccccuccgcccgcgucuccauccuccacgagguccgccccgucaccuccggcugcuuccccaucaugcacgaccgcaccaagauccgccagcuccccaaccuccuccgcggcuacgagcacauccgccucuccacccacaacgucaucaacgccgagaacgcccccggcggccccuacaagaucggcaccuccggcuccugccccaacgucaccaacggcaacggcuucuucgccaccauggccugggccguccccaagaacgacaagaacaagaccgccaccaacccccucaccaucgagguccccuacaucugcaccgagggcgaggaccagaucaccgucuggggcuuccacuccgacaacgagacccagauggccaagcucuacggcgacuccaagccccagaaguucaccuccuccgccaacggcgucaccacccacuacgucucccagaucggcggcuuccccaaccagaccgaggacggcggccucccccaguccggccgcaucgucgucgacuacaugguccagaaguccggcaagaccggcaccaucaccuaccagcgcggcauccuccucccccagaaggucuggugcgccaacggccgcuccaaggucaucaagggcucccucccccucaucggcgaggccgacugccuccacgagaaguacggcggccucaacaaguccaagcccuacuacaccggcgagcacgccaaggccaucggcaacugccccaucugggucaagaccccccucaagcucgccaacggcaccaaguaccgcccccccgccaagcuccucaaggagcgcggcuucuucggcgccaucgccggcuuccucgagggcggcugggagggcaugaucgccggcuggcacggcuacaccucccacggcgcccacggcgucgccgucgccgccgaccucaaguccacccaggaggccaucaacaagaucaccaagaaccucaacucccucuccgagcucgaggucaagaaccuccagcgccucuccggcgccauggacgagcuccacaacgagauccucgagcucgacgagaaggucgacgaccuccgcgccgacaccaucuccucccagaucgagcucgccguccuccucuccaacgagggcaucaucaacuccgaggacgagcaccuccucgcccucgagcgcaagcucaagaagaugcucggccccuccgccgucgagaucggcaacggcugcuucgagaccaagcacaagugcaaccagaccugccucgaccgcaucgccgccggcaccuucgacgccggcgaguucucccuccccaccuucgacucccucaacaucaccgccgccucccucaacgacgacggccucgacaaccacaccauccuccucuacuacuccaccgccgccuccucccucgccgucacccucaugaucgccaucuucgucgucuacaugaucucccgcgacaacgucuccugcuccaucugccucuga

SEQ ID NO: 123513 - RNA, 1758 nt, Artificial Sequence; identical to SEQ ID NO: 122719
  derived and/or modified CDS sequence (opt2) from hemagglutinin__InfluenzaB__AGX21249

SEQ ID NO: 123514 - RNA, 1758 nt, Artificial Sequence
  derived and/or modified CDS sequence (opt2) from hemagglutinin__InfluenzaB__AGX21260
augaaggccaucaucguccuccucauggucgucaccuccaacgccgaccgcaucugcaccggcaucaccuccuccaacuccccccacgucgucaagaccgccacccagggcgaggucaacgucaccggcgucaucccccucaccaccacccccaccaagucccacuucgccaaccucaagggcaccgagacccgcggcaagcucugccccaagugccucaacugcaccgaccucgacgucgcccucggccgccccaagugcaccggcaagauccccuccgcccgcgucuccauccuccacgagguccgccccgucaccuccggcugcuuccccaucaugcacgaccgcaccaagauccgccagcuccccaaccuccuccgcggcuacgagcacauccgccucuccacccacaacgucaucaacgccgagaacgcccccggcggccccuacaagaucggcaccuccggcuccugccccaacgucaccaacggcaacggcuucuucgccaccauggccugggccguccccaagaacgacaagaacaagaccgccaccaacccccucaccaucgagguccccuacaucugcaccgagggcgaggaccagaucaccgucuggggcuuccacuccgacaacgagacccagauggccaagcucuacggcgacuccaagccccagaaguucaccuccuccgccaacggcgucaccacccacuacgucucccagaucggcggcuuccccaaccagaccgaggacggcggccucccccaguccggccgcaucgucgucgacuacaugguccagaaguccggcaagaccggcaccaucaccuaccagcgcggcauccuccucccccagcgcgucuggugcgccuccggccgcuccaaggucaucaagggcucccucccccucaucggcgaggccgacugccuccacgagaaguacggcggccucaacaaguccaagcccuacuacaccggcgagcacgccaaggccaucggcaacugccccaucugggucaagaccccccucaagcucgccaacggcaccaaguaccgcccccccgccaagcuccucaaggagcgcggcuucuucggcgccaucgccggcuuccucgagggcggcugggagggcaugaucgccggcuggcacggcuacaccucccacggcgcccacggcgucgccgucgccgccgaccucaaguccacccaggaggccaucaacaagaucaccaagaaccucaacucccucuccgagcucgaggucaagaaccuccagcgccucuccggcgccauggacgagcuccacaacgagauccucgagcucgacgagaaggucgacgaccuccgcgccgacaccaucuccucccagaucgagcucgccguccuccucuccaacgagggcaucaucaacuccgaggacgagcaccuccucgcccucgagcgcaagcucaagaagaugcucggccccuccgccgucgagaucggcaacggcugcuucgagaccaagcacaagugcaaccagaccugccucgaccgcaucgccgccggcaccuucgacgccggcgaguucucccuccccaccuucgacucccucaacaucaccgccgccucccucaacgacgacggccucgacaaccacaccauccuccucuacuacuccaccgccgccuccucccucgccgucacccucaugaucgccaucuucgucgucuacauggucucccgcgacaacgucuccugcuccaucugccucuga

SEQ ID NO: 123515 - RNA, 1758 nt, Artificial Sequence; identical to SEQ ID NO: 122644
  derived and/or modified CDS sequence (opt2) from hemagglutinin__InfluenzaB__AGX21271

SEQ ID NO: 123516 - RNA, 1758 nt, Artificial Sequence
  derived and/or modified CDS sequence (opt2) from hemagglutinin__InfluenzaB__AGX21282
augaaggccaucaucguccuccucauggucgucaccuccaacgccgaccgcaucugcaccggcaucaccuccuccaacuccccccacaucgucaagaccgccacccagggcgaggucaacgucaccggcgucaucccccucaccaccucccccaccaagucccacuucgccaaccucaagggcaccgagacccgcggcaagcucugccccaagugccucaacugcaccgaccucgacgucgcccucggccgccccaagugcaccggcaagauccccuccgcccgcgucuccauccuccacgagguccgccccgucaccuccggcugcuuccccaucaugcacgaccgcaccaagauccgccagcuccccaaccuccuccgcggcuacgagcacauccgccucuccacccacaacgucaucaacgccaagaacgcccccggcggccccuacaagaucggcaccuccggcuccugccccaacaucaccaacggcaacggcuucuucgccaccauggccugggccguccccaagaacgacaagaacaagaccgccaccaacccccucaccaucgagguccccuacaucugcaccgagggcgaggaccagaucaccgucuggggcuuccacuccgacaacgagacccagauggccaagcucuacggcgacuccaagccccagaaguucaccuccuccgccaacggcgucaccacccacuacgucucccagaucggcggcuuccccaaccagaccgaggacggcggccucccccaguccggccgcaucgucgucgacuacaugguccagaaguccggcaagaccggcaccaucaccuaccagcgcggcauccuccucccccagaaggucuggugcgccuccggccgcuccaaggucaucaagggcucccucccccucaucggcgaggccgacugccuccacgagaaguacggcggccucaacaaguccaagcccuacuacaccggcgagcacgccaaggccaucggcaacugccccaucugggucaagaccccccucaagcucgccaacggcaccaaguaccgcccccccgccaagcuccucaaggagcgcggcuucuucggcgccaucgccggcuuccucgagggcggcugggagggcaugaucgccggcuggcacggcuacaccucccacggcgcccacggcgucgccgucgccgccgaccucaaguccacccaggaggccaucaacaagaucaccaagaaccucaacucccucuccgagcucgaggucaagaaccuccagcgccucuccggcgccauggacgagcuccacaacgagauccucgagcucgacgagaaggucgacgaccuccgcgccgacaccaucuccucccagaucgagcucgccguccuccucuccaacgagggcaucaucaacuccgaggacgagcaccuccucgcccucgagcgcaagcucaagaagaugcucggccccuccgccgucgagaucggcaacggcugcuucgagaccaagcacaagugcaaccagaccugccucgaccgcaucgccgccggcaccuucgacgccggcgaguucucccuccccaccuucgacucccucaacaucaccgccgccucccucaacgacgacggccucgacaaccacaccauccuccucuacuacuccaccgccgccuccucccucgccgucacccucaugaucgccaucuucgucgucuacauggucucccgcgacaacgucuccugcuccaucugccucuga

SEQ ID NO: 123517 - RNA, 1758 nt, Artificial Sequence; identical to SEQ ID NO: 122681
  derived and/or modified CDS sequence (opt2) from hemagglutinin__InfluenzaB__AGX21293

SEQ ID NO: 123518 - RNA, 1758 nt, Artificial Sequence; identical to SEQ ID NO: 122719
  derived and/or modified CDS sequence (opt2) from hemagglutinin__InfluenzaB__AGX21304

SEQ ID NO: 123519 - RNA, 1758 nt, Artificial Sequence; identical to SEQ ID NO: 122681
  derived and/or modified CDS sequence (opt2) from hemagglutinin__InfluenzaB__AGX21315

SEQ ID NO: 123520 - RNA, 1758 nt, Artificial Sequence; identical to SEQ ID NO: 122644
  derived and/or modified CDS sequence (opt2) from hemagglutinin__InfluenzaB__AGX21326

SEQ ID NO: 123521 - RNA, 1758 nt, Artificial Sequence
  derived and/or modified CDS sequence (opt2) from hemagglutinin__InfluenzaB__AGX21337
augaaggccaucaucguccuccucauggucgucaccuccaacgccgaccgcaucugcaccggcaucaccuccuccaacuccccccacgucgucaagaccgccacccagggcgaggucaacgucaccggcgucaucccccucaccaccacccccaccaagucccacuucgccaaccucaagggcaccgagacccgcggcaagcucugccccaagugccccaacugcaccgaccucgacgucgcccucggccgccccaagugcaccggcaagauccccuccgcccgcgucuccauccuccacgagguccgccccgucaccuccggcugcuuccccaucaugcacgaccgcaccaagauccgccagcuccccaaccuccuccgcggcuacgagcacauccgccucuccacccacaacgucaucaacgccgagaacgcccccggcggccccuacaagaucggcaccuccggcuccugccccaacgucaccaacggcaacggcuucuucgccaccauggccugggccguccccaagaacgacaagaacaagaccgccaccaacccccucaccaucgagguccccuacaucugcaccgagggcgaggaccagaucaccgucuggggcuuccacuccgacaaggagacccagauggccaagcucuacggcgacuccaagccccagaaguucaccuccuccgccaacggcgucaccacccacuacgucucccagaucggcggcuuccccaaccagaccgaggacggcggccucccccaguccggccgcaucgucgucgacuacaugguccagaaguccggcaagaccggcaccaucaccuaccagcgcggcauccuccucccccagaaggucuggugcgccuccggccgcuccaaggucaucaagggcucccucccccucaucggcgaggccgacugccuccacgagaaguacggcggccucaacaaguccaagcccuacuacaccggcgagcacgccaaggccaucggcaacugccccaucugggucaagaccccccucaagcucgccaacggcaccaaguaccgcccccccgccaagcuccucaaggagcgcggcuucuucggcgccaucgccggcuuccucgagggcggcugggagggcaugaucgccggcuggcacggcuacaccucccacggcgcccacggcgucgccgucgccgccgaccucaaguccacccaggaggccaucaacaagaucaccaagaaccucaacucccucuccgagcucgaggucaagaaccuccagcgccucuccggcgccauggacgagcuccacaacgagauccucgagcucgacgagaaggucgacgaccuccgcgccgacaccaucuccucccagaucgagcucgccguccuccucuccaacgagggcaucaucaacuccgaggacgagcaccuccucgcccucgagcgcaagcucaagaagaugcucggccccuccgccgucgagaucggcaacggcugcuucgagaccaagcacaagugcaaccagaccugccucgaccgcaucgccgccggcaccuucgacgccggcgaguucucccuccccaccuucgacucccucaacaucaccgccgccucccucaacgacgacggccucgacaaccacaccauccuccucuacuacuccaccgccgccuccucccucgccgucacccucaugaucgccaucuucgucgucuacauggucucccgcgacaacgucuccugcuccaucugccucuga

SEQ ID NO: 123522 - RNA, 1758 nt, Artificial Sequence; identical to SEQ ID NO: 122681
  derived and/or modified CDS sequence (opt2) from hemagglutinin__InfluenzaB__AGX21348

SEQ ID NO: 123523 - RNA, 1758 nt, Artificial Sequence; identical to SEQ ID NO: 122681
  derived and/or modified CDS sequence (opt2) from hemagglutinin__InfluenzaB__AGX21359

SEQ ID NO: 123524 - RNA, 1758 nt, Artificial Sequence
  derived and/or modified CDS sequence (opt2) from hemagglutinin__InfluenzaB__AGX21370
augaaggccaucaucguccuccucauggucgucaccuccaacgccgaccgcaucugcaccggcaucaccuccuccaacuccccccacgucgucaagaccgccacccagggcgaggucaacgucaccggcgucaucccccucaccaccacccccaccaagucccacuucgccaaccucaagggcaccgagacccgcggcaagcucugccccaagugccccaacugcaccgaccucgacgucgcccucggccgccccaagugcaugggcaagauccccuccgcccgcgucuccauccuccacgagguccgccccgucaccuccggcugcuuccccaucaugcacgaccgcaccaagauccgccagcuccccaaccuccuccgcggcuacgagcacauccgccucuccacccacaacgucaucaacgccgagaacgcccccggcggccccuacaagaucggcaccuccggcuccugccccaacgucaccaacggcaacggcuucuucgccaccauggccugggccguccccaagaacgacaagaacaagaccgccaccaacccccucaccaucgagguccccuacaucugcaccgagggcgaggaccagaucaccgucuggggcuuccacuccgacaacgagacccagauggccaagcucuacggcgacuccaagccccagaaguucaccuccuccgccaacggcgucaccacccacuacgucucccagaucggcggcuuccccaaccagaccgaggacggcggccucccccaguccggccgcaucgucgucgacuacaugguccagaaguccggcaagaccggcaccaucaccuaccagcgcggcauccuccucccccagaaggucuggugcgccuccggccgcuccaaggucaucaagggcucccucccccucaucggcgaggccgacugccuccacgagaaguacggcggccucaacaaguccaagcccuacuacaccggcgagcacgccaaggccaucggcaacugccccaucugggucaagaccccccucaagcucgccaacggcaccaaguaccgcccccccgccaagcuccucaaggagcgcggcuucuucggcgccaucgccggcuuccucgagggcggcugggagggcaugaucgccggcuggcacggcuacaccucccacggcgcccacggcgucgccgucgccgccgaccucaaguccacccaggaggccaucaacaagaucaccaagaaccucaacucccucuccgagcucgaggucaagaaccuccagcgccucuccggcgccauggacgagcuccacaacgagauccucgagcucgacgagaaggucgacgaccuccgcgccgacaccaucuccucccagaucgagcucgccguccuccucuccaacgagggcaucaucaacuccgaggacgagcaccuccucgcccucgagcgcaagcucaagaagaugcucggccccuccgccgucgagaucggcaacggcugcuucgagaccaagcacaagugcaaccagaccugccucgaccgcaucgccgccggcaccuucgacgccggcgaguucucccuccccaccuucgacucccucaacaucaccgccgccucccucaacgacgacggccucgacaaccacaccauccuccucuacuacuccaccgccgccuccucccucgccgucacccucaugaucgccaucuucgucgucuacauggucucccgcgacaacgucuccugcuccaucugccucuga

SEQ ID NO: 123525 - RNA, 1758 nt, Artificial Sequence
  derived and/or modified CDS sequence (opt2) from hemagglutinin__InfluenzaB__AGX21381
augaaggccaucaucguccuccucauggucgucaccuccaacgccgaccgcaucugcaccggcaucaccuccuccaacuccccccacaucgucaagaccgccacccagggcgaggucaacgucaccggcgucaucccccucaccaccacccccaccaagucccacuucgccaaccucaagggcaccgagacccgcggcaagcucugccccaagugccucaacugcaccgaccucgacgucgcccucggccgccccaagugcaccggcaagauccccuccgcccgcgucuccauccuccacgagguccgccccgucaccuccggcugcuuccccaucaugcacgaccgcaccaagauccgccagcuccccaaccuccuccgcggcuacgagcacauccgccucuccacccacaacgucaucaacgccgagaacgcccccggcggccccuacaagaucggcaccuccggcuccugccccaacaucaccaacggcaacggcuucuucgccaccauggccugggccguccccaagaacgacaagaacaagaccgccaccaacccccucaccaucgagguccccuacaucugcaccgagggcgaggaccagaucaccgucuggggcuuccacuccgacaacgagacccagauggccaagcucuacggcgacuccaagccccagaaguucaccuccuccgccaacggcgucaccacccacuacaucucccagaucggcggcuuccccaaccagaccgaggacggcggccucccccaguccggccgcaucgucgucgacuacaugguccagaaguccggcaagaccggcaccaucaccuaccagcgcggcauccuccucccccagaaggucuggugcgccuccggccgcuccaaggucaucaagggcucccucccccucaucggcgaggccgacugccuccacgagaaguacggcggccucaacaaguccaagcccuacuacaccggcgagcacgccaaggccaucggcaacugccccaucugggucaagaccccccucaagcucgccaacggcaccaaguaccgcccccccgccaagcuccucaaggagcgcggcuucuucggcgccaucgccggcuuccucgagggcggcugggagggcaugaucgccggcuggcacggcuacaccucccacggcgcccacggcgucgccgucgccgccgaccucaaguccacccaggaggccaucaacaagaucaccaagaaccucaacucccucuccgagcucgaggucaagaaccuccagcgccucuccggcgccauggacgagcuccacaacgagauccucgagcucgacgagaaggucgacgaccuccgcgccgacaccaucuccucccagaucgagcucgccguccuccucuccaacgagggcaucaucaacuccgaggacgagcaccuccucgcccucgagcgcaagcucaagaagaugcucggccccuccgccgucgagaucggcaacggcugcuucgagaccaagcacaagugcaaccagaccugccucgaccgcaucgccgccggcaccuucgacgccggcgaguucucccuccccaccuucgacucccucaacaucaccgccgccucccucaacgacgacggccucgacaaccacaccauccuccucuacuacuccaccgccgccuccucccucgccgucacccucaugaucgccaucuucgucgucuacauggucucccgcgacaacgucuccugcuccaucugccucuga

SEQ ID NO: 123526 - RNA, 1758 nt, Artificial Sequence
  derived and/or modified CDS sequence (opt2) from hemagglutinin__InfluenzaB__AGX21392
augaaggccaucaucguccuccucauggucgucaccuccaacgccgaccgcaucugcaccggcaucaccuccuccaacuccccccacaucgucaagaccgccacccagggcgaggucaacgucaccggcgucaucccccucaccaccacccccaccaagucccacuucgccaaccucaagggcaccgagacccgcggcaagcucugccccaagugccucaacugcaccgaccucgacgucgcccucggccgccccaagugcaccggcaagauccccuccgcccgcgucuccauccuccacgagguccgccccgucaccuccggcugcuuccccaucaugcacgaccgcaccaagauccgccagcuccccaaccuccuccgcggcuacgagcacauccgccucuccacccacaacgucaucaacgccgagaacgcccccggcggccccuacaagaucggcaccuccggcuccugccccaacaucaccaacggcaacggcuucuucgccaccauggccugggccguccccaagaacgacaagaacaagaccgccaccaacccccucaccaucgagguccccuacaucugcaccgagggcgaggaccagaucaccgucuggggcuuccacuccgacaacgaggcccagauggccaagcucuacggcgacuccaagccccagaaguucaccuccuccgccaacggcgucaccacccacuacgucucccagaucggcggcuuccccaaccagaccgaggacggcggccucccccaguccggccgcaucgucgucgacuacaugguccagaaguccggcaagaccggcaccaucaccuaccagcgcggcauccuccucccccagaaggucuggugcgccuccggccgcuccaaggucaucaagggcucccucccccucaucggcgaggccgacugccuccacgagaaguacggcggccucaacaaguccaagcccuacuacaccggcgagcacgccaaggccaucggcaacugccccaucugggucaagaccccccucaagcucgccaacggcaccaaguaccgcccccccgccaagcuccucaaggagcgcggcuucuucggcgccaucgccggcuuccucgagggcggcugggagggcaugaucgccggcuggcacggcuacaccucccacggcgcccacggcgucgccgucgccgccgaccucaaguccacccaggaggccaucaacaagaucaccaagaaccucaacucccucuccgagcucgaggucaagaaccuccagcgccucuccggcgccauggacgagcuccacaacgagauccucgagcucgacgagaaggucgacgaccuccgcgccgacaccaucuccucccagaucgagcucgccguccuccucuccaacgagggcaucaucaacuccgaggacgagcaccuccucgcccucgagcgcaagcucaagaagaugcucggccccuccgccgucgagaucggcaacggcugcuucgagaccaagcacaagugcaaccagaccugccucgaccgcaucgccgccggcaccuucgacgccggcgaguucucccuccccaccuucgacucccucaacaucaccgccgccucccucaacgacgacggccucgacaaccacaccauccuccucuacuacuccaccgccgccuccucccucgccgucacccucaugaucgccaucuucgucgucuacauggucucccgcgacaacgucuccugcuccaucugccucuga

SEQ ID NO: 123527 - RNA, 1758 nt, Artificial Sequence
  derived and/or modified CDS sequence (opt2) from hemagglutinin__InfluenzaB__AGX21403
augaaggccaucaucguccuccucauggucgucaccuccaacgccgaccgcaucugcaccggcaucaccuccuccaacuccccccacgucgucaagaccgccacccagggcgaggucaacgucaccggcgucaucccccucaccaccacccccaccaagucccacuucgccaaccucaagggcaccgagacccgcggcaagcucugccccaagugccccaacugcaccgaccucgacgucgcccucggccgccccaagugcaccggcaagauccccuccgcccgcgucuccauccuccacgagguccgccccgucaccuccggcugcuuccccaucaugcacgaccgcaccaagauccgccagcuccccaaccuccuccgcggcuacgagcacauccgccucuccacccacaacgucaucaacgccgagaacgcccccggcggccccuacaagaucggcaccuccggcuccugccccaacgucaccaacggcaacggcuucuucgccaccauggccugggccguccccaagaacgacaagaacaagaccgccaccaacccccucaccaucgagguccccuacaucugcaccgagggcgaggaccagaucaccgucuggggcuuccacuccgacaacgagacccagauggccaagcucuacggcgacuccaagccccagaaguucaccuccuccgccaacggcgucaccacccacuacgucucccagaucggcggcuuccccaaccagaccgaggacggcggccucccccaguccggccgcaucgucgucgacuacaugguccagaaguccggcaagaccggcaccaucaccuaccagcgcggcauccuccucccccagaaggucuggugcgccuccggccgcuccaaggucaucaagggcucccucccccucaucggcgaggccgacugccuccacgagaaguacggcggccucaacaaguccaagcccuacuacaccggcgagcacgccaaggccaucggcaacugccccaucugggucaagaccccccucaagcucgccaacggcaccaaguaccgcccccccgccaagcuccucaaggagcgcggcuucuucggcgccaucgccggcuuccucgagggcggcugggagggcaugaucgccggcuggcacggcuacaccucccacggcgcccacggcgucgccgucgccgccgaccucaaguccacccaggaggccaucaacaagaucaccaagaaccucaacucccucuccgagcucgaggucaagaaccuccagcgccucuccggcgccauggacgagcuccacaacgagauccucgagcucgacgagaaggucgacgaccuccgcgccgacaccaucuccucccagaucgagcucgccguccuccucuccaacgagggcaucaucaacuccgaggacgagcaccuccucgcccucgagcgcaagcucaagaagaugcucggccccuccgccgucgagaucggcaacggcugcuucgagaccaagcacaagugcaaccagaccugccucaaccgcaucgccgccggcaccuucgacgccggcgaguucucccuccccaccuucgacucccucaacaucaccgccgccucccucaacgacgacggccucgacaaccacaccauccuccucuacuacuccaccgccgccuccucccucgccgucacccucaugaucgccaucuucgucgucuacauggucucccgcgacaacgucuccugcuccaucugccucuga

SEQ ID NO: 123528 - RNA, 1758 nt, Artificial Sequence
  derived and/or modified CDS sequence (opt2) from hemagglutinin__InfluenzaB__AGX21414
augaaggccaucaucguccuccucauggucgucaccuccaacgccgaccgcaucugcaccggcaucaccuccuccaacuccccccacgucgucaagaccgccacccagggcgaggucaacgucaccggcgucaucccccucaccaccacccccaccaagucccacuucgccaaccucaagggcaccgagacccgcggcaagcucugccccaagugccccaacugcaccgaccucgacgucgcccucggccgccccaagugcaccggcaagauccccuccgcccgcgucuccauccuccacgagguccgccccgucaccuccggcugcuuccccaucaugcacgaccgcaccaagauccgccagcuccccaaccuccuccgcggcuacgagcacauccgccucuccacccacaacgucaucaacgccgagaacgcccccggcggccccuacaagaucggcaccuccggcuccugccccaacgucaccaacggcaacggcuucuucgccaccauggccugggccguccccaagaacgacaagaacaagaccgccaccgacccccucaccaucgagguccccuacaucugcaccgagggcgaggaccagaucaccgucuggggcuuccacuccgacaacgagacccagauggccaagcucuacggcgacuccaagccccagaaguucaccuccuccuccaacggcgucaccacccacuacgucucccagaucggcggcuuccccaaccagaccgaggacggcggccucccccaguccggccgcaucgucgucgacuacaugguccagaaguccggcaagaccggcaccaucaccuaccagcgcggcauccuccucccccagaaggucuggugcgccuccggccgcuccaaggucaucaagggcucccucccccucaucggcgaggccgacugccuccacgagaaguacggcggccucaacaaguccaagcccuacuacaccggcgagcacgccaaggccaucggcaacugccccaucugggucaagaccccccucaagcucgccaacggcaccaaguaccgcccccccgccaagcuccucaaggagcgcggcuucuucggcgccaucgccggcuuccucgagggcggcugggagggcaugaucgccggcuggcacggcuacaccucccacggcgcccacggcgucgccgucgccgccgaccucaaguccacccaggaggccaucaacaagaucaccaagaaccucaacucccucuccgagcucgaggucaagaaccuccagcgccucuccggcgccauggacgagcuccacaacgagauccucgagcucgacgagaaggucgacgaccuccgcgccgacaccaucuccucccagaucgagcucgccguccuccucuccaacgagggcaucaucaacuccgaggacgagcaccuccucgcccucgagcgcaagcucaagaagaugcucggccccuccgccgucgagaucggcaacggcugcuucgagaccaagcacaagugcaaccagaccugccucgaccgcaucgccgccggcaccuucgacgccggcgaguucucccuccccaccuucgacucccucaacaucaccgccgccucccucaacgacgacggccucgacaaccacaccauccuccucuacuacuccaccgccgccuccucccucgccgucacccucaugaucgccaucuucgucgucuacauggucucccgcgacaacgucuccugcuccaucugccucuga

SEQ ID NO: 123529 - RNA, 1758 nt, Artificial Sequence; identical to SEQ ID NO: 122644
  derived and/or modified CDS sequence (opt2) from hemagglutinin__InfluenzaB__AGX21425

SEQ ID NO: 123530 - RNA, 1758 nt, Artificial Sequence
  derived and/or modified CDS sequence (opt2) from hemagglutinin__InfluenzaB__AGX21436
augaaggccaucaucguccuccucauggucgucaccuccaacgccgaccgcaucugcaccggcaucaccuccuccaacuccccccacaucgucaagaccgccacccagggcgaggucaacgucaccggcgucaucccccucaccaccacccccaccaagucccacuucgccaaccucaagggcaccgagacccgcggcaagcucugccccaagugccucaacugcaccgaccucgacgucgcccucggccgccccaagugcaccggcaagauccccuccgcccgcgucuccauccuccacgagguccgccccgucaccuccggcugcuuccccaucaugcacgaccgcaccaagauccgccagcuccccaaccuccuccgcggcuacgagcacauccgccucuccacccacaacgucaucaacgccgagaacgcccccggcggccccuacaagaucggcaccuccggcuccugccccaacaucaccaacggcaacggcuucuucgccaccauggccugggccguccccaagaacgacaagaacaagaccgccaccaacccccucaccaucgagguccccuacaucugcaccgagggcgaggaccagaucaccgucuggggcuuccacuccgacaacgagacccagauggccaagcucuacggcgacuccaagccccagaaguucaccuccuccgccaacggcgucaccacccacuacgucucccagaucggcggcuuccccaaccagaccgaggacggcggccucccccaguccggccgcaucgucgucgacuacaugguccagaaguccggcaagaccggcaccaucaccuaccagcgcggcauccuccucccccagaaggucuggugcgccuccggccgcuccaaggucaucaagggcucccucccccucaucggcgaggccgacugccuccacgagaaguacggcggccucaacaaguccaagcccuacuacaccggcgagcacgccaaggccaucggcaacugccccaucugggucaagaccccccucaagcucgccaacggcaccaaguaccgcccccccgccaagcuccucaaggagcgcggcuucuucggcgccaucgccggcuuccucgagggcggcugggagggcaugaucgccggcuggcacggcuacaccucccacggcgcccacggcgucgccgucgccgccgaccucaaguccacccaggaggccaucaacaagaucaccaagaaccucaacucccucuccgagcucgaggucaagaaccuccagcgccucuccggcgccauggacgagcuccacaacgagauccucgagcucgacgagaaggucgacgaccuccgcgccgacaccaucuccucccagaucgagcucgccguccuccucuccaacgagggcaucaucaacuccgaggacgagcaccuccucgcccucgagcgcaagcucaagaagaugcucggccccuccgccgucgagaucggcaacggcugcuucgagaccaagcacaagugcaaccagaccugccucgaccgcaucgccgccggcaccuucgacgccggcgaguucucccuccccaccuucgacucccucaacaucaccgccgccucccucaacgacgacggccucgacaaccacaccauccuccucuacuacuccaccgucgccuccucccucgccgucacccucaugaucgccaucuucgucgucuacauggucucccgcgacaacgucuccugcuccaucugccucuga

SEQ ID NO: 123531 - RNA, 1758 nt, Artificial Sequence; identical to SEQ ID NO: 122719
  derived and/or modified CDS sequence (opt2) from hemagglutinin__InfluenzaB__AGX21447

SEQ ID NO: 123532 - RNA, 1758 nt, Artificial Sequence; identical to SEQ ID NO: 122644
  derived and/or modified CDS sequence (opt2) from hemagglutinin__InfluenzaB__AGX21458

SEQ ID NO: 123533 - RNA, 1758 nt, Artificial Sequence; identical to SEQ ID NO: 122644
  derived and/or modified CDS sequence (opt2) from hemagglutinin__InfluenzaB__AGX21469

SEQ ID NO: 123534 - RNA, 1758 nt, Artificial Sequence
  derived and/or modified CDS sequence (opt2) from hemagglutinin__InfluenzaB__AGX21480
augaaggccaucaucguccuccucauggucgucaccuccaacgccgaccgcaucugcaccggcaucaccuccuccaacuccccccacgucgucaagaccgccacccagggcgaggucaacgucaccggcgucaucccccucaccaccacccccaccaagucccacuucgccaaccucaagggcaccgagacccgcggcaagcucugccccaagugccucaacugcaccgaccucgacgucgcccucggccgccccaagugcaccggcaagauccccuccgcccgcgucuccauccuccacgagguccgccccgucaccuccggcugcuuccccaucaugcacgaccgcaccaagauccgccagcuccccaaccuccuccgcggcuacgagcacauccgccucuccacccacaacgucaucaacgccgagaacgcccccggcggccccuacaagaucggcaccuccggcuccugccccaacgucaccaacggcaacggcuucuucgccaccauggccugggccguccccaagaacgacaagaacaagaccgccaccaacccccucaccaucgagguccccuacaucugcaccgagggcgaggaccagaucaccgucuggggcuuccacuccgacaacgagacccagauggccaagcucuacggcgacuccaagccccagaaguucaccuccuccgccaacggcgucaccacccacuacgucucccagaucggcggcuuccccaaccagaccgaggacggcggccucccccaguccggccgcaucgucgucgacuacaugguccagaaguccggcaagaccggcaccaucaccuaccagcgcggcauccuccucccccagaaggucuggugcgccuccggccgcuccaaggucaucaagggcucccucccccucaucggcgaggccgacugccuccacgagaaguacggcggccucaacaaguccaagcccuacuacaccggcgagcacgccaaggccaucggcaacugccccaucugggucaagaccccccucaagcucgccaacggcaccaaguaccgcccccccgccaagcuccucaaggagcgcggcuucuucggcgccaucgccggcuuccucgagggcggcugggagggcaugaucgccggcuggcacggcuacaccucccacggcgcccacggcgucgccgucgccgccgaccucaaguccacccaggaggccaucaacaagaucaccaagaaccucaacucccucuccgagcucgaggucaagaaccuccagcgccucuccggcgccauggacgagcuccacaacgagauccucgagcucgacgagaaggucgacgaccuccgcgccgacaccaucuccucccagaucgagcucgccguccuccucuccaacgagggcaucaucaacuccgaggacgagcaccuccucgcccucgagcgcaagcucaagaagaugcucggccccuccgccgucgagaucggcaacggcugcuucgagaccaagcacaagugcaaccagaccugccucgaccgcaucgccgccggcaccuucgacgccggcgaguucucccuccccaccuucgacucccucaacaucaccgccgccucccucaacgaggacggccucgacaaccacaccauccuccucuacuacuccaccgccgccuccucccucgccgucacccucaugaucgccaucuucgucgucuacauggucucccgcgacaacgucuccugcuccaucugccucuga

SEQ ID NO: 123535 - RNA, 1758 nt, Artificial Sequence; identical to SEQ ID NO: 122719
  derived and/or modified CDS sequence (opt2) from hemagglutinin__InfluenzaB__AGX21491

SEQ ID NO: 123536 - RNA, 1758 nt, Artificial Sequence; identical to SEQ ID NO: 122719
  derived and/or modified CDS sequence (opt2) from hemagglutinin__InfluenzaB__AGX21502

SEQ ID NO: 123537 - RNA, 1758 nt, Artificial Sequence; identical to SEQ ID NO: 122644
  derived and/or modified CDS sequence (opt2) from hemagglutinin__InfluenzaB__AGX21513

SEQ ID NO: 123538 - RNA, 1758 nt, Artificial Sequence; identical to SEQ ID NO: 122681
  derived and/or modified CDS sequence (opt2) from hemagglutinin__InfluenzaB__AGX21524

SEQ ID NO: 123539 - RNA, 1758 nt, Artificial Sequence
  derived and/or modified CDS sequence (opt2) from hemagglutinin__InfluenzaB__AGX21535
augaaggccaucaucguccuccucauggucgucaccuccaacgccgaccgcaucugcaccggcaucaccuccuccaacuccccccacaucgucaagaccgccacccagggcgaggucaacgucaccggcgucaucccccucaccaccacccccaccaagucccacuucgccaaccucaagggcaccgagacccgcggcaagcucugccccaagugccucaacugcaccgaccucgacgucgcccucggccgccccaagugcaccggcaagauccccuccgcccgcgucuccauccuccacgagguccgccccgucaccuccggcugcuuccccaucaugcacgaccgcaccaagauccgccagcuccccaaccuccuccgcggcuacgagcacauccgccucuccacccacaacgucaucaacgccgagaacgcccccggcggccccuacaagaucggcaccuccggcuccugccccaacaucaccaacggcaacggcuucuucgccaccauggccugggccguccccaagaacgacaagaacaagaccgccaccaacccccucaccaucgagguccccuacaucugcaccgagggcgaggaccagaucaccgucuggggcuuccacuccgacuccgagacccagauggccaagcucuacggcgacuccaagccccagaaguucaccuccuccgccaacggcgucaccacccacuacgucucccagaucggcggcuuccccaaccagaccgaggacggcggccucccccaguccggccgcaucgucgucgacuacaugguccagaaguccggcaagaccggcaccaucaccuaccagcgcggcauccuccucccccagaaggucuggugcgccuccggccgcuccaaggucaucaagggcucccucccccucaucggcgaggccgacugccuccacgagaaguacggcggccucaacaaguccaagcccuacuacaccggcgagcacgccaaggccaucggcaacugccccaucugggucaagaccccccucaagcucgccaacggcaccaaguaccgcccccccgccaagcuccucaaggagcgcggcuucuucggcgccaucgccggcuuccucgagggcggcugggagggcaugaucgccggcuggcacggcuacaccucccacggcgcccacggcgucgccgucgccgccgaccucaaguccacccaggaggccaucaacaagaucaccaagaaccucaacucccucuccgagcucgaggucaagaaccuccagcgccucuccggcgccauggacgagcuccacaacgagauccucgagcucgacgagaaggucgacgaccuccgcgccgacaccaucuccucccagaucgagcucgccguccuccucuccaacgagggcaucaucaacuccgaggacgagcaccuccucgcccucgagcgcaagcucaagaagaugcucggccccuccgccgucgagaucggcaacggcugcuucgagaccaagcacaagugcaaccagaccugccucgaccgcaucgccgccggcaccuucgacgccggcgaguucucccuccccaccuucgacucccucaacaucaccgccgccucccucaacgacgacggccucgacaaccacaccauccuccucuacuacuccaccgccgccuccucccucgccgucacccucaugaucgccaucuucgucgucuacauggucucccgcgacaacgucuccugcuccaucugccucuga

SEQ ID NO: 123540 - RNA, 1758 nt, Artificial Sequence; identical to SEQ ID NO: 122681
  derived and/or modified CDS sequence (opt2) from hemagglutinin__InfluenzaB__AGX21546

SEQ ID NO: 123541 - RNA, 1758 nt, Artificial Sequence
  derived and/or modified CDS sequence (opt2) from hemagglutinin__InfluenzaB__AGX21557
augaaggccaucaucguccuccucauggucgucaccuccaacgccgaccgcaucugcaccggcaucaccuccuccaacuccccccacgucgucaagaccgccacccagggcgaggucaacgucaccggcgucaucacccucaccaccacccccaccaagucccacuucgccaaccucaagggcaccgagacccgcggcaagcucugccccaagugccucaacugcaccgaccucgacgucgcccucggccgccccaagugcaccggcaagauccccuccgcccgcgucuccauccuccacgagguccgccccgucaccuccggcugcuuccccaucaugcacgaccgcaccaagauccgccagcuccccaaccuccuccgcggcuacgagcacauccgccucuccacccacaacgucaucaacgccgagaacgcccccggcggccccuacaagaucggcaccuccggcuccugccccaacgucaccaacggcaacggcuucuucgccaccauggccugggccguccccaagaacgacaagaacaagaccgccaccaacccccucaccaucgagguccccuacaucugcaccgagggcgaggaccagaucaccgucuggggcuuccacuccgacaacgagacccagauggccaagcucuacggcgacuccaagccccagaaguucaccuccuccgccaacggcgucaccacccacuacgucucccagaucggcggcuuccccaaccagaccgaggacggcggccucccccaguccggccgcaucgucgucgacuacaugguccagaaguccggcaagaccggcaccaucaccuaccagcgcggcauccuccucccccagaaggucuggugcgccuccggccgcuccaaggucaucaagggcucccucccccucaucggcgaggccgacugccuccacgagaaguacggcggccucaacaaguccaagcccuacuacaccggcgagcacgccaaggccaucggcaacugccccaucugggucaagaccccccucaagcucgccaacggcaccaaguaccgcccccccgccaagcuccucaaggagcgcggcuucuucggcgccaucgccggcuuccucgagggcggcugggagggcaugaucgccggcuggcacggcuacaccucccacggcgcccacggcgucgccgucgccgccgaccucaaguccacccaggaggccaucaacaagaucaccaagaaccucaacucccucuccgagcucgaggucaagaaccuccagcgccucuccggcgccauggacgagcuccacaacgagauccucgagcucgacgagaaggucgacgaccuccgcgccgacaccaucuccucccagaucgagcucgccguccuccucuccaacgagggcaucaucaacuccgaggacgagcaccuccucgcccucgagcgcaagcucaagaagaugcucggccccuccgccgucgagaucggcaacggcugcuucgagaccaagcacaagugcaaccagaccugccucgaccgcaucgccgccggcaccuucgacgccggcgaguucucccuccccaccuucgacucccucaacaucaccgccgccucccucaacgacgacggccucgacaaccacaccauccuccucuacuacuccaccgccgccuccucccucgccgucacccucaugaucgccaucuucgucgucuacauggucucccgcgacaacgucuccugcuccaucugccucuga

SEQ ID NO: 123542 - RNA, 1758 nt, Artificial Sequence
  derived and/or modified CDS sequence (opt2) from hemagglutinin__InfluenzaB__AGX21568
augaaggccaucaucguccuccucauggucgucaccuccaacgccgaccgcaucugcaccggcaucaccuccuccaacuccccccacgucgucaagaccgccacccagggcgaggucaacgucaccggcgucaucccccucaccaccacccccaccaagucccacuucgccaaccucaagggcaccgagacccgcggcaagcucugccccaagugccucaacugcaccgaccucgacgucgcccucggccgccccaagugcaccggcaagauccccuccgcccgcgucuccauccuccacgagguccgccccgucaccuccggcugcuuccccaugaugcacgaccgcaccaagauccgccagcuccccaaccuccuccgcggcuacgagcacauccgccucuccacccacaacgucaucaacgccgagaacgcccccggcggccccuacaagaucggcaccuccggcuccugccccaacgucaccaacggcaacggcuucuucgccaccauggccugggccguccccaagaacgacaagaacaagaccgccaccaacccccucaccaucgagguccccuacaucugcaccgagggcgaggaccagaucaccgucuggggcuuccacuccgacaacgagacccagauggccaagcucuacggcgacuccaagccccagaaguucaccuccuccgccaacggcgucaccacccacuacgucucccagaucggcggcuuccccaaccagaccgaggacggcggccucccccaguccggccgcaucgucgucgacuacaugguccagaaguccggcaagaccggcaccaucaccuaccagcgcggcauccuccucccccagaaggucuggugcgccuccggccgcuccaaggucaucaagggcucccucccccucaucggcgaggccgacugccuccacgagaaguacggcggccucaacaaguccaagcccuacuacaccggcgagcacgccaaggccaucggcaacugccccaucugggucaagaccccccucaagcucgccaacggcaccaaguaccgcccccccgccaagcuccucaaggagcgcggcuucuucggcgccaucgccggcuuccucgagggcggcugggagggcaugaucgccggcuggcacggcuacaccucccacggcgcccacggcgucgccgucgccgccgaccucaaguccacccaggaggccaucaacaagaucaccaagaaccucaacucccucuccgagcucgaggucaagaaccuccagcgccucuccggcgccauggacgagcuccacaacgagauccucgagcucgacgagaaggucgacgaccuccgcgccgacaccaucuccucccagaucgagcucgccguccuccucuccaacgagggcaucaucaacuccgaggacgagcaccuccucgcccucgagcgcaagcucaagaagaugcucggccccuccgccgucgagaucggcaacggcugcuucgagaccaagcacaagugcaaccagaccugccucgaccgcaucgccgccggcaccuucgacgccggcgaguucucccuccccaccuucgacucccucaacaucaccgccgccucccucaacgacgacggccucgacaaccacaccauccuccucuacuacuccaccgccgccuccucccucgccgucacccucaugaucgccaucuucgucgucuacauggucucccgcgacaacgucuccugcuccaucugccucuga

SEQ ID NO: 123543 - RNA, 1758 nt, Artificial Sequence; identical to SEQ ID NO: 122644
  derived and/or modified CDS sequence (opt2) from hemagglutinin__InfluenzaB__AGX21579

SEQ ID NO: 123544 - RNA, 1758 nt, Artificial Sequence; identical to SEQ ID NO: 122681
  derived and/or modified CDS sequence (opt2) from hemagglutinin__InfluenzaB__AGX21590

SEQ ID NO: 123545 - RNA, 1758 nt, Artificial Sequence; identical to SEQ ID NO: 123494
  derived and/or modified CDS sequence (opt2) from hemagglutinin__InfluenzaB__AGX21601

SEQ ID NO: 123546 - RNA, 1758 nt, Artificial Sequence; identical to SEQ ID NO: 122681
  derived and/or modified CDS sequence (opt2) from hemagglutinin__InfluenzaB__AGX21611

SEQ ID NO: 123547 - RNA, 1758 nt, Artificial Sequence; identical to SEQ ID NO: 123025
  derived and/or modified CDS sequence (opt2) from hemagglutinin__InfluenzaB__AGX21622

SEQ ID NO: 123548 - RNA, 1758 nt, Artificial Sequence
  derived and/or modified CDS sequence (opt2) from hemagglutinin__InfluenzaB__AGX21633
augaaggccaucaucguccuccucauggucgucaccuccaacgccgaccgcaucugcaccggcaucaccuccuccaacuccccccacaucgucaagaccgccacccagggcgaggucaacgucaccggcgucaucccccucaccaccacccccaccaagucccacuucgccaaccucaagggcaccgagacccgcggcaagcucugccccaagugccucaacugcaccgaccucgacgucgcccucggccgccccaagugcaccggcaagauccccuccgcccgcgucuccauccuccacgagguccgccccgucaccuccggcugcuuccccaucaugcacgaccgcaccaagauccgccagcuccccaaccuccuccgcggcuacgagcacauccgccucuccacccacaacgucaucaacgccgagaacgcccccggcggccccuacaagaucggcaccuccggcuccugccccaacaucaccaacggcaacggcuucuucgccaccauggccugggccguccccaagaacgacaagaacaagaccgccaccaacccccucaccaucgagguccccuacaucugcaccgagggcgaggaccagaucaccgucuggggcuuccacuccgacaacgagacccagauggccaagcucuacggcgacuccaagccccagaaguucaccuccuccgccaacggcgucaccacccacuacgucucccagaucggcggcuuccccaaccagaccgaggacggcggccucccccaguccggccgcaucgucgucgacuacaugguccagaaguccggcaagaccggcaccaucaccuaccagcgcggcauccuccucccccagaaggucuggugcgccuccggccgcuccaaggucaucaagggcucccucccccucaucggcgaggccgacugccuccacgagaaguacggcggccucaacaaguccaagcccuacuacaccggcgagcacgccaaggccaucggcaacugccccaucugggucaagaccccccucaagcucgccaacggcaccaaguaccgcccccccgcccgccuccucaaggagcgcggcuucuucggcgccaucgccggcuuccucgagggcggcugggagggcaugaucgccggcuggcacggcuacaccucccacggcgcccacggcgucgccgucgccgccgaccucaaguccacccaggaggccaucaacaagaucaccaagaaccucaacucccucuccgagcucgaggucaagaaccuccagcgccucuccggcgccauggacgagcuccacaacgagauccucgagcucgacgagaaggucgacgaccuccgcgccgacaccaucuccucccagaucgagcucgccguccuccucuccaacgagggcaucaucaacuccgaggacgagcaccuccucgcccucgagcgcaagcucaagaagaugcucggccccuccgccgucgagaucggcaacggcugcuucgagaccaagcacaagugcaaccagaccugccucgaccgcaucgccgccggcaccuucgacgccggcgaguucucccuccccaccuucgacucccucaacaucaccgccgccucccucaacgacgacggccucgacaaccacaccauccuccucuacuacuccaccgccgccuccucccucgccgucacccucaugaucgccaucuucgucgucuacauggucucccgcgacaacgucuccugcuccaucugccucuga

SEQ ID NO: 123549 - RNA, 1758 nt, Artificial Sequence; identical to SEQ ID NO: 122719
  derived and/or modified CDS sequence (opt2) from hemagglutinin__InfluenzaB__AGX21644

SEQ ID NO: 123550 - RNA, 1758 nt, Artificial Sequence; identical to SEQ ID NO: 122644
  derived and/or modified CDS sequence (opt2) from hemagglutinin__InfluenzaB__AGX21655

SEQ ID NO: 123551 - RNA, 1758 nt, Artificial Sequence
  derived and/or modified CDS sequence (opt2) from hemagglutinin__InfluenzaB__AGX21666
augaaggccaucaucguccuccucauggucgucaccuccaacgccgaccgcaucugcaccggcaucaccuccuccaacuccccccacgucgucaagaccgccacccagggcgaggucaacgucaccggcgucaucccccucaccaccacccccaccaagucccacuucgccaaccucaagggcaccgagacccgcggcaagcucugccccaagugccccaacugcaccgaccucgacgucgcccucggccgccccaagugcaccggcaagauccccuccgcccgcgucuccauccuccacgagguccgccccgucaccuccggcugcuuccccaucaugcacgaccgcaccaagauccgccagcuccccaaccuccuccgcggcuacgagcacauccgccucuccacccacaacgucaucaacgccgagaacgcccccggcggccccuacaagaucggcaccuccggcuccugccccaacgucaccaacggcaacggcuucuucgccaccauggccugggccguccccaagaacgacaagaacaagaccgccaccaacccccucaccaucgagguccccuacaucugcaccgagggcgaggaccagaucaccgucuggggcuuccacuccgacaacgagacccagauggccaagcucuacggcgacuccaagccccagaaguucaccuccuccgccaacggcgucaccacccacuacgucucccagaucggcggcuuccccaaccagaccgaggacggcggccucccccaguccggccgcaucgucgucgacuacaugguccagaaguccggcaagaccggcaccaucaccuaccagcgcggcauccuccucccccagaaggucuggugcgccuccggccgcuccaaggucaucaagggcucccucccccucaucggcgaggccgacugccuccacgagaaguacggcggccucaacaaguccaagcccuacuacaccggcgagcacgccaaggccaucggcaacugccccaucugggucaagaccccccucaagcucgccaacggcaccaaguaccgcccccccgccaagcuccucaaggagcgcggcuucuucggcgccaucgccggcuuccucgagggcggcugggagggcaugaucgccggcuggcacggcuacaccucccacggcgcccacggcgucgccgucgccgccgaccucaaguccacccaggaggccaucaacaagaucaccaagaaccucaacucccucuccgagcucgaggucaagaaccuccagcgccucuccggcgccauggacgagcuccacaacgagauccucgagcucgacgagaaggucgacgaccuccgcgccgacaccaucuccucccagaucgagcucgccguccuccucuccaacgagggcaucaucaacuccgaggacgagcaccuccucgcccucgagcgcaagcucaagaagaugcucggccccuccgccgucgagaucggcaacggcugcuucgagaccaagcacaagugcaaccagaccugccucgacaagaucgccgccggcaccuucgacgccggcgaguucucccuccccaccuucgacucccucaacaucaccgccgccucccucaacgacgacggccucgacaaccacaccauccuccucuacuacuccaccgccgccuccucccucgccgucacccucaugaucgccaucuucgucgucuacauggucucccgcgacaacgucuccugcuccaucugccucuga

SEQ ID NO: 123552 - RNA, 1758 nt, Artificial Sequence; identical to SEQ ID NO: 122719
  derived and/or modified CDS sequence (opt2) from hemagglutinin__InfluenzaB__AGX21677

SEQ ID NO: 123553 - RNA, 1758 nt, Artificial Sequence; identical to SEQ ID NO: 122644
  derived and/or modified CDS sequence (opt2) from hemagglutinin__InfluenzaB__AGX21688

SEQ ID NO: 123554 - RNA, 1758 nt, Artificial Sequence
  derived and/or modified CDS sequence (opt2) from hemagglutinin__InfluenzaB__AGX21699
augaaggccaucaucguccuccucauggucgucaccuccaacgccgaccgcaucugcaccggcaucaccuccuccaacuccccccacgucgucaagaccgccacccagggcgaggucaacgucaccggcgucaucccccucaccaccacccccaccaagucccacuucgccaaccucaagggcaccgagacccgcggcaagcucugccccaagugccucaacugcaccgaccucgacgucgcccucggccgccccaagugcaccggcaagauccccuccgcccgcgucuccauccuccacgagguccgccccgucaccuccggcugcuuccccaucaugcacgaccgcaccaagauccgccagcuccccaaccuccuccgcggcuacgagcacauccgccucuccacccacaacgucaucaacgccgagaacgcccccggcggccccuacaagaucggcaccuccggcuccugccccaacgucaccaacggcaacggcuucuucgccaccauggccugggccguccccaagaacgacaagaacaagaccgccaccaacccccucaccaucgagguccccuacaucugcaccgagggcgaggaccagaucaccgucuggggcuuccacuccgacaacgagacccagauggccaagcucuacggcgacuccaagccccagaaguucaccuccuccgccaacggcgucaccacccacuacgucucccagaucggcggcuuccccaaccagaccgaggacggcggccucccccaguccggccgcaucgucgucgacuacaugguccagaaguccggcaagaccggcaccaucaccuaccagcgcggcauccuccucccccagaaggucuggugcgccuccggccgcuccaaggucaucaagggcucccucccccucaucggcgaggccgacugccuccacgagaaguacggcggccucaacaaguccaagcccuacuacaccggcgagcacgccaaggccaucggcaacugccccaucugggucaagaccccccucaaccucgccaacggcaccaaguaccgcccccccgccaagcuccucaaggagcgcggcuucuucggcgccaucgccggcuuccucgagggcggcugggagggcaugaucgccggcuggcacggcuacaccucccacggcgcccacggcgucgccgucgccgccgaccucaaguccacccaggaggccaucaacaagaucaccaagaaccucaacucccucuccgagcucgaggucaagaaccuccagcgccucuccggcgccauggacgagcuccacaacgagauccucgagcucgacgagaaggucgacgaccuccgcgccgacaccaucuccucccagaucgagcucgccguccuccucuccaacgagggcaucaucaacuccgaggacgagcaccuccucgcccucgagcgcaagcucaagaagaugcucggccccuccgccgucgagaucggcaacggcugcuucgagaccaagcacaagugcaaccagaccugccucgaccgcaucgccgccggcaccuucgacgccggcgaguucucccuccccaccuucgacucccucaacaucaccgccgccucccucuccgacgacggccucgacaaccacaccauccuccucuacuacuccaccgccgccuccucccucgccgucacccucaugaucgccaucuucgucgucuacauggucucccgcgacaacgucuccugcuccaucugccucuga

SEQ ID NO: 123555 - RNA, 1758 nt, Artificial Sequence; identical to SEQ ID NO: 123494
  derived and/or modified CDS sequence (opt2) from hemagglutinin__InfluenzaB__AGX21710

SEQ ID NO: 123556 - RNA, 1758 nt, Artificial Sequence; identical to SEQ ID NO: 122719
  derived and/or modified CDS sequence (opt2) from hemagglutinin__InfluenzaB__AGX21721

SEQ ID NO: 123557 - RNA, 1755 nt, Artificial Sequence
  derived and/or modified CDS sequence (opt2) from hemagglutinin__InfluenzaB__AGX21732
augaaggccaucaucguccuccucauggucgucaccuccaacgccgaccgcaucugcaccggcaucaccuccuccaacuccccccacgucgucaagaccgccacccagggcgaggucaacgucaccggcgccaucccccucaccaccacccccaccaagucccacuucgccaaccucaagggcaccaagacccgcggcaagcucugccccaccugccucaacugcaccgaccucgacgucgcccucggcggccccaugugcgucggcaucacccccuccgccaaggccuccauccuccacgagguccgccccgucaccuccggcugcuuccccaucaugcacgaccgcaccaagauccgccagcuccccaaccuccuccgcggcuacgagaagauccgccucuccgcccagaacgucaucaacgccgagaaggcccccggcggccccuacaagcucggcaccuccggcuccugccccaacgccaccuccaaguccggcuucuucgccaccauggccugggccgucccccgcgacgacaacaagaccgccaccaacccccucaccgucgaggucccccacaucugcgccaacgaggaggaccagaucaccgucuggggcuuccacuccgacaacaagacccagaugaagaaccucuacggcgacuccaacccccagaaguucaccuccuccgccaacggcaucaccacccacuacgucucccagaucggcggcuuccccgaccagaccgaggacggcggccucccccaguccggccgcaucgucgucgacuacaugguccagaagcccggcaagaccggcaccaucgucuaccagcgcggcauccuccucccccagaaggucuggugcgccuccggccgcuccaaggucaucaagggcucccucccccucaucggcgaggccgacugccuccacgagaaguacggcggccucaacaaguccaagcccuacuacaccggcgagcacgccaaggccaucggcaacugccccaucugggucaagaccccccucaagcucgccaacggcaccaaguaccgcccccccgccaagcuccucaaggagcgcggcuucuucggcgccaucgccggcuuccucgagggcggcugggagggcaugaucgccggcuggcacggcuacaccucccacggcgcccacggcgucgccgucgccgccgaccucaaguccacccaggaggccaucaacaagaucaccaagaaccucaacucccucuccgagcucgaggucaagaaccuccagcgccucuccggcgccauggacgagcuccacaacgagauccucgagcucgacgagaaggucgacgaccuccgcgccgacaccaucuccucccagaucgagcucgccguccuccucuccaacgagggcaucaucaacuccgaggacgagcaccuccucgcccucgagcgcaagcucaagaagaugcucggccccuccgccgucgacaucggcaacggcugcuucgagaccaagcacaagugcaaccagaccugccucgaccgcaucgccgccggcaccuucaacgccggcgaguucucccuccccaccuucgacucccucaacaucaccgccgccucccucaacgacgacggccucgacaaccacaccauccuccucuacuacuccaccgccgccuccucccucgccgucacccucaugaucgccaucuucaucgucuacaugaucucccgcgacaacgucuccugcuccaucugccucuga

SEQ ID NO: 123558 - RNA, 1755 nt, Artificial Sequence
  derived and/or modified CDS sequence (opt2) from hemagglutinin__InfluenzaB__AGX21743
augaaggccaucaucguccuccucauggucgucaccuccaacgccgaccgcaucugcaccggcaucaccuccuccaacuccccccacgucgucaagaccgccacccagggcgaggucaacgucaccggcgucaucccccucaccaccacccccaccaagucccacuucgccaaccucaagggcacccgcacccgcggcaagcucugccccgacugccucaacugcaccgaccucgacgucgcccucggccgccccaugugcgucggcaccacccccuccgccaaggccuccauccuccacgagguccgccccgucaccuccggcugcuuccccaucaugcacgaccgcaccaagauccgccagcuccccaaccuccuccgcggcuacgagaacauccgccucuccacccagaacgucaucgacgccgagaaggcccucggcggccccuaccgccucggcaccuccggcuccugccccaacgccaccuccaaguccggcuucuucgccaccauggccugggccguccccaaggacaacaacaagaacgccaccaacccccucaccgucgagguccccuacaucugcaccgagggcgaggaccagaucaccgucuggggcuuccacuccgacaacaagacccagaugaagaaccucuacggcgacuccaacccccagaaguucaccuccuccgccaacggcgucaccacccacuacgucucccagaucggcggcuuccccgaccagaccgaggacggcggccucccccaguccggccgcaucgucgucgacuacaugguccagaagcccggcaagaccggcaccaucgucuaccagcgcggcguccuccucccccagaaggucuggugcgccuccggcaaguccaaggucaucaagggcucccucccccucaucggcgaggccgacugccuccacgagaaguacggcggccucaacaaguccaagcccuacuacaccggcgagcacgccaaggccaucggcaacugccccaucugggucaagaccccccucaagcucgccaacggcaccaaguaccgcccccccgccaagcuccucaaggagcgcggcuucuucggcgccaucgccggcuuccucgagggcggcugggagggcaugaucgccggcuggcacggcuacaccucccacggcgcccacggcgucgccgucgccgccgaccucaaguccacccaggaggccaucaacaagaucaccaagaaccucaacucccucuccgagcucgaggucaagaaccuccagcgccucuccggcgccauggacgagcuccacaacgagauccucgagcucgacgagaaggucgacgaccuccgcgccgacaccaucuccucccagaucgagcucgccguccuccucuccaacgagggcaucaucaacuccgaggacgagcaccuccucgcccucgagcgcaagcucaagaagaugcucggccccuccgccgucgacaucggcaacggcugcuucgagaccaagcacaagugcaaccagaccugccucgaccgcaucgccgccggcaccuucaacgccggcgaguucucccuccccaccuucgacucccucaacaucaccgccgccucccucaacgacgacggccucgacaaccacaccauccuccucuacuacuccaccgccgccuccucccucgccgucacccucaugcucgccaucuucaucgucuacauggucucccgcgacaacgucuccugcuccaucugccucuga

SEQ ID NO: 123559 - RNA, 1755 nt, Artificial Sequence
  derived and/or modified CDS sequence (opt2) from hemagglutinin__InfluenzaB__AGX21754
augaaggccaucaucguccuccucauggucgucaccuccaacgccgaccgcaucugcaccggcaucaccuccuccaacuccccccacgucgucaagaccgccacccagggcgaggucaacgucaccggcgccaucccccucaccaccacccccgccaagucccacuucgccaaccucaagggcaccaagacccgcggcaagcucugccccaccugccucaacugcaccgaccucgacgucgcccucggcggccccaugugcgucggcaucacccccuccgccaaggccuccauccuccacgagguccgccccgucaccuccggcugcuuccccaucaugcacgaccgcaccaagauccgccagcuccccaaccuccuccgcggcuacgagaagauccgccucuccgcccagaacgucaucaacgccgagaaggcccccggcggccccuacaagcucggcaccuccggcuccugccccaacgccaccuccaaguccggcuucuucgccaccauggccugggccgucccccgcgacgacaacaagaccgccaccaacccccucaccgucgaggucccccacaucugcgccaacgaggaggaccagaucaccgucuggggcuuccacuccgacaacaagacccagaugaagaaccucuacggcgacuccaacccccagaaguucaccuccuccgccaacggcaucaccacccacuacgucucccagaucggcggcuuccccgaccagaccgaggacggcggccucccccaguccggccgcaucgucgucgacuacaugguccagaagcccggcaagaccggcaccaucgucuaccagcgcggcauccuccucccccagaaggucuggugcgccuccggccgcuccaaggucaucaagggcucccucccccucaucggcgaggccgacugccuccacgagaaguacggcggccucaacaaguccaagcccuacuacaccggcgagcacgccaaggccaucggcaacugccccaucugggucaagaccccccucaagcucgccaacggcaccaaguaccgcccccccgccaagcuccucaaggagcgcggcuucuucggcgccaucgccggcuuccucgagggcggcugggagggcaugaucgccggcuggcacggcuacaccucccacggcgcccacggcgucgccgucgccgccgaccucaaguccacccaggaggccaucaacaagaucaccaagaaccucaacucccucuccgagcucgaggucaagaaccuccagcgccucuccggcgccauggacgagcuccacaacgagauccucgagcucgacgagaaggucgacgaccuccgcgccgacaccaucuccucccagaucgagcucgccguccuccucuccaacgagggcaucaucaacuccgaggacgagcaccuccucgcccucgagcgcaagcucaagaagaugcucggccccuccgccgucgacaucggcaacggcugcuucgagaccaagcacaagugcaaccagaccugccucgaccgcaucgccgccggcaccuucaacgccggcgaguucucccuccccaccuucgacucccucaacaucaccgccgccucccucaacgacgacggccucgacaaccacaccauccuccucuacuacuccaccgccgccuccucccucgccgucacccucaugaucgccaucuucaucgucuacaugaucucccgcgacaacgucuccugcuccaucugccucuga

SEQ ID NO: 123560 - RNA, 1755 nt, Artificial Sequence
  derived and/or modified CDS sequence (opt2) from hemagglutinin__InfluenzaB__AGX21776
augaaggccaucaucguccuccucauggucgucaccuccaacgccgaccgcaucugcaccggcaucaccuccuccaacuccccccacgucgucaagaccgccacccagggcgaggucaacgucaccggcgucaucccccucaccaccacccccaccaaguccuacuucgccaaccucaagggcacccgcacccgcggcaagcucugccccgacugccucaacugcaccgaccucgacgucgcccucggccgccccaugugcgucggcaucacccccuccgccaaggccuccauccuccacgagguccgccccgucaccuccggcugcuuccccaucaugcacgaccgcaccaagauccgccagcuccccaaccuccuccgcggcuacgagaacauccgccucuccacccagaacgucaucgacgccgagaaggcccccggcggccccuaccgccucggcaccuccggcuccugccccaacgccaccuccaaguccggcuucuucgccaccauggccugggccguccccaaggacaacaacaagaacgccaccaacccccucaccgucgagguccccuacgucugcaccgagggcgaggaccagaucaccgucuggggcuuccacuccgacaacaagacccagaugaagaaccucuacggcgacuccaacccccagaaguucaccuccuccgccaacggcgucaccacccacuacgucucccagaucggcggcuuccccgaccagaccgaggacggcggccucccccaguccggccgcaucgucgucgacuacaugguccagaagcccggcaagaccggcaccaucgucuaccagcgcggcguccuccucccccagaaggucuggugcgccuccggccgcuccaaggucaucaagggcucccucccccucaucggcgaggccgacugccuccacgagaaguacggcggccucaacaaguccaagcccuacuacaccggcgagcacgccaaggccaucggcaacugccccaucugggucaagaccccccucaagcucgccaacggcaccaaguaccgcccccccgccaagcuccucaaggagcgcggcuucuucggcgccaucgccggcuuccucgagggcggcugggagggcaugaucgccggcuggcacggcuacaccucccacggcgcccacggcgucgccgucgccgccgaccucaaguccacccaggaggccaucaacaagaucaccaagaaccucaacucccucuccgagcucgaggucaagaaccuccagcgccucuccggcgccauggacgagcuccacaacgagauccucgagcucgacgagaaggucgacgaccuccgcgccgacaccaucuccucccagaucgagcucgccguccuccucuccaacgagggcaucaucaacuccgaggacgagcaccuccucgcccucgagcgcaagcucaagaagaugcucggccccuccgccgucgacaucggcaacggcugcuucgagaccaagcacaagugcaaccagaccugccucgaccgcaucgccgccggcaccuucaacgccggcgaguucucccuccccaccuucgacucccucaacaucaccgccgccucccucaacgacgacggccucgacaaccacaccauccuccucuacuacuccaccgccgccuccucccucgccgucacccucaugcucgccaucuucaucgucuacauggucucccgcgacaacgucuccugcuccaucugccucuga

SEQ ID NO: 123561 - RNA, 1758 nt, Artificial Sequence; identical to SEQ ID NO: 123015
  derived and/or modified CDS sequence (opt2) from hemagglutinin__InfluenzaB__AGX21787

SEQ ID NO: 123562 - RNA, 1755 nt, Artificial Sequence
  derived and/or modified CDS sequence (opt2) from hemagglutinin__InfluenzaB__AGX21798
augaaggccaucaucguccuccucauggucgucaccuccaacgccgaccgcaucugcaccggcaucaccuccuccaacuccccccacgucgucaagaccgccacccagggcgaggucaacgucaccggcgucaucccccucaccaccacccccaccaaguccuacuucgccaaccucaagggcacccgcacccgcggcaagcucugccccgacugccucaacugcaccgaccucgacgucgcccucggccgccccaugugcgucggcaccacccccuccgccaaggccuccauccuccacgagguccgccccgucaccuccggcugcuuccccaucaugcacgaccgcaccaagauccgccagcuccccaaccuccuccgcggcuacgagaacauccgccucuccacccagaacgucaucgacgccgagaaggcccccggcggccccuaccgccucggcaccuccggcuccugccccaacgccaccuccaaguccggcuucuucgccaccauggccugggccguccccaaggacaacaacaagaacgccaccaacccccucaccgucgagguccccuacgucugcaccgagggcgaggaccagaucaccgucuggggcuuccacuccgacaacaagacccagaugaagaaccucuacggcgacuccaacccccagaaguucaccuccuccgccaacggcgucaccacccacuacgucucccagaucggcggcuuccccgaccagaccgaggacggcggccucccccaguccggccgcaucgucgucgacuacaugguccagaagcccggcaagaccggcaccaucgucuaccagcgcggcguccuccucccccagaaggucuggugcgccuccggccgcuccaaggucaucaagggcucccucccccucaucggcgaggccgacugccuccacgagaaguacggcggccucaacaaguccaagcccuacuacaccggcgagcacgccaaggccaucggcaacugccccaucugggucaagaccccccucaagcucgccaacggcaccaaguaccgcccccccgccaagcuccucaaggagcgcggcuucuucggcgccaucgccggcuuccucgagggcggcugggagggcaugaucgccggcuggcacggcuacaccucccacggcgcccacggcgucgccgucgccgccgaccucaaguccacccaggaggccaucaacaagaucaccaagaaccucaacucccucuccgagcucgaggucaagaaccuccagcgccucuccggcgccauggacgagcuccacaacgagauccucgagcucgacgagaaggucgacgaccuccgcgccgacaccaucuccucccagaucgagcucgccguccuccucuccaacgagggcaucaucaacuccgaggacgagcaccuccucgcccucgagcgcaagcucaagaagaugcucggccccuccgccgucgacaucggcaacggcugcuucgagaccaagcacaagugcaaccagaccugccucgaccgcaucgccgccggcaccuucaacgccggcgaguucucccuccccaccuucgacucccucaacaucaccgccgccucccucaacgacgacggccucgacaaccacaccauccuccucuacuacuccaccgccgccuccucccucgccgucacccucaugcucgccaucuucaucgucuacauggucucccgcgacaacgucuccugcuccaucugccucuga

SEQ ID NO: 123563 - RNA, 1755 nt, Artificial Sequence
  derived and/or modified CDS sequence (opt2) from hemagglutinin__InfluenzaB__AGX21809
augaaggccaucaucguccuccucauggucgucaccuccaacgccgaccgcaucugcaccggcaucaccuccuccaacuccccccacgucgucaagaccgccacccagggcgaggucaacgucaccggcgucaucccccucaccaccacccccaccaaguccuacuucgccaaccucaagggcacccgcacccgcggcaagcucugccccgacugccucaacugcaccgaccucgacgucgcccucggccgccccaugugcgucggcaccacccccuccgccaaggccuccauccuccacgagguccgccccgucaccuccggcugcuuccccaucaugcacgaccgcaccaagauccgccagcuccccaaccuccuccgcggcuacgagaacauccgccucuccacccagaacgucaucgacgccgagaaggcccccggcggccccuaccgccucggcaccuccggcuccugccccaacgccaccuccaaguccggcuucuucgccaccauggccugggccguccccaaggacaacaacaagaacgccaccaacccccucaccgucgagguccccuacgucugcaccgagggcgaggaccagaucaccgucuggggcuuccacuccgacaacaagacccagaugaagaaccucuacggcgacuccaacccccagaaguucaccuccuccgccaacggcgucaccacccacuacgucucccagaucggcggcuuccccgaccagaccgaggacggcggccucccccaguccggccgcaucgucgucgacuacaugguccagaagcccggcaagaccggcaccaucgucuaccagcgcggcguccuccucccccagaaggucuggugcgccuccggccgcuccaaggucaucaagggcucccucccccucaucggcgaggccgacugccuccacgagaaguacggcggccucaacaagucccgccccuacuacaccggcgagcacgccaaggccaucggcaacugccccaucugggucaagaccccccucaagcucgccaacggcaccaaguaccgcccccccgccaagcuccucaaggagcgcggcuucuucggcgccaucgccggcuuccucgagggcggcugggagggcaugaucgccggcuggcacggcuacaccucccacggcgcccacggcgucgccgucgccgccgaccucaaguccacccaggaggccaucaacaagaucaccaagaaccucaacucccucuccgagcucgaggucaagaaccuccagcgccucuccggcgccauggacgagcuccacaacgagauccucgagcucgacgagaaggucgacgaccuccgcgccgacaccaucuccucccagaucgagcucgccguccuccucuccaacgagggcaucaucaacuccgaggacgagcaccuccucgcccucgagcgcaagcucaagaagaugcucggccccuccgccgucgacaucggcaacggcugcuucgagaccaagcacaagugcaaccagaccugccucgaccgcaucgccgccggcaccuucaacgccggcgaguucucccuccccaccuucgacucccucaacaucaccgccgccucccucaacgacgacggccucgacaaccacaccauccuccucuacuacuccaccgccgccuccucccucgccgucacccucaugcucgccaucuucaucgucuacauggucucccgcgacaacgucuccugcuccaucugccucuga

SEQ ID NO: 123564 - RNA, 1755 nt, Artificial Sequence
  derived and/or modified CDS sequence (opt2) from hemagglutinin__InfluenzaB__AGX21820
augaaggccaucaucguccuccucauggucgucaccuccaacgccgaccgcaucugcaccggcaucaccuccuccaacuccccccacgucgucaagaccgccacccagggcgaggucaacgucaccggcgucaucccccucaccaccacccccaccaaguccuacuucgccaaccucaagggcacccgcacccgcggcaagcucugccccgacugccucaacugcaccgaccucgacgucgcccucggccgccccaugugcgucggcaccacccccuccgccaaggccuccauccuccacgagguccgccccgucaccuccggcugcuuccccaucaugcacgaccgcaccaagauccgccagcuccccaaccuccuccgcggcuacgagaacauccgccucuccacccagaacgucaucgacgccgagaaggcccccggcggccccuaccgccucggcaccuccggcuccugccccaacgccaccaacaaguccggcuucuucgccaccauggccugggccguccccaaggacaacaacaagaacgccaccaacccccucaccgucgagguccccuacaucugcaccgagggcgaggaccagaucaccgucuggggcuuccacuccgacaacaagacccagaugaagaaccucuacggcgacuccaacccccagaaguucaccuccuccgccaacggcgucaccacccacuacgucucccagaucggcggcuuccccgaccagaccgaggacggcggccucccccaguccggccgcaucgucgucgacuacaugaugcagaagcccggcaagaccggcaccaucgucuaccagcgcggcguccuccucccccagaaggucuggugcgccuccggccgcuccaaggucaucaagggcucccucccccucaucggcgaggccgacugccuccacgagaaguacggcggccucaacaaguccaagcccuacuacaccggcgagcacgccaaggccaucggcaacugccccaucugggucaagaccccccucaagcucgccaacggcaccaaguaccgcccccccgccaagcuccucaaggagcgcggcuucuucggcgccaucgccggcuuccucgagggcggcugggagggcaugaucgccggcuggcacggcuacaccucccacggcgcccacggcgucgccgucgccgccgaccucaaguccacccaggaggccaucaacaagaucaccaagaaccucaacucccucuccgagcucgaggucaagaaccuccagcgccucuccggcgccauggacgagcuccacaacgagauccucgagcucgacgagaaggucgacgaccuccgcgccgacaccaucuccucccagaucgagcucgccguccuccucuccaacgagggcaucaucaacuccgaggacgagcaccuccucgcccucgagcgcaagcucaagaagaugcucggccccuccgccgucgacaucggcaacggcugcuucgagaccaagcacaagugcaaccagaccugccucgaccgcaucgccgccggcaccuucaacgccggcgaguucucccuccccaccuucgacucccucaacaucaccgccgccucccucaacgacgacggccucgacaaccacaccauccuccucuacuacuccaccgccgccuccucccucgccgucacccucaugcucgccaucuucaucgucuacauggucucccgcgacaacgucuccugcuccaucugccucuga

SEQ ID NO: 123565 - RNA, 1755 nt, Artificial Sequence; identical to SEQ ID NO: 123059
  derived and/or modified CDS sequence (opt2) from hemagglutinin__InfluenzaB__AGX21831

SEQ ID NO: 123566 - RNA, 1755 nt, Artificial Sequence; identical to SEQ ID NO: 123062
  derived and/or modified CDS sequence (opt2) from hemagglutinin__InfluenzaB__AGX21842

SEQ ID NO: 123567 - RNA, 1755 nt, Artificial Sequence; identical to SEQ ID NO: 123062
  derived and/or modified CDS sequence (opt2) from hemagglutinin__InfluenzaB__AGX21853

SEQ ID NO: 123568 - RNA, 1755 nt, Artificial Sequence
  derived and/or modified CDS sequence (opt2) from hemagglutinin__InfluenzaB__AGX21864
augaaggccaucaucguccuccucauggucgucaccuccaacgccgaccgcaucugcaccggcaucaccuccuccaacuccccccacgucgucaagaccgccacccagggcgaggucaacgucaccggcgucaucccccucaccaccacccccaccaaguccuacuucgccaaccucaagggcacccgcacccgcggcaagcucugccccgacugccucaacugcaccgaccucgacgucgcccucggccgccccaugugcgucggcaccacccccuccgccaaggccuccauccuccacgagguccgccccgucaccuccggcugcuuccccaucaugcacgaccgcaccaagauccgccagcuccccaaccuccuccgcggcuacgagaacauccgccucuccaaccagaacgucaucgacgccgagaaggcccccggcggccccuaccgccucggcaccuccggcuccugccccaacgccaccuccaaguccggcuucuucgccaccauggccugggccguccccaaggacaacaacaagaacgccaccaacccccucaccgucgagguccccuacaucugcaccgagggcgaggaccagaucaccgucuggggcuuccacuccgacaacaagacccagaugaagaaccucuacggcgacuccaacccccagaaguucaccuccuccgccaacggcgucaccacccacuacgucucccagaucggcggcuuccccgaccagaccgaggacggcggccucccccaguccggccgcaucgucgucgacuacaugaugcagaagcccggcaagaccggcaccaucgucuaccagcgcggcguccuccucccccagaaggucuggugcgccuccggccgcuccaaggucaucaagggcucccucccccucaucggcgaggccgacugccuccacgagaaguacggcggccucaacaaguccaagcccuacuacaccggcgagcacgccaaggccaucggcaacugccccaucugggucaagaccccccucaagcucgccaacggcaccaaguaccgcccccccgccaagcuccucaaggagcgcggcuucuucggcgccaucgccggcuuccucgagggcggcugggagggcaugaucgccggcuggcacggcuacaccucccacggcgcccacggcgucgccgucgccgccgaccucaaguccacccaggaggccaucaacaagaucaccaagaaccucaacucccucuccgagcucgaggucaagaaccuccagcgccucuccggcgccauggacgagcuccacaacgagauccucgagcucgacgagaaggucgacgaccuccgcgccgacaccaucuccucccagaucgagcucgccguccuccucuccaacgagggcaucaucaacuccgaggacgagcaccuccucgcccucgagcgcaagcucaagaagaugcucggccccuccgccgucgacaucggcaacggcugcuucgagaccaagcacaagugcaaccagaccugccucgaccgcaucgccgccggcaccuucaacgccggcgaguucucccuccccaccuucgacucccucaacaucaccgccgccucccucaacgacgacggccucgacaaccacaccauccuccucuacuacuccaccgccgccuccucccucgccgucacccucaugcucgccaucuucaucgucuacauggucucccgcgacaacgucuccugcuccaucugccucuga

SEQ ID NO: 123569 - RNA, 1755 nt, Artificial Sequence; identical to SEQ ID NO: 123060
  derived and/or modified CDS sequence (opt2) from hemagglutinin__InfluenzaB__AGX21875

SEQ ID NO: 123570 - RNA, 1755 nt, Artificial Sequence; identical to SEQ ID NO: 123059
  derived and/or modified CDS sequence (opt2) from hemagglutinin__InfluenzaB__AGX21886

SEQ ID NO: 123571 - RNA, 1755 nt, Artificial Sequence; identical to SEQ ID NO: 123059
  derived and/or modified CDS sequence (opt2) from hemagglutinin__InfluenzaB__AGX21897

SEQ ID NO: 123572 - RNA, 1755 nt, Artificial Sequence; identical to SEQ ID NO: 123059
  derived and/or modified CDS sequence (opt2) from hemagglutinin__InfluenzaB__AGX21908

SEQ ID NO: 123573 - RNA, 1755 nt, Artificial Sequence
  derived and/or modified CDS sequence (opt2) from hemagglutinin__InfluenzaB__AGX21919
augaaggccaucaucguccuccucauggucgucaccuccaacgccgaccgcaucugcaccggcaucaccuccuccaacuccccccacgucgucaagaccgccacccagggcgaggucaacgucaccggcgucaucccccucaccaccacccccaccaaguccuacuucgccaaccucaagggcacccgcacccgcggcaagcucugccccgacugccucaacugcaccgaccucgacgucgcccucggccgccccaugugcgucggcaccacccccuccgccaaggccuccauccuccacgagguccgccccgucaccuccggcugcuuccccaucaugcacgaccgcaccaagauccgccagcuccccaaccuccuccgcggcuacgagaacauccgccucuccacccagaacgucaucgacgccgagaaggcccccggcggccccuaccgccucggcaccuccggcuccugccccaacgccaccuccaaguccggcuucuucgccaccauggccugggccguccccaaggacaacaacaagaacgccaccaacccccucaccgucgagguccccuacaucugcaccgagggcgaggaccagaucaccgucuggggcuuccacuccgacaacaagacccagaugaagaaccucuacggcgacuccaacccccagaaguucaccuccuccgccaacggcgucaccacccacuacgucucccagaucggcggcuuccccgaccagaccgaggacggcggccucccccaguccggccgcaucgucgucgacuacaugaugcagaagcccggcaaggccggcaccaucgucuaccagcgcggcguccuccucccccagaaggucuggugcgccuccggccgcuccaaggucaucaagggcucccucccccucaucggcgaggccgacugccuccacgagaaguacggcggccucaacaaguccaagcccuacuacaccggcgagcacgccaaggccaucggcaacugccccaucugggucaagaccccccucaagcucgccaacggcaccaaguaccgcccccccgccaagcuccucaaggagcgcggcuucuucggcgccaucgccggcuuccucgagggcggcugggagggcaugaucgccggcuggcacggcuacaccucccacggcgcccacggcgucgccgucgccgccgaccucaaguccacccaggaggccaucaacaagaucaccaagaaccucaacucccucuccgagcucgaggucaagaaccuccagcgccucuccggcgccauggacgagcuccacaacgagauccucgagcucgacgagaaggucgacgaccuccgcgccgacaccaucuccucccagaucgagcucgccguccuccucuccaacgagggcaucaucaacuccgaggacgagcaccuccucgcccucgagcgcaagcucaagaagaugcucggccccuccgccgucgacaucggcaacggcugcuucgagaccaagcacaagugcaaccagaccugccucgaccgcaucgccgccggcaccuucaacgccggcgaguucucccuccccaccuucgacucccucaacaucaccgccgccucccucaacgacgacggccucgacaaccacaccauccuccucuacuacuccaccgccgccuccucccucgccgucacccucaugcucgccaucuucaucgucuacauggucucccgcgacaacgucuccugcuccaucugccucuga

SEQ ID NO: 123574 - RNA, 1755 nt, Artificial Sequence; identical to SEQ ID NO: 123062
  derived and/or modified CDS sequence (opt2) from hemagglutinin__InfluenzaB__AGX21941

SEQ ID NO: 123575 - RNA, 1755 nt, Artificial Sequence; identical to SEQ ID NO: 123059
  derived and/or modified CDS sequence (opt2) from hemagglutinin__InfluenzaB__AGX21952

SEQ ID NO: 123576 - RNA, 1755 nt, Artificial Sequence; identical to SEQ ID NO: 123062
  derived and/or modified CDS sequence (opt2) from hemagglutinin__InfluenzaB__AGX21963

SEQ ID NO: 123577 - RNA, 1755 nt, Artificial Sequence
  derived and/or modified CDS sequence (opt2) from hemagglutinin__InfluenzaB__AGX21974
augaaggccaucaucguccuccucauggucgucaccuccaacgccgaccgcaucugcaccggcaucaccuccuccaacuccccccacgucgucaagaccgccacccagggcgaggucaacgucaccggcgucaucccccucaccaccacccccaccaaguccuacuucgccaaccucaagggcacccgcacccgcggcaagcucugccccgacugccucaacugcaccgaccucgacgucgcccucggccgccccaugugcgucggcaccacccccuccgccaaggccuccauccuccacgagguccgccccgucaccuccggcugcuuccccaucaugcacgaccgcaccaagauccgccagcuccccaaccuccuccgcggcuacgagaacauccgccucuccacccagaacgucaucgacgccgagaaggcccccggcggccccuaccgccucggcaccuccggcuccugccccaacgccaccuccaaguccggcuucuucgccaccauggccugggccguccccaaggucaacaacaagaacgccaccaacccccucaccgucgagguccccuacaucugcaccgagggcgaggaccagaucaccgucuggggcuuccacuccgacaacaagacccagaugaagaaccucuacggcgacuccaacccccagaaguucaccuccuccgccaacggcgucaccacccacuacgucucccagaucggcuccuuccccgaccagaccgaggacggcggccucccccaguccggccgcaucgucgucgacuacaugaugcagaagcccggcaagaccggcaccaucgucuaccagcgcggcguccuccucccccagaaggucuggugcgccuccggccgcuccaaggucaucaagggcucccucccccucaucggcgaggccgacugccuccacgagaaguacggcggccucaacaaguccaagcccuacuacaccggcgagcacgccaaggccaucggcaacugccccaucugggucaagaccccccucaagcucgccaacggcaccaaguaccgcccccccgccaagcuccucaaggagcgcggcuucuucggcgccaucgccggcuuccucgagggcggcugggagggcaugaucgccggcuggcacggcuacaccucccacggcgcccacggcgucgccgucgccgccgaccucaaguccacccaggaggccaucaacaagaucaccaagaaccucaacucccucuccgagcucgaggucaagaaccuccagcgccucuccggcgccauggacgagcuccacaacgagauccucgagcucgacgagaaggucgacgaccuccgcgccgacaccaucuccucccagaucgagcucgccguccuccucuccaacgagggcaucaucaacuccgaggacgagcaccuccucgcccucgagcgcaagcucaagaagaugcucggccccuccgccgucgacaucggcaacggcugcuucgagaccaagcacaagugcaaccagaccugccucgaccgcaucgccgccggcaccuucaacgccggcgaguucucccuccccaccuucgacucccucaacaucaccgccgccucccucaacgacgacggccucgacaaccacaccauccuccucuacuacuccaccgccgccuccucccucgccgucacccucaugcucgccaucuucaucgucuacaugaucucccgcgacaacgucuccugcuccaucugccucuga

SEQ ID NO: 123578 - RNA, 1755 nt, Artificial Sequence; identical to SEQ ID NO: 123062
  derived and/or modified CDS sequence (opt2) from hemagglutinin__InfluenzaB__AGX21985

SEQ ID NO: 123579 - RNA, 1755 nt, Artificial Sequence; identical to SEQ ID NO: 123060
  derived and/or modified CDS sequence (opt2) from hemagglutinin__InfluenzaB__AGX21996

SEQ ID NO: 123580 - RNA, 1755 nt, Artificial Sequence; identical to SEQ ID NO: 123060
  derived and/or modified CDS sequence (opt2) from hemagglutinin__InfluenzaB__AGX22007

SEQ ID NO: 123581 - RNA, 1755 nt, Artificial Sequence; identical to SEQ ID NO: 123059
  derived and/or modified CDS sequence (opt2) from hemagglutinin__InfluenzaB__AGX22018

SEQ ID NO: 123582 - RNA, 1755 nt, Artificial Sequence; identical to SEQ ID NO: 123059
  derived and/or modified CDS sequence (opt2) from hemagglutinin__InfluenzaB__AGX22029

SEQ ID NO: 123583 - RNA, 1755 nt, Artificial Sequence; identical to SEQ ID NO: 123059
  derived and/or modified CDS sequence (opt2) from hemagglutinin__InfluenzaB__AGX22040

SEQ ID NO: 123584 - RNA, 1755 nt, Artificial Sequence
  derived and/or modified CDS sequence (opt2) from hemagglutinin__InfluenzaB__AGX22051
augaaggccaucaucguccuccucauggucgucaccuccaacgccgaccgcaucugcaccggcaucaccuccuccaacuccccccacgucgucaagaccgccacccagggcgaggucaacgucaccggcgucaucccccucaccaccacccccaccaaguccuacuucgccaaccucaagggcacccgcacccgcggcaagcucugccccgacugccucaacugcaccgaccucgacgucgcccucggccgccccaugugcgucggcaccacccccuccgccaaggccuccauccuccacgagguccgccccgucaccuccggcugcuuccccaucaugcacgaccgcaccaagauccgccagcuccccaaccuccuccgcggcuacgagaacauccgccucuccacccagaacgucaucgacgccgagaaggcccccggcggccccuaccgccucggcaccuccggcuccugccccaacgccaccuccaaguccggcuucuucgccaccauggccugggccguccccaaggacaacaacaagaacgccaccaacccccucaccgucgagguccccuacaucugcaccgagggcgaggaccagaucaccgucuggggcuuccacuccgacaacaagacccagaugaagaaccucuacggcgacuccaacccccagaaguucaccuccuccgccaacggcgucaccacccacuacgucucccagaucggcggcuuccccgaccagaucgaggacggcggccucccccaguccggccgcaucgucgucgacuacaugaugcagaagcccggcaagaccggcaccaucgucuaccagcgcggcguccuccucccccagaaggucuggugcgccuccggccgcuccaaggucaucaagggcucccucccccucaucggcgaggccgacugccuccacgagaaguacggcggccucaacaaguccaagcccuacuacaccggcgagcacgccaaggccaucggcaacugccccaucugggucaagaccccccucaagcucgccaacggcaccaaguaccgcccccccgccaagcuccucaaggagcgcggcuucuucggcgccaucgccggcuuccucgagggcggcugggagggcaugaucgccggcuggcacggcuacaccucccacggcgcccacggcgucgccgucgccgccgaccucaaguccacccaggaggccaucaacaagaucaccaagaaccucaacucccucuccgagcucgaggucaagaaccuccagcgccucuccggcgccauggacgcccuccacaacgagauccucgagcucgacgagaaggucgacgaccuccgcgccgacaccaucuccucccagaucgagcucgccguccuccucuccaacgagggcaucaucaacuccgaggacgagcaccuccucgcccucgagcgcaagcucaagaagaugcucggccccuccgccgucgagaucggcaacggcugcuucgagaccaagcacaagugcaaccagaccugccucgaccgcaucgccgccggcaccuucaacgccggcgaguucucccuccccaccuucgacucccucaacaucaccgccgccucccucaacgacgacggccucgacaaccacaccauccuccucuacuacuccaccgccgccuccucccucgccgucacccucaugcucgccaucuucaucgucuacauggucucccgcgacaacgucuccugcuccaucugccucuga

SEQ ID NO: 123585 - RNA, 1755 nt, Artificial Sequence; identical to SEQ ID NO: 123059
  derived and/or modified CDS sequence (opt2) from hemagglutinin__InfluenzaB__AGX22062

SEQ ID NO: 123586 - RNA, 1755 nt, Artificial Sequence
  derived and/or modified CDS sequence (opt2) from hemagglutinin__InfluenzaB__AGX22073
augaaggccaucaucguccuccucauggucgucaccuccaacgccgaccgcaucugcaccggcaucaccuccuccaacuccccccacgucgucaagaccgccacccagggcgaggucaacgucaccggcgucaucccccucaccaccacccccaccaaguccuacuucgccaaccucaagggcacccgcacccgcggcaagcucugccccgacugccucaacugcaccgaccucgacgucgcccucggccgccccaugugcgucggcaccacccccuccgccaaggccuccauccuccacgagguccgccccgucaccuccggcugcuuccccaucaugcacgaccgcaccaagauccgccagcuccccaaccuccuccgcggcuacgagaacauccgccucuccacccagaacgucaucgacgccgagaaggcccccggcggccccuaccgccucggcaccuccggcuccugccccaacgccaccuccaaguccggcuucuucgccaccauggccugggccguccccaaggacaacaacaagaacgccaccaacccccucaccgucgagguccccuacaucugcaccgagggcgaggaccagaucaccgucuggggcuuccacuccgacaacaagacccagaugaagaaccucuacggcgacuccaacccccagaaguucaccuccuccgccaacggcgucaccacccacuacgucucccagaucggcggcuuccccgaccagaccgaggacggcggccucccccaguccggccgcaucgucgucgacuacaugaugcagaagcccggcaagaccggcaccaucgucuaccagcgcggcguccuccucccccagaaggucuggugcgccuccggccgcuccaaggucaucaagggcucccucccccucaucggcgaggccgacugccuccacgagaaguacggcggccucaacaaguccaagcccuacuacaccggcgagcacgccaaggccaucggcaacugccccaucugggucaagaccccccucaagcucgccaacggcaccaaguaccgcccccccgccaagcuccucaaggagcgcggcuucuucggcgccaucgccggcuucaucgagggcggcugggagggcaugaucgccggcuggcacggcuacaccucccacggcgcccacggcgucgccgucgccgccgaccucaaguccacccaggaggccaucaacaagaucaccaagaaccucaacucccucuccgagcucgaggucaagaaccuccagcgccucuccggcgccauggacgagcuccacaacgagauccucgagcucgacgagaaggucgacgaccuccgcgccgacaccaucuccucccagaucgagcucgccguccuccucuccaacgagggcaucaucaacuccgaggacgagcaccuccucgcccucgagcgcaagcucaagaagaugcucggccccuccgccgucgacaucggcaacggcugcuucgagaccaagcacaagugcaaccagaccugccucgaccgcaucgccgccggcaccuucaacgccggcgacuucucccuccccaccuucgacucccucaacaucaccgccgccucccucaacgacgacggccucgacaaccacaccauccuccucuacuacuccaccgccgccuccucccucgccgucacccucaugcucgccaucuucaucgucuacauggucucccgcgacaacgucuccugcuccaucugccucuga

SEQ ID NO: 123587 - RNA, 1755 nt, Artificial Sequence; identical to SEQ ID NO: 123062
  derived and/or modified CDS sequence (opt2) from hemagglutinin__InfluenzaB__AGX22095

SEQ ID NO: 123588 - RNA, 1755 nt, Artificial Sequence; identical to SEQ ID NO: 123060
  derived and/or modified CDS sequence (opt2) from hemagglutinin__InfluenzaB__AGX22106

SEQ ID NO: 123589 - RNA, 1755 nt, Artificial Sequence
  derived and/or modified CDS sequence (opt2) from hemagglutinin__InfluenzaB__AGX22128
augaaggccaucaucguccuccucauggucgucaccuccaacgccgaccgcaucugcaccggcaucaccuccuccaacuccccccacgucgucaagaccgccacccagggcgaggucaacgucaccggcgucaucccccucaccaccacccccaccaaguccuacuucgccaaccucaagggcacccgcacccgcggcaagcucugccccgacugccucaacugcaccgaccucgacgucgcccucggccgccccaugugcgucggcaccacccccuccgccaaggccuccauccuccacgagguccgccccgucaccuccggcugcuuccccaucaugcacgaccgcaccaagauccgccagcuccccaaccuccuccgcggcuacgagaacauccgccucuccacccagaacgucaucgacgccgagaacgcccccggcggccccuaccgccucggcaccuccggcuccugccccaacgccaccuccaaguccggcuucuucgccaccauggccugggccguccccaaggacaacaacaagaacgccaccaacccccucaccgucgagguccccuacgucugcaccgagggcgaggaccagaucaccgucuggggcuuccacuccgacaacaagacccagaugaagaaccucuacggcgacuccaacccccagaaguucaccuccuccgccaacggcgucaccacccacuacgucucccagaucggcggcuuccccgcccagaccgaggacggcggccucccccaguccggccgcaucgucgucgacuacaugguccagaagccccgcaagaccggcaccaucgucuaccagcgcggcguccuccucccccagaaggucuggugcgccuccggccgcuccaaggucaucaagggcucccucccccucaucggcgaggccgacugccuccacgagaaguacggcggccucaacaaguccaagcccuacuacaccggcgagcacgccaaggccaucggcaacugccccaucugggucaagaccccccucaagcucgccaacggcaccaaguaccgcccccccgccaagcuccucaaggagcgcggcuucuucggcgccaucgccggcuuccucgagggcggcugggagggcaugaucgccggcuggcacggcuacaccucccacggcgcccacggcgucgccgucgccgccgaccucaaguccacccaggaggccaucaacaagaucaccaagaaccucaacucccucuccgagcucgagaucaagaaccuccagcgccucuccggcgccaugaacgagcuccacaacgagauccucgagcucgacgagaaggucgacgaccuccgcgccgacaccaucuccucccagaucgagcucgccguccuccucuccaacgagggcaucaucaacuccgaggacgagcaccuccucgcccucgagcgcaagcucaagaagaugcucggccccuccgccgucgacaucggcaacggcugcuucgagaccaagcacaagugcaaccagaccugccucgaccgcaucgccgccggcaccuucaacgccggcgaguucucccuccccaccuucgacucccucaacaucaccgccgccucccucaacgacgacggccucgacaaccacaccauccuccucuacuacuccaccgccgccuccucccucgccgucacccucaugcucgccaucuucaucgucuacauggucucccgcgacaacgucuccugcuccaucugccucuga

SEQ ID NO: 123590 - RNA, 1755 nt, Artificial Sequence
  derived and/or modified CDS sequence (opt2) from hemagglutinin__InfluenzaB__AGX22139
augaaggccaucaucguccuccucauggucgucaccuccaacgccgaccgcaucugcaccggcaucaccuccuccaacuccccccacgucgucaagaccgccacccagggcgaggucaacgucaccggcgucaucccccucaccaccacccccaccaaguccuacuucgccaaccucaagggcacccgcacccgcggcaagcucugccccgacugccucaacugcaccgaccucgacgucgcccucggccgccccaugugcgucggcaccacccccuccgccgaggccuccauccuccacgagguccgccccgucaccuccggcugcuuccccaucaugcacgaccgcaccaagauccgccagcuccccaaccuccuccgcggcuacgagaacauccgccucuccacccagaacgucaucgacgccgagaaggcccccggcggccccuaccgccucggcaccuccggcuccugccccaacgccaccuccaaguccggcuucuucgccaccauggccugggccguccccaaggacaacaacaagaacgccaccaacccccucaccgucgagguccccuacaucugcaccgagggcgaggaccagaucaccgucuggggcuuccacuccgacaacaagacccagaugaagaaccucuacggcgacuccaacccccagaaguucaccuccuccgccaacggcgucaccacccacuacgucucccagaucggcggcuuccccgaccagaccgaggacggcggccucccccaguccggccgcaucgucgucgacuacaugaugcagaagcccggcaagaccggcaccaucgucuaccagcgcggcguccuccucccccagaaggucuggugcgccuccggccgcuccaaggucaucaagggcucccucccccucaucggcgaggccgacugccuccacgagaaguacggcggccucaacaaguccaagcccuacuacaccggcgagcacgccaaggccaucggcaacugccccaucugggucaagaccccccucaagcucgccaacggcaccaaguaccgcccccccgccaagcuccucaaggagcgcggcuucuucggcgccaucgccggcuuccucgagggcggcugggagggcaugaucgccggcuggcacggcuacaccucccacggcgcccacggcgucgccgucgccgccgaccucaaguccacccaggaggccaucaacaagaucaccaagaaccucaacucccucuccgagcucgaggucaagaaccuccagcgccucuccggcgccauggacgagcuccacaacgagauccucgagcucgacgagaaggucgacgaccuccgcgccgacaccaucuccucccagaucgagcucgccguccuccucuccaacgagggcaucaucaacuccgaggacgagcaccuccucgcccucgagcgcaagcucaagaagaugcucggccccuccgccgucgacaucggcaacggcugcuucgagaccaagcacaagugcaaccagaccugccucgaccgcaucgccgccggcaccuucaacgccggcgaguucucccuccccaccuucgacucccucaacaucaccgccgccucccucaacgacgacggccucgacaaccacaccauccuccucuacuacuccaccgccgccuccucccucgccgucacccucaugcucgccaucuucaucgucuacauggucucccgcgacaacgucuccugcuccaucugccucuga

SEQ ID NO: 123591 - RNA, 1755 nt, Artificial Sequence; identical to SEQ ID NO: 123590
  derived and/or modified CDS sequence (opt2) from hemagglutinin__InfluenzaB__AGX22150

SEQ ID NO: 123592 - RNA, 1755 nt, Artificial Sequence; identical to SEQ ID NO: 123590
  derived and/or modified CDS sequence (opt2) from hemagglutinin__InfluenzaB__AGX22161

SEQ ID NO: 123593 - RNA, 1755 nt, Artificial Sequence; identical to SEQ ID NO: 123059
  derived and/or modified CDS sequence (opt2) from hemagglutinin__InfluenzaB__AGX22172

SEQ ID NO: 123594 - RNA, 1755 nt, Artificial Sequence; identical to SEQ ID NO: 123590
  derived and/or modified CDS sequence (opt2) from hemagglutinin__InfluenzaB__AGX22183

SEQ ID NO: 123595 - RNA, 1755 nt, Artificial Sequence; identical to SEQ ID NO: 123590
  derived and/or modified CDS sequence (opt2) from hemagglutinin__InfluenzaB__AGX22194

SEQ ID NO: 123596 - RNA, 1755 nt, Artificial Sequence; identical to SEQ ID NO: 123590
  derived and/or modified CDS sequence (opt2) from hemagglutinin__InfluenzaB__AGX22205

SEQ ID NO: 123597 - RNA, 1755 nt, Artificial Sequence; identical to SEQ ID NO: 123060
  derived and/or modified CDS sequence (opt2) from hemagglutinin__InfluenzaB__AGX22216

SEQ ID NO: 123598 - RNA, 1755 nt, Artificial Sequence; identical to SEQ ID NO: 123062
  derived and/or modified CDS sequence (opt2) from hemagglutinin__InfluenzaB__AGX22227

SEQ ID NO: 123599 - RNA, 1755 nt, Artificial Sequence
  derived and/or modified CDS sequence (opt2) from hemagglutinin__InfluenzaB__AGX22238
augaaggccaucaucguccuccucauggucgucaccuccaacgccgaccgcaucugcaccggcaucaccuccuccaacuccccccacauggucaagaccgccacccagggcgaggucaacgucaccggcgucaucccccucaccaccacccccaccaaguccuacuucgccaaccucaagggcacccgcacccgcggcaagcucugccccgacugccucaacugcaccgaccucgacgucgcccucggccgccccaugugcgucggcaccacccccuccgccaaggccuccauccuccacgagguccgccccgucaccuccggcugcuuccccaucaugcacgaccgcaccaagauccgccagcuccccaaccuccuccgcggcuacgagaacauccgccucuccacccagaacgucaucgacgccgagaaggcccccggcggccccuaccgccucggcaccuccggcuccugccccaacgccaccuccaaguccggcuucuucgccaccauggccugggccguccccaaggacaacaacaagaacgccaccaacccccucaccgucgagguccccuacaucugcaccgagggcgaggaccagaucaccgucuggggcuuccacuccgacaacaagacccagaugaagaaccucuacggcgacuccaacccccagaaguucaccuccuccgccaacggcgucaccacccacuacgucucccagaucggcggcuuccccgaccagaccgaggacggcggccucccccaguccggccgcaucgucgucgacuacaugaugcagaagcccggcaagaccggcaccaucgucuaccagcgcggcguccuccucccccagaaggucuggugcgccuccggccgcuccaaggucaucaagggcucccucccccucaucggcgaggccgacugccuccacgagaaguacggcggccucaacaaguccaagcccuacuacaccggcgagcacgccaaggccaucggcaacugccccaucugggucaagaccccccucaagcucgccaacggcaccaaguaccgcccccccgccaagcuccucaaggagcgcggcuucuucggcgccaucgccggcuuccucgagggcggcugggagggcaugaucgccggcuggcacggcuacaccucccacggcgcccacggcgucgccgucgccgccgaccucaaguccacccaggaggccaucaacaagaucaccaagaaccucaacucccucuccgagcucgaggucaagaaccuccagcgccucuccggcgccauggacgagcuccacaacgagauccucgagcucgacgagaaggucgacgaccuccgcgccgacaccaucuccucccagaucgagcucgccguccuccucuccaacgagggcaucaucaacuccgaggacgagcaccuccucgcccucgagcgcaagcucaagaagaugcucggccccuccgccgucgacaucggcaacggcugcuucgagaccaagcacaagugcaaccagaccugccucgaccgcaucgccgccggcaccuucaacgccggcgaguucucccuccccaccuucgacucccucaacaucaccgccgccucccucaacgacgacggccucgacaaccacaccauccuccucuacuacuccaccgccgccuccucccucgccgucacccucaugcucgccaucuucaucgucuacauggucucccgcgacaacgucuccugcuccaucugccucuga

SEQ ID NO: 123600 - RNA, 1755 nt, Artificial Sequence; identical to SEQ ID NO: 123060
  derived and/or modified CDS sequence (opt2) from hemagglutinin__InfluenzaB__AGX22249

SEQ ID NO: 123601 - RNA, 1755 nt, Artificial Sequence; identical to SEQ ID NO: 123059
  derived and/or modified CDS sequence (opt2) from hemagglutinin__InfluenzaB__AGX22260

SEQ ID NO: 123602 - RNA, 1755 nt, Artificial Sequence
  derived and/or modified CDS sequence (opt2) from hemagglutinin__InfluenzaB__AGX22271
augaaggccaucaucguccuccucauggucgucaccuccaacgccgaccgcaucugcaccggcaucaccuccuccaacuccccccacgucgucaagaccgccacccagggcgaggucaacgucaccggcgucaucccccucaccaccacccccaccaaguccuacuucgccaaccucaagggcacccgcacccgcggcaagcucugccccgacugccucaacugcaccgaccucgacgucgcccucggccgccccaugugcgucggcaccacccccuccgccaaggccuccauccuccacgagguccgccccgucaccuccggcugcuuccccaucaugcacgaccgcaccaagauccgccagcuccccaaccuccuccgcggcuacgagaacauccgccucuccacccagaacgucaucgacgccgagaaggcccccggcggccccuaccgccucggcaccuccggcuccugccccaacgccaccuccaaguccggcuucuucgccaccauggccugggccguccccaaggacaacaacaagaacgccaccaacccccucaccgucgagguccccuacaucugcaccgagggcgaggaccagaucaccgucuggggcuuccacuccgacaacaagacccagaugaagaaccucuacggcgacuccaacccccagaaguucaccuccuccgccaacggcgucaccacccacuacgucucccagaucggcggcuuccccgaccagaccgaggacggcggccucccccaguccggccgcaucgucgucgacuacaugaugcagaagcccggcaagaccggcaccaucgucuaccagcgcggcguccuccucccccagaaggucuggugcgccuccggccgcuccaaggucaucaagggcucccucccccucaucggcgaggccgacugccuccacgagaaguacggcggccucaacaaguccaagcccuacuacaccggcgagcacgccaaggccaucggcaacugccccaucugggucaagaccccccucaagcucgccaacggcaccaaguaccgccccuccgccaagcuccucaaggagcgcggcuucuucggcgccaucgccggcuuccucgagggcggcugggagggcaugaucgccggcuggcacggcuacaccucccacggcgcccacggcgucgccgucgccgccgaccucaaguccacccaggaggccaucaacaagaucaccaagaaccucaacucccucuccgagcucgaggucaagaaccuccagcgccucuccggcgccauggacgagcuccacaacgagauccucgagcucgacgagaaggucgacgaccuccgcgccgacaccaucuccucccagaucgagcucgccguccuccucuccaacgagggcaucaucaacuccgaggacgagcaccuccucgcccucgagcgcaagcucaagaagaugcucggccccuccgccgucgagaucggcaacggcugcuucgagaccaagcacaagugcaaccagaccugccucgaccgcaucgccgccggcaccuucaacgccggcgaguucucccuccccaccuucgacucccucaacaucaccgccgccucccucaacgacgacggccucgacaaccacaccauccuccucuacuacuccaccgccgccuccucccucgccgucacccucaugcucgccaucuucaucgucuacauggucucccgcgacaacgucuccugcuccaucugccucuga

SEQ ID NO: 123603 - RNA, 1755 nt, Artificial Sequence
  derived and/or modified CDS sequence (opt2) from hemagglutinin__InfluenzaB__AGX22282
augaaggccaucaucguccuccucauggucgucaccuccaacgccgaccgcaucugcaccggcaucaccuccuccaacuccccccacgucgucaagaccgccacccagggcgaggucaacgucaccggcgucaucccccucaccaccacccccaccaaguccuacuucgccaaccucaagggcacccgcacccgcggcaagcucugccccgacugccucaacugcaccgaccucgacgucgcccucggccgccccaugugcgucggcaccacccccuccgccaaggccuccauccuccacgagguccgccccgucaccuccggcugcuuccccaucaugcacgaccgcaccaagauccgccagcuccccaaccuccuccgcggcuacgagaacauccgccucuccacccagaacgucaucgacgccgagaaggcccccggcggccccuaccgccucggcaccuccggcuccugccccaacgccaccuccaaguccggcuucuucgccaccauggccugggccguccccaaggacaacaacaagaacgccaccaacccccucaccgucgagguccccuacaucugcaccgagggcgaggaccagaucaccgucuggggcuuccacuccgacaacaagacccagaugaagaaccucuacggcgacuccaacccccagaaguucaccuccuccgccaacggcgucaccacccacuacgucucccagaucggcgacuuccccgaccagaccgaggacggcggccucccccaguccggccgcaucgucgucgacuacaugaugcagaagcccggcaagaccggcaccaucgucuaccagcgcggcguccuccucccccagaaggucuggugcgccuccggccgcuccaaggucaucaagggcucccucccccucaucggcgaggccgacugccuccacgagaaguacggcggccucaacaaguccaagcccuacuacaccggcgagcacgccaaggccaucggcaacugccccaucugggucaagaccccccucaagcucgccaacggcaccaaguaccgcccccccgccaagcuccucaaggagcgcggcuucuucggcgccaucgccggcuuccucgagggcggcugggagggcaugaucgccggcuggcacggcuacaccucccacggcgcccacggcgucgccgucgccgccgaccucaaguccacccaggaggccaucaacaagaucaccaagaaccucaacucccucuccgagcucgaggucaagaaccuccagcgccucuccggcgccauggacgagcuccacaacgagauccucgagcucgacgagaaggucgacgaccuccgcgccgacaccaucuccucccagaucgagcucgccguccuccucuccaacgagggcaucaucaacuccgaggacgagcaccuccucgcccucgagcgcaagcucaagaagaugcucggccccuccgccgucgacaucggcaacggcugcuucgagaccaagcacaagugcaaccagaccugccucgaccgcaucgccgccggcaccuucaacgccggcgaguucucccuccccaccuucgacucccucaacaucaccgccgccucccucaacgacgacggccucgacaaccacaccauccuccucuacuacuccaccgccgccuccucccucgccgucacccucaugcucgccaucuucaucgucuacauggucucccgcgacaacgucuccugcuccaucugccucuga

SEQ ID NO: 123604 - RNA, 1755 nt, Artificial Sequence; identical to SEQ ID NO: 123059
  derived and/or modified CDS sequence (opt2) from hemagglutinin__InfluenzaB__AGX22293

SEQ ID NO: 123605 - RNA, 1755 nt, Artificial Sequence
  derived and/or modified CDS sequence (opt2) from hemagglutinin__InfluenzaB__AGX22304
augaaggccaucaucguccuccucauggucgucaccuccaacgccgaccgcaucugcaccggcaucaccuccuccaacuccccccacgucgucaagaccgccacccagggcgaggucaacgucaccggcgucaucccccucaccaccacccccaccaaguccuacuucgccaaccucaagggcacccgcacccgcggcaagcucugccccgacugccucaacugcaccgaccucgacgucgcccucggccgccccaugugcgucggcaccacccccuccgccaaggccuccauccuccacgagguccgccccgucaccuccggcugcuuccccaucaugcacgaccgcaccaagauccgccagcuccccaaccuccuccgcggcuacgagaacauccgccucuccacccagaacgucaucgacgccgagaaggcccccggcggccccuaccgccucggcaccuccggcuccugccccaacgccaccuccaaguccggcuucuucgccaccauggccugggccguccccaaggacaacaacaagaacgccaccaacccccucaccgucgagguccccuacaucugcaccgagggcgaggaccagaucaccgucuggggcuuccacuccgacaacaagacccagaugaagaaccucuacggcgacuccaacccccagaaguucaccuccuccaccaacggcgucaccacccacuacgucucccagaucggcggcuuccccgaccagaccgaggacggcggccucccccaguccggccgcaucgucgucgacuacaugaugcagaagcccggcaagaccggcaccaucgucuaccagcgcggcguccuccucccccagaaggucuggugcgccuccggccgcuccaaggucaucaagggcucccucccccucaucggcgaggccgacugccuccacgagaaguacggcggccucaacaaguccaagcccuacuacaccggcgagcacgccaaggccaucggcaacugccccaucugggucaagaccccccucaagcucgccaacggcaccaaguaccgcccccccgccaagcuccucaaggagcgcggcuucuucggcgccaucgccggcuuccucgagggcggcugggagggcaugaucgccggcuggcacggcuacaccucccacggcgcccacggcgucgccgucgccgccgaccucaaguccacccaggaggccaucaacaagaucaccaagaaccucaacucccucuccgagcucgaggucaagaaccuccagcgccucuccggcgccauggacgagcuccacaacgagauccucgagcucgacgagaaggucgacgaccuccgcgccgacaccaucuccucccagaucgagcucgccguccuccucuccaacgagggcaucaucaacuccgaggacgagcaccuccucgcccucgagcgcaagcucaagaagaugcucggccccuccgccgucgacaucggcaacggcugcuucgagaccaagcacaagugcaaccagaccugccucgaccgcaucgccgccggcaccuucaacgccggcgaguucucccuccccaccuucgacucccucaacaucaccgccgccucccucaacgacgacggccucgacaaccacaccauccuccucuacuacuccaccgccgccuccucccucgccgucacccucaugcucgccaucuucaucgucuacauggucucccgcgacaacgucuccugcuccaucugccucuga

SEQ ID NO: 123606 - RNA, 1755 nt, Artificial Sequence; identical to SEQ ID NO: 123059
  derived and/or modified CDS sequence (opt2) from hemagglutinin__InfluenzaB__AGX22315

SEQ ID NO: 123607 - RNA, 1755 nt, Artificial Sequence; identical to SEQ ID NO: 122462
  derived and/or modified CDS sequence (opt2) from hemagglutinin__InfluenzaB__AGX22326

SEQ ID NO: 123608 - RNA, 1755 nt, Artificial Sequence; identical to SEQ ID NO: 123062
  derived and/or modified CDS sequence (opt2) from hemagglutinin__InfluenzaB__AGX22337

SEQ ID NO: 123609 - RNA, 1755 nt, Artificial Sequence; identical to SEQ ID NO: 123062
  derived and/or modified CDS sequence (opt2) from hemagglutinin__InfluenzaB__AGX22348

SEQ ID NO: 123610 - RNA, 1755 nt, Artificial Sequence
  derived and/or modified CDS sequence (opt2) from hemagglutinin__InfluenzaB__AGX22359
augaaggccaucaucguccuccucauggucgucaccuccaacgccgaccgcaucugcaccggcaucaccuccuccaacuccccccacgucgucaagaccgccacccagggcgaggucaacgucaccggcgucaucccccucaccaccacccccaccaaguccuacuucgccaaccucaagggcacccgcacccgcggcaagcucugccccgacugccucaacugcaccgaccucgacgucgcccucggccgccccaugugcgucggcaccacccccuccgccaaggccuccauccuccacgagguccgccccgucaccuccggcugcuuccccaucaugcacgaccgcaccaagauccgccagcuccccaaccuccuccgcggcuacgagaacauccgccucuccacccagaacgucaucgacgccgagaacgcccccggcggccccuaccgccucggcaccuccggcuccugccccaacgccaccuccaaguccggcuucuucgccaccauggccugggccguccccaaggacaacaacaagaacgccaccaacccccucaccgucgagguccccuacgucugcaccgagggcgaggaccagaucaccgucuggggcuuccacuccgacaacaagacccagaugaagaaccucuacggcgacuccaacccccagaaguucaccuccuccgccaacggcgucaccacccacuacgucucccagaucggcggcuuccccgcccagaccgaggacggcggccucccccaguccggccgcaucgucgucgacuacaugguccagaagcccaagaagaccggcaccaucgucuaccagcgcggcguccuccucccccagaaggucuggugcgccuccggccgcuccaaggucaucaagggcucccucccccucaucggcgaggccgacugccuccacgagaaguacggcggccucaacaaguccaagcccuacuacaccggcgagcacgccaaggccaucggcaacugccccaucugggucaagaccccccucaagcucgccaacggcaccaaguaccgcccccccgccaagcuccucaaggagcgcggcuucuucggcgccaucgccggcuuccucgagggcggcugggagggcaugaucgccggcuggcacggcuacaccucccacggcgcccacggcgucgccgucgccgccgaccucaaguccacccaggaggccaucaacaagaucaccaagaaccucaacucccucuccgagcucgagaucaagaaccuccagcgccucuccggcgccauggacgagcuccacaacgagauccucgagcucgacgagaaggucgacgaccuccgcgccgacaccaucuccucccagaucgagcucgccguccuccucuccaacgagggcaucaucaacuccgaggacgagcaccuccucgcccucgagcgcaagcucaagaagaugcucggccccuccgccgucgacaucggcaacggcugcuucgagaccaagcacaagugcaaccagaccugccucgaccgcaucgccgccggcaccuucaacgccggcgaguucucccuccccaccuucgacucccucaacaucaccgccgccucccucaacgacgacggccucgacaaccacaccauccuccucuacuacuccaccgccgccuccucccucgccgucacccucaugcucgccaucuucaucgucuacauggucucccgcgacaacgucuccugcuccaucugccucuga

SEQ ID NO: 123611 - RNA, 1755 nt, Artificial Sequence; identical to SEQ ID NO: 123060
  derived and/or modified CDS sequence (opt2) from hemagglutinin__InfluenzaB__AGX22370

SEQ ID NO: 123612 - RNA, 1755 nt, Artificial Sequence
  derived and/or modified CDS sequence (opt2) from hemagglutinin__InfluenzaB__AGX22381
augaaggccaucaucguccuccucauggucgucaccuccaacgccgaccgcaucugcaccggcaucaccuccuccaacuccccccacgucgucaagaccgccacccagggcgaggucaacgucaccggcgucaucccccucaccaccacccccaccaaguccuacuucgccaaccucaagggcacccgcacccgcggcaagcucugccccgacugccucaacugcaccgaccucgacgucgcccucggccgccccaugugcgucggcaccacccccuccgccaaggccuccauccuccacgagguccgccccgucaccuccggcugcuuccccaucaugcacgaccgcaccaagauccgccagcucuccaaccuccuccgcggcuacgagaacauccgccucuccacccagaacgucaucgacgccgagaaggcccccggcggccccuaccgccucggcaccuccggcuccugccccaacgccaccuccaaguccggcuucuucgccaccauggccugggccguccccaaggacaacaacaagaacgccaccaacccccucaccgucgagguccccuacaucugcaccgagggcgaggaccagaucaccgucuggggcuuccacuccgacaacaagacccagaugaagaaccucuacggcgacuccaacccccagaaguucaccuccuccgccaacggcgucaccacccacuacgucucccagaucggcggcuuccccgaccagaccgaggacggcggccucccccaguccggccgcaucgucgucgacuacaugaugcagaagcccggcaagaccggcaccaucgucuaccagcgcggcguccuccucccccagaaggucuggugcgccuccggccgcuccaaggucaucaagggcucccucccccucaucggcgaggccgacugccuccacgagaaguacggcggccucaacaaguccaagcccuacuacaccggcgagcacgccaaggccaucggcaacugccccaucugggucaagaccccccucaagcucgccaacggcaccaaguaccgcccccccgccaagcuccucaaggagcgcggcuucuucggcgccaucgccggcuuccucgagggcggcugggagggcaugaucgccggcuggcacggcuacaccucccacggcgcccacggcgucgccgucgccgccgaccucaaguccacccaggaggccaucaacaagaucaccaagaaccucaacucccucuccgagcucgaggucaagaaccuccagcgccucuccggcgccauggacgagcuccacaacgagauccucgagcucgacgagaaggucgacgaccuccgcgccgacaccaucuccucccagaucgagcucgccguccuccucuccaacgagggcaucaucaacuccgaggacgagcaccuccucgcccucgagcgcaagcucaagaagaugcucggccccuccgccgucgacaucggcaacggcugcuucgagaccaagcacaagugcaaccagaccugccucgaccgcaucgccgccggcaccuucaacgccggcgaguucucccuccccaccuucgacucccucaacaucaccgccgccucccucaacgacgacggccucgacaaccacaccauccuccucuacuacuccaccgccgccuccucccucgccgucacccucaugcucgccaucuucaucgucuacauggucucccgcgacaacgucuccugcuccaucugccucuga

SEQ ID NO: 123613 - RNA, 1755 nt, Artificial Sequence; identical to SEQ ID NO: 123059
  derived and/or modified CDS sequence (opt2) from hemagglutinin__InfluenzaB__AGX22392

SEQ ID NO: 123614 - RNA, 1755 nt, Artificial Sequence
  derived and/or modified CDS sequence (opt2) from hemagglutinin__InfluenzaB__AGX22403
augaaggccaucaucguccuccucauggucgucaccuccaacgccgaccgcaucugcaccggcaucaccuccuccaacuccccccacgucgucaagaccgccacccagggcgaggucaacgucaccggcgucaucccccucaccaccacccccaccaaguccuacuucgccaaccucaagggcacccgcacccgcggcaagcucugccccgacugccucaacugcaccgaccucgacgucgcccucggccgccccaugugcgucggcaccacccccuccgccaaggccuccauccuccacgagguccgccccgucaccuccggcugcuuccccaucaugcacgaccgcaccaagauccgccagcuccccaaccuccuccgcggcuacgagaacauccgccucuccacccagaacgucaucgacgccgagaaggcccccggcggccccuaccgccucggcaccuccggcuccugccccaacgccaccuccaaguccggcuucuucgccaccauggccugggccguccccaaggacaacaacaagaacgccaccaacccccucaccgucgagguccccuacaucugcaccgagggcgaggaccagaucaccgucuggggcuuccacuccgacaacaagacccagaugaagaaccucuacggcgacuccaacccccagaaguucaccuccuccgccaacggcgucaccacccacuacgucucccagaucggcggcuuccccgaccagaccgaggacggcggccucccccaguccggccgcaucgucgucgacuacaugaugcagaagcccggcaagaccggcaccaucgucuaccagcgcggcguccuccucccccagaaggucuggugcgccuccggccgcuccaaggucaucaagggcucccucccccucaucggcgaggccgacugccuccacgagaaguacggcggccucaacaaguccaagcccuacuacaccggcgagcacgccaaggccaucggcaacugccccaucugggucaagaccccccucaagcucgccaacggcaccaaguaccgcccccccgccaagcuccucaaggagcgcggcuucuucggcgccaucgccggcuuccucgagggcggcugggagggcaugaucgccggcuggcacggcuacaccucccacggcgcccacggcgucgccgucgccgccgaccucaaguccacccaggaggccaucaacaagaucaccaagaaccucaacucccucuccgagcucgaggucaagaaccuccagcgccucuccggcgccauggacgagcuccacaacgagauccucgagcucgacgagaaggucgacgaccuccgcgccgacaccaucuccucccagaucgagcucgccguccuccucuccaacgagggcaucaucaacuccgaggacgagcaccuccucgcccucgagcgcaagcucaagaagaugcucggccccuccgccgucgacaucggcaacggcugcuucgagaccaagcacaagugcaaccagaccugccucgaccgcaucgccgccggcaccuucaacgccggcgacuucucccuccccaccuucgacucccucaacaucaccgccgccucccucaacgacgacggccucgacaaccacaccauccuccucuacuacuccaccgccgccuccucccucgccgucacccucaugcucgccaucuucaucgucuacauggucucccgcgacaacgucuccugcuccaucugccucuga

SEQ ID NO: 123615 - RNA, 1755 nt, Artificial Sequence; identical to SEQ ID NO: 123059
  derived and/or modified CDS sequence (opt2) from hemagglutinin__InfluenzaB__AGX22414

SEQ ID NO: 123616 - RNA, 1755 nt, Artificial Sequence
  derived and/or modified CDS sequence (opt2) from hemagglutinin__InfluenzaB__AGX22425
augaaggccaucaucguccuccucauggucgucaccuccaacgccgaccgcaucugcaccggcaucaccuccuccaacuccccccacgucgucaagaccgccacccagggcgaggucaacgucaccggcgucaucccccucaccaccacccccaccaaguccuacuucgccaaccucaagggcacccgcacccgcggcaagcucugccccgacugccucaacugcaccgaccucgacgucgcccucggccgccccaugugcgucggcaccacccccuccgccaaggccuccauccuccacgagguccgccccgucaccuccggcugcuuccccaucaugcacgaccgcaccaagauccgccagcuccccaaccuccuccgcggcuacgagaacauccgccucuccacccagaacgucaucgacgccgagaaggcccccggcggccccuaccgccucggcaccuccggcuccugccccaacgccaccuccaaguccggcuucuucgccaccauggccugggccguccccaaggacaacaacaagaacgccaccaacccccucaccgucgagguccccuacaucugcaccgagggcgaggaccagaucaccgucuggggcuuccacuccgacaacaagauccagaugaagaaccucuacggcgacuccaacccccagaaguucaccuccuccgccaacggcgucaccacccacuacgucucccagaucggcggcuuccccgaccagaccgaggacggcggccucccccaguccggccgcaucgucgucgacuacaugaugcagaagcccggcaagaccggcaccaucgucuaccagcgcggcguccuccucccccagaaggucuggugcgccuccggccgcuccaaggucaucaagggcucccucccccucaucggcgaggccgacugccuccacgagaaguacggcggccucaacaaguccaagcccuacuacaccggcgagcacgccaaggccaucggcaacugccccaucugggucaagaccccccucaagcucgccaacggcaccaaguaccgcccccccgccaagcuccucaaggagcgcggcuucuucggcgccaucgccggcuuccucgagggcggcugggagggcaugaucgccggcuggcacggcuacaccucccacggcgcccacggcgucgccgucgccgccgaccucaaguccacccaggaggccaucaacaagaucaccaagaaccucaacucccucuccgagcucgaggucaagaaccuccagcgccucuccggcgccauggacgagcuccacaacgagauccucgagcucgacgagaaggucgacgaccuccgcgccgacaccaucuccucccagaucgagcucgccguccuccucuccaacgagggcaucaucaacuccgaggacgagcaccuccucgcccucgagcgcaagcucaagaagaugcucggccccuccgccgucgagaucggcaacggcugcuucgagaccaagcacaagugcaaccagaccugccucgaccgcaucgccgccggcaccuucaacgccggcgaguucucccuccccaccuucgacucccucaacaucaccgccgccucccucaacgacgacggccucgacaaccacaccauccuccucuacuacuccaccgccgccuccucccucgccgucacccucaugcucgccaucuucaucgucuacauggucucccgcgacaacgucuccugcuccaucugccucuga

SEQ ID NO: 123617 - RNA, 1755 nt, Artificial Sequence; identical to SEQ ID NO: 123060
  derived and/or modified CDS sequence (opt2) from hemagglutinin__InfluenzaB__AGX22436

SEQ ID NO: 123618 - RNA, 1755 nt, Artificial Sequence; identical to SEQ ID NO: 123060
  derived and/or modified CDS sequence (opt2) from hemagglutinin__InfluenzaB__AGX22445

SEQ ID NO: 123619 - RNA, 1755 nt, Artificial Sequence
  derived and/or modified CDS sequence (opt2) from hemagglutinin__InfluenzaB__AGX22456
augaaggccaucaucguccuccucauggucgucaccuccaacgccgaccgcaucugcaccggcaucaccuccuccuccuccccccacgucgucaagaccgccacccagggcgaggucaacgucaccggcgucaucccccucaccaccacccccaccaaguccuacuucgccaaccucaagggcacccgcacccgcggcaagcucugccccgacugccucaacugcaccgaccucgacgucgcccucggccgccccaugugcgucggcaccacccccuccgccaaggccuccauccuccacgagguccgccccgucaccuccggcugcuuccccaucaugcacgaccgcaccaagauccgccagcuccccaaccuccuccgcggcuacgagaacauccgccucuccacccagaacgucaucgacgccgagaaggcccccggcggccccuaccgccucggcaccuccggcuccugccccaacgccaccuccaaguccggcuucuucgccaccauggccugggccguccccaaggacaacaacaagaacgccaccaacccccucaccgucgagguccccuacaucugcaccgagggcgaggaccagaucaccgucuggggcuuccacuccgacaacaagacccagaugaagaaccucuacggcgacuccaacccccagaaguucaccuccuccgccaacggcgucaccacccacuacgucucccagaucggcggcuuccccgaccagaccgaggacggcggccucccccaguccggccgcaucgucgucgacuacaugaugcagaagcccggcaagaccggcaccaucgucuaccagcgcggcguccuccucccccagaaggucuggugcgccuccggccgcuccaaggucaucaagggcucccucccccucaucggcgaggccgacugccuccacgagaaguacggcggccucaacaaguccaagcccuacuacaccggcgagcacgccaaggccaucggcaacugccccaucugggucaagaccccccucaagcucgccaacggcaccaaguaccgcccccccgccaagcuccucaaggagcgcggcuucuucggcgccaucgccggcuuccucgagggcggcugggagggcaugaucgccggcuggcacggcuacaccucccacggcgcccacggcgucgccgucgccgccgaccucaaguccacccaggaggccaucaacaagaucaccaagaaccucaacucccucuccgagcucgaggucaagaaccuccagcgccucuccggcgccauggacgagcuccacuccgagauccucgagcucgacgagaaggucgacgaccuccgcgccgacaccaucuccucccagaucgagcucgccguccuccucuccaacgagggcaucaucaacuccgaggacgagcaccuccucgcccucgagcgcaagcucaagaagaugcucggccccuccgccgucgacaucggcaacggcugcuucgagaccaagcacaagugcaaccagaccugccucgaccgcaucgccgccggcaccuucaacgccggcgaguucucccuccccaccuucgacucccucaacaucaccgccgccucccucaacgacgacggccucgacaaccacaccauccuccucuacuacuccaccgccgccuccucccucgccgucacccucaugcucgccaucuucaucgucuacaucgucucccgcgacaacgucuccugcuccaucugccucuga

SEQ ID NO: 123620 - RNA, 1755 nt, Artificial Sequence; identical to SEQ ID NO: 123059
  derived and/or modified CDS sequence (opt2) from hemagglutinin__InfluenzaB__AGX22467

SEQ ID NO: 123621 - RNA, 1755 nt, Artificial Sequence; identical to SEQ ID NO: 123059
  derived and/or modified CDS sequence (opt2) from hemagglutinin__InfluenzaB__AGX22478

SEQ ID NO: 123622 - RNA, 1755 nt, Artificial Sequence
  derived and/or modified CDS sequence (opt2) from hemagglutinin__InfluenzaB__AGX22489
augaaggccaucaucguccuccucauggucgucaccuccaacgccgaccgcaucugcaccggcaucaccuccuccaacuccccccacgucgucaagaccgccacccagggcgaggucaacgucaccggcgucaucccccucaccaccacccccaccaaguccuacuucgccaaccucaagggcacccgcacccgcggcaagcucugccccgacugccucaacugcaccgaccucgacgucgcccucggccgccccaugugcgucggcaccacccccuccgccaaggccuccauccuccacgagguccgccccgucaccuccggcugcuuccccaucaugcacgaccgcaccaagauccgccagcuccccaaccuccuccgcggcuacgagaacauccgccucuccacccaguccgccaucgacgccgagaaggcccccggcggccccuaccgccucggcaccuccggcuccugccccaacgccaccuccaaguccggcuucuucgccaccauggccugggccguccccaaggacaacaacaagaacgccaccaacccccucaccgucgagguccccuacaucugcaccgagggcgaggaccagaucaccgucuggggcuuccacuccgacaacaagacccagaugaagaaccucuacggcgacuccaacccccagaaguucaccuccuccgccaacggcgucaccacccacuacgucucccagaucggcggcuuccccggccagaccgaggacggcggccucccccaguccggccgcaucgucgucgacuacaugauccagaagcccggcaagaccggcaccaucgucuaccagcgcggcguccuccucccccagaaggucuggugcgccuccggccgcuccaaggucaucaagggcucccucccccucaucggcgaggccgacugccuccacgagaaguacggcggccucaacaaguccaagcccuacuacaccggcgagcacgccaaggccaucggcaacugccccaucugggucaagaccccccucaagcucgccaacggcaccaaguaccgcccccccgccaagcuccucaaggagcgcggcuucuucggcgccaucgccggcuuccucgagggcggcugggagggcaugaucgccggcuggcacggcuacaccucccacggcgcccacggcgucgccgucgccgccgaccucaaguccacccaggaggccaucaacaagaucaccaagaaccucaacucccucuccgagcucgaggucaagaaccuccagcgccucuccggcgccauggacgagcuccacaacgagauccucgagcucgacgagaaggucgacgaccuccgcgccgacaccaucuccgcccagaucgagcucgccguccuccucuccaacgagggcaucaucaacuccgaggacgagcaccuccucgcccucgagcgcaagcucaagaagaugcucggccccuccgccgucgacaucggcaacggcugcuucgagaccaagcacaagugcaaccagaccugccucgaccgcaucgccgccggcaccuucaacgccggcgaguucucccuccccaccuucgacucccucaacaucaccgccgccucccucaacgacgacggccucgacaaccacaccauccuccucuacuacuccaccgccgccuccucccucgccgucacccucaugcucgccaucuucaucgucuacauggucucccgcgacaacgucuccugcuccaucugccucuga

SEQ ID NO: 123623 - RNA, 1755 nt, Artificial Sequence
  derived and/or modified CDS sequence (opt2) from hemagglutinin__InfluenzaB__AGX22500
augaaggccaucaucguccuccucauggucgucaccuccaacgccgaccgcaucugcaccggcaucaccuccuccaacuccccccacgucgucaagaccgccacccagggcgaggucaacgucaccggcgucaucccccucaccaccacccccaccaaguccuacuucgccaaccucaagggcacccgcacccgcggcaagcucugccccgacugccucaacugcaccgaccucgacgucgcccucggccgccccaugugcgucggcaccacccccuccgccaaggccuccauccuccacgagguccgccccgucaccuccggcugcuuccccaucaugcacgaccgcaccaagauccgccagcuccccaaccuccuccgcggcuacgagaacauccgccucuccacccagaacgucaucgacgccgagaacgcccccggcggccccuaccgccucggcaccuccggcuccugccccaacgccaccuccaaguccggcuucuucgccaccauggccugggccguccccaaggacaacaacaagaacgccaccaacccccucaccgucgagguccccuacaucugcaccgagggcgaggaccagaucaccgucuggggcuuccacuccgacaacaagacccagaugaagaaccucuacggcgacuccaacccccagaaguucaccuccuccgccaacggcgucaccacccacuacgucucccagaucggcggcuuccccgcccagaccgaggacggcggccucccccaguccggccgcaucaucgucgacuacaugguccagaagccccgcaagaccggcaccaucgucuaccagcgcggcguccuccucccccagaaggucuggugcgccuccggccgcuccaaggucaucaagggcucccucccccucaucggcgaggccgacugccuccacgagaaguacggcggccucaacaaguccaagcccuacuacaccggcgagcacgccaaggccaucggcaacugccccaucugggucaagaccccccucaagcucgccaacggcaccaaguaccgcccccccgccaagcuccucaaggagcgcggcuucuucggcgccaucgccggcuuccucgagggcggcugggagggcaugaucgccggcuggcacggcuacaccucccacggcgcccacggcgucgccgucgccgccgaccucaaguccacccaggaggccaucaacaagaucaccaagaaccucaacucccucuccgagcucgaggucaagaaccuccagcgccucuccggcgccauggacgagcuccacaacgagauccucgagcucgacgagaaggucgacgaccuccgcgccgacaccaucuccucccagaucgagcucgccguccuccucuccaacgagggcaucaucaacuccgaggacgagcaccuccucgcccucgagcgcaagcucaagaagaugcucggccccuccgccgucgacaucggcaacggcugcuucgagaccaagcacaagugcaaccagaccugccucgaccgcaucgccgccggcaccuucaacgccggcgaguucucccuccccaccuucgacucccucaacaucaccgccgccucccucaacgacgacggccucgacaaccacaccauccuccucuacuacuccaccgucgccuccucccucgccgucacccucaugcucgccaucuucaucgucuacauggucucccgcgacaacgucuccugcuccaucugccucuga

SEQ ID NO: 123624 - RNA, 1755 nt, Artificial Sequence; identical to SEQ ID NO: 123060
  derived and/or modified CDS sequence (opt2) from hemagglutinin__InfluenzaB__AGX22511

SEQ ID NO: 123625 - RNA, 1755 nt, Artificial Sequence
  derived and/or modified CDS sequence (opt2) from hemagglutinin__InfluenzaB__AGX22522
augaaggccaucaucguccuccucauggucgucaccuccaacgccgaccgcaucugcaccggcaucaccuccuccaacuccccccacgucgucaagaccgccacccagggcgaggucaacgucaccggcgucaucccccucaccaccacccccaccaaguccuacuucgccaaccucaagggcacccgcacccgcggcaagcucugccccgacugccucaacugcaccgaccucgacgucgcccucggccgccccaugugcgucggcaccacccccuccgccaaggccuccauccuccacgagguccgccccgucaccuccggcugcuuccccaucaugcacgaccgcaccaagauccgccagcucgccaaccuccuccgcggcuacgagaacauccgccucuccacccagaacgucaucgacgccgagaaggcccccggcggccccuaccgccucggcaccuccggcuccugccccaacgccaccuccaaguccggcuucuucgccaccauggccugggccguccccaaggacaacaacaagaacgccaccaacccccucaccgucgagguccccuacaucugcaccgagggcgaggaccagaucaccgucuggggcuuccacuccgacaacaagacccagaugaagaaccucuacggcgacuccaacccccagaaguucaccuccuccgccaacggcgucaccaagcacuacgucucccagaucggcggcuuccccgaccagaccgaggacggcggccucccccaguccggccgcaucgucgucgacuacaugaugcagaagcccggcaagaccggcaccaucgucuaccagcgcggcguccuccucccccagaaggucuggugcgccuccggccgcuccaaggucaucaagggcucccucccccucaucggcgaggccgacugccuccacgagaaguacggcggccucaacaaguccaagcccuacuacaccggcgagcacgccaaggccaucggcaacugccccaucugggucaagaccccccucaagcucgccaacggcaccaaguaccgcccccccgccaagcuccucaaggagcgcggcuucuucggcgccaucgccggcuuccucgagggcggcugggagggcaugaucgccggcuggcacggcuacaccucccacggcgcccacggcgucgccgucgccgccgaccucaaguccacccaggaggccaucaacaagaucaccaagaaccucaacucccucuccgagcucgaggucaagaaccuccagcgccucuccggcgccauggacgagcuccacaacgagauccucgagcucgacgagaaggucgacgaccuccgcgccgacaccaucuccucccagaucgagcucgccguccuccucuccaacgagggcaucaucaacuccgaggacgagcaccuccucgcccucgagcgcaagcucaagaagaugcucggccccuccgccgucgacaucggcaacggcugcuucgagaccaagcacaagugcaaccagaccugccucgaccgcaucgccgccggcaccuucaacgccggcgaguucucccuccccaccuucgacucccucaacaucaccgccgccucccucaacgacgacggccucgacaaccacaccauccuccucuacuacuccaccgccgccuccucccucgccgucacccucaugcucgccaucuucaucgucuacauggucucccgcgacaacgucuccugcuccaucugccucuga

SEQ ID NO: 123626 - RNA, 1755 nt, Artificial Sequence; identical to SEQ ID NO: 122462
  derived and/or modified CDS sequence (opt2) from hemagglutinin__InfluenzaB__AGX22533

SEQ ID NO: 123627 - RNA, 1755 nt, Artificial Sequence; identical to SEQ ID NO: 123074
  derived and/or modified CDS sequence (opt2) from hemagglutinin__InfluenzaB__AGX22566

SEQ ID NO: 123628 - RNA, 1755 nt, Artificial Sequence; identical to SEQ ID NO: 123060
  derived and/or modified CDS sequence (opt2) from hemagglutinin__InfluenzaB__AGX22577

SEQ ID NO: 123629 - RNA, 1755 nt, Artificial Sequence; identical to SEQ ID NO: 123074
  derived and/or modified CDS sequence (opt2) from hemagglutinin__InfluenzaB__AGX22588

SEQ ID NO: 123630 - RNA, 1755 nt, Artificial Sequence; identical to SEQ ID NO: 122462
  derived and/or modified CDS sequence (opt2) from hemagglutinin__InfluenzaB__AGX22599

SEQ ID NO: 123631 - RNA, 1755 nt, Artificial Sequence
  derived and/or modified CDS sequence (opt2) from hemagglutinin__InfluenzaB__AGX22610
augaaggccaucaucguccuccucauggucgucaccuccaacgccgaccgcaucugcaccggcaucaccuccuccaacuccccccacgucgucaagaccgccacccagggcgaggucaacgucaccggcgucaucccccucaccaccacccccaccaaguccuacuucgccaaccucaagggcacccgcacccgcggcaagcucugccccgacugccucaacugcaccgaccucgacgucgcccucggccgccccaugugcgucggcaccacccccuccgccaaggccuccauccuccacgagguccgccccgucaccuccggcugcuuccccaucaugcacgaccgcaccaagauccgccagcuccccaaccuccuccgcggcuacgagaacauccgccucuccacccagaacgucaucgacgccgagaaggcccccggcggccccuaccgccucggcaccuccggcuccugccccaacgccaccuccaaguccggcuucuucgccaccauggccugggccguccccaaggacaacaacaagaacgccaccaacccccucaccgucgagguccccuacaucugcaccgagggcgaggaccagaucaccgucuggggcuuccacuccgacaacaagacccagaugaagaaccucuacggcgaccccaacccccagaaguucaccuccuccgccaacggcgucaccacccacuacgucucccagaucggcggcuuccccgaccagaccgaggacggcggccucccccaguccggccgcaucgucgucgacuacaugaugcagaagcccggcaagaccggcaccaucgucuaccagcgcggcguccuccucccccagaaggucuggugcgccuccggccgcuccaaggucaucaagggcucccucccccucaucggcgaggccgacugccuccacgagaaguacggcggccucaacaaguccaagcccuacuacaccggcgagcacgccaaggccaucggcaacugccccaucugggucaagaccccccucaagcucgccaacggcaccaaguaccgcccccccgccaagcuccucaaggagcgcggcuucuucggcgccaucgccggcuuccucgagggcggcugggagggcaugaucgccggcuggcacggcuacaccucccacggcgcccacggcgucgccgucgccgccgaccucaaguccacccaggaggccaucaacaagaucaccaagaaccucaacucccucuccgagcucgaggucaagaaccuccagcgccucuccggcgccauggacgagcuccacaacgagauccucgagcucgacgagaaggucgacgaccuccgcgccgacaccaucuccucccagaucgagcucgccguccuccucuccaacgagggcaucaucaacuccgaggacgagcaccuccucgcccucgagcgcaagcucaagaagaugcucggccccuccgccgucgacaucggcaacggcugcuucgagaccaagcacaagugcaaccagaccugccucgaccgcaucgccgccggcaccuucaacgccggcgaguucucccuccccaccuucgacucccucaacaucaccgccgccucccucaacgacgacggccucgacaaccacaccauccuccucuacuacuccaccgccgccuccucccucgccgucacccucaugcucgccaucuucaucgucuacauggucucccgcgacaacgucuccugcuccaucugccucuga

SEQ ID NO: 123632 - RNA, 1755 nt, Artificial Sequence
  derived and/or modified CDS sequence (opt2) from hemagglutinin__InfluenzaB__AGX22621
augaaggccaucaucguccuccucauggucgucaccuccaacgccgaccgcaucugcaccggcaucaccuccuccaacuccccccacgucgucaagaccgccacccagggcgaggucaacgucaccggcgucaucccccucaccaccacccccaccaaguccuacuucgccaaccucaagggcacccgcacccgcggcaagcucugccccgacugccucaacugcaccgaccucgacgucgcccucggccgccccaugugcgucggcaccacccccuccgccaaggccuccauccuccacgagguccgccccgucaccuccggcugcuuccccaucaugcacgaccgcaccaagauccgccagcucgccaaccuccuccgcggcuacgagaacauccgccucuccacccagaacgucaucgacgccgagaaggcccccggcggccccuaccgccucggcaccuccggcuccugccccaacgccaccuccaaguccggcuucuucgccaccauggccugggccguccccaaggacaacaacaagaacgccaccaacccccucaccgucgagguccccuacaucugcaccggcggcgaggaccagaucaccgucuggggcuuccacuccgacaacaagacccagaugaagaaccucuacggcgacuccaacccccagaaguucaccuccuccgccaacggcgucaccacccacuacgucucccagaucggcggcuuccccgaccagaccgaggacggcggccucccccaguccggccgcaucgucgucgacuacaugaugcagaagcccggcaagaccggcaccaucgucuaccagcgcggcguccuccucccccagaaggucuggugcgccuccggccgcuccaaggucaucaagggcucccucccccucaucggcgaggccgacugccuccacgagaaguacggcggccucaacaaguccaagcccuacuacaccggcgagcacgccaaggccaucggcaacugccccaucugggucaagaccccccucaagcucgccaacggcaccaaguaccgcccccccgccaagcuccucaaggagcgcggcuucuucggcgccaucgccggcuuccucgagggcggcugggagggcaugaucgccggcuggcacggcuacaccucccacggcgcccacggcgucgccgucgccgccgaccucaaguccacccaggaggccaucaacaagaucaccaagaaccucaacucccucuccgagcucgaggucaagaaccuccagcgccucuccggcgccauggacgagcuccacaacgagauccucgagcucgacgagaaggucgacgaccuccgcgccgacaccaucuccucccagaucgagcucgccguccuccucuccaacgagggcaucaucaacuccgaggacgagcaccuccucgcccucgagcgcaagcucaagaagaugcucggccccuccgccgucgacaucggcaacggcugcuucgagaccaagcacaagugcaaccagaccugccucgaccgcaucgccgccggcaccuucaacgccggcgaguucucccuccccaccuucgacucccucaacaucaccgccgccucccucaacgacgacggccucgacaaccacaccauccuccucuacuacuccaccgccgccuccucccucgccgucacccucaugcucgccaucuucaucgucuacauggucucccgcgacaacgucuccugcuccaucugccucuga

SEQ ID NO: 123633 - RNA, 1755 nt, Artificial Sequence; identical to SEQ ID NO: 122462
  derived and/or modified CDS sequence (opt2) from hemagglutinin__InfluenzaB__AGX22632

SEQ ID NO: 123634 - RNA, 1755 nt, Artificial Sequence
  derived and/or modified CDS sequence (opt2) from hemagglutinin__InfluenzaB__AGX22643
augaaggccaucaucguccuccucauggucgucaccuccaacgccgaccgcaucugcaccggcaucaccuccuccaacuccccccacgucgucaagaccgccacccagggcgaggucaacgucaccggcgucaucccccucaccaccacccccaccaaguccuacuucgccaaccucaagggcacccgcacccgcggcaagcucugccccgacugccucaacugcaccgaccucgacgucgcccucggccgccccaugugcgucggcaccacccccuccgccaaggccuccauccuccacgagguccgccccgucaccuccggcugcuuccccaucaugcacgaccgcaccaagauccgccagcucgccaaccuccuccgcggcuacgagaacauccgccucuccauccagaacgucaucgacgccgagaaggcccccggcggccccuaccgccucggcaccuccggcuccugccccaacgccaccuccaaguccggcuucuucgccaccauggccugggccguccccaaggacaacaacaagaacgccaccaacccccucaccgucgagguccccuacaucugcaccgagggcgaggaccagaucaccgucuggggcuuccacuccgacaacaagacccagaugaagaaccucuacggcgacuccaacccccagaaguucaccuccuccgccaacggcgucaccacccacuacgucucccagaucggcggcuuccccgaccagaccgaggacggcggccucccccaguccggccgcaucgucgucgacuacaugaugcagaagcccggcaagaccggcaccaucgucuaccagcgcggcguccuccucccccagaaggucuggugcgccuccggccgcuccaaggucaucaagggcucccucccccucaucggcgaggccgacugccuccacgagaaguacggcggccucaacaaguccaagcccuacuacaccggcgagcacgccaaggccaucggcaacugccccaucugggucaagaccccccucaagcucgccaacggcaccaaguaccgcccccccgccaagcuccucaaggagcgcggcuucuucggcgccaucgccggcuuccucgagggcggcugggagggcaugaucgccggcuggcacggcuacaccucccacggcgcccacggcgucgccgucgccgccgaccucaaguccacccaggaggccaucaacaagaucaccaagaaccucaacucccucuccgagcucgaggucaagaaccuccagcgccucuccggcgccauggacgagcuccacaacgagauccucgagcucgacgagaaggucgacgaccuccgcgccgacaccaucuccucccagaucgagcucgccguccuccucuccaacgagggcaucaucaacuccgaggacgagcaccuccucgcccucgagcgcaagcucaagaagaugcucggccccuccgccgucgacaucggcaacggcugcuucgagaccaagcacaagugcaaccagaccugccucgaccgcaucgccgccggcaccuucaacgccggcgaguucucccuccccaccuucgacucccucaacaucaccgccgccucccucaacgacgacggccucgacaaccacaccauccuccucuacuacuccaccgccgccuccucccucgccgucacccucaugcucgccaucuucaucgucuacauggucucccgcgacaacgucuccugcuccaucugccucuga

SEQ ID NO: 123635 - RNA, 1755 nt, Artificial Sequence
  derived and/or modified CDS sequence (opt2) from hemagglutinin__InfluenzaB__AGX22654
augaaggccaucaucguccuccucauggucgucaccuccaacgccgaccgcaucugcaccggcaucaccuccuccaacuccccccacgucgucaagaccgccacccagggcgaggucaacgucaccggcgucaucccccucaccaccacccccaccaaguccuacuucgccaaccucaagggcacccgcacccgcggcaagcucugccccgacugccucaacugcaccgaccucgacgucgcccucggccgccccaugugcgucggcaccacccccuccgccaaggccuccauccuccacgagguccgccccgucaccuccggcugcuuccccaucaugcacgaccgcaccaagauccgccagcucgccaaccuccuccgcggcuacgagaacauccgccucuccacccagaacgucaucgacgccgagaaggcccccggcggccccuaccgccucggcaccuccggcuccugccccaacgccaccuccaaguccggcuucuucgccaccauggccugggccguccccaaggacaacaacaagaacgccaccaacccccucaccgucgagguccccuacaucugcaccgagggcgaggaccagaucaccgucuggggcuuccacuccgacaacaagacccagaugaagaaccucuacggcgacuccaacccccagaaguucaccuccuccgccaacggcgucaccacccacuacgucucccagaucggcggcuuccccgaccagaccgaggacggcggccucccccaguccggccgcaucgucgucgacuacaugaugcagaagcccggcaagaccggcaccaucgucuaccagcgcggcguccuccucccccagaaggucuggugcgccuccggccgcuccaaggucaucaagggcucccucccccucaucggcgaggccgacugccuccacgagaaguacggcggccucaacaaguccaagcccuacuacaccggcgagcacgccaaggccaucggcaacugccccaucugggucaagaccccccucaagcucgccaacggcaccaaguaccgcccccccgccaagcuccucaaggagcgcggcuucuucggcgccaucgccggcuuccucgagggcggcugggagggcaugaucgccggcuggcacggcuacaccucccacggcgcccacggcgucgccgucgccgccgaccucaaguccacccaggaggccaucaacaagaucaccaagaaccucaacucccucuccgagcucgaggucaagaaccuccagcgccucuccggcgccauggacgagcuccacuccgagauccucgagcucgacgagaaggucgacgaccuccgcgccgacaccaucuccucccagaucgagcucgccguccuccucuccaacgagggcaucaucaacuccgaggacgagcaccuccucgcccucgagcgcaagcucaagaagaugcucggccccuccgccgucgacaucggcaacggcugcuucgagaccaagcacaagugcaaccagaccugccucgaccgcaucgccgccggcaccuucaacgccggcgaguucucccuccccaccuucgacucccucaacaucaccgccgccucccucaacgacgacggccucgacaaccacaccauccuccucuacuacuccaccgccgccuccucccucgccgucacccucaugcucgccaucuucaucgucuacauggucucccgcgacaacgucuccugcuccaucugccucuga

SEQ ID NO: 123636 - RNA, 1755 nt, Artificial Sequence; identical to SEQ ID NO: 123074
  derived and/or modified CDS sequence (opt2) from hemagglutinin__InfluenzaB__AGX22665

SEQ ID NO: 123637 - RNA, 1755 nt, Artificial Sequence; identical to SEQ ID NO: 123074
  derived and/or modified CDS sequence (opt2) from hemagglutinin__InfluenzaB__AGX22676

SEQ ID NO: 123638 - RNA, 1755 nt, Artificial Sequence; identical to SEQ ID NO: 122462
  derived and/or modified CDS sequence (opt2) from hemagglutinin__InfluenzaB__AGX22687

SEQ ID NO: 123639 - RNA, 1755 nt, Artificial Sequence; identical to SEQ ID NO: 123074
  derived and/or modified CDS sequence (opt2) from hemagglutinin__InfluenzaB__AGX22698

SEQ ID NO: 123640 - RNA, 1755 nt, Artificial Sequence
  derived and/or modified CDS sequence (opt2) from hemagglutinin__InfluenzaB__AGX22709
augaaggccaucaucguccuccucauggucgucaccuccaacgccgaccgcaucugcaccggcaucaccuccuccaacuccccccacgucgucaagaccgccacccagggcgaggucaacgucaccggcgucaucccccucaccaccacccccaccaaguccuacuucgccaaccucaagggcacccgcacccgcggcaagcucugccccgacugccucaacugcaccgaccucgacgucgcccucggccgccccaugugcgucggcaccacccccuccgccaaggccuccauccuccacgagguccgccccgucaccuccggcugcuuccccaucaugcacgaccgcaccaagauccgccagcucgccaaccuccuccgcggcuacgagaacauccgccucuccacccagaacgucaucgacgccgagaaggcccccggcggccccuaccgccucggcaccuccggcuccugccccaacgccaccuccaaguccggcuucuucgccaccauggccugggccguccccaaggacaacaacaagaacgccaccaacccccucaccgucgagguccccuacaucugcaccgagggcgaggaccagaucaccgucuggggcuuccacuccgacaacaagacccagaugaagaaccucuacggcgacuccaacccccagaaguucaccuccuccgccaacggcgucaccacccacuacgucucccagaucggcggcuuccccgaccagaccgaggacggcggccucccccaguccggccgcaucgucgucgacuacaugaugcagaagcccgagaagaccggcaccaucgucuaccagcgcggcguccuccucccccagaaggucuggugcgccuccggccgcuccaaggucaucaagggcucccucccccucaucggcgaggccgacugccuccacgagaaguacggcggccucaacaaguccaagcccuacuacaccggcgagcacgccaaggccaucggcaacugccccaucugggucaagaccccccucaagcucgccaacggcaccaaguaccgcccccccgccaagcuccucaaggagcgcggcuucuucggcgccaucgccggcuuccucgagggcggcugggagggcaugaucgccggcuggcacggcuacaccucccacggcgcccacggcgucgccgucgccgccgaccucaaguccacccaggaggccaucaacaagaucaccaagaaccucaacucccucuccgagcucgaggucaagaaccuccagcgccucuccggcgccauggacgagcuccacaacgagauccucgagcucgacgagaaggucgacgaccuccgcgccgacaccaucuccucccagaucgagcucgccguccuccucuccaacgagggcaucaucaacuccgaggacgagcaccuccucgcccucgagcgcaagcucaagaagaugcucggccccuccgccgucgacaucggcaacggcugcuucgagaccaagcacaagugcaaccagaccugccucgaccgcaucgccgccggcaccuucaacgccggcgaguucucccuccccaccuucgacucccucaacaucaccgccgccucccucaacgacgacggccucgacaaccacaccauccuccucuacuacuccaccgccgccuccucccucgccgucacccucaugcucgccaucuucaucgucuacauggucucccgcgacaacgucuccugcuccaucugccucuga

SEQ ID NO: 123641 - RNA, 1755 nt, Artificial Sequence
  derived and/or modified CDS sequence (opt2) from hemagglutinin__InfluenzaB__AGX22720
augaaggccaucaucguccuccucauggucgucaccuccaacgccgaccgcaucugcaccggcaucaccuccuccaacuccccccacgucgucaagaccgccacccagggcgaggucaacgucaccggcgucaucccccucaccaccacccccaccaaguccuacuucgccaaccucaagggcacccgcacccgcggcaagcucugccccgacugccucaacugcaccgaccucgacgucgcccucggccgccccaugugcgucggcaccacccccuccgccaaggccuccauccuccacgagguccgccccgucaccuccggcugcuuccccaucaugcacgaccgcaccaagauccgccagcuccccaaccuccuccgcggcuacgagaacauccgccucuccacccagaacgucaucgacgccgagaaggcccccggcggccccuaccgccucggcaccuccggcuccugccccaacgccaccuccaaguccggcuucuucgccaccauggccugggccguccccaaggacaacaacaagaacgccaccaacccccucaccgucgagguccccuacaucugcaccgagggcgaggaccagaucaccgucuggggcuuccacuccgacaacaagacccagaugaagaaccucuacggcgacuccaacccccagaaguucaccuccuccgccaacggcgccaccacccacuacgucucccagaucggcggcuuccccgaccagaccgaggacggcggccucccccaguccggccgcaucgucgucgacuacaugaugcagaagcccggcaagaccggcaccaucgucuaccagcgcggcguccuccucccccagaaggucuggugcgccuccggccgcuccaaggucaucaagggcucccucccccucaucggcgaggccgacugccuccacgagaaguacggcggccucaacaaguccaagcccuacuacaccggcgagcacgccaaggccaucggcaacugccccaucugggucaagaccccccucaagcucgccaacggcaccaaguaccgcccccccgccaagcuccucaaggagcgcggcuucuucggcgccaucgccggcuuccucgagggcggcugggagggcaugaucgccggcuggcacggcuacaccucccacggcgcccacggcgucgccgucgccgccgaccucaaguccacccaggaggccaucaacaagaucaccaagaaccucaacucccucuccgagcucgaggucaagaaccuccagcgccucuccggcgccauggacgagcuccacaacgagauccucgagcucgacgagaaggucgacgaccuccgcgccgacaccaucuccucccagaucgagcucgccguccuccucuccaacgagggcaucaucaacuccgaggacgagcaccuccucgcccucgagcgcaagcucaagaagaugcucggccccuccgccgucgacaucggcaacggcugcuucgagaccaagcacaagugcaaccagaccugccucgaccgcaucgccgccggcaccuucaacgccggcgaguucucccuccccaccuucgacucccucaacaucaccgccgccucccucaacgacgacggccucgacaaccacaccauccuccucuacuacuccaccgccgccuccucccucgccgucacccucaugcucgccaucuucaucgucuacauggucucccgcgacaacgucuccugcuccaucugccucuga

SEQ ID NO: 123642 - RNA, 1755 nt, Artificial Sequence; identical to SEQ ID NO: 123074
  derived and/or modified CDS sequence (opt2) from hemagglutinin__InfluenzaB__AGX22731

SEQ ID NO: 123643 - RNA, 1755 nt, Artificial Sequence; identical to SEQ ID NO: 123635
  derived and/or modified CDS sequence (opt2) from hemagglutinin__InfluenzaB__AGX22742

SEQ ID NO: 123644 - RNA, 1755 nt, Artificial Sequence
  derived and/or modified CDS sequence (opt2) from hemagglutinin__InfluenzaB__AGX22753
augaaggccaucaucguccuccucauggucgucaccuccaacgccgaccgcaucugcaccggcaucaccuccuccaacuccccccacgucgucaagaccgccacccagggcgaggucaacgucaccggcgucaucccccucaccaccacccccgccaaguccuacuucgccaaccucaagggcacccgcacccgcggcaagcucugccccgacugccucaacugcaccgaccucgacgucgcccucggccgccccaugugcgucggcaccacccccuccgccaaggccuccauccuccacgagguccgccccgucaccuccggcugcuuccccaucaugcacgaccgcaccaagauccgccagcucgccaaccuccuccgcggcuacgagaacauccgccucuccacccagaacgucaucgacgccgagaaggcccccggcggccccuaccgccucggcaccuccggcuccugccccaacgccaccuccaaguccggcuucuucgccaccauggccugggccguccccaaggacaacaacaagaacgccaccaacccccucaccgucgagguccccuacaucugcaaggagggcgaggaccagaucaccgucuggggcuuccacuccgacaacaagacccagaugaagaaccucuacggcgacuccaacccccagaaguucaccuccuccgccaacggcgucaccacccacuacgucucccagaucggcggcuuccccgaccagaccgaggacggcggccucccccaguccggccgcaucgucgucgacuacaugauccagaagcccggcaagaccggcaccaucgucuaccagcgcggcguccuccucccccagaaggucuggugcgccuccggccgcuccaaggucaucaagggcucccucccccucaucggcgaggccgacugccuccacgagaaguacggcggccucaacaaguccaagcccuacuacaccggcgagcacgccaaggccaucggcaacugccccaucugggucaagaccccccucaagcucgccaacggcaccaaguaccgcccccccgccaagcuccucaaggagcgcggcuucuucggcgccaucgccggcuuccucgagggcggcugggagggcaugaucgccggcuggcacggcuacaccucccacggcgcccacggcgucgccgucgccgccgaccucaaguccacccaggaggccaucaacaagaucaccaagaaccucaacucccucuccgagcucgaggucaagaaccuccagcgccucuccggcgccauggacgagcuccacaacgagauccucgagcucgacgagaaggucgacgaccuccgcgccgacaccaucuccucccagaucgagcucgccguccuccucuccaacgagggcaucaucaacuccgaggacgagcaccuccucgcccucgagcgcaagcucaagaagaugcucggccccuccgccgucgacaucggcaacggcugcuucgagaccaagcacaagugcaaccagaccugccucgaccgcaucgccgccggcaccuucaacgccggcgaguucucccuccccaccuucgacucccucaacaucaccgccgccucccucaacgacgacggccucgacaaccacaccauccuccucuacuacuccaccgccgccuccucccucgccgucacccucaugcucgccaucuucaucgucuacauggucucccgcgacaacgucuccugcuccaucugccucuga

SEQ ID NO: 123645 - RNA, 1755 nt, Artificial Sequence
  derived and/or modified CDS sequence (opt2) from hemagglutinin__InfluenzaB__AGX22764
augaaggccaucaucguccuccucauggucgucaccuccaacgccgaccgcaucugcaccggcaucaccuccuccaacuccccccacgucgucaagaccgccacccagggcgaggucaacgucaccggcgucaucccccucaccaccacccccaccaaguccuacuucgccaaccucaagggcacccgcacccgcggcaagcucugccccgacugccucaacugcaccgaccucgacgucgcccucggccgccccaugugcgucggcaccacccccuccgccaaggccuccauccuccacgagguccgccccgucaccuccggcugcuuccccaucaugcacgaccgcaccaagauccgccagcucgccaaccuccuccgcggcuacgagaacauccgccucuccacccagaacgucaucgacgccgagaaggcccccggcggccccuaccgccucggcaccuccggcuccugccccaacgccaccuccaaguccggcuucuucgccaccauggccugggccguccccaaggacaacaacaagaacgccaccaacccccucaccgucgagguccccuacaucugcaaggagggcgaggaccagaucaccgucuggggcuuccacuccgacaacaagacccagaugaagaaccucuacggcgacuccaacccccagaaguucaccuccuccgccaacggcgucaccacccacuacgucucccagaucggcggcuuccccgaccagaccgaggacggcggccucccccaguccggccgcaucgucgucgacuacaugauccagaagcccggcaagaccggcaccaucgucuaccagcgcggcguccuccucccccagaaggucuggugcgccuccggccgcuccaaggucaucaagggcucccucccccucaucggcgaggccgacugccuccacgagaaguacggcggccucaacaaguccaagcccuacuacaccggcgaccacgccaaggccaucggcaacugccccaucugggucaagaccccccucaagcucgccaacggcaccaaguaccgcccccccgccaagcuccucaaggagcgcggcuucuucggcgccaucgccggcuuccucgagggcggcugggagggcaugaucgccggcuggcacggcuacaccucccacggcgcccacggcgucgccgucgccgccgaccucaaguccacccaggaggccaucaacaagaucaccaagaaccucaacucccucuccgagcucgaggucaagaaccuccagcgccucuccggcgccauggacgagcuccacaacgagauccucgagcucgacgagaaggucgacgaccuccgcgccgacaccaucuccucccagaucgagcucgccguccuccucuccaacgagggcaucaucaacuccgaggacgagcaccuccucgcccucgagcgcaagcucaagaagaugcucggccccuccgccgucgacaucggcaacggcugcuucgagaccaagcacaagugcaaccagaccugccucgaccgcaucgccgccggcaccuucaacgccggcgaguucucccuccccaccuucgacucccucaacaucaccgccgccucccucaacgacgacggccucgacaaccacaccauccuccucuacuacuccaccgccgccuccucccucgccgucacccucaugcucgccaucuucaucgucuacauggucucccgcgacaacgucuccugcuccaucugccucuga

SEQ ID NO: 123646 - RNA, 1755 nt, Artificial Sequence
  derived and/or modified CDS sequence (opt2) from hemagglutinin__InfluenzaB__AGX22775
augaaggccaucaucguccuccucauggucgucaccuccaacgccgaccgcaucugcaccggcaucaccuccuccaacuccccccacgucgucaagaccgccacccagggcgaggucaacgucaccggcgucaucccccucaccaccacccccaccaaguccuacuucgccaaccucaagggcacccgcacccgcggcaagcucugccccgacugccucaacugcaccgaccucgacgucgcccucggccgccccaugugcgucggcaccacccccuccgccaaggccuccauccuccacgagguccgccccgucaccuccggcugcuuccccaucaugcacgaccgcaccaagauccgccagcuccccaaccuccuccgcggcuacgagaacauccgccucuccacccagaacgucaucgacgccgagaaggcccccggcggccccuaccgccucggcaccuccggcuccugccccaacgccaccuccaaguccggcuucuucgccaccauggccugggccguccccaaggacaacaacaagaacgccaccaacccccucaccgucgagguccccuacaucugcaccgagggcgaggaccagaucaccgucuggggcuuccacuccgacaacaagacccagaugaagaaccucuacggcgacuccaacccccagaaguucaccuccuccgccaacggcgucaccacccacuacgucucccagaucggcggcuuccccgaccagaccgaggacggcggccucccccaguccggccgcaucgucgucgacuacaugaugcagaagcccggcaagaccggcaccaucgucuaccagcgcggcguccuccucccccagaaggucuggugcgccuccggccgcuccaaggucaucaagggcucccucccccucaucggcgaggccgacugccuccacgagaaguacggcggccucaacaaguccaagcccuacuacaccggcgagcacgccaaggccaucggcaacugccccaucugggucaagaccccccucaagcucgccaacggcaccaaguaccgcccccccgccaagcuccucaaggagcgcggcuucuucggcgccaucgccggcuuccucgagggcggcugggagggcaugaucgccggcuggcacggcuacaccucccacggcgcccacggcgucgccgucgccgccgaccucaaguccacccaggaggccaucaacaagaucaccaagaaccucaacucccucuccgagcucgaggucaagaaccuccagcgccucuccggcgccauggacgagcuccacaacgagauccucgagcucgacgagaaggucgacgaccuccgcgccgacaccaucuccucccagaucgagcucgccguccuccucuccaacgagggcaucaucaacuccgaggacgagcaccuccucgcccucgagcgccgccucaagaagaugcucggccccuccgccgucgagaucggcaacggcugcuucgagaccaagcacaagugcaaccagaccugccucgaccgcaucgccgccggcaccuucaacgccggcgaguucucccuccccaccuucgacucccucaacaucaccgccgccucccucaacgacgacggccucgacaaccacaccauccuccucuacuacuccaccgccgccuccucccucgccgucacccucaugcucgccaucuucaucgucuacauggucucccgcgacaacgucuccugcuccaucugccucuga

SEQ ID NO: 123647 - RNA, 1755 nt, Artificial Sequence; identical to SEQ ID NO: 123074
  derived and/or modified CDS sequence (opt2) from hemagglutinin__InfluenzaB__AGX22786

SEQ ID NO: 123648 - RNA, 1755 nt, Artificial Sequence
  derived and/or modified CDS sequence (opt2) from hemagglutinin__InfluenzaB__AGX22797
augaaggccaucaucguccuccucauggucgucaccuccaacgccgaccgcaucugcaccggcaucaccuccuccaacuccccccacgucgucaagaccgccacccagggcgaggucaacgucaccggcgucaucccccucaccaccacccccaccaaguccuacuucgccaaccucaagggcacccgcacccgcggcaagcucugccccgacugccucaacugcaccgaccucgacgucgcccucggccgccccaugugcgucggcaccacccccuccgccaaggccuccauccuccacgagguccgccccgucaccuccggcugcuuccccaucaugcacgaccgcaccaagauccgccagcucgccaaccuccuccgcggcuacgagaacauccgccucuccacccagaacgucaucgacgccgagaaggcccccggcggccccuaccgccucggcaccuccggcuccugccccaacgccaccuccaaguccggcuucuucgccaccauggccugggccguccccaaggacaacaacaagaacgccaccaacccccucaccgucgagguccccuacaucugcaaggagggcgaggaccagaucaccgucuggggcuuccacuccgacaacaagacccagaugaagaaccucuacggcgacuccaacccccagaaguucaccuccuccgccaacggcgucaccacccacuacgucucccagaucggcggcuuccccgaccagaccgaggacggcggccucccccaguccggccgcaucgucgucgacuacaugauccagaagcccggcaagaccggcaccaucgucuaccagcgcggcguccucuucccccagaaggucuggugcgccuccggccgcuccaaggucaucaagggcucccucccccucaucggcgaggccgacugccuccacgagaaguacggcggccucaacaaguccaagcccuacuacaccggcgagcacgccaaggccaucggcaacugccccaucugggucaagaccccccucaagcucgccaacggcaccaaguaccgcccccccgccaagcuccucaaggagcgcggcuucuucggcgccaucgccggcuuccucgagggcggcugggagggcaugaucgccggcuggcacggcuacaccucccacggcgcccacggcgucgccgucgccgccgaccucaaguccacccaggaggccaucaacaagaucaccaagaaccucaacucccucuccgagcucgaggucaagaaccuccagcgccucuccggcgccauggacgagcuccacaacgagauccucgagcucgacgagaaggucgacgaccuccgcgccgacaccaucuccucccagaucgagcucgccguccuccucuccaacgagggcaucaucaacuccgaggacgagcaccuccucgcccucgagcgcaagcucaagaagaugcucggccccuccgccgucgacaucggcaacggcugcuucgagaccaagcacaagugcaaccagaccugccucgaccgcaucgccgccggcaccuucaacgccggcgaguucucccuccccaccuucgacucccucaacaucaccgccgccucccucaacgacgacggccucgacaaccacaccauccuccucuacuacuccaccgccgccuccucccucgccgucacccucaugcucgccaucuucaucgucuacauggucucccgcgacaacgucuccugcuccaucugccucuga

SEQ ID NO: 123649 - RNA, 1755 nt, Artificial Sequence; identical to SEQ ID NO: 123074
  derived and/or modified CDS sequence (opt2) from hemagglutinin__InfluenzaB__AGX22808

SEQ ID NO: 123650 - RNA, 1755 nt, Artificial Sequence; identical to SEQ ID NO: 123074
  derived and/or modified CDS sequence (opt2) from hemagglutinin__InfluenzaB__AGX22819

SEQ ID NO: 123651 - RNA, 1755 nt, Artificial Sequence; identical to SEQ ID NO: 123074
  derived and/or modified CDS sequence (opt2) from hemagglutinin__InfluenzaB__AGX22830

SEQ ID NO: 123652 - RNA, 1755 nt, Artificial Sequence
  derived and/or modified CDS sequence (opt2) from hemagglutinin__InfluenzaB__AGX22841
augaaggccaucaucguccuccucauggucgucaccuccaacgccgaccgcaucugcaccggcaucaccuccuccaacuccccccacgucgucaagaccgccacccagggcgaggucaacgucaccggcgucaucccccucaccaccacccccaccaaguccuacuucgccaaccucaagggcacccgcacccgcggcaagcucugccccgacugccucaacugcaccgaccucgacgucgcccucggccgccccaugugcgucggcaccacccccuccgccaaggccuccauccuccacgagguccgccccgucaccuccggcugcuuccccaucaugcacgaccgcaccaagauccgccagcucgccaaccuccuccgcggcuacgagaacauccgccucuccacccagaacgucaucgacgccgagaaggcccccggcggccccuaccgccucggcaccuccggcuccugccccaacgccaccuccaaguccggcuucuucgccaccauggccugggccguccccaaggacaacaacaagaacgccaccaacccccucaccgucgagguccccuacaucugcaaggagggcgaggaccagaucaccgucuggggcuuccacuccgacaacaagacccagaugaagaaccucuacggcgacuccaacccccagaaguucaccuccuccgccgacggcgucaccacccacuacgucucccagaucggcggcuuccccgaccagaccgaggacggcggccucccccaguccggccgcaucgucgucgacuacaugauccagaagcccggcaagaccggcaccaucgucuaccagcgcggcguccuccucccccagaaggucuggugcgccuccggccgcuccaaggucaucaagggcucccucccccucaucggcgaggccgacugccuccacgagaaguacggcggccucaacaaguccaagcccuacuacaccggcgagcacgccaaggccaucggcaacugccccaucugggucaagaccccccucaagcucgccaacggcaccaaguaccgcccccccgccaagcuccucaaggagcgcggcuucuucggcgccaucgccggcuuccucgagggcggcugggagggcaugaucgccggcuggcacggcuacaccucccacggcgcccacggcgucgccgucgccgccgaccucaaguccacccaggaggccaucaacaagaucaccaagaaccucaacucccucuccgagcucgaggucaagaaccuccagcgccucuccggcgccauggacgagcuccacaacgagauccucgagcucgacgagaaggucgacgaccuccgcgccgacaccaucuccucccagaucgagcucgccguccuccucuccaacgagggcaucaucaacuccgaggacgagcaccuccucgcccucgagcgcaagcucaagaagaugcucggccccuccgccgucgacaucggcaacggcugcuucgagaccaagcacaagugcaaccagaccugccucgaccgcaucgccgccggcaccuucaacgccggcgaguucucccuccccaccuucgacucccucaacaucaccgccgccucccucaacgacgacggccucgacaaccacaccauccuccucuacuacuccaccgccgccuccucccucgccgucacccucaugcucgccaucuucaucgucuacauggucucccgcgacaacgucuccugcuccaucugccucuga

SEQ ID NO: 123653 - RNA, 1755 nt, Artificial Sequence; identical to SEQ ID NO: 122462
  derived and/or modified CDS sequence (opt2) from hemagglutinin__InfluenzaB__AGX22852

SEQ ID NO: 123654 - RNA, 1755 nt, Artificial Sequence; identical to SEQ ID NO: 123074
  derived and/or modified CDS sequence (opt2) from hemagglutinin__InfluenzaB__AGX22863

SEQ ID NO: 123655 - RNA, 1755 nt, Artificial Sequence; identical to SEQ ID NO: 123074
  derived and/or modified CDS sequence (opt2) from hemagglutinin__InfluenzaB__AGX22874

SEQ ID NO: 123656 - RNA, 1755 nt, Artificial Sequence; identical to SEQ ID NO: 122462
  derived and/or modified CDS sequence (opt2) from hemagglutinin__InfluenzaB__AGX22885

SEQ ID NO: 123657 - RNA, 1755 nt, Artificial Sequence; identical to SEQ ID NO: 123635
  derived and/or modified CDS sequence (opt2) from hemagglutinin__InfluenzaB__AGX22896

SEQ ID NO: 123658 - RNA, 1755 nt, Artificial Sequence
  derived and/or modified CDS sequence (opt2) from hemagglutinin__InfluenzaB__AGX22907
augaaggccaucaucguccuccucauggucgucaccuccaacgccgaccgcaucugcaccggcaucaccuccuccaacuccccccacgucgucaagaccgccacccagggcgaggucaacgucaccggcgucaucccccucaccaccacccccaccaaguccuacuucgccaaccucaagggcacccgcacccgcggcaagcucugccccgacugccucaacugcaccgaccucgacgucgcccucggccgccccaugugcgucggcaccacccccuccgccaaggccuccauccuccacgagguccgccccgucaccuccggcugcuuccccaucaugcacgaccgcaccaagauccgccagcucgccaaccuccuccgcggcuacgagaacauccgccucuccacccagaacgucaucgacgccgagaaggcccccggcggccccuaccgccucggcaccuccggcuccugccccaacgccaccuccaaguccggcuucuucgccaccauggccugggccguccccaaggacaacaacaagaacgccaccaacccccucaccgucgagguccccuacaucugcaccgagggcgaggaccagaucaccgucuggggcuuccacuccgacaacaagacccagaugaagaaccucuacggcgacuccaacccccagaaguucaccuccuccgccaacggcgucaccacccacuacgucucccagaucggcggcuuccccgaccagaccgaggacggcggccucccccaguccggccgcaucgucgucgacuacaugaugcagaagcccggcaagaccggcaccaucgucuaccagcgcggcguccuccucccccagaaggucuggugcgccuccggccgcuccaaggucaucaagggcucccucccccucaucggcgaggccgacugccuccacgagaaguacggcggccucaacaaguccaagcccuacuacaccggcgagcacgccaaggccaucggcaacugccccaucugggucaagaccccccucaagcucgccaacggcaccaaguaccgcccccccgccaagcuccucaaggagcgcggcuucuucggcgccaucgccggcuuccucgagggcggcugggagggcaugaucgccggcuggcacggcuacaccucccacggcgcccacggcgucgccgucgccgccgaccucaaguccacccaggaggccaucaacaagaucaccaagaaccucaacucccucuccgagcucgaggucaagaaccuccagcgccucuccggcgccauggacgagcuccacaacgagauccucgagcucgacgagaaggucgacgaccuccgcgccgacaccaucuccucccagaucgagcucgccguccuccucuccaacgagggcaucaucaacuccgaggacgagcaccuccucgcccucgagcgcaagcucaagaagaugcucggccccuccgccgucgacaucggcaacggcugcuucgagaccaagcacaagugcaaccagaccugccucgaccgcaucgccgccggcaccuucaacgccggcgaguucucccuccccaccuucgacucccucaacaucaccgccgccucccucaacgacgacggccucgacaaccacaccauccuccucuacuacuccaccgccgccuccucccucgccgucacccucaugcucgccaucuucaucgucuacauggucucccgcgacuccgucuccugcuccaucugccucuga

SEQ ID NO: 123659 - RNA, 1755 nt, Artificial Sequence; identical to SEQ ID NO: 122462
  derived and/or modified CDS sequence (opt2) from hemagglutinin__InfluenzaB__AGX22918

SEQ ID NO: 123660 - RNA, 1755 nt, Artificial Sequence; identical to SEQ ID NO: 122462
  derived and/or modified CDS sequence (opt2) from hemagglutinin__InfluenzaB__AGX22929

SEQ ID NO: 123661 - RNA, 1755 nt, Artificial Sequence; identical to SEQ ID NO: 123074
  derived and/or modified CDS sequence (opt2) from hemagglutinin__InfluenzaB__AGX22940

SEQ ID NO: 123662 - RNA, 1755 nt, Artificial Sequence; identical to SEQ ID NO: 122462
  derived and/or modified CDS sequence (opt2) from hemagglutinin__InfluenzaB__AGX22951

SEQ ID NO: 123663 - RNA, 1755 nt, Artificial Sequence; identical to SEQ ID NO: 122462
  derived and/or modified CDS sequence (opt2) from hemagglutinin__InfluenzaB__AGX22962

SEQ ID NO: 123664 - RNA, 1755 nt, Artificial Sequence; identical to SEQ ID NO: 122462
  derived and/or modified CDS sequence (opt2) from hemagglutinin__InfluenzaB__AGX22973

SEQ ID NO: 123665 - RNA, 1755 nt, Artificial Sequence; identical to SEQ ID NO: 122462
  derived and/or modified CDS sequence (opt2) from hemagglutinin__InfluenzaB__AGX22984

SEQ ID NO: 123666 - RNA, 1755 nt, Artificial Sequence; identical to SEQ ID NO: 122462
  derived and/or modified CDS sequence (opt2) from hemagglutinin__InfluenzaB__AGX22995

SEQ ID NO: 123667 - RNA, 1755 nt, Artificial Sequence; identical to SEQ ID NO: 122462
  derived and/or modified CDS sequence (opt2) from hemagglutinin__InfluenzaB__AGX23006

SEQ ID NO: 123668 - RNA, 1755 nt, Artificial Sequence
  derived and/or modified CDS sequence (opt2) from hemagglutinin__InfluenzaB__AGX23017
augaaggccaucaucguccuccucauggucgucaccuccaacgccgaccgcaucugcaccggcaucaccuccuccaacuccccccacgucgucaagaccgccacccagggcgaggucaacgucaccggcgucaucccccucaccaccacccccaccaaguccuacuucgccaaccucaagggcacccgcacccgcggcaagcucugccccgacugccucaacugcaccgaccucgacgucgcccucggccgccccaugugcgucggcaccacccccuccgccaaggccuccauccuccacgagauccgccccgucaccuccggcugcuuccccaucaugcacgaccgcaccaagauccgccagcucgccaaccuccuccgcggcuacgagaacauccgccucuccacccagaacgucaucgacgccgagaaggcccccggcggccccuaccgccucggcaccuccggcuccugccccaacgccaccuccaaguccggcuucuucgccaccauggccugggccguccccaaggacaacaacaagaacgccaccaacccccucaccgucgagguccccuacaucugcaccgagggcgaggaccagaucaccgucuggggcuuccacuccgacaacaagacccagaugaagaaccucuacggcgacuccaacccccagaaguucaccuccuccgccaacggcgucaccacccacuacgucucccagaucggcggcuuccccgaccagaccgaggacggcggccucccccaguccggccgcaucgucgucgacuacaugaugcagaagcccggcaagaccggcaccaucgucuaccagcgcggcguccuccucccccagaaggucuggugcgccuccggccgcuccaaggucaucaagggcucccucccccucaucggcgaggccgacugccuccacgagaaguacggcggccucaacaaguccaagcccuacuacaccggcgagcacgccaaggccaucggcaacugccccaucugggucaagaccccccucaagcucgccaacggcaccaaguaccgcccccccgccaagcuccucaaggagcgcggcuucuucggcgccaucgccggcuuccucgagggcggcugggagggcaugaucgccggcuggcacggcuacaccucccacggcgcccacggcgucgccgucgccgccgaccucaaguccacccaggaggccaucaacaagaucaccaagaaccucaacucccucuccgagcucgaggucaagaaccuccagcgccucuccggcgccauggacgagcuccacaacgagauccucgagcucgacgagaaggucgacgaccuccgcgccgacaccaucuccucccagaucgagcucgccguccuccucuccaacgagggcaucaucaacuccgaggacgagcaccuccucgcccucgagcgcaagcucaagaagaugcucggccccuccgccgucgacaucggcaacggcugcuucgagaccaagcacaagugcaaccagaccugccucgaccgcaucgccgccggcaccuucaacgccggcgaguucucccuccccaccuucgacucccucaacaucaccgccgccucccucaacgacgacggccucgacaaccacaccauccuccucuacuacuccaccgccgccuccucccucgccgucacccucaugcucgccaucuucaucgucuacauggucucccgcgacaacgucuccugcuccaucugccucuga

SEQ ID NO: 123669 - RNA, 1755 nt, Artificial Sequence
  derived and/or modified CDS sequence (opt2) from hemagglutinin__InfluenzaB__AGX23028
augaaggccaucaucguccuccucauggucgucaccuccaacgccgaccgcaucugcaccggcaucaccuccuccaacuccccccacgucgucaagaccgccacccagggcgaggucaacgucaccggcgucaucccccucaccaccacccccaccaaguccuacuucgccaaccucaagggcaccaagacccgcggcaagcucugccccgacugccucaacugcaccgaccucgacgucgcccucggccgccccaugugcgucggcaccacccccuccgccaaggccuccauccuccacgagguccgccccgucaccuccggcugcuuccccaucaugcacgaccgcaccaagauccgccagcucgccaaccuccuccgcggcuacgagaacauccgccucuccacccagaacgucaucgacgccgagaaggcccccggcggccccuacaagcucggcaccuccggcuccugccccaacgccaccuccaaguccggcuucuucgccaccauggccugggccguccccaaggacaacaacaagaacgccaccaacccccucaccgucgagguccccuacaucugcaccgagggcgaggaccagaucaccgucuggggcuuccacuccgacaacaagacccagaugaagaaccucuacggcgacuccaacccccagaaguucaccuccuccgccaacggcgucaccacccacuacgucucccagaucggcggcuuccccgaccagaccgaggacggcggccucccccaguccggccgcaucgucgucgacuacaugaugcagaagcccggcaagaccggcaccaucgucuaccagcgcggcguccuccucccccagaaggucuggugcgccuccggccgcuccaaggucaucaagggcucccucccccucaucggcgaggccgacugccuccacgagaaguacggcggccucaacaaguccaagcccuacuacaccggcgagcacgccaaggccaucggcaacugccccaucugggucaagaccccccucaagcucgccaacggcaccaaguaccgcccccccgccaagcuccucaaggagcgcggcuucuucggcgccaucgccggcuuccucgagggcggcugggagggcaugaucgccggcuggcacggcuacaccucccacggcgcccacggcgucgccgucgccgccgaccucaaguccacccaggaggccaucaacaagaucaccaagaaccucaacucccucuccgagcucgaggucaagaaccuccagcgccucuccggcgccauggacgagcuccacaacgagauccucgagcucgacgagaaggucgacgaccuccgcgccgacaccaucuccucccagaucgagcucgccguccuccucuccaacgagggcaucaucaacuccgaggacgagcaccuccucgcccucgagcgcaagcucaagaagaugcucggccccuccgccgucgacaucggcaacggcugcuucgagaccaagcacaagugcaaccagaccugccucgaccgcaucgccgccggcaccuucaacgccggcgaguucucccuccccaccuucgacucccucaacaucaccgccgccucccucaacgacgacggccucgacaaccacaccauccuccucuacuacuccaccgccgccuccucccucgccgucacccucaugcucgccaucuucaucgucuacauggucucccgcgacaacgucuccugcuccaucugccucuga

SEQ ID NO: 123670 - RNA, 1755 nt, Artificial Sequence; identical to SEQ ID NO: 122462
  derived and/or modified CDS sequence (opt2) from hemagglutinin__InfluenzaB__AGX23039

SEQ ID NO: 123671 - RNA, 1755 nt, Artificial Sequence
  derived and/or modified CDS sequence (opt2) from hemagglutinin__InfluenzaB__AGX23050
augaaggccaucaucguccuccucauggucgucaccuccaacgccgaccgcaucugcaccggcaucaccuccuccaacuccccccacgucgucaagaccgccacccagggcgaggucaacgucaccggcgucaucccccucaccaccacccccaccaaguccuacuucgccaaccucaagggcacccgcacccgcggcaagcucugccccgacugccucaacugcaccgaccucgacgucgcccucggccgccccaugugcgucggcaccacccccuccgccaaggccuccauccuccacgaggucucccccgucaccuccggcugcuuccccaucaugcacgaccgcaccaagauccgccagcucgccaaccuccuccgcggcuacgagaacauccgccucuccacccagaacgucaucgacgccgagaaggcccccggcggccccuaccgccucggcaccuccggcuccugccccaacgccaccuccaaguccggcuucuucgccaccauggccugggccguccccaaggacaacaacaagaacgccaccaacccccucaccgucgagguccccuacaucugcaccgagggcgaggaccagaucaccgucuggggcuuccacuccgacaacaagacccagaugaagaaccucuacggcgacuccaacccccagaaguucaccuccuccgccaacggcgucaccacccacuacgucucccagaucggcggcuuccccgaccagaccgaggacggcggccucccccaguccggccgcaucgucgucgacuacaugaugcagaagcccggcaagaccggcaccaucgucuaccagcgcggcguccuccucccccagaaggucuggugcgccuccggccgcuccaaggucaucaagggcucccucccccucaucggcgaggccgacugccuccacgagaaguacggcggccucaacaaguccaagcccuacuacaccggcgagcacgccaaggccaucggcaacugccccaucugggucaagaccccccuccgccucgccaacggcaccaaguaccgcccccccgccaagcuccucaaggagcgcggcuucuucggcgccaucgccggcuuccucgagggcggcugggagggcaugaucgccggcuggcacggcuacaccucccacggcgcccacggcgucgccgucgccgccgaccucaaguccacccaggaggccaucaacaagaucaccaagaaccucaacucccucuccgagcucgaggucaagaaccuccagcgccucuccggcgccauggacgagcuccacaacgagauccucgagcucgacgagaaggucgacgaccuccgcgccgacaccaucuccucccagaucgagcucgccguccuccucuccaacgagggcaucaucaacuccgaggacgagcaccuccucgcccucgagcgcaagcucaagaagaugcucggccccuccgccgucgacaucggcaacggcugcuucgagaccaagcacaagugcaaccagaccugccucgaccgcaucgccgccggcaccuucaacgccggcgaguucucccuccccaccuucgacucccucaacaucaccgccgccucccucaacgacgacggccucgacaaccacaccauccuccucuacuacuccaccgccgccuccucccucgccgucacccucaugcucgccaucuucaucgucuacauggucucccgcgacaacgucuccugcuccaucugccucuga

SEQ ID NO: 123672 - RNA, 1755 nt, Artificial Sequence
  derived and/or modified CDS sequence (opt2) from hemagglutinin__InfluenzaB__AGX23061
augaaggccaucaucguccuccucauggucgucaccuccaacgccgaccgcaucugcaccggcaucaccuccuccaacuccccccacgucgucaagaccgccacccagggcgaggucaacgucaccggcgucaucccccucaccaccacccccaccaaguccuacuucgccaaccucaagggcacccgcacccgcggcaagcucugccccgacugccucaacugcaccgaccucgacgucgcccucggccgccccaugugcgucggcaccacccccuccgccaaggccuccauccuccacgagguccgccccgucaccuccggcugcuuccccaucaugcacgaccgcaccaagauccgccagcucgccaaccuccuccgcggcuacgagaacauccgccucuccacccagaacgucaucgacgccgagaaggcccccggcggccccuaccgccucggcaccuccggcuccugccccaacgccaccuccaaguccggcuucuucgccaccauggccugggccguccccaaggacaacaacaagaacgccaccaacccccucaccgucgagguccccuacaucugcaccgagggcgaggaccagaucaccgucuggggcuuccacuccgacaacaagacccagaugaagaaccucuacggcgacuccaacccccagaaguucaccuccuccgccaacggcgucaccacccacuacgucucccagaucggcggcuuccccgaccagaccgaggacggcggccucccccaguccggccgcaucgucgucgacuacaugaugcagaagcccggcaagaccggcaccaucgucuaccagcgcggcguccuccucccccagaaggucuggugcgccuccggccgcuccaaggucaucaagggcucccucccccucaucggcgaggccgacugccuccacgagaaguacggcggccucaacaaguccaagcccuacuacaccggcgagcacgccaaggccaucggcaacugccccaucugggucaagaccccccuccgccucgccaacggcaccaaguaccgcccccccgccaagcuccucaaggagcgcggcuucuucggcgccaucgccggcuuccucgagggcggcugggagggcaugaucgccggcuggcacggcuacaccucccacggcgcccacggcgucgccgucgccgccgaccucaaguccacccaggaggccaucaacaagaucaccaagaaccucaacucccucuccgagcucgaggucaagaaccuccagcgccucuccggcgccauggacgagcuccacaacgagauccucgagcucgacgagaaggucgacgaccuccgcgccgacaccaucuccucccagaucgagcucgccguccuccucuccaacgagggcaucaucaacuccgaggacgagcaccuccucgcccucgagcgcaagcucaagaagaugcucggccccuccgccgucgacaucggcaacggcugcuucgagaccaagcacaagugcaaccagaccugccucgaccgcaucgccgccggcaccuucaacgccggcgaguucucccuccccaccuucgacucccucaacaucaccgccgccucccucaacgacgacggccucgacaaccacaccauccuccucuacuacuccaccgccgccuccucccucgccgucacccucaugcucgccaucuucaucgucuacauggucucccgcgacaacgucuccugcuccaucugccucuga

SEQ ID NO: 123673 - RNA, 1755 nt, Artificial Sequence; identical to SEQ ID NO: 122462
  derived and/or modified CDS sequence (opt2) from hemagglutinin__InfluenzaB__AGX23072

SEQ ID NO: 123674 - RNA, 1755 nt, Artificial Sequence; identical to SEQ ID NO: 123074
  derived and/or modified CDS sequence (opt2) from hemagglutinin__InfluenzaB__AGX23083

SEQ ID NO: 123675 - RNA, 1755 nt, Artificial Sequence; identical to SEQ ID NO: 122462
  derived and/or modified CDS sequence (opt2) from hemagglutinin__InfluenzaB__AGX23094

SEQ ID NO: 123676 - RNA, 1755 nt, Artificial Sequence; identical to SEQ ID NO: 122462
  derived and/or modified CDS sequence (opt2) from hemagglutinin__InfluenzaB__AGX23105

SEQ ID NO: 123677 - RNA, 1755 nt, Artificial Sequence; identical to SEQ ID NO: 123074
  derived and/or modified CDS sequence (opt2) from hemagglutinin__InfluenzaB__AGX23116

SEQ ID NO: 123678 - RNA, 1755 nt, Artificial Sequence; identical to SEQ ID NO: 122462
  derived and/or modified CDS sequence (opt2) from hemagglutinin__InfluenzaB__AGX23127

SEQ ID NO: 123679 - RNA, 1755 nt, Artificial Sequence; identical to SEQ ID NO: 122462
  derived and/or modified CDS sequence (opt2) from hemagglutinin__InfluenzaB__AGX23138

SEQ ID NO: 123680 - RNA, 1755 nt, Artificial Sequence
  derived and/or modified CDS sequence (opt2) from hemagglutinin__InfluenzaB__AGX23149
augaaggccaucaucguccuccucauggucgucaccuccaacgccgaccgcaucugcaccggcaucaccuccuccgacuccccccacgucgucaagaccgccacccagggcgaggucaacgucaccggcgucaucccccucaccaccacccccaccaaguccuacuucgccaaccucaagggcacccgcacccgcggcaagcucugccccgacugccucaacugcaccgaccucgacgucgcccucggccgccccaugugcgucggcaccacccccuccgccaaggccuccauccuccacgagguccgccccgucaccuccggcugcuuccccaucaugcacgaccgcaccaagauccgccagcucgccaaccuccuccgcggcuacgagaacauccgccucuccacccagaacgucaucgacgccgagaaggcccccggcggccccuaccgccucggcaccuccggcuccugccccaacgccaccuccaaguccggcuucuucgccaccauggccugggccguccccaaggacaacaacaagaacgccaccaacccccucaccgucgagguccccuacaucugcaccgagggcgaggaccagaucaccgucuggggcuuccacuccgacaacaagacccagaugaagaaccucuacggcgacuccaacccccagaaguucaccuccuccgccaacggcgucaccacccacuacgucucccagaucggcggcuuccccgaccagaccgaggacggcggccucccccaguccggccgcaucgucgucgacuacaugaugcagaagcccggcaagaccggcaccaucgucuaccagcgcggcguccuccucccccagaaggucuggugcgccuccggccgcuccaaggucaucaagggcucccucccccucaucggcgaggccgacugccuccacgagaaguacggcggccucaacaaguccaagcccuacuacaccggcgagcacgccaaggccaucggcaacugccccaucugggucaagaccccccucaagcucgccaacggcaccaaguaccgcccccccgccaagcuccucaaggagcgcggcuucuucggcgccaucgccggcuuccucgagggcggcugggagggcaugaucgccggcuggcacggcuacaccucccacggcgcccacggcgucgccgucgccgccgaccucaaguccacccaggaggccaucaacaagaucaccaagaaccucaacucccucuccgagcucgaggucaagaaccuccagcgccucuccggcgccauggacgagcuccacaacgagauccucgagcucgacgagaaggucgacgaccuccgcgccgacaccaucuccucccagaucgagcucgccguccuccucuccaacgagggcaucaucaacuccgaggacgagcaccuccucgcccucgagcgcaagcucaagaagaugcucggccccuccgccgucgacaucggcaacggcugcuucgagaccaagcacaagugcaaccagaccugccucgaccgcaucgccgccggcaccuucaacgccggcgaguucucccuccccaccuucgacucccucaacaucaccgccgccucccucaacgacgacggccucgacaaccacaccauccuccucuacuacuccaccgccgccuccucccucgccgucacccucaugcucgccaucuucaucgucuacauggucucccgcgacaacgucuccugcuccaucugccucuga

SEQ ID NO: 123681 - RNA, 1755 nt, Artificial Sequence
  derived and/or modified CDS sequence (opt2) from hemagglutinin__InfluenzaB__AGX23160
augaaggccaucaucguccuccucauggucgucaccuccaacgccgaccgcaucugcaccggcaucaccuccuccaacuccccccacgucgucaagaccgccacccagggcgaggucaacgucaccggcgucaucccccucaccaccacccccaccaaguccuacuucgccaaccucaagggcacccgcacccgcggcaagcucugccccgacugccucaacugcaccgaccucgacgucgcccucggccgccccaugugcgucggcaucacccccuccgccaaggccuccauccuccacgagguccgccccgucaccuccggcugcuuccccaucaugcacgaccgcaccaagauccgccagcucgccaaccuccuccgcggcuacgagaacauccgccucuccacccagaacgucaucgacgccgagaaggcccccggcggccccuaccgccucggcaccuccggcuccugccccaacgccaccuccaaguccggcuucuucgccaccauggccugggccguccccaaggacaacaacaagaacgccaccaacccccucaccgucgagguccccuacaucugcaccgagggcgaggaccagaucaccgucuggggcuuccacuccgacaacaagacccagaugaagaaccucuacggcgacuccaacccccagcgcuucaccuccuccgccaacggcgucaccacccacuacgucucccagaucggcggcuuccccgaccagaccgaggacggcggccucccccaguccggccgcaucgucgucgacuacaugaugcagaagcccggcaagaccggcaccaucgucuaccagcgcggcguccuccucccccagaaggucuggugcgccuccggccgcuccaaggucaucaagggcucccucccccucaucggcgaggccgacugccuccacgagaaguacggcggccucaacaaguccaagcccuacuacaccggcgagcacgccaaggccaucggcaacugccccaucugggucaagaccccccuccgccucgccaacggcaccaaguaccgcccccccgccaagcuccucaaggagcgcggcuucuucggcgccaucgccggcuuccucgagggcggcugggagggcaugaucgccggcuggcacggcuacaccucccacggcgcccacggcgucgccgucgccgccgaccucaaguccacccaggaggccaucaacaagaucaccaagaaccucaacucccucuccgagcucgaggucaagaaccuccagcgccucuccggcgccauggacgagcuccacaacgagauccucgagcucgacgagaaggucgacgaccuccgcgccgacaccaucuccucccagaucgagcucgccguccuccucuccaacgagggcaucaucaacuccgaggacgagcaccuccucgcccucgagcgcaagcucaagaagaugcucggccccuccgccgucgacaucggcaacggcugcuucgagaccaagcacaagugcaaccagaccugccucgaccgcaucgccgccggcaccuucaacgccggcgaguucucccuccccaccuucgacucccucaacaucaccgccgccucccucaacgacgacggccucgacaaccacaccauccuccucuacuacuccaccgccgccuccucccucgccgucacccucaugcucgccaucuucaucgucuacauggucucccgcgacaacgucuccugcuccaucugccucuga

SEQ ID NO: 123682 - RNA, 1755 nt, Artificial Sequence
  derived and/or modified CDS sequence (opt2) from hemagglutinin__InfluenzaB__AGX23171
augaaggccaucaucguccuccucauggucgucaccuccaacgccgaccgcaucugcaccggcaucaccuccuccaacuccccccacgucgucaagaccgccacccagggcgaggucaacgucaccggcgucaucccccucaccaccacccccaccaaguccuacuucgccaaccucaagggcacccgcacccgcggcaagcucugccccgacugccucaacugcaccgaccucgacgucgcccucggccgccccaugugcgucggcaccacccccuccgccaaggccuccauccuccacgagguccgccccgucaccuccggcugcuuccccaucaugcacgaccgcaccaagauccgccagcucgccaaccuccuccgcggcuacgagaacauccgccucuccacccagaacgucaucgacgccgagaaggcccccggcggccccuaccgccucggcaccuccggcuccugccccaacgccaccuccaaguccggcuucuucgccaccauggccugggccguccccaaggacaacaacaagaacgccaccaacccccucaccgucgagguccccuacaucugcaccgagggcgaggaccagaucaccgucuggggcuuccacuccgacaacaagacccagaugaagaaccucuacggcgacuccaacccccagcgcuucaccuccuccgccaacggcgucaccacccacuacgucucccagaucggcggcuuccccgaccagaccgaggacggcggccucccccaguccggccgcaucgucgucgacuacaugaugcagaagcccggcaagaccggcaccaucgucuaccagcgcggcguccuccucccccagaaggucuggugcgccuccggccgcuccaaggucaucaagggcucccucccccucaucggcgaggccgacugccuccacgagaaguacggcggccucaacaaguccaagcccuacuacaccggcgagcacgccaaggccaucggcaacugccccaucugggucaagaccccccuccgccucgccaacggcaccaaguaccgcccccccgccaagcuccucaaggagcgcggcuucuucggcgccaucgccggcuuccucgagggcggcugggagggcaugaucgccggcuggcacggcuacaccucccacggcgcccacggcgucgccgucgccgccgaccucaaguccacccaggaggccaucaacaagaucaccaagaaccucaacucccucuccgagcucgaggucaagaaccuccagcgccucuccggcgccauggacgagcuccacaacgagauccucgagcucgacgagaaggucgacgaccuccgcgccgacaccaucuccucccagaucgagcucgccguccuccucuccaacgagggcaucaucaacuccgaggacgagcaccuccucgcccucgagcgcaagcucaagaagaugcucggccccuccgccgucgacaucggcaacggcugcuucgagaccaagcacaagugcaaccagaccugccucgaccgcaucgccgccggcaccuucaacgccggcgaguucucccuccccaccuucgacucccucaacaucaccgccgccucccucaacgacgacggccucgacaaccacaccauccuccucuacuacuccaccgccgccuccucccucgccgucacccucaugcucgccaucuucaucgucuacauggucucccgcgacaacgucuccugcuccaucugccucuga

SEQ ID NO: 123683 - RNA, 1755 nt, Artificial Sequence; identical to SEQ ID NO: 122462
  derived and/or modified CDS sequence (opt2) from hemagglutinin__InfluenzaB__AGX23182

SEQ ID NO: 123684 - RNA, 1755 nt, Artificial Sequence; identical to SEQ ID NO: 122462
  derived and/or modified CDS sequence (opt2) from hemagglutinin__InfluenzaB__AGX23193

SEQ ID NO: 123685 - RNA, 1755 nt, Artificial Sequence; identical to SEQ ID NO: 123074
  derived and/or modified CDS sequence (opt2) from hemagglutinin__InfluenzaB__AGX23204

SEQ ID NO: 123686 - RNA, 1755 nt, Artificial Sequence; identical to SEQ ID NO: 122462
  derived and/or modified CDS sequence (opt2) from hemagglutinin__InfluenzaB__AGX23215

SEQ ID NO: 123687 - RNA, 1755 nt, Artificial Sequence
  derived and/or modified CDS sequence (opt2) from hemagglutinin__InfluenzaB__AGX23226
augaaggccaucaucguccuccucauggucgucaccuccaacgccgaccgcaucugcaccggcaucaccuccuccaacuccccccacgucgucaagaccgccacccagggcgaggucaacgucaccggcgucaucccccucaccaccacccccaccaaguccuacuucgccaaccucaagggcacccgcacccgcggcaagcucugccccgacugccucaacugcaccgaccucgacgucgcccucggccgccccaugugcgucggcaccacccccuccgccaaggccuccauccuccacgagguccgccccgucaccuccggcugcuuccccaucaugcacgaccgcaccaagauccgccagcucgccaaccuccuccgcggcuacgagaacauccgccucuccacccagaacgucaucgacgccgagaaggcccccggcggccccuaccgccucggcaccuccggcuccugccccaacgccaccuccaaguccggcuucuucgccaccauggccugggccguccccaaggacaacaacaagaacgccaccaacccccucaccgucgagguccccuacaucugcaaggagggcgaggaccagaucaccgucuggggcuuccacuccgacaacaagacccagaugaagaaccucuacggcgacuccaacccccagaaguucaccuccuccgccuccggcgucaccacccacuacgucucccagaucggcggcuuccccgaccagaccgaggacggcggccucccccaguccggccgcaucgucgucgacuacaugauccagaagcccggcaagaccggcaccaucgucuaccagcgcggcguccuccucccccagaaggucuggugcgccuccggccgcuccaaggucaucaagggcucccucccccucaucggcgaggccgacugccuccacgagaaguacggcggccucaacaaguccaagcccuacuacaccggcgagcacgccaaggccaucggcaacugccccaucugggucaagaccccccucaagcucgccaacggcaccaaguaccgcccccccgccaagcuccucaaggagcgcggcuucuucggcgccaucgccggcuuccucgagggcggcugggagggcaugaucgccggcuggcacggcuacaccucccacggcgcccacggcgucgccgucgccgccgaccucaaguccacccaggaggccaucaacaagaucaccaagaaccucaacucccucuccgagcucgaggucaagaaccuccagcgccucuccggcgccauggacgagcuccacaacgagauccucgagcucgacgagaaggucgacgaccuccgcgccgacaccaucuccucccagaucgagcucgccguccuccucuccaacgagggcaucaucaacuccgaggacgagcaccuccucgcccucgagcgcaagcucaagaagaugcucggccccuccgccgucgacaucggcaacggcugcuucgagaccaagcacaagugcaaccagaccugccucgaccgcaucgccgccggcaccuucaacgccggcgaguucucccuccccaccuucgacucccucaacaucaccgccgccucccucaacgacgacggccucgacaaccacaccauccuccucuacuacuccaccgccgccuccucccucgccgucacccucaugcucgccaucuucaucgucuacauggucucccgcgacaacgucuccugcuccaucugccucuga

SEQ ID NO: 123688 - RNA, 1755 nt, Artificial Sequence; identical to SEQ ID NO: 123635
  derived and/or modified CDS sequence (opt2) from hemagglutinin__InfluenzaB__AGX23237

SEQ ID NO: 123689 - RNA, 1755 nt, Artificial Sequence
  derived and/or modified CDS sequence (opt2) from hemagglutinin__InfluenzaB__AGX23248
augaaggccaucaucguccuccucauggucgucaccuccaacgccgaccgcaucugcaccggcaucaccuccuccaacuccccccacgucgucaagaccgccacccagggcgaggucaacgucaccggcgucaucccccucaccaccacccccaccaaguccuacuucgccaaccucaagggcacccgcacccgcggcaagcucugccccgacugccucaacugcaccgaccucgacgucgcccucggccgccccaugugcgucggcaccacccccuccgccaaggccuccauccuccacgagguccgccccgucaccuccggcugcuuccccaucaugcacgaccgcaccaagauccgccagcucgccaaccuccuccgcggcuacgagaacauccgccucuccacccagaacgucaucgacgccgagaaggcccccggcggccccuaccgccucggcaccuccggcuccugccccaacgccaccuccaaguccggcuucuucgccaccauggccugggccguccccaaggacaacaacaagaacgccaccaacccccucaccgucgagguccccuacaucugcaaggagggcgaggaccagaucaccgucuggggcuuccacuccgacaacaagacccagaugaagaaccucuacggcgacuccaacccccagaaguucaccuccuccgccuccggcgucaccacccacuacgucucccagaucggcggcuuccccgaccagaccgaggacggcggccucccccaguccggccgcaucgucgucgacuacaugauccagaagcccggcaagaccggcaccaucgucuaccagcgcggcguccuccucccccagaaggucuggugcgccuccggccgcuccaaggucaucaagggcucccucccccucaucggcgaggccgacugccuccacgagaaguacggcggccucaacaaguccaagcccuacuacaccggcgagcacgccaaggccaucggcaacugccccaucugggucaagaccccccucaagcucgccaacggcaccaaguaccgcccccccgccaagcuccucaaggagcgcggcuucuucggcgccaucgccggcuuccucgagggcggcugggagggcaugaucgccggcuggcacggcuacaccucccacggcgcccacggcgucgccgucgccgccgaccucaaguccacccaggaggccaucaacaagaucaccaagaaccucaacucccucuccgagcucgaggucaagaaccuccagcgccucuccggcgccauggacgagcuccacaacgagauccucgagcucgacgagaaggucgacgaccuccgcgccgacaccaucuccucccagaucgagcucgccguccuccucuccaacgagggcaucaucaacuccgaggacgagcaccuccucgcccucgagcgcaagcucaagaagaugcucggccccuccgccgucgacaucggcaacggcugcuucgagaccaagcacaagugcaaccagaccugccucaaccgcaucgccgccggcaccuucaacgccggcgaguucucccuccccaccuucgacucccucaacaucaccgccgccucccucaacgacgacggccucgacaaccacaccauccuccucuacuacuccaccgccgccuccucccucgccgucacccucaugcucgccaucuucaucgucuacauggucucccgcgacaacgucuccugcuccaucugccucuga

SEQ ID NO: 123690 - RNA, 1755 nt, Artificial Sequence; identical to SEQ ID NO: 122462
  derived and/or modified CDS sequence (opt2) from hemagglutinin__InfluenzaB__AGX23259

SEQ ID NO: 123691 - RNA, 1755 nt, Artificial Sequence; identical to SEQ ID NO: 122462
  derived and/or modified CDS sequence (opt2) from hemagglutinin__InfluenzaB__AGX23270

SEQ ID NO: 123692 - RNA, 1755 nt, Artificial Sequence
  derived and/or modified CDS sequence (opt2) from hemagglutinin__InfluenzaB__AGX23281
augaaggccaucaucguccuccucauggucgucaccuccaacgccgaccgcaucugcaccggcaucaccuccuccaacuccccccacgucgucaagaccgccacccagggcgaggucaacgucaccggcgucaucccccucaccaccacccccaccaaguccuacuucgccaaccucaagggcacccgcacccgcggcaagcucugccccgacugccucaacugcaccgaccucgacgucgcccucggccgccccaugugcgucggcaccacccccuccgccaaggccuccauccuccacgagguccgccccgucaccuccggcugcuuccccaucaugcacgaccgcaccaagauccgccagcucgccaaccuccuccgcggcuacgagaacauccgccucuccacccagaacgucaucgacgccgagaaggcccccggcggccccuaccgccucggcaccuccggcuccugccccaacgccgccuccaaguccggcuucuucgccaccauggccugggccguccccaaggacaacaacaagaacgccaccaacccccucaccgucgagguccccuacaucugcaccgagggcgaggaccagaucaccgucuggggcuuccacuccgacaacaagacccagaugaagaaccucuacggcgacuccaacccccagaaguucaccuccuccgccaacggcgucaccacccacuacgucucccagaucggcggcuuccccgaccagaccgaggacggcggccucccccaguccggccgcaucgucgucgacuacaugaugcagaagcccggcaagaccggcaccaucgucuaccagcgcggcguccuccucccccagaaggucuggugcgccuccggccgcuccaaggucaucaagggcucccucccccucaucggcgaggccgacugccuccacgagaaguacggcggccucaacaaguccaagcccuacuacaccggcgagcacgccaaggccaucggcaacugccccaucugggucaagaccccccucaagcucgccaacggcaccaaguaccgcccccccgccaagcuccucaaggagcgcggcuucuucggcgccaucgccggcuuccucgagggcggcugggagggcaugaucgccggcuggcacggcuacaccucccacggcgcccacggcgucgccgucgccgccgaccucaaguccacccaggaggccaucaacaagaucaccaagaaccucaacucccucuccgagcucgaggucaagaaccuccagcgccucuccggcgccauggacgagcuccacuccgagauccucgagcucgacgagaaggucgacgaccuccgcgccgacaccaucuccucccagaucgagcucgccguccuccucuccaacgagggcaucaucaacuccgaggacgagcaccuccucgcccucgagcgcaagcucaagaagaugcucggccccuccgccgucgacaucggcaacggcugcuucgagaccaagcacaagugcaaccagaccugccucgaccgcaucgccgccggcaccuucaacgccggcgaguucucccuccccaccuucgacucccucaacaucaccgccgccucccucaacgacgacggccucgacaaccacaccauccuccucuacuacuccaccgccgccuccucccucgccgucacccucaugcucgccaucuucaucgucuacauggucucccgcgacaacgucuccugcuccaucugccucuga

SEQ ID NO: 123693 - RNA, 1755 nt, Artificial Sequence
  derived and/or modified CDS sequence (opt2) from hemagglutinin__InfluenzaB__AGX23292
augaaggccaucaucguccuccucauggucgucaccuccaacgccgaccgcaucugcaccggcaucaccuccuccaacuccccccacgucgucaagaccgccacccagggcgaggucaacgucaccggcgucaucccccucaccaccacccccaccaaguccuacuucgccaaccucaagggcacccgcacccgcggcaagcucugccccgacugccucaacugcaccgaccucgacgucgcccucggccgccccaugugcgucggcaccacccccuccgccaaggccuccauccuccacgagguccgccccgucaccuccggcugcuuccccaucaugcacgaccgcaccaagauccgccagcucgccaaccuccuccgcggcuacgagaacauccgccucuccacccagaacgucaucgacgccgagaaggcccccggcggccccuaccgccucggcaccuccggcuccugccccaacgccaacuccaaguccggcuucuucgccaccauggccugggccguccccaaggacaacaacaagaacgccaccaacccccucaccgucgagguccccuacaucugcaccgagggcgaggaccagaucaccgucuggggcuuccacuccgacaacaagacccagaugaagaaccucuacggcgacuccaacccccagaaguucaccuccuccgccaacggcgucaccacccacuacgucucccagaucggcggcuuccccgaccagaccgaggacggcggccucccccaguccggccgcaucgucgucgacuacaugaugcagaagcccggcaagaccggcaccaucgucuaccagcgcggcguccuccucccccagaaggucuggugcgccuccggccgcuccaaggucaucaagggcucccucccccucaucggcgaggccgacugccuccacgagaaguacggcggccucaacaaguccaagcccuacuacaccggcgagcacgccaaggccaucggcaacugccccaucugggucaagaccccccucaagcucgccaacggcaccaaguaccgcccccccgccaagcuccucaaggagcgcggcuucuucggcgccaucgccggcuuccucgagggcggcugggagggcaugaucgccggcuggcacggcuacaccucccacggcgcccacggcgucgccgucgccgccgaccucaaguccacccaggaggccaucaacaagaucaccaagaaccucaacucccucuccgagcucgaggucaagaaccuccagcgccucuccggcgccauggacgagcuccacaacgagauccucgagcucgacgagaaggucgacgaccuccgcgccgacaccaucuccucccagaucgagcucgccguccuccucuccaacgagggcaucaucaacuccgaggacgagcaccuccucgcccucgagcgcaagcucaagaagaugcucggccccuccgccgucgacaucggcaacggcugcuucgagaccaagcacaagugcaaccagaccugccucgaccgcaucgccgccggcaccuucaacgccggcgaguucucccuccccaccuucgacucccucaacaucaccgccgccucccucaacgacgacggccucgacaaccacaccauccuccucuacuacuccaccgccgccuccucccucgccgucacccucaugcucgccaucuucaucgucuacauggucucccgcgacaacgucuccugcuccaucugccucuga

SEQ ID NO: 123694 - RNA, 1755 nt, Artificial Sequence
  derived and/or modified CDS sequence (opt2) from hemagglutinin__InfluenzaB__AGX23314
augaaggccaucaucguccuccucauggucgucaccuccaacgccgaccgcaucugcaccggcaucaccuccuccaacuccccccacgucgucaagaccgccacccagggcgaggucaacgucaccggcgucaucccccucaccaccacccccaccaaguccuacuucgccaaccucaagggcacccgcacccgcggcaagcucugccccgacugccucaacugcaccgaccucgacgucgcccucggccgccccaugugcgucggcaccacccccuccgccaaggccuccauccuccacgagguccgccccgucaccuccggcugcuuccccaucaugcacgaccgcaccaagauccgccagcucgccaaccuccuccgcggcuacgagaacauccgccucuccacccagaacgucaucgacgccgagcgcgcccccggcggccccuaccgccucggcaccuccggcuccugccccaacgccaccuccaaguccggcuucuucgccaccauggccugggccguccccaaggacaacaacaagaacgccaccaacccccucaccgucgagguccccuacaucugcaccgagggcgaggaccagaucaccgucuggggcuuccacuccgacaacaagacccagaugaagaaccucuacggcgacuccaacccccagaaguucaccuccuccgccaacggcgucaccacccacuacgucucccagaucggcggcuuccccgaccagaccgaggacggcggccucccccaguccggccgcaucgucgucgacuacaugaugcagaagcccggcaagaccggcaccaucgucuaccagcgcggcguccuccucccccagaaggucuggugcgccuccggccgcuccaaggucaucaagggcucccucccccucaucggcgaggccgacugccuccacgagaaguacggcggccucaacaaguccaagcccuacuacaccggcgagcacgccaaggccaucggcaacugccccaucugggucaagaccccccucaagcucgccaacggcaccaaguaccgcccccccgccaagcuccucaaggagcgcggcuucuucggcgccaucgccggcuuccucgagggcggcugggagggcaugaucgccggcuggcacggcuacaccucccacggcgcccacggcgucgccgucgccgccgaccucaaguccacccaggaggccaucaacaagaucaccaagaaccucaacucccucuccgagcucgaggucaagaaccuccagcgccucuccggcgccauggacgagcuccacaacgagauccucgagcucgacgagaaggucgacgaccuccgcgccgacaccaucuccucccagaucgagcucgccguccuccucuccaacgagggcaucaucaacuccgaggacgagcaccuccucgcccucgagcgcaagcucaagaagaugcucggccccuccgccgucgacaucggcaacggcugcuucgagaccaagcacaagugcaaccagaccugccucgaccgcaucgccgccggcaccuucaacgccggcgaguucucccuccccaccuucgacucccucaacaucaccgccgccucccucaacgacgacggccucgacaaccacaccauccuccucuacuacuccaccgccgccuccucccucgccgucacccucaugcucgccaucuucaucgucuacauggucucccgcgacaacgucuccugcuccaucugccucuga

SEQ ID NO: 123695 - RNA, 1755 nt, Artificial Sequence; identical to SEQ ID NO: 123694
  derived and/or modified CDS sequence (opt2) from hemagglutinin__InfluenzaB__AGX23325

SEQ ID NO: 123696 - RNA, 1755 nt, Artificial Sequence; identical to SEQ ID NO: 123694
  derived and/or modified CDS sequence (opt2) from hemagglutinin__InfluenzaB__AGX23336

SEQ ID NO: 123697 - RNA, 1755 nt, Artificial Sequence; identical to SEQ ID NO: 123694
  derived and/or modified CDS sequence (opt2) from hemagglutinin__InfluenzaB__AGX23347

SEQ ID NO: 123698 - RNA, 1755 nt, Artificial Sequence; identical to SEQ ID NO: 123694
  derived and/or modified CDS sequence (opt2) from hemagglutinin__InfluenzaB__AGX23358

SEQ ID NO: 123699 - RNA, 1755 nt, Artificial Sequence; identical to SEQ ID NO: 123694
  derived and/or modified CDS sequence (opt2) from hemagglutinin__InfluenzaB__AGX23369

SEQ ID NO: 123700 - RNA, 1755 nt, Artificial Sequence; identical to SEQ ID NO: 123694
  derived and/or modified CDS sequence (opt2) from hemagglutinin__InfluenzaB__AGX23380

SEQ ID NO: 123701 - RNA, 1755 nt, Artificial Sequence; identical to SEQ ID NO: 122462
  derived and/or modified CDS sequence (opt2) from hemagglutinin__InfluenzaB__AGX23391

SEQ ID NO: 123702 - RNA, 1755 nt, Artificial Sequence
  derived and/or modified CDS sequence (opt2) from hemagglutinin__InfluenzaB__AGX23413
augaaggccaucaucguccuccucauggucgucaccuccaacgccgaccgcaucugcaccggcaucaccuccuccaacuccccccacgucgucaagaccgccacccagggcgaggucaacgucaccggcgucaucccccucaccaccacccccaccaaguccuacuucgccaaccucaagggcacccgcacccgcggcaagcucugccccgacugccucaacugcaccgaccucgacgucgcccucggccgccccaugugcgucggcaccacccccuccgccaaggccuccauccuccacgagguccgccccgucaccuccggcugcuuccccaucaugcacgaccgcaccaagauccgccagcucgccaaccuccuccgcggcuacgagaacauccgccucuccaaccagaacgucaucgacgccgagcgcgcccccggcggccccuaccgccucggcaccuccggcuccugccccaacgccaccuccaaguccggcuucuucgccaccauggccugggccguccccaaggacaacaacaagaacgccaccaacccccucaccgucgagguccccuacaucugcaccgagggcgaggaccagaucaccgucuggggcuuccacuccgacaacaagacccagaugaagaaccucuacggcgacuccaacccccagaaguucaccuccuccgccaacggcgucaccacccacuacgucucccagaucggcggcuuccccgaccagaccgaggacggcggccucccccaguccggccgcaucgucgucgacuacaugaugcagaagcccggcaagaccggcaccaucgucuaccagcgcggcguccuccucccccagaaggucuggugcgccuccggccgcuccaaggucaucaagggcucccucccccucaucggcgaggccgacugccuccacgagaaguacggcggccucaacaaguccaagcccuacuacaccggcgagcacgccaaggccaucggcaacugccccaucugggucaagaccccccucaagcucgccaacggcaccaaguaccgcccccccgccaagcuccucaaggagcgcggcuucuucggcgccaucgccggcuuccucgagggcggcugggagggcaugaucgccggcuggcacggcuacaccucccacggcgcccacggcgucgccgucgccgccgaccucaaguccacccaggaggccaucaacaagaucaccaagaaccucaacucccucuccgagcucgaggucaagaaccuccagcgccucuccggcgccauggacgagcuccacaacgagauccucgagcucgacgagaaggucgacgaccuccgcgccgacaccaucuccucccagaucgagcucgccguccuccucuccaacgagggcaucaucaacuccgaggacgagcaccuccucgcccucgagcgcaagcucaagaagaugcucggccccuccgccgucgacaucggcaacggcugcuucgagaccaagcacaagugcaaccagaccugccucgaccgcaucgccgccggcaccuucaacgccggcgaguucucccuccccaccuucgacucccucaacaucaccgccgccucccucaacgacgacggccucgacaaccacaccauccuccucuacuacuccaccgccgccuccucccucgccgucacccucaugcucgccaucuucaucgucuacauggucucccgcgacaacgucuccugcuccaucugccucuga

SEQ ID NO: 123703 - RNA, 1755 nt, Artificial Sequence; identical to SEQ ID NO: 123702
  derived and/or modified CDS sequence (opt2) from hemagglutinin__InfluenzaB__AGX23424

SEQ ID NO: 123704 - RNA, 1755 nt, Artificial Sequence; identical to SEQ ID NO: 122856
  derived and/or modified CDS sequence (opt2) from hemagglutinin__InfluenzaB__AGX23435

SEQ ID NO: 123705 - RNA, 1755 nt, Artificial Sequence; identical to SEQ ID NO: 122767
  derived and/or modified CDS sequence (opt2) from hemagglutinin__InfluenzaB__AGX23446

SEQ ID NO: 123706 - RNA, 1755 nt, Artificial Sequence; identical to SEQ ID NO: 122856
  derived and/or modified CDS sequence (opt2) from hemagglutinin__InfluenzaB__AGX23457

SEQ ID NO: 123707 - RNA, 1755 nt, Artificial Sequence; identical to SEQ ID NO: 122767
  derived and/or modified CDS sequence (opt2) from hemagglutinin__InfluenzaB__AGX23468

SEQ ID NO: 123708 - RNA, 1755 nt, Artificial Sequence; identical to SEQ ID NO: 122462
  derived and/or modified CDS sequence (opt2) from hemagglutinin__InfluenzaB__AGX23479

SEQ ID NO: 123709 - RNA, 1755 nt, Artificial Sequence; identical to SEQ ID NO: 122462
  derived and/or modified CDS sequence (opt2) from hemagglutinin__InfluenzaB__AGX23490

SEQ ID NO: 123710 - RNA, 1755 nt, Artificial Sequence; identical to SEQ ID NO: 123083
  derived and/or modified CDS sequence (opt2) from hemagglutinin__InfluenzaB__AGX23501

SEQ ID NO: 123711 - RNA, 1755 nt, Artificial Sequence
  derived and/or modified CDS sequence (opt2) from hemagglutinin__InfluenzaB__AGX23512
augaaggccaucaucguccuccucauggucgucaccuccaacgccgaccgcaucugcaccggcaucaccuccuccaacuccccccacgucgucaagaccgccacccagggcgaggucaacgucaccggcgucaucccccucaccaccacccccaccaaguccuacuucgccaaccucaagggcaccaagacccgcggcaagcucugccccgacugccucaacugcaccgaccucgacgucgcccucggccgccccaugugcgucggcaccacccccuccgccaaggccuccauccuccacgagguccgccccgucaccuccggcugcuuccccaucaugcacgaccgcaccaagauccgccagcucgccaaccuccuccgcggcuacgagaacauccgccucuccacccagaacgucaucgacgccgagaaggcccccggcggccccuaccgccucggcaccuccggcuccugccccaacgccaccuccaaguccggcuucuucgccaccauggccugggccguccccaaggacaacaacaagaacgccaccaacccccucaccgucgagguccccuacaucugcaccgagggcgaggaccagaucaccgucuggggcuuccacuccgacaacaagacccagaugaagacccucuacggcgacuccaacccccagaaguucaccuccuccgccaacggcgucaccacccacuacgucucccagaucggcggcuuccccgaccagaccgaggacggcggccucccccaguccggccgcaucgucgucgacuacaugaugcagaagcccggcaagaccggcaccaucgucuaccagcgcggcguccuccucccccagaaggucuggugcgccuccggccgcuccaaggucaucaagggcucccucccccucaucggcgaggccgacugccuccacgagaaguacggcggccucaacaaguccaagcccuacuacaccggcgagcacgccaaggccaucggcaacugccccaucugggucaagaccccccucaagcucgccaacggcaccaaguaccgcccccccgccaagcuccucaaggagcgcggcuucuucggcgccaucgccggcuuccucgagggcggcugggagggcaugaucgccggcuggcacggcuacaccucccacggcgcccacggcgucgccgucgccgccgaccucaaguccacccaggaggccaucaacaagaucaccaagaaccucaacucccucuccgagcucgaggucaagaaccuccagcgccucuccggcgccauggacgagcuccacaacgagauccucgagcucgacgagaaggucgacgaccuccgcgccgacaccaucuccucccagaucgagcucgccguccuccucuccaacgagggcaucaucaacuccgaggacgagcaccuccucgcccucgagcgcaagcucaagaagaugcucggccccuccgccgucgacaucggcaacggcugcuucgagaccaagcacaagugcaaccagaccugccucgaccgcaucgccgccggcaccuucaacgccggcgaguucucccuccccaccuucgacucccucaacaucaccgccgccucccucaacgacgacggccucgacaaccacaccauccuccucuacuacuccaccgccgccuccucccucgccgucacccucaugcucgccaucuucaucgucuacauggucucccgcgacaacgucuccugcuccaucugccucuga

SEQ ID NO: 123712 - RNA, 1755 nt, Artificial Sequence; identical to SEQ ID NO: 122462
  derived and/or modified CDS sequence (opt2) from hemagglutinin__InfluenzaB__AGX23523

SEQ ID NO: 123713 - RNA, 1755 nt, Artificial Sequence; identical to SEQ ID NO: 122767
  derived and/or modified CDS sequence (opt2) from hemagglutinin__InfluenzaB__AGX23534

SEQ ID NO: 123714 - RNA, 1755 nt, Artificial Sequence; identical to SEQ ID NO: 122767
  derived and/or modified CDS sequence (opt2) from hemagglutinin__InfluenzaB__AGX23545

SEQ ID NO: 123715 - RNA, 1755 nt, Artificial Sequence; identical to SEQ ID NO: 122462
  derived and/or modified CDS sequence (opt2) from hemagglutinin__InfluenzaB__AGX23556

SEQ ID NO: 123716 - RNA, 1755 nt, Artificial Sequence; identical to SEQ ID NO: 122462
  derived and/or modified CDS sequence (opt2) from hemagglutinin__InfluenzaB__AGX23567

SEQ ID NO: 123717 - RNA, 1755 nt, Artificial Sequence; identical to SEQ ID NO: 122462
  derived and/or modified CDS sequence (opt2) from hemagglutinin__InfluenzaB__AGX23578

SEQ ID NO: 123718 - RNA, 1755 nt, Artificial Sequence; identical to SEQ ID NO: 122462
  derived and/or modified CDS sequence (opt2) from hemagglutinin__InfluenzaB__AGX23600

SEQ ID NO: 123719 - RNA, 1755 nt, Artificial Sequence
  derived and/or modified CDS sequence (opt2) from hemagglutinin__InfluenzaB__AGX23611
augaaggccaucaucguccuccucauggucgucaccuccaacgccgaccgcaucugcaccggcaucaccuccuccaacuccccccacgucgucaagaccgccacccagggcgaggucaacgucaccggcgucaucccccucaccaccacccccaccaaguccuacuucgccaaccucaagggcacccgcacccgcggcaagcucugccccgacugccucaacugcaccgaccucgacgucgcccucggccgccccaugugcgucggcaccacccccuccgccaaggccuccauccuccacgagguccgccccgucaccuccggcugcuuccccaucaugcacgaccgcaccaagauccgccagcucgccaaccuccuccgcggcuacgagaacauccgccucuccacccagaacgucaucgacgccgagaaggcccccggcggccccuaccgccucggcaccuccggcuccugccccaacgccaccuccaaguccggcuucuucgccaccauggccugggccguccccaaggacaacaacaagaacgccaccaacccccucaccgucgagguccccuacaucugcaccgagggcgaggaccagaucaccgucuggggcuuccacuccgacaacaagacccagaugaagaaccucuacggcgacuccaacccccagaaguucaccuccuccgccaacggcgucaccacccacuacgucucccagaucggcggcuuccccgaccagaccgaggacggcggccucccccaguccggccgcaucgucgucgacuacaugaugcagaagcccggcaagaccggcaccaucgucuaccagcgcggcguccuccucccccagaaggucuggugcgccuccggccgcuccaaggucaucaagggcucccucccccucaucggcgaggccgacugccuccacgagaaguacggcggccucaacaaguccaagcccuacuacaccggcgagcacgccaaggccaucggcaacugccccaucugggucaagaccccccucaagcucgccaacggcaccaaguaccgcccccccgccaagcuccucaaggagcgcggcuucuucggcgccaucgccggcuuccucgagggcggcugggagggcaugaucgccggcuggcacggcuacaccucccacggcgcccacggcgucgccgucgccgccgaccucaaguccacccaggaggccaucaacaagaucaccaagaaccucaacucccucuccgagcucgagaucaagaaccuccagcgccucuccggcgccauggacgagcuccacaacgagauccucgagcucgacgagaaggucgacgaccuccgcgccgacaccaucuccucccagaucgagcucgccguccuccucuccaacgagggcaucaucaacuccgaggacgagcaccuccucgcccucgagcgcaagcucaagaagaugcucggccccuccgccgucgacaucggcaacggcugcuucgagaccaagcacaagugcaaccagaccugccucgaccgcaucgccgccggcaccuucaacgccggcgaguucucccuccccaccuucgacucccucaacaucaccgccgccucccucaacgacgacggccucgacaaccacaccauccuccucuacuacuccaccgccgccuccucccucgccgucacccucaugcucgccaucuucaucgucuacauggucucccgcgacaacgucuccugcuccaucugccucuga

SEQ ID NO: 123720 - RNA, 1755 nt, Artificial Sequence; identical to SEQ ID NO: 122462
  derived and/or modified CDS sequence (opt2) from hemagglutinin__InfluenzaB__AGX23622

SEQ ID NO: 123721 - RNA, 1755 nt, Artificial Sequence; identical to SEQ ID NO: 122767
  derived and/or modified CDS sequence (opt2) from hemagglutinin__InfluenzaB__AGX23633

SEQ ID NO: 123722 - RNA, 1755 nt, Artificial Sequence; identical to SEQ ID NO: 122767
  derived and/or modified CDS sequence (opt2) from hemagglutinin__InfluenzaB__AGX23644

SEQ ID NO: 123723 - RNA, 1755 nt, Artificial Sequence; identical to SEQ ID NO: 122462
  derived and/or modified CDS sequence (opt2) from hemagglutinin__InfluenzaB__AGX23655

SEQ ID NO: 123724 - RNA, 1755 nt, Artificial Sequence; identical to SEQ ID NO: 122767
  derived and/or modified CDS sequence (opt2) from hemagglutinin__InfluenzaB__AGX23666

SEQ ID NO: 123725 - RNA, 1755 nt, Artificial Sequence
  derived and/or modified CDS sequence (opt2) from hemagglutinin__InfluenzaB__AGX23677
augaaggccaucaucguccuccucauggucgucaccuccaacgccgaccgcaucugcaccggcaucaccuccuccaacuccccccacgucgucaagaccgccacccagggcgaggucaacgucaccggcgucaucccccucaccaccacccccaccaaguccuacuucgccaaccucaagggcaccaagacccgcggcaagcucugccccgacugccucaacugcaccgaccucgacgucgcccucggccgccccaugugcgucggcaccacccccuccgccaaggccuccauccuccacgagguccgccccgucaccuccggcugcuuccccaucaugcacgaccgcaccaagauccgccagcucgccaaccuccuccgcggcuacgagaagauccgccucuccacccagaacgucaucgacgccgagaaggcccccggcggccccuaccgccucggcaccuccggcuccugccccaacgccaccuccaaguccggcuucuucgccaccauggccugggccguccccaaggacaacaacaagaacgccaccaacccccucaccgucgagguccccuacaucugcaucgagggcgaggaccagaucaccgucuggggcuuccacuccgacaacaagacccagaugaagaaccucuacggcgacuccaacccccagaaguucaccuccuccgccaacggcgucaccacccacuacgucucccagaucggcggcuuccccgaccagaccgaggacggcggccucccccaguccggccgcaucgucgucgacuacaugaugcagaagcccggcaagaccggcaccaucgucuaccagcgcggcguccuccucccccagaaggucuggugcgccuccggccgcuccaaggucaucaagggcucccucccccucaucggcgaggccgacugccuccacgagaaguacggcggccucaacaaguccaagcccuacuacaccggcgagcacgccaaggccaucggcaacugccccaucugggucaagaccccccucaagcucgccaacggcaccaaguaccgcccccccgccaagcuccucaaggagcgcggcuucuucggcgccaucgccggcuuccucgagggcggcugggagggcaugaucgccggcuggcacggcuacaccucccacggcgcccacggcgucgccgucgccgccgaccucaaguccacccaggaggccaucaacaagaucaccaagaaccucaacucccucuccgagcucgaggucaagaaccuccagcgccucuccggcgccauggacgagcuccacaacgagauccucgagcucgacgagaaggucgacgaccuccgcgccgacaccaucuccucccagaucgagcucgccguccuccucuccaacgagggcaucaucaacuccgaggacgagcaccuccucgcccucgagcgcaagcucaagaagaugcucggccccuccgccgucgacaucggcaacggcugcuucgagaccaagcacaagugcaaccagaccugccucgaccgcaucgccgccggcaccuucaacgccggcgaguucucccuccccaccuucgacucccucaacaucaccgccgccucccucaacgacgacggccucgacaaccacaccauccuccucuacuacuccaccgccgccuccucccucgccgucacccucaugcucgccaucuucaucgucuacauggucucccgcgacaacgucuccugcuccaucugccucuga

SEQ ID NO: 123726 - RNA, 1755 nt, Artificial Sequence; identical to SEQ ID NO: 122767
  derived and/or modified CDS sequence (opt2) from hemagglutinin__InfluenzaB__AGX23688

SEQ ID NO: 123727 - RNA, 1755 nt, Artificial Sequence; identical to SEQ ID NO: 122767
  derived and/or modified CDS sequence (opt2) from hemagglutinin__InfluenzaB__AGX23699

SEQ ID NO: 123728 - RNA, 1755 nt, Artificial Sequence; identical to SEQ ID NO: 122462
  derived and/or modified CDS sequence (opt2) from hemagglutinin__InfluenzaB__AGX23710

SEQ ID NO: 123729 - RNA, 1755 nt, Artificial Sequence; identical to SEQ ID NO: 122767
  derived and/or modified CDS sequence (opt2) from hemagglutinin__InfluenzaB__AGX23721

SEQ ID NO: 123730 - RNA, 1755 nt, Artificial Sequence; identical to SEQ ID NO: 122462
  derived and/or modified CDS sequence (opt2) from hemagglutinin__InfluenzaB__AGX23732

SEQ ID NO: 123731 - RNA, 1755 nt, Artificial Sequence; identical to SEQ ID NO: 122767
  derived and/or modified CDS sequence (opt2) from hemagglutinin__InfluenzaB__AGX23743

SEQ ID NO: 123732 - RNA, 1755 nt, Artificial Sequence; identical to SEQ ID NO: 122767
  derived and/or modified CDS sequence (opt2) from hemagglutinin__InfluenzaB__AGX23754

SEQ ID NO: 123733 - RNA, 1755 nt, Artificial Sequence; identical to SEQ ID NO: 122462
  derived and/or modified CDS sequence (opt2) from hemagglutinin__InfluenzaB__AGX23765

SEQ ID NO: 123734 - RNA, 1755 nt, Artificial Sequence; identical to SEQ ID NO: 122767
  derived and/or modified CDS sequence (opt2) from hemagglutinin__InfluenzaB__AGX23776

SEQ ID NO: 123735 - RNA, 1755 nt, Artificial Sequence; identical to SEQ ID NO: 122767
  derived and/or modified CDS sequence (opt2) from hemagglutinin__InfluenzaB__AGX23787

SEQ ID NO: 123736 - RNA, 1755 nt, Artificial Sequence; identical to SEQ ID NO: 122462
  derived and/or modified CDS sequence (opt2) from hemagglutinin__InfluenzaB__AGX23798

SEQ ID NO: 123737 - RNA, 1755 nt, Artificial Sequence; identical to SEQ ID NO: 122462
  derived and/or modified CDS sequence (opt2) from hemagglutinin__InfluenzaB__AGX23809

SEQ ID NO: 123738 - RNA, 1755 nt, Artificial Sequence; identical to SEQ ID NO: 122462
  derived and/or modified CDS sequence (opt2) from hemagglutinin__InfluenzaB__AGX23820

SEQ ID NO: 123739 - RNA, 1755 nt, Artificial Sequence; identical to SEQ ID NO: 122767
  derived and/or modified CDS sequence (opt2) from hemagglutinin__InfluenzaB__AGX23831

SEQ ID NO: 123740 - RNA, 1755 nt, Artificial Sequence; identical to SEQ ID NO: 122462
  derived and/or modified CDS sequence (opt2) from hemagglutinin__InfluenzaB__AGX23842

SEQ ID NO: 123741 - RNA, 1755 nt, Artificial Sequence
  derived and/or modified CDS sequence (opt2) from hemagglutinin__InfluenzaB__AGX23853
augaaggccaucaucguccuccucauggucgucaccuccaacgccgaccgcaucugcaccggcaucaccuccuccaacuccccccacgucgucaagaccgccacccagggcgaggucaacgucaccggcgucaucccccucaccaccacccccaccaaguccuacuucgccaaccucaagggcacccgcacccgcggcaagcucugccccgacugccucaacugcaccgaccucgacgucgcccucggccgccccaugugcgucggcaccacccccuccgccaaggccuccauccuccacgagguccgccccgucaccuccggcugcuuccccaucaugcacgaccgcaccaagauccgccagcucgccaaccuccuccgcggcuacgagaacauccgccucuccauccagaacgucaucgacgccgagaaggcccccggcggccccuaccgccucggcaccuccggcuccugccccaacgccaccuccaaguccggcuucuucgccaccauggccugggccguccccaaggacaacaacaagaacgccaccaacccccucaccgucgagguccccuacaucugcaccgagggcgaggaccagaucaccgucuggggcuuccacuccgacaacaagacccagaugaagaaccucuacggcgacuccaacccccagaaguucaccuccuccgccaacggcgucaccacccacuacgucucccagaucggcggcuuccccgaccagaccgaggacggcggccucccccaguccggccgcaucgucgucgacuacaugaugcagaaguccggcaagaccggcaccaucgucuaccagcgcggcguccuccucccccagaaggucuggugcgccuccggccgcuccaaggucaucaagggcucccucccccucaucggcgaggccgacugccuccacgagaaguacggcggccucaacaaguccaagcccuacuacaccggcgagcacgccaaggccaucggcaacugccccaucugggucaagaccccccucaagcucgccaacggcaccaaguaccgcccccccgccaagcuccucaaggagcgcggcuucuucggcgccaucgccggcuuccucgagggcggcugggagggcaugaucgccggcuggcacggcuacaccucccacggcgcccacggcgucgccgucgccgccgaccucaaguccacccaggaggccaucaacaagaucaccaagaaccucaacucccucuccgagcucgaggucaagaaccuccagcgccucuccggcgccauggacgagcuccacaacgagauccucgagcucgacgagaaggucgacgaccuccgcgccgacaccaucuccucccagaucgagcucgccguccuccucuccaacgagggcaucaucaacuccgaggacgagcaccuccucgcccucgagcgcaagcucaagaagaugcucggccccuccgccgucgacaucggcaacggcugcuucgagaccaagcacaagugcaaccagaccugccucgaccgcaucgccgccggcaccuucaacgccggcgaguucucccuccccaccuucgacucccucaacaucaccgccgccucccucaacgacgacggccucgacaaccacaccauccuccucuacuacuccaccgccgccuccucccucgccgucacccucaugcucgccaucuucaucgucuacauggucucccgcgacaacgucuccugcuccaucugccucuga

SEQ ID NO: 123742 - RNA, 1755 nt, Artificial Sequence; identical to SEQ ID NO: 122462
  derived and/or modified CDS sequence (opt2) from hemagglutinin__InfluenzaB__AGX23864

SEQ ID NO: 123743 - RNA, 1755 nt, Artificial Sequence; identical to SEQ ID NO: 122767
  derived and/or modified CDS sequence (opt2) from hemagglutinin__InfluenzaB__AGX23875

SEQ ID NO: 123744 - RNA, 1755 nt, Artificial Sequence; identical to SEQ ID NO: 122462
  derived and/or modified CDS sequence (opt2) from hemagglutinin__InfluenzaB__AGX23886

SEQ ID NO: 123745 - RNA, 1755 nt, Artificial Sequence
  derived and/or modified CDS sequence (opt2) from hemagglutinin__InfluenzaB__AGX23897
augaaggccaucaucguccuccucauggucgucaccuccaacgccgaccgcaucugcaccggcaucaccuccuccaacuccccccacgucgucaagaccgccacccagggcgaggucaacgucaccggcgucaucccccucaccaccacccccaccaaguccuacuucgccaaccucaagggcacccgcacccgcggcaagcucugccccgacugccucaacugcaccgaccucgacgucgcccucggccgccccaugugcgucggcaccacccccuccgccaaggccuccauccuccacgagguccgccccgucaccuccggcugcuuccccaucaugcacgaccgcaccaagauccgccagcucgccaaccuccuccgcggcuacgagaacauccgccucuccacccagaacgucaucgacgccgagaaggcccccggcggccccuaccgccucggcaccuccggcuccugccccaacgccaccuccaaguccggcuucuucgccaccauggccugggccguccccaaggacaacaacaagaacgccaccaacccccucaccgucgagguccccuacaucugcaccgagggcgaggaccagaucaccgucuggggcuuccacuccgacaacaagacccagaugaagaaccucuacggcgacuccaacccccagaaguucaccuccuccgccaacggcgucaccacccacuacgucucccagaucggcggcuuccccgaccagaccgaggacggcggccucccccaguccggccgcaucgucgucgacuacaugaugcagaaguccggcaagaccggcaccaucgucuaccagcgcggcguccuccucccccagaaggucuggugcgccuccggccgcuccaaggucaucaagggcucccucccccucaucggcgaggccgacugccuccacgagaaguacggcggccucaacaaguccaagcccuacuacaccggcgagcacgccaaggccaucggcaacugccccaucugggucaagaccccccucaagcucgccaacggcaccaaguaccgcccccccgccaagcuccucaaggagcgcggcuucuucggcgccaucgccggcuuccucgagggcggcugggagggcaugaucgccggcuggcacggcuacaccucccacggcgcccacggcgucgccgucgccgccgaccucaaguccacccaggaggccaucaacaagaucaccaagaaccucaacucccucuccgagcucgaggucaagaaccuccagcgccucuccggcgccauggacgagcuccacaacgagauccucgagcucgacgagaaggucgacgaccuccgcgccgacaccaucuccucccagaucgagcucgccguccuccucuccaacgagggcaucaucaacuccgaggacgagcaccuccucgcccucgagcgcaagcucaagaagaugcucggccccuccgccgucgacaucggcaacggcugcuucgagaccaagcacaagugcaaccagaccugccucgaccgcaucgccgccggcaccuucaacgccggcgaguucucccuccccaccuucgacucccucaacaucaccgccgccucccucaacgacgacggccucgacaaccacaccauccuccucuacuacuccaccgccgccuccucccucgccgucacccucaugcucgccaucuucaucgucuacauggucucccgcgacaacgucuccugcuccaucugccucuga

SEQ ID NO: 123746 - RNA, 1755 nt, Artificial Sequence
  derived and/or modified CDS sequence (opt2) from hemagglutinin__InfluenzaB__AGX23908
augaaggccaucaucguccuccucauggucgucaccuccaacgccgaccgcaucugcaccggcaucaccuccuccaacuccccccacgucgucaagaccgccacccagggcgaggucaacgucaccggcgucaucccccucaccaccacccccaccaaguccuacuucgccaaccucaagggcacccgcacccgcggcaagcucugccccgacugccucaacugcaccgaccucgacgucgcccucggccgccccaugugcgucggcaccacccccuccgccaaggccuccauccuccacgagguccgccccgucaccuccggcugcuuccccaucaugcacgaccgcaccaagauccgccagcucgccaaccuccuccgcggcuacgagaacauccgccucuccacccagaacgucaucgacgccgagaaggcccccggcggccccuaccgccucggcaccuccggcuccugccccaacgccaccuccaaguccggcuucuucgucaccauggccugggccguccccaaggacaacaacaagaacgccaccaacccccucaccgucgagguccccuacaucugcaccgagggcgaggaccagaucaccgucuggggcuuccacuccgacaacaagacccagaugaagaaccucuacggcgacuccaacccccagaaguucaccuccuccgccaacggcgucaccacccacuacgucucccagaucggcggcuuccccgaccagaccgaggacggcggccucccccaguccggccgcaucgucgucgacuacaugaugcagaagcccggcaagaccggcaccaucgucuaccagcgcggcguccuccucccccagaaggucuggugcgccuccggccgcuccaaggucaucaagggcucccucccccucaucggcgaggccgacugccuccacgagaaguacggcggccucaacaaguccaagcccuacuacaccggcgagcacgccaaggccaucggcaacugccccaucugggucaagaccccccucaagcucgccaacggcaccaaguaccgcccccccgccaagcuccucaaggagcgcggcuucuucggcgccaucgccggcuuccucgagggcggcugggagggcaugaucgccggcuggcacggcuacaccucccacggcgcccacggcgucgccgucgccgccgaccucaaguccacccaggaggccaucaacaagaucaccaagaaccucaacucccucuccgagcucgaggucaagaaccuccagcgccucuccggcgccauggacgagcuccacaacgagauccucgagcucgacgagaaggucgacgaccuccgcgccgacaccaucuccucccagaucgagcucgccguccuccucuccaacgagggcaucaucaacuccgaggacgagcaccuccucgcccucgagcgcaagcucaagaagaugcucggccccuccgccgucgacaucggcaacggcugcuucgagaccaagcacaagugcaaccagaccugccucgaccgcaucgccgccggcaccuucaacgccggcgaguucucccuccccaccuucgacucccucaacaucaccgccgccucccucaacgacgacggccucgacaaccacaccauccuccucuacuacuccaccgccgccuccucccucgccgucacccucaugcucgccaucuucaucgucuacauggucucccgcgacaacgucuccugcuccaucugccucuga

SEQ ID NO: 123747 - RNA, 1755 nt, Artificial Sequence; identical to SEQ ID NO: 122603
  derived and/or modified CDS sequence (opt2) from hemagglutinin__InfluenzaB__AGX23919

SEQ ID NO: 123748 - RNA, 1755 nt, Artificial Sequence; identical to SEQ ID NO: 123083
  derived and/or modified CDS sequence (opt2) from hemagglutinin__InfluenzaB__AGX23930

SEQ ID NO: 123749 - RNA, 1755 nt, Artificial Sequence; identical to SEQ ID NO: 122462
  derived and/or modified CDS sequence (opt2) from hemagglutinin__InfluenzaB__AGX23941

SEQ ID NO: 123750 - RNA, 1755 nt, Artificial Sequence; identical to SEQ ID NO: 122767
  derived and/or modified CDS sequence (opt2) from hemagglutinin__InfluenzaB__AGX23952

SEQ ID NO: 123751 - RNA, 1755 nt, Artificial Sequence; identical to SEQ ID NO: 122767
  derived and/or modified CDS sequence (opt2) from hemagglutinin__InfluenzaB__AGX23963

SEQ ID NO: 123752 - RNA, 1755 nt, Artificial Sequence; identical to SEQ ID NO: 123083
  derived and/or modified CDS sequence (opt2) from hemagglutinin__InfluenzaB__AGX23974

SEQ ID NO: 123753 - RNA, 1755 nt, Artificial Sequence; identical to SEQ ID NO: 122603
  derived and/or modified CDS sequence (opt2) from hemagglutinin__InfluenzaB__AGX23985

SEQ ID NO: 123754 - RNA, 1755 nt, Artificial Sequence
  derived and/or modified CDS sequence (opt2) from hemagglutinin__InfluenzaB__AGX23996
augaaggccaucaucguccuccucauggucgucaccuccaacgccgaccgcaucugcaccggcaucaccuccuccaacuccccccacgucgucaagaccgccacccagggcgaggucaacgucaccggcgucaucccccucaccaccacccccaccaaguccuacuucgccaaccucaagggcacccgcacccgcggcaagcucugccccgacugccucaacugcaccgaccucgacgucgcccucggccgccccaugugcgucggcaccacccccuccgccaaggccuccauccuccacgagguccgccccaucaccuccggcugcuuccccaucaugcacgaccgcaccaagauccgccagcucgccaaccuccuccgcggcuacgagaacauccgccucuccacccagaacgucaucgacgccgagaaggcccccggcggccccuaccgccucggcaccuccggcuccugccccaacgccaccuccaaguccggcuucuucgccaccauggccugggccguccccaaggacaacaacaagaacgccaccaacccccucaccgucgagguccccuacaucugcaccgagggcgaggaccagaucaccgucuggggcuuccacuccgacaacaagacccagaugaagaaccucuacggcgacuccaacccccagaaguucaccuccuccgccaacggcgucaccacccacuacgucucccagaucggcggcuuccccgaccagaccgaggacggcggccucccccaguccggccgcaucgucgucgacuacaugaugcagaagcccggcaagaccggcaccaucgucuaccagcgcggcguccuccucccccagaaggucuggugcgccuccggccgcuccaaggucaucaagggcucccucccccucaucggcgaggccgacugccuccacgagaaguacggcggccucaacaaguccaagcccuacuacaccggcgagcacgccaaggccaucggcaacugccccaucugggucaagaccccccucaagcucgccaacggcaccaaguaccgcccccccgccaagcuccucaaggagcgcggcuucuucggcgccaucgccggcuuccucgagggcggcugggagggcaugaucgccggcuggcacggcuacaccucccacggcgcccacggcgucgccgucgccgccgaccucaaguccacccaggaggccaucaacaagaucaccaagaaccucaacucccucuccgagcucgaggucaagaaccuccagcgccucuccggcgccauggacgagcuccacaacgagauccucgagcucgacgagaaggucgacgaccuccgcgccgacaccaucuccucccagaucgagcucgccguccuccucuccaacgagggcaucaucaacuccgaggacgagcaccuccucgcccucgagcgcaagcucaagaagaugcucggccccuccgccgucgacaucggcaacggcugcuucgagaccaagcacaagugcaaccagaccugccucgaccgcaucgccgccggcaccuucaacgccggcgaguucucccuccccaccuucgacucccucaacaucaccgccgccucccucaacgacgacggccucgacaaccacaccauccuccucuacuacuccaccgccgccuccucccucgccgucacccucaugcucgccaucuucaucgucuacauggucucccgcgacaacgucuccugcuccaucugccucuga

SEQ ID NO: 123755 - RNA, 1755 nt, Artificial Sequence; identical to SEQ ID NO: 123083
  derived and/or modified CDS sequence (opt2) from hemagglutinin__InfluenzaB__AGX24007

SEQ ID NO: 123756 - RNA, 1755 nt, Artificial Sequence; identical to SEQ ID NO: 123083
  derived and/or modified CDS sequence (opt2) from hemagglutinin__InfluenzaB__AGX24018

SEQ ID NO: 123757 - RNA, 1755 nt, Artificial Sequence
  derived and/or modified CDS sequence (opt2) from hemagglutinin__InfluenzaB__AGX24029
augaaggccaucaucguccuccucauggucgucaccuccaacgccgaccgcaucugcaccggcaucaccuccuccaacuccccccacgucgucaagaccgccacccagggcgaggucaacgucaccggcgucaucccccucaccaccacccccaccaaguccuacuucgccaaccucaagggcacccgcacccgcggcaagcucugccccgacugccucaacugcaccgaccucgacgucgcccucggccgccccaugugcgucggcaccacccccuccgccaaggccuccauccuccacgagguccgccccgucaccuccggcugcuuccccaucaugcacgaccgcaccaagauccgccagcuccccaaccuccuccgcggcuacgagaacauccgccucuccacccagaacgucaucgacgccgagaaggcccccggcggccccuaccgccucggcaccuccggcuccugccccaacgccaccuccaaguccggcuucuucgccaccauggccugggccguccccaaggacaacaacaagaacgccaccaacccccucaccgucgagguccccuacaucugcaaggagggcgaggaccagaucaccgucuggggcuuccacuccgacaacaagacccagaugaagaaccucuacggcgacuccaacccccagaaguucaccuccuccgccaacggcgucaccacccacuacgucucccagaucggcuccuuccccgaccagaccgaggacggcggccucccccaguccggccgcaucgucgucgacuacaugaugcagaagcccggcaagaccggcaccaucgucuaccagcgcggcguccuccucccccagaaggucuggugcgccuccggccgcuccaaggucaucaagggcucccucccccucaucggcgaggccgacugccuccacgagaaguacggcggccucaacaaguccaagcccuacuacaccggcgagcacgccaaggccaucggcaacugccccaucugggucaagaccccccucaagcucgccaacggcaccaaguaccgcccccccgccaagcuccucaaggagcgcggcuucuucggcgccaucgccggcuuccucgagggcggcugggagggcaugaucgccggcuggcacggcuacaccucccacggcgcccacggcgucgccgucgccgccgaccucaaguccacccaggaggccaucaacaagaucaccaagaaccucaacucccucuccgagcucgaggucaagaaccuccagcgccucuccggcgccauggacgagcuccacaacgagauccucgagcucgacgagaaggucgacgaccuccgcgccgacaccaucuccucccagaucgagcucgccguccuccucuccaacgagggcaucaucaacuccgaggacgagcaccuccucgcccucgagcgcaagcucaagaagaugcucggccccuccgccgucgagaucggcaacggcugcuucgagaccaagcacaagugcaaccagaccugccucaaccgcaucgccgccggcaccuucaacgccggcgaguucucccuccccaccuucgacucccucaacaucaccgccgccucccucaacgacgacggccucgacaaccacaccauccuccucuacuacuccaccgccgccuccucccucgccgucacccucaugcucgccaucuucaucgucuacauggucucccgcgacaacgucuccugcuccaucugccucuga

SEQ ID NO: 123758 - RNA, 1755 nt, Artificial Sequence; identical to SEQ ID NO: 123083
  derived and/or modified CDS sequence (opt2) from hemagglutinin__InfluenzaB__AGX24040

SEQ ID NO: 123759 - RNA, 1755 nt, Artificial Sequence; identical to SEQ ID NO: 122767
  derived and/or modified CDS sequence (opt2) from hemagglutinin__InfluenzaB__AGX24051

SEQ ID NO: 123760 - RNA, 1755 nt, Artificial Sequence; identical to SEQ ID NO: 122856
  derived and/or modified CDS sequence (opt2) from hemagglutinin__InfluenzaB__AGX24062

SEQ ID NO: 123761 - RNA, 1755 nt, Artificial Sequence; identical to SEQ ID NO: 122603
  derived and/or modified CDS sequence (opt2) from hemagglutinin__InfluenzaB__AGX24073

SEQ ID NO: 123762 - RNA, 1755 nt, Artificial Sequence
  derived and/or modified CDS sequence (opt2) from hemagglutinin__InfluenzaB__AGX24084
augaaggccaucaucguccuccucauggucgucaccuccaacgccgaccgcaucugcaccggcaucaccuccuccaacuccccccacgucgucaagaccgccacccagggcgaggucaacgucaccggcgucaucccccucaccaccacccccaccaaguccuacuucgccaaccucaagggcacccgcacccgcggcaagcucugccccgacugccucaacugcaccgaccucgacgucgcccucggccgccccaugugcgucggcaccacccccuccgccaaggccuccaucauccacgagguccgccccgucaccuccggcugcuuccccaucaugcacgaccgcaccaagauccgccagcucgccaaccuccuccgcggcuacgagaacauccgccucuccacccagaacgucaucgacgccgagaaggcccccggcggccccuaccgccucggcaccuccggcuccugccccaacgccaccuccaaguccggcuucuucgccaccauggccugggccguccccaaggacaacaacaagaacgccaccaacccccucaccgucgagguccccuacaucugcaccgagggcgaggaccagaucaccgucuggggcuuccacuccgacaacaagacccagaugaagaaccucuacggcgacuccaacccccagaaguucaccuccuccgccaacggcgucaccacccacuacgucucccagaucggcggcuuccccgaccagaccgaggacggcggccucccccaguccggccgcaucgucgucgacuacaugaugcagaagcccggcaagaccggcaccaucgucuaccagcgcggcguccuccucccccagaaggucuggugcgccuccggccgcuccaaggucaucaagggcucccucccccucaucggcgaggccgacugccuccacgagaaguacggcggccucaacaaguccaagcccuacuacaccggcgagcacgccaaggccaucggcaacugccccaucugggucaagaccccccucaagcucgccaacggcaccaaguaccgcccccccgccaagcuccucaaggagcgcggcuucuucggcgccaucgccggcuuccucgagggcggcugggagggcaugaucgccggcuggcacggcuacaccucccacggcgcccacggcgucgccgucgccgccgaccucaaguccacccaggaggccaucaacaagaucaccaagaaccucaacucccucuccgagcucgaggucaagaaccuccagcgccucuccggcgccauggacgagcuccacaacgagauccucgagcucgacgagaaggucgacgaccuccgcgccgacaccaucuccucccagaucgagcucgccguccuccucuccaacgagggcaucaucaacuccgaggacgagcaccuccucgcccucgagcgcaagcucaagaagaugcucggccccuccgccgucgacaucggcaacggcugcuucgagaccaagcacaagugcaaccagaccugccucgaccgcaucgccgccggcaccuucaacgccggcgaguucucccuccccaccuucgacucccucaacaucaccgccgccucccucaacgacgacggccucgacaaccacaccauccuccucuacuacuccaccgccgccuccucccucgccgucacccucaugcucgccaucuucaucgucuacauggucucccgcgacaacgucuccugcuccaucugccucuga

SEQ ID NO: 123763 - RNA, 1755 nt, Artificial Sequence; identical to SEQ ID NO: 123083
  derived and/or modified CDS sequence (opt2) from hemagglutinin__InfluenzaB__AGX24095

SEQ ID NO: 123764 - RNA, 1755 nt, Artificial Sequence
  derived and/or modified CDS sequence (opt2) from hemagglutinin__InfluenzaB__AGX24106
augaaggccaucaucguccuccucauggucgucaccuccaacgccgaccgcaucugcaccggcaucaccuccuccaacuccccccacgucgucaagaccgccacccagggcgaggucaacgucaccggcgucaucccccucaccaccacccccaccaaguccuacuucgccaaccucaagggcacccgcacccgcggcaagcucugccccgacugccucaacugcaccgaccucgacgucgcccucggccgccccaugugcgucggcaccacccccuccgccaaggccuccauccuccacgagguccgccccgucaccuccggcugcuuccccaucaugcacgaccgcaccaagauccgccagcucgccaaccuccuccgcggcuacgagaacauccgccucuccacccagaacgucaucgacgccgagaaggcccccggcggccccuaccgccucggcaccuccggcuccugccccaacaccaccuccaaguccggcuucuucgccaccauggccugggccguccccaaggacaacaacaagaacgccaccaacccccucaccgucgagguccccuacaucugcaccgagggcgaggaccagaucaccgucuggggcuuccacuccgacaacaagacccagaugaagaaccucuacggcgacuccaacccccagaaguucaccuccuccgccaacggcgucaccacccacuacgucucccagaucggcggcuuccccgaccagaccgaggacggcggccucccccaguccggccgcaucgucgucgacuacaugaugcagaagcccggcaagaccggcaccaucgucuaccagcgcggcguccuccucccccagaaggucuggugcgccuccggccgcuccaaggucaucaagggcucccucccccucaucggcgaggccgacugccuccacgagaaguacggcggccucaacaaguccaagcccuacuacaccggcgagcacgccaaggccaucggcaacugccccaucugggucaagaccccccucaagcucgccaacggcaccaaguaccgcccccccgccaagcuccucaaggagcgcggcuucuucggcgccaucgccggcuuccucgagggcggcugggagggcaugaucgccggcuggcacggcuacaccucccacggcgcccacggcgucgccgucgccgccgaccucaaguccacccaggaggccaucaacaagaucaccaagaaccucaacucccucuccgagcucgaggucaagaaccuccagcgccucuccggcgccauggacgagcuccacaacgagauccucgagcucgacgagaaggucgacgaccuccgcgccgacaccaucuccucccagaucgagcucgccguccuccucuccaacgagggcaucaucaacuccgaggacgagcaccuccucgcccucgagcgcaagcucaagaagaugcucggccccuccgccgucgacaucggcaacggcugcuucgagaccaagcacaagugcaaccagaccugccucgaccgcaucgccgccggcaccuucaacgccggcgaguucucccuccccaccuucgacucccucaacaucaccgccgccucccucaacgacgacggccucgacaaccacaccauccuccucuacuacuccaccgccgccuccucccucgccgucacccucaugcucgccaucuucaucgucuacauggucucccgcgacaacgucuccugcuccaucugccucuga

SEQ ID NO: 123765 - RNA, 1755 nt, Artificial Sequence
  derived and/or modified CDS sequence (opt2) from hemagglutinin__InfluenzaB__AGX24117
augaaggccaucaucguccuccucauggucgucaccuccaacgccgaccgcaucugcaccggcaucaccuccuccaacuccccccacgucgucaagaccgccacccagggcgaggucaacgucaccggcgucaucccccucaccaccacccccaccaaguccuacuucgccaaccucaagggcacccgcacccgcggcaagcucugccccgacugccucaacugcaccgaccucgacgucgcccucggccgccccaugugcgucggcaccacccccuccgccaaggccuccauccuccacgagguccgccccgucaccuccggcugcuuccccaucaugcacgaccgcaccaagauccgccagcuccccaaccuccuccgcggcuacgagaacauccgccucuccacccagaacgucaucgacgccgagaaggcccccggcggccccuaccgccucggcaccuccggcuccugccccaacaccaccuccaaguccggcuucuucgccaccauggccugggccguccccaaggacaacaacaagaacgccaccaacccccucaccgucgagguccccuacaucugcaccgagggcgaggaccagaucaccgucuggggcuuccacuccgacaacaagacccagaugaagaaccucuacggcgacuccaacccccagaaguucaccuccuccgccaacggcgucaccacccacuacgucucccagaucggcuccuuccccgaccagaccgaggacggcggccucccccaguccggccgcaucgucgucgacuacaugaugcagaagcccggcaagaccggcaccaucgucuaccagcgcggcauccuccucccccagaaggucuggugcgccuccggccgcuccaaggucaucaagggcucccucccccucaucggcgaggccgacugccuccacgagaaguacggcggccucaacaaguccaagcccuacuacaccggcgagcacgccaaggccaucggcaacugccccaucugggucaagaccccccucaagcucgccaacggcaccaaguaccgcccccccgccaagcuccucaaggagcgcggcuucuucggcgccaucgccggcuuccucgagggcggcugggagggcaugaucgccggcuggcacggcuacaccucccacggcgcccacggcgucgccgucgccgccgaccucaaguccacccaggaggccaucaacaagaucaccaagaaccucaacucccucuccgagcucgaggucaagaaccuccagcgccucuccggcgccauggacgagcuccacaacgagauccucgagcucgacgagaaggucgacgaccuccgcgccgacaccaucuccucccagaucgagcucgccguccuccucuccaacgagggcaucaucaacuccgaggacgagcaccuccucgcccucgagcgcaagcucaagaagaugcucggccccuccgccgucgagaucggcaacggcugcuucgagaccaagcacaagugcaaccagaccugccucgaccgcaucgccgccggcaccuucaacgccggcgaguucucccuccccaccuucgacucccucaacaucaccgccgccucccucaacgacgacggccucgacaaccacaccauccuccucuacuacuccaccgccgccuccucccucgccgucacccucaugcucgccaucuucaucgucuacauggucucccgcgacaacgucuccugcuccaucugccucuga

SEQ ID NO: 123766 - RNA, 1755 nt, Artificial Sequence
  derived and/or modified CDS sequence (opt2) from hemagglutinin__InfluenzaB__AGX24128
augaaggccaucaucguccuccucauggucgucaccuccaacgccgaccgcaucugcaccggcaucaccuccuccaacuccccccacgucgucaagaccgccacccagggcgaggucaacgucaccggcgucaucccccucaccaccacccccaccaaguccuacuucgccaaccucaagggcacccgcacccgcggcaagcucugccccgacugccucaacugcaccgaccucgacgucgcccucggccgccccaugugcgucggcaccacccccuccgccaaggccuccauccuccacgagguccgccccgucaccuccggcugcuuccccaucaugcacgaccgcaccaagauccgccagcuccccaaccuccuccgcggcuacgagaacauccgccucuccacccagaacgucaucgacgccgagaaggcccccggcggccccuaccgccucggcaccuccggcuccugccccaacgccaccuccaagaucggcuucuucgccaccauggccugggccguccccaaggacaacuacaagaacgccaccaacccccucaccgucgagguccccuacaucugcaccgagggcgaggaccagaucaccgucuggggcuuccacuccgacaacaagacccagaugaagaaccucuacggcgacuccaacccccagaaguucaccuccuccgccaacggcgucaccacccacuacgucucccagaucggcgacuuccccgaccagaccgaggacggcggccucccccaguccggccgcaucgucgucgacuacaugaugcagaagcccggcaagaccggcaccaucgucuaccagcgcggcguccuccucccccagaaggucuggugcgccuccggccgcuccaaggucaucaagggcucccucccccucaucggcgaggccgacugcauccacgagaaguacggcggccucaacaaguccaagcccuacuacaccggcgagcacgccaaggccaucggcaacugccccaucugggucaagaccccccucaagcucgccaacggcaccaaguaccgcccccccgccaagcuccucaaggagcgcggcuucuucggcgccaucgccggcuuccucgagggcggcugggagggcaugaucgccggcuggcacggcuacaccucccacggcgcccacggcgucgccgucgccgccgaccucaaguccacccaggaggccaucaacaagaucaccaagaaccucaacucccucuccgagcucgaggucaagaaccuccagcgccucuccggcgccauggacgagcuccacaacgagauccucgagcucgacgagaaggucgacgaccuccgcgccgacaccaucuccucccagaucgagcucgccguccuccucuccaacgagggcaucaucaacuccgaggacgagcaccuccucgcccucgagcgcaagcucaagaagaugcucggccccuccgccgucgacaucggcaacggcugcuucgagaccaagcacaagugcaaccagaccugccucgaccgcaucgccgccggcaccuucaacgccggcgaguucucccuccccaccuucgacucccucaacaucaccgccgccucccucaacgacgacggccucgacaaccacaccauccuccucuacuacuccaccgccgccuccucccucgccgucacccucaugcucgccaucuucaucgucuacauggucucccgcgacaacgucuccugcuccaucugccucuga

SEQ ID NO: 123767 - RNA, 1755 nt, Artificial Sequence; identical to SEQ ID NO: 122462
  derived and/or modified CDS sequence (opt2) from hemagglutinin__InfluenzaB__AGX24139

SEQ ID NO: 123768 - RNA, 1755 nt, Artificial Sequence
  derived and/or modified CDS sequence (opt2) from hemagglutinin__InfluenzaB__AGX24150
augaaggccaucaucguccuccucauggucgucaccuccaacgccgaccgcaucugcaccggcaucaccuccuccaacuccccccacgucgucaagaccgccacccagggcgaggucaacgucaccggcgucaucccccucaccaccacccccaccaaguccuacuucgccaaccucaagggcacccgcacccgcggcaagcucugccccuacugccucaacugcaccgaccucgacgucgcccucggccgccccaugugcgucggcaccacccccuccgccaaggccuccauccuccacgagguccgccccgucaccuccggcugcuuccccaucaugcacgaccgcaccaagauccgccagcuccccaaccuccuccgcggcuacgagaacauccgccucuccacccagaacgucaucgacgccgagaaggcccccggcggccccuaccgccucggcaccuccggcuccugccccaacgccaccuccaaguccggcuucuucgccaccauggccugggccguccccaaggacaacaacaagaacgccaccaacccccucaccgucgagguccccuacaucugcaccgagggcgaggaccagaucaccgucuggggcuuccacuccgacaacaagacccagaugaagaaccucuacggcgacuccaacccccagaaguucaccuccuccgccaacggcgucaccacccacuacgucucccagaucggcuccuuccccgaccagaccgaggacggcggccucccccaguccggccgcaucgucgucgacuacaugaugcagaagcccggcaagaccggcaccaucgucuaccagcgcggcauccuccucccccagaaggucuggugcgccuccggccgcuccaaggucaucaagggcucccucccccucaucggcgaggccgacugccuccacgagaaguacggcggccucaacaaguccaagcccuacuacaccggcgagcacgccaaggccaucggcaacugccccaucugggucaagaccccccucaagcucgccaacggcaccaaguaccgcccccccgccaagcuccucaaggagcgcggcuucuucggcgccaucgccggcuuccucgagggcggcugggagggcaugaucgccggcuggcacggcuacaccucccacggcgcccacggcgucgccgucgccgccgaccucaaguccacccaggaggccaucaacaagaucaccaagaaccucaacucccucuccgagcucgaggucaagaaccuccagcgccucuccggcgccauggacgagcuccacaacgagauccucgagcucgacgagaaggucgacgaccuccgcgccgacaccaucuccucccagaucgagcucgccguccuccucuccaacgagggcaucaucaacuccgaggacgagcaccuccucgcccucgagcgcaagcucaagaagaugcucggccccuccgccgucgagaucggcaacggcugcuucgagaccaagcacaagugcaaccagaccugccucgaccgcaucgccgccggcaccuucaacgccggcgaguucucccuccccaccuucgacucccucaacaucaccgccgccucccucaacgacgacggccucgacaaccacaccauccuccucuacuacuccaccgccgccuccucccucgccgucacccucaugcucgccaucuucaucgucuacauggucucccgcgacaacgucuccugcuccaucugccucuga

SEQ ID NO: 123769 - RNA, 1755 nt, Artificial Sequence; identical to SEQ ID NO: 123083
  derived and/or modified CDS sequence (opt2) from hemagglutinin__InfluenzaB__AGX24161

SEQ ID NO: 123770 - RNA, 1755 nt, Artificial Sequence; identical to SEQ ID NO: 122856
  derived and/or modified CDS sequence (opt2) from hemagglutinin__InfluenzaB__AGX24172

SEQ ID NO: 123771 - RNA, 1755 nt, Artificial Sequence; identical to SEQ ID NO: 122856
  derived and/or modified CDS sequence (opt2) from hemagglutinin__InfluenzaB__AGX24183

SEQ ID NO: 123772 - RNA, 1755 nt, Artificial Sequence; identical to SEQ ID NO: 122856
  derived and/or modified CDS sequence (opt2) from hemagglutinin__InfluenzaB__AGX24194

SEQ ID NO: 123773 - RNA, 1755 nt, Artificial Sequence; identical to SEQ ID NO: 122603
  derived and/or modified CDS sequence (opt2) from hemagglutinin__InfluenzaB__AGX24205

SEQ ID NO: 123774 - RNA, 1755 nt, Artificial Sequence; identical to SEQ ID NO: 122767
  derived and/or modified CDS sequence (opt2) from hemagglutinin__InfluenzaB__AGX24227

SEQ ID NO: 123775 - RNA, 1755 nt, Artificial Sequence; identical to SEQ ID NO: 122856
  derived and/or modified CDS sequence (opt2) from hemagglutinin__InfluenzaB__AGX24238

SEQ ID NO: 123776 - RNA, 1755 nt, Artificial Sequence
  derived and/or modified CDS sequence (opt2) from hemagglutinin__InfluenzaB__AGX24249
augaaggccaucaucguccuccucauggucgucaccuccaacgccgaccgcaucugcaccggcaucaccuccuccaaguccccccacgucgucaagaccgccacccagggcgaggucaacgucaccggcgucaucccccucaccaccacccccaccaaguccuacuucgccaaccucaagggcacccgcacccgcggcaagcucugccccgacugccucaacugcaccgaccucgacgucgcccucggccgccccaugugcgucggcaccacccccuccgccaaggccuccauccuccacgagguccgccccgucaccuccggcugcuuccccaucaugcacgaccgcaccaagauccgccagcuccccaaccuccuccgcggcuacgagaacauccgccucuccacccagaacgucaucgacgccgagaaggcccccggcggccccuaccgccucggcaccuccggcuccugccccaacgccaccuccaagaucggcuucuucgccaccauggccugggccguccccaaggacaacuacaagaacgccaccaacccccucaccgucgagguccccuacaucugcaccgagggcgaggaccagaucaccgucuggggcuuccacuccgacaacaagacccagaugaagaaccucuacggcgacuccaacccccagaaguucaccuccuccgccaacggcgucaccacccacuacgucucccagaucggcgacuuccccgaccagaccgaggacggcggccucccccaguccggccgcaucgucgucgacuacaugaugcagaagcccggcaagaccggcaccaucgucuaccagcgcggcguccuccucccccagaaggucuggugcgccuccggccgcuccaaggucaucaagggcucccucccccucaucggcgaggccgacugccuccacgagaaguacggcggccucaacaaguccaagcccuacuacaccggcgagcacgccaaggccaucggcaacugccccaucugggucaagaccccccucaagcucgccaacggcaccaaguaccgcccccccgccaagcuccucaaggagcgcggcuucuucggcgccaucgccggcuuccucgagggcggcugggagggcaugaucgccggcuggcacggcuacaccucccacggcgcccacggcgucgccgucgccgccgaccucaaguccacccaggaggccaucaacaagaucaccaagaaccucaacucccucuccgagcucgaggucaagaaccuccagcgccucuccggcgccauggacgagcuccacaacgagauccucgagcucgacgagaaggucgacgaccuccgcgccgacaccaucuccucccagaucgagcucgccguccuccucuccaacgagggcaucaucaacuccgaggacgagcaccuccucgcccucgagcgcaagcucaagaagaugcucggccccuccgccgucgacaucggcaacggcugcuucgagaccaagcacaagugcaaccagaccugccucgaccgcaucgccgccggcaccuucaacgccggcgaguucucccuccccaccuucgacucccucaacaucaccgccgccucccucaacgacgacggccucgacaaccacaccauccuccucuacuacuccaccgccgccuccucccucgccgucacccucaugcucgccaucuucaucgucuacauggucucccgcgacaacgucuccugcuccaucugccucuga

SEQ ID NO: 123777 - RNA, 1755 nt, Artificial Sequence; identical to SEQ ID NO: 122603
  derived and/or modified CDS sequence (opt2) from hemagglutinin__InfluenzaB__AGX24260

SEQ ID NO: 123778 - RNA, 1755 nt, Artificial Sequence; identical to SEQ ID NO: 123092
  derived and/or modified CDS sequence (opt2) from hemagglutinin__InfluenzaB__AGX24271

SEQ ID NO: 123779 - RNA, 1755 nt, Artificial Sequence
  derived and/or modified CDS sequence (opt2) from hemagglutinin__InfluenzaB__AGX24282
augaaggccaucaucguccuccucauggucgucaccuccaacgccgaccgcaucugcaccggcaucaccuccuccaacuccccccacgucgucaagaccgccacccagggcgaggucaacgucaccggcgucaucccccucaccaccacccccaccaaguccuacuucgccaaccucaagggcacccgcacccgcggcaagcucugccccgacugccucaacugcaccgaccucgacgucgcccucggccgccccaugugcgucggcaccacccccuccgccaaggccuccauccuccacgagguccgccccgucaccuccggcugcuuccccaucaugcacgaccgcaccaagauccgccagcuccccaaccuccuccgcggcuacgagaacauccgccucuccacccagaacgucaucgacgccgagaaggcccccggcggccccuaccgccucggcaccuccggcuccugccccaacgccaccuccaaguccggcuucuucgccaccauggccugggccguccccaaggacaacaacaagaacgccaccaacccccucaccgucgagguccccuacaucugcaccaagggcgaggaccagaucaccgucuggggcuuccacuccgacaacaagacccagaugaagaaccucuacggcgacuccaacccccagaaguucaccuccuccgccaacggcgucaccacccacuacgucucccagaucggcuccuuccccgaccagaccgaggacggcggccucccccaguccggccgcaucgucgucgacuacaugaugcagaagcccggcaagaccggcaccaucgucuaccagcgcggcguccuccucccccagcgcgucuggugcgccuccggccgcuccaaggucaucaagggcucccucccccucaucggcgaggccgacugccuccacgagaaguacggcggccucaacaaguccaagcccuacuacaccggcgagcacgccaaggccaucggcaacugccccaucugggucaagaccccccucaagcucgccaacggcaccaaguaccgcccccccgccaagcuccucaaggagcgcggcuucuucggcgccaucgccggcuuccucgagggcggcugggagggcaugaucgccggcuggcacggcuacaccucccacggcgcccacggcgucgccgucgccgccgaccucaaguccacccaggaggccaucaacaagaucaccaagaaccucaacucccucuccgagcucgaggucaagaaccuccagcgccucuccggcgccauggacgagcuccacaacgagauccucgagcucgacgagaaggucgacgaccuccgcgccgacaccaucuccucccagaucgagcucgccguccuccucuccaacgagggcaucaucaacuccgaggacgagcaccuccucgcccucgagcgcaagcucaagaagaugcucggccccuccgccgucgagaucggcaacggcugcuucgagaccaagcacaagugcaaccagaccugccucgaccgcaucgccgccggcaccuucaacgccggcgaguucucccuccccaccuucgacucccucaacaucaccgccgccucccucaacgacgacggccucgacaaccacaccauccuccucuacuacuccaccgccgccuccucccucgccgucacccucaugcucgccaucuucaucgucuacauggucucccgcgacaacgucuccugcuccaucugccucuga

SEQ ID NO: 123780 - RNA, 1755 nt, Artificial Sequence; identical to SEQ ID NO: 122603
  derived and/or modified CDS sequence (opt2) from hemagglutinin__InfluenzaB__AGX24293

SEQ ID NO: 123781 - RNA, 1755 nt, Artificial Sequence; identical to SEQ ID NO: 122603
  derived and/or modified CDS sequence (opt2) from hemagglutinin__InfluenzaB__AGX24304

SEQ ID NO: 123782 - RNA, 1755 nt, Artificial Sequence; identical to SEQ ID NO: 123092
  derived and/or modified CDS sequence (opt2) from hemagglutinin__InfluenzaB__AGX24315

SEQ ID NO: 123783 - RNA, 1755 nt, Artificial Sequence
  derived and/or modified CDS sequence (opt2) from hemagglutinin__InfluenzaB__AGX24326
augaaggccaucaucguccuccucauggucgucaccuccaacgccgaccgcaucugcaccggcaucaccuccuccaacuccccccacgucgucaagaccgccacccagggcgaggucaacgucaccggcgucaucccccucaccaccacccccaccaaguccuacuucgccaaccucaagggcacccgcacccgcggcaagcucugccccgacugccucaacugcaccgaccucgacgucgcccucggccgccccaccugcgucggcaccacccccuccgccaaggccuccauccuccacgagguccgccccgucaccuccggcugcuuccccaucaugcacgaccgcaccaagauccgccagcuccccaaccuccuccgcggcuacgagaacauccgccucuccacccagaacgucaucgacgccgagaaggcccccggcggccccuaccgccucggcaccuccggcuccugccccaacgccaccuccaaguccggcuucuucgccaccauggccugggccguccccaaggacaacaacaagaacgccaccaacccccucaccgucgagguccccuacaucugcaccgagggcgaggaccagaucaccgucuggggcuuccacuccgacaacaagacccagaugaagaaccucuacggcgacuccaacccccagaaguucaccuccuccgccaacggcgucaccacccacuacgucucccagaucggcuccuuccccgaccagaccgaggacggcggccucccccaguccggccgcaucgucgucgacuacaugaugcagaagcccggcaagaccggcaccaucgucuaccagcgcggcauccuccucccccagaaggucuggugcgccuccggccgcuccaaggucaucaagggcucccucccccucaucggcgaggccgacugccuccacgagaaguacggcggccucaacaaguccaagcccuacuacaccggcgagcacgccaaggccaucggcaacugccccaucugggucaagaccccccucaagcucgccaacggcaccaaguaccgcccccccgccaagcuccucaaggagcgcggcuucuucggcgccaucgccggcuuccucgagggcggcugggagggcaugaucgccggcuggcacggcuacaccucccacggcgcccacggcgucgccgucgccgccgaccucaaguccacccaggaggccaucaacaagaucaccaagaaccucaacucccucuccgagcucgaggucaagaaccuccagcgccucuccggcgccauggacgagcuccacaacgagauccucgagcucgacgagaaggucgacgaccuccgcgccgacaccaucuccucccagaucgagcucgccguccuccucuccaacgagggcaucaucaacuccgaggacgagcaccuccucgcccucgagcgcaagcucaagaagaugcucggccccuccgccgucgagaucggcaacggcugcuucgagaccaagcacaagugcaaccagaccugccucgaccgcaucgccgccggcaccuucaacgccggcgaguucucccuccccaccuucgacucccucaacaucaccgccgccucccucaacgacgacggccucgacaaccacaccauccuccucuacuacuccaccgccgccuccucccucgccgucacccucaugcucgccaucuucaucgucuacauggucucccgcgacaacgucuccugcuccaucugccucuga

SEQ ID NO: 123784 - RNA, 1755 nt, Artificial Sequence
  derived and/or modified CDS sequence (opt2) from hemagglutinin__InfluenzaB__AGX24337
augaaggccaucaucguccuccucauggucgucaccuccaacgccgaccgcaucugcaccggcaucaccuccuccaacuccccccacgucgucaagaccgccacccagggcgaggucaacgucaccggcgucaucccccucaccaccacccccaccaaguccuacuucgccaaccucaagggcacccgcacccgcggcaagcucugccccgacugccucaacugcaccgaccucgacgucgcccucggcaugcccaugugcgucggcaccacccccuccgccaaggccuccauccuccacgagguccgccccgucaccuccggcugcuuccccaucaugcacgaccgcaccaagauccgccagcuccccaaccuccuccgcggcuacgagaacauccgccucuccacccagaacgucaucgacgccgagaaggcccccggcggccccuaccgccucggcaccuccggcuccugccccaacgccaccuccaagaucggcuucuucgccaccauggccugggccguccccaaggacaacuacaagaacgccaccaacccccucaccgucgagguccccuacaucugcaccgagggcgaggaccagaucaccgucuggggcuuccacuccgacaacaagacccagaugaagaaccucuacggcgacuccaacccccagaaguucaccuccuccgccaacggcgucaccacccacuacgucucccagaucggcgacuuccccgaccagaccgaggacggcggccucccccaguccggccgcaucgucgucgacuacaugaugcagaagcccggcaagaccggcaccaucgucuaccagcgcggcguccuccucccccagaaggucuggugcgccuccggccgcuccaaggucaucaagggcucccucccccucaucggcgaggccgacugccuccacgagaaguacggcggccucaacaaguccaagcccuacuacaccggcgagcacgccaaggccaucggcaacugccccaucugggucaagaccccccucaagcucgccaacggcaccaaguaccgcccccccgccaagcuccucaaggagcgcggcuucuucggcgccaucgccggcuuccucgagggcggcugggagggcaugaucgccggcuggcacggcuacaccucccacggcgcccacggcgucgccgucgccgccgaccucaaguccacccaggaggccaucaacaagaucaccaagaaccucaacucccucuccgagcucgaggucaagaaccuccagcgccucuccggcgccauggacgagcuccacaacgagauccucgagcucgacgagaaggucgacgaccuccgcgccgacaccaucuccucccagaucgagcucgccguccuccucuccaacgagggcaucaucaacuccgaggacgagcaccuccucgcccucgagcgcaagcucaagaagaugcucggccccuccgccgucgacaucggcaacggcugcuucgagaccaagcacaagugcaaccagaccugccucgaccgcaucgccgccggcaccuucaacgccggcgaguucucccuccccaccuucgacucccucaacaucaccgccgccucccucaacgacgacggccucgacaaccacaccauccuccucuacuacuccaccgccgccuccucccucgccgucacccucaugcucgccaucuucaucgucuacauggucucccgcgacaacgucuccugcuccaucugccucuga

SEQ ID NO: 123785 - RNA, 1755 nt, Artificial Sequence; identical to SEQ ID NO: 122856
  derived and/or modified CDS sequence (opt2) from hemagglutinin__InfluenzaB__AGX24348

SEQ ID NO: 123786 - RNA, 1755 nt, Artificial Sequence; identical to SEQ ID NO: 122603
  derived and/or modified CDS sequence (opt2) from hemagglutinin__InfluenzaB__AGX24359

SEQ ID NO: 123787 - RNA, 1755 nt, Artificial Sequence; identical to SEQ ID NO: 122856
  derived and/or modified CDS sequence (opt2) from hemagglutinin__InfluenzaB__AGX24381

SEQ ID NO: 123788 - RNA, 1755 nt, Artificial Sequence
  derived and/or modified CDS sequence (opt2) from hemagglutinin__InfluenzaB__AGX24392
augaaggccaucaucguccuccucauggucgucaccuccaacgccgaccgcaucugcaccggcaucaccuccuccaacuccccccacgucgucaagaccgccacccagggcgaggucaacgucaccggcgucaucccccucaccaccacccccaccaaguccuacuucgccaaccucaagggcacccgcacccgcggcaagcucugccccgacugccucaacugcaccgaccucgacgucgcccucggccgccccaugugcgucggcaccacccccuccgccaaggccuccauccuccacgagguccgccccgucaccuccggcugcuuccccaucaugcacgaccgcaccaagauccgccagcuccccaaccuccuccgcggcuacgagaacauccgccucuccacccagaacgucaucgacgccgagaaggcccccggcggccccuaccgccucggcaccuccggcuccugccccaacgccaccuccaaguccggcuucuucgccaccauggccugggccguccccaaggacaacaacaagaacgccaccaacccccucaccgucgagauccccuacaucugcaccgagggcgaggaccagaucaccgucuggggcuuccacuccgacaacaagacccagaugaagaaccucuacggcgacuccaacccccagaaguucaccuccuccgccaacggcgucaccacccacuacgucucccagaucggcuccuuccccgaccagaccgaggacggcggccucccccaguccggccgcaucgucgucgacuacaugaugcagaagcccggcaagaccggcaccaucgucuaccagcgcggcguccuccucccccagaaggucuggugcgccuccggccgcuccaaggucaucaagggcucccucccccucaucggcgaggccgacugccuccacgagaaguacggcggccucaacaaguccaagcccuacuacaccggcgagcacgccaaggccaucggcaacugccccaucugggucaagaccccccucaagcucgccaacggcaccaaguaccgcccccccgccaagcuccucaaggagcgcggcuucuucggcgccaucgccggcuuccucgagggcggcugggagggcaugaucgccggcuggcacggcuacaccucccacggcgcccacggcgucgccgucgccgccgaccucaaguccacccaggaggccaucaacaagaucaccaagaaccucaacucccucuccgagcucgaggucaagaaccuccagcgccucuccggcgccauggacgagcuccacaacgagauccucgagcucgacgagaaggucgacgaccuccgcgccgacaccaucuccucccagaucgagcucgccguccuccucuccaacgagggcaucaucaacuccgaggacgagcaccuccucgcccucgagcgcaagcucaagaagaugcucggccccuccgccgucgagaucggcaacggcugcuucgagaccaagcacaagugcaaccagaccugccucgaccgcaucgccgccggcaccuucaacgccggcgaguucucccuccccaccuucgacucccucaacaucaccgccgccucccucaacgacgacggccucgacaaccacaccauccuccucuacuacuccaccgccgccuccucccucgccgucacccucaugcucgccaucuucaucgucuacauggucucccgcgacaacgucuccugcuccaucugccucuga

SEQ ID NO: 123789 - RNA, 1755 nt, Artificial Sequence; identical to SEQ ID NO: 122603
  derived and/or modified CDS sequence (opt2) from hemagglutinin__InfluenzaB__AGX24403

SEQ ID NO: 123790 - RNA, 1755 nt, Artificial Sequence; identical to SEQ ID NO: 122856
  derived and/or modified CDS sequence (opt2) from hemagglutinin__InfluenzaB__AGX24414

SEQ ID NO: 123791 - RNA, 1755 nt, Artificial Sequence; identical to SEQ ID NO: 122603
  derived and/or modified CDS sequence (opt2) from hemagglutinin__InfluenzaB__AGX24425

SEQ ID NO: 123792 - RNA, 1755 nt, Artificial Sequence; identical to SEQ ID NO: 122603
  derived and/or modified CDS sequence (opt2) from hemagglutinin__InfluenzaB__AGX24436

SEQ ID NO: 123793 - RNA, 1755 nt, Artificial Sequence; identical to SEQ ID NO: 123092
  derived and/or modified CDS sequence (opt2) from hemagglutinin__InfluenzaB__AGX24447

SEQ ID NO: 123794 - RNA, 1755 nt, Artificial Sequence; identical to SEQ ID NO: 123783
  derived and/or modified CDS sequence (opt2) from hemagglutinin__InfluenzaB__AGX24458

SEQ ID NO: 123795 - RNA, 1755 nt, Artificial Sequence
  derived and/or modified CDS sequence (opt2) from hemagglutinin__InfluenzaB__AGX24469
augaaggccaucaucguccuccucauggucgucaccuccaacgccgaccgcaucugcaccggcaucaccuccuccaacuccccccacgucgucaagaccgccacccagggcgaggucaacgucaccggcgucaucccccucaccaccacccccaccaaguccuacuucgccaaccucaagggcacccgcacccgcggcaagcucugccccgacugccucaacugcaccgaccucgacgucgcccucggccgccccaccugcgucggcaccacccccuccgccaaggccuccauccuccacgagguccgccccgucaccuccggcugcuuccccaucaugcacgaccgcaccaagauccgccagcuccccaaccuccuccgcggcuacgagaacauccgccucuccacccagaacgucaucgacgccgagaaggcccccggcggccccuaccgccucggcaccuccggcuccugccccaacgccaccuccaaguccggcuucuucgccaccauggccugggccguccccaaggacaacaacaagaacgccaccaacccccucaccgucgagguccccuacaucugcaccgagggcgaggaccagaucaccgucuggggcuuccacuccgacaacaagacccagaugaagaaccucuacggcgacuccaacccccagaaguucaccuccuccgccaacggcgucaccacccacuacgucucccagaucggcuccuuccccgaccagaccgaggacggcggccucccccaguccggccgcaucgucgucgacuacaugaugcagaagcccggcaagaccggcaccaucgucuaccagcgcggcauccuccucccccagaaggucuggugcgccuccggccgcuccaaggucaucaagggcucccucccccucaucggcgaggccgacugccuccacgagaaguacggcggccucaacaaguccaagcccuacuacaccggcgagcacgccaaggccaucggcaacugccccaucugggucaagaccccccucaagcucgccaacggcaccaaguaccgcccccccgccaagcuccucaaggagcgcggcuucuucggcgccaucgccggcuuccucgagggcggcugggagggcauggucgccggcuggcacggcuacaccucccacggcgcccacggcgucgccgucgccgccgaccucaaguccacccaggaggccaucaacaagaucaccaagaaccucaacucccucuccgagcucgaggucaagaaccuccagcgccucuccggcgccauggacgagcuccacaacgagauccucgagcucgacgagaaggucgacgaccuccgcgccgacaccaucuccucccagaucgagcucgccguccuccucuccaacgagggcaucaucaacuccgaggacgagcaccuccucgcccucgagcgcaagcucaagaagaugcucggccccuccgccgucgagaucggcaacggcugcuucgagaccaagcacaagugcaaccagaccugccucgaccgcaucgccgccggcaccuucaacgccggcgaguucucccuccccaccuucgacucccucaacaucaccgccgccucccucaacgacgacggccucgacaaccacaccauccuccucuacuacuccaccgccgccuccucccucgccgucacccucaugcucgccaucuucaucgucuacauggucucccgcgacaacgucuccugcuccaucugccucuga

SEQ ID NO: 123796 - RNA, 1755 nt, Artificial Sequence; identical to SEQ ID NO: 123092
  derived and/or modified CDS sequence (opt2) from hemagglutinin__InfluenzaB__AGX24480

SEQ ID NO: 123797 - RNA, 1755 nt, Artificial Sequence; identical to SEQ ID NO: 123092
  derived and/or modified CDS sequence (opt2) from hemagglutinin__InfluenzaB__AGX24491

SEQ ID NO: 123798 - RNA, 1755 nt, Artificial Sequence
  derived and/or modified CDS sequence (opt2) from hemagglutinin__InfluenzaB__AGX24502
augaaggccaucaucguccuccucauggucgucaccuccaacgccgaccgcaucugcaccggcaucaccuccuccaacuccccccacgucgucaagaccgccacccagggcgaggucaacgucaccggcgucaucccccucaccaccacccccaccaaguccuacuucgccaaccucaagggcacccgcacccgcggcaagcucugccccgacugccucaacugcaccgaccucgacgucgcccucggccgccccaugugcgucggcaccacccccuccgccaaggccuccauccuccacgagguccgccccgucaccuccggcugcuuccccaucaugcacgaccgcaccaagauccgccagcuccccaaccuccuccgcggcuacgagaacauccgccucuccacccagaacgucaucgacgccgagaaggcccccggcggccccuaccgccucggcaccuccggcuccugccccaacgccaccuccaaguccggcuucuucgccaccauggccugggccguccagaaggacaacaacaagaacgccaccaacccccucaccgucgagguccccuacaucugcaccgagggcgaggaccagaucaccgucuggggcuuccacuccgacaacaagacccagaugaagaaccucuacggcgacuccaacccccagaaguucaccuccuccgccaacggcgucaccacccacuacgucucccagaucggcuccuuccccgaccagaccgaggacggcggccucccccaguccggccgcaucgucgucgacuacaugaugcagaagcccggcaagaccggcaccaucgucuaccagcgcggcguccuccucccccagcgcgucuggugcgccuccggccgcuccaaggucaucaagggcucccucccccucaucggcgaggccgacugccuccacgagaaguacggcggccucaacaaguccaagcccuacuacaccggcgagcacgccaaggccaucggcaacugccccaucugggucaagaccccccucaagcucgccaacggcaccaaguaccgcccccccgccaagcuccucaaggagcgcggcuucuucggcgccaucgccggcuuccucgagggcggcugggagggcaugaucgccggcuggcacggcuacaccucccacggcgcccacggcgucgccgucgccgccgaccucaaguccacccaggaggccaucaacaagaucaccaagaaccucaacucccucuccgagcucgaggucaagaaccuccagcgccucuccggcgccauggacgagcuccacaacgagauccucgagcucgacgagaaggucgacgaccuccgcgccgacaccaucuccucccagaucgagcucgccguccuccucuccaacgagggcaucaucaacuccgaggacgagcaccuccucgcccucgagcgcaagcucaagaagaugcucggccccuccgccgucgagaucggcaacggcugcuucgagaccaagcacaagugcaaccagaccugccucgaccgcaucgccgccggcaccuucaacgccggcgaguucucccuccccaccuucgacucccucaacaucaccgccgccucccucaacgacgacggccucgacaaccacaccauccuccucuacuacuccaccgccgccuccucccucgccgucacccucaugcucgccaucuucaucgucuacauggucucccgcgacaacgucuccugcuccaucugccucuga

SEQ ID NO: 123799 - RNA, 1755 nt, Artificial Sequence; identical to SEQ ID NO: 122767
  derived and/or modified CDS sequence (opt2) from hemagglutinin__InfluenzaB__AGX24513

SEQ ID NO: 123800 - RNA, 1755 nt, Artificial Sequence; identical to SEQ ID NO: 123092
  derived and/or modified CDS sequence (opt2) from hemagglutinin__InfluenzaB__AGX24524

SEQ ID NO: 123801 - RNA, 1755 nt, Artificial Sequence
  derived and/or modified CDS sequence (opt2) from hemagglutinin__InfluenzaB__AGX24535
augaaggccaucaucguccuccucauggucgucaccuccaacgccgaccgcaucugcaccggcaucaccuccuccaacuccccccacgucgucaagaccgccacccagggcgaggucaacgucaccggcgucaucccccucaccaccacccccaccaaguccuacuucgccaaccucaagggcacccgcacccgcggcaagcucugccccgacugccucaacugcaccgaccucgacgucgcccucggccgccccaugugcgucggcaccacccccuccgccaaggccuccauccuccacgagguccgccccgucaccuccggcugcuuccccaucaugcacgaccgcaccaagauccgccagcuccccaaccuccuccgcggcuacgagaacauccgccucuccacccagaacgucaucgacgccgagaaggcccccggcggccccuaccgccucggcaccuccggcuccugccccaacgccaccuccaagaucggcuucuucgccaccauggccugggccguccccaaggacaacuacaagaacgccaccaacccccucaccgucgagguccccuacaucugcaccgagggcgaggaccagaucaccgucuggggcuuccacuccgacaacaagacccagaugaagaaccucuacggcgacuccaacccccagaaguucaccuccuccgccaacggcgucaccacccacuacgucucccagaucggcgacuuccccgaccagaccgaggacggcggccucccccaguccggccgcaucgucgucgacuacaugaugcagaagcccggcaagaccggcaccaucgucuaccagcgcggcguccuccucccccagaaggucuggugcgccuccggccgcuccaaggucaucaagggcucccucccccucaucggcgaggccgacugccuccacgagaaguacggcggccucaacaaguccaagcccuacuacaccggcgagcacgccaaggccaucggcaacugccccaucugggucaagaccccccucaagcucgccaacggcaccaaguaccgcccccccgccaagcuccucaaggagcgcggcuucuucggcgccaucgccggcuuccucgagggcggcugggagggcaugaucgccggcuggcacggcuacaccucccacggcgcccacggcgucgccgucgccgccgaccucaaguccacccaggaggccaucaacaagaucaccaagaaccucaacucccucuccgagcucgaggucaagaaccuccagcgccucuccggcgccauggacgagcuccacaacgagauccucgagcucgacgagaaggucgacgaccuccgcgccgacaccaucuccgcccagaucgagcucgccguccuccucuccaacgagggcaucaucaacuccgaggacgagcaccuccucgcccucgagcgcaagcucaagaagaugcucggccccuccgccgucgacaucggcaacggcugcuucgagaccaagcacaagugcaaccagaccugccucgaccgcaucgccgccggcaccuucaacgccggcgaguucucccuccccaccuucgacucccucaacaucaccgccgccucccucaacgacgacggccucgacaaccacaccauccuccucuacuacuccaccgccgccuccucccucgccgucacccucaugcucgccaucuucaucgucuacauggucucccgcgacaacgucuccugcuccaucugccucuga

SEQ ID NO: 123802 - RNA, 1755 nt, Artificial Sequence; identical to SEQ ID NO: 122603
  derived and/or modified CDS sequence (opt2) from hemagglutinin__InfluenzaB__AGX24546

SEQ ID NO: 123803 - RNA, 1755 nt, Artificial Sequence
  derived and/or modified CDS sequence (opt2) from hemagglutinin__InfluenzaB__AGX24557
augaagaccaucaucguccuccucauggucgucaccuccaacgccgaccgcaucugcaccggcaucaccuccuccaacuccccccacgucgucaagaccgccacccagggcgaggucaacgucaccggcgucaucccccucaccaccacccccaccaaguccuacuucgccaaccucaagggcacccgcacccgcggcaagcucugccccgacugccucaacugcaccgaccucgacgucgcccucggccgccccaccugcgucggcaccacccccuccgccaaggccuccauccuccacgagguccgccccgucaccuccggcugcuuccccaucaugcacgaccgcaccaagauccgccagcuccccaaccuccuccgcggcuacgagaacauccgccucuccacccagaacgucaucgacgccgagaaggcccccggcggccccuaccgccucggcaccuccggcuccugccccaacgccaccuccaaguccggcuucuucgccaccauggccugggccguccccaaggacaacaacaagaacgccaccaacccccucaccgucgagguccccuacaucugcaccgagggcgaggaccagaucaccgucuggggcuuccacuccgacaacaagacccagaugaagaaccucuacggcgacuccaacccccagaaguucaccuccuccgccaacggcgucaccacccacuacgucucccagaucggcuccuuccccgaccagaccgaggacggcggccucccccaguccggccgcaucgucgucgacuacaugaugcagaagcccggcaagaccggcaccaucgucuaccagcgcggcauccuccucccccagaaggucuggugcgccuccggccgcuccaaggucaucaagggcucccucccccucaucggcgaggccgacugccuccacgagaaguacggcggccucaacaaguccaagcccuacuacaccggcgagcacgccaaggccaucggcaacugccccaucugggucaagaccccccucaagcucgccaacggcaccaaguaccgcccccccgccaagcuccucaaggagcgcggcuucuucggcgccaucgccggcuuccucgagggcggcugggagggcaugaucgccggcuggcacggcuacaccucccacggcgcccacggcgucgccgucgccgccgaccucaaguccacccaggaggccaucaacaagaucaccaagaaccucaacucccucuccgagcucgaggucaagaaccuccagcgccucuccggcgccauggacgagcuccacaacgagauccucgagcucgacgagaaggucgacgaccuccgcgccgacaccaucuccucccagaucgagcucgccguccuccucuccaacgagggcaucaucaacuccgaggacgagcaccuccucgcccucgagcgcaagcucaagaagaugcucggccccuccgccgucgagaucggcaacggcugcuucgagaccaagcacaagugcaaccagaccugccucgaccgcaucgccgccggcaccuucaacgccggcgaguucucccuccccaccuucgacucccucaacaucaccgccgccucccucaacgacgacggccucgacaaccacaccauccuccucuacuacuccaccgccgccuccucccucgccgucacccucaugcucgccaucuucaucgucuacauggucucccgcgacaacgucuccugcuccaucugccucuga

SEQ ID NO: 123804 - RNA, 1755 nt, Artificial Sequence; identical to SEQ ID NO: 123092
  derived and/or modified CDS sequence (opt2) from hemagglutinin__InfluenzaB__AGX24579

SEQ ID NO: 123805 - RNA, 1755 nt, Artificial Sequence; identical to SEQ ID NO: 123092
  derived and/or modified CDS sequence (opt2) from hemagglutinin__InfluenzaB__AGX24590

SEQ ID NO: 123806 - RNA, 1755 nt, Artificial Sequence; identical to SEQ ID NO: 123092
  derived and/or modified CDS sequence (opt2) from hemagglutinin__InfluenzaB__AGX24601

SEQ ID NO: 123807 - RNA, 1755 nt, Artificial Sequence; identical to SEQ ID NO: 123092
  derived and/or modified CDS sequence (opt2) from hemagglutinin__InfluenzaB__AGX24612

SEQ ID NO: 123808 - RNA, 1755 nt, Artificial Sequence; identical to SEQ ID NO: 122603
  derived and/or modified CDS sequence (opt2) from hemagglutinin__InfluenzaB__AGX24623

SEQ ID NO: 123809 - RNA, 1755 nt, Artificial Sequence; identical to SEQ ID NO: 123092
  derived and/or modified CDS sequence (opt2) from hemagglutinin__InfluenzaB__AGX24634

SEQ ID NO: 123810 - RNA, 1755 nt, Artificial Sequence; identical to SEQ ID NO: 123801
  derived and/or modified CDS sequence (opt2) from hemagglutinin__InfluenzaB__AGX24656

SEQ ID NO: 123811 - RNA, 1755 nt, Artificial Sequence; identical to SEQ ID NO: 122603
  derived and/or modified CDS sequence (opt2) from hemagglutinin__InfluenzaB__AGX24667

SEQ ID NO: 123812 - RNA, 1755 nt, Artificial Sequence; identical to SEQ ID NO: 122856
  derived and/or modified CDS sequence (opt2) from hemagglutinin__InfluenzaB__AGX24678

SEQ ID NO: 123813 - RNA, 1755 nt, Artificial Sequence; identical to SEQ ID NO: 123092
  derived and/or modified CDS sequence (opt2) from hemagglutinin__InfluenzaB__AGX24689

SEQ ID NO: 123814 - RNA, 1755 nt, Artificial Sequence; identical to SEQ ID NO: 123092
  derived and/or modified CDS sequence (opt2) from hemagglutinin__InfluenzaB__AGX24700

SEQ ID NO: 123815 - RNA, 1755 nt, Artificial Sequence; identical to SEQ ID NO: 123092
  derived and/or modified CDS sequence (opt2) from hemagglutinin__InfluenzaB__AGX24711

SEQ ID NO: 123816 - RNA, 1755 nt, Artificial Sequence; identical to SEQ ID NO: 122603
  derived and/or modified CDS sequence (opt2) from hemagglutinin__InfluenzaB__AGX24722

SEQ ID NO: 123817 - RNA, 1755 nt, Artificial Sequence; identical to SEQ ID NO: 122603
  derived and/or modified CDS sequence (opt2) from hemagglutinin__InfluenzaB__AGX24733

SEQ ID NO: 123818 - RNA, 1755 nt, Artificial Sequence; identical to SEQ ID NO: 122603
  derived and/or modified CDS sequence (opt2) from hemagglutinin__InfluenzaB__AGX24744

SEQ ID NO: 123819 - RNA, 1755 nt, Artificial Sequence; identical to SEQ ID NO: 122603
  derived and/or modified CDS sequence (opt2) from hemagglutinin__InfluenzaB__AGX24755

SEQ ID NO: 123820 - RNA, 1755 nt, Artificial Sequence; identical to SEQ ID NO: 123092
  derived and/or modified CDS sequence (opt2) from hemagglutinin__InfluenzaB__AGX24766

SEQ ID NO: 123821 - RNA, 1755 nt, Artificial Sequence; identical to SEQ ID NO: 122603
  derived and/or modified CDS sequence (opt2) from hemagglutinin__InfluenzaB__AGX24777

SEQ ID NO: 123822 - RNA, 1755 nt, Artificial Sequence; identical to SEQ ID NO: 122603
  derived and/or modified CDS sequence (opt2) from hemagglutinin__InfluenzaB__AGX24788

SEQ ID NO: 123823 - RNA, 1755 nt, Artificial Sequence; identical to SEQ ID NO: 122603
  derived and/or modified CDS sequence (opt2) from hemagglutinin__InfluenzaB__AGX24799

SEQ ID NO: 123824 - RNA, 1755 nt, Artificial Sequence; identical to SEQ ID NO: 123092
  derived and/or modified CDS sequence (opt2) from hemagglutinin__InfluenzaB__AGX24810

SEQ ID NO: 123825 - RNA, 1755 nt, Artificial Sequence; identical to SEQ ID NO: 123092
  derived and/or modified CDS sequence (opt2) from hemagglutinin__InfluenzaB__AGX24821

SEQ ID NO: 123826 - RNA, 1755 nt, Artificial Sequence
  derived and/or modified CDS sequence (opt2) from hemagglutinin__InfluenzaB__AGX24832
augaaggccaucaucguccuccucauggucgucaccuccaacgccgaccgcaucugcaccggcaucaccuccuccaacuccccccacgucgucaagaccgccacccagggcgaggucaacgucaccggcgucaucccccucaccaccacccccaccaaguccuacuucgccaaccucaagggcacccgcacccgcggcaagcucugccccgacugccucaacugcaccgaccucgacgucgcccucggccgccccaugugcgucggcaccacccccuccgccaaggccuccauccuccacgagguccgccccgucaccuccggcugcuuccccaucaugcacgaccgcaccaagauccgccagcuccccaaccuccuccgcggcuacgagaacauccgccucuccacccagaacgucaucgacgccgagaaggcccccggcggccccuaccgccucggcaccuccggcuccugccccaacgccaccuccaaguccggcuucuucgccaccauggccugggccguccccaaggacaacaacaagaacgccaccaacccccucaccgucgagguccccuacaucugcaccgagggcgaggaccagaucaccgucuggggcuuccacuccgacaacaagacccagaugaagaaccucuacggcgacuccaacccccagaaguucaccuccuccgccaacggcgucaccacccacuacgucucccagaucggcuccuuccccgaccagaccgaggacggcggccucccccaguccggccgcaucgucgucgacuacaugaugcagaagcccggcaagaccggcaccaucgucuaccagcgcggcauccuccucccccagcgcgucuggugcgccuccggccgcuccaaggucaucaagggcucccucccccucaucggcgaggccgacugccuccacgagaaguacggcggccucaacaaguccaagcccuacuacaccggcgagcacgccaaggccaucggcaacugccccaucugggucaagaccccccucaagcucgccaacggcaccaaguaccgcccccccgccaagcuccucaaggagcgcggcuucuucggcgccaucgccggcuuccucgagggcggcugggagggcaugaucgccggcuggcacggcuacaccucccacggcgcccacggcgucgccgucgccgccgaccucaaguccacccaggaggccaucaacaagaucaccaagaaccucaacucccucuccgagcucgaggucaagaaccuccagcgccucuccggcgccauggacgagcuccacaacgagauccucgagcucgacgagaaggucgacgaccuccgcgccgacaccaucuccucccagaucgagcucgccguccuccucuccaacgagggcaucaucaacuccgaggacgagcaccuccucgcccucgagcgcaagcucaagaagaugcucggccccuccgccgucgagaucggcaacggcugcuucgagaccaagcacaagugcaaccagaccugccucgaccgcaucgccgccggcaccuucaacgccggcgaguucucccuccccaccuucgacucccucaacaucaccgccgccucccucaacgacgacggccucgacaaccacaccauccuccucuacuacuccaccgccgccuccucccucgccgucacccucaugcucgccaucuucaucgucuacauggucucccgcgacaacgucuccugcuccaucugccucuga

SEQ ID NO: 123827 - RNA, 1755 nt, Artificial Sequence
  derived and/or modified CDS sequence (opt2) from hemagglutinin__InfluenzaB__AGX24843
augaaggccaucaucguccuccucauggucgucaccuccaacgccgaccgcaucugcaccggcaucaccuccuccaacuccccccacgucgucaagaccgccacccagggcgaggucaacgucaccggcgucaucccccucaccaccacccccaccaaguccuacuucgccaaccucaagggcacccgcacccgcggcaagcucugccccgacugccucaacugcaccgaccucgacgucgcccucggccgccccaugugcgucggcaccacccccuccgccaaggccuccauccuccacgagguccgccccgucaccuccggcugcuuccccaucaugcacgaccgcaccaagauccgccagcuccccaaccuccuccgcggcuacgagaacauccgccucuccacccagaacgucaucgacgccgagaaggcccccggcggccccuaccgccucggcaccuccggcuccugccccaacgccaccuccaagaucggcuucuucgccaccauggccugggccguccccaaggacaacuacaagaacgccaccaacccccucaccgucgagguccccuacaucugcaccgagggcgaggaccagaucaccgucuggggcuuccacuccgacaacaagacccagaugaagaaccucuacggcgacuccaacccccagaaguucaccuccuccgccaacggcgucaccacccacuacgucucccagaucggcgacuuccccgaccagaccgaggacggcggccucccccaguccggccgcaucgucgucgacuacaugguccagaagcccggcaagaccggcaccaucgucuaccagcgcggcguccuccucccccagcgcgucuggugcaccuccggccgcuccaaggucaucaagggcucccucccccucaucggcgaggccgacugccuccacgagaaguacggcggccucaacaaguccaagcccuacuacaccggcgagcacgccaaggccaucggcaacugccccaucugggucaagaccccccucaagcucgccaacggcaccaaguaccgcccccccgccaagcuccucaaggagcgcggcuucuucggcgccaucgccggcuuccucgagggcggcugggagggcaugaucgccggcuggcacggcuacaccucccacggcgcccacggcgucgccgucgccgccgaccucaaguccacccaggaggccaucaacaagaucaccaagaaccucaacucccucuccgagcucgaggucaagaaccuccagcgccucuccggcgccauggacgagcuccacaacgagauccucgagcucgacgagaaggucgacgaccuccgcgccgacaccaucuccucccagaucgagcucgccguccuccucuccaacgagggcaucaucaacuccgaggacgagcaccuccucgcccucgagcgcaagcucaagaagaugcucggccccuccgccgucgacaucggcaacggcugcuucgagaccaagcacaagugcaaccagaccugccucgaccgcaucgccgccggcaccuucaacgccggcgaguucucccuccccaccuucgacucccucaacaucaccgccgccucccucaacgacgacggccucgacaaccacaccauccuccucuacuacuccaccgccgccuccucccucgccgucacccucaugcucgccaucuucaucgucuacauggucucccgcgacaacgucuccugcuccaucugccucuga

SEQ ID NO: 123828 - RNA, 1755 nt, Artificial Sequence
  derived and/or modified CDS sequence (opt2) from hemagglutinin__InfluenzaB__AGX24854
augaaggccaucaucguccuccucauggucgucaccuccaacgccgaccgcaucugcaccggcaucaccuccuccaacuccccccacgucgucaagaccgccacccagggcgaggucaacgucaccggcgucaucccccucaccaccacccccaccaaguccuacuucgccaaccucaagggcacccgcacccgcggcaagcucugccccgagugccucaacugcaccgaccucgacgucgcccucggccgccccaugugcgucggcaccacccccuccgccaaggccuccauccuccacgagguccgccccgucaccuccggcugcuuccccaucaugcacgaccgcaccaagauccgccagcuccccaaccuccuccgcggcuacgagaacauccgccucuccacccagaacgucaucgacgccgagaaggcccccggcggccccuaccgccucggcaccuccggcuccugccccaacgccaccuccaagaucggcuucuucgccaccauggccugggccguccccaaggacaacuacaagaacgccaccaacccccucaccgucgagguccccuacaucugcgccgagggcgaggaccagaucaccgucuggggcuuccacuccgacaacaagacccagaugaagaaccucuacggcgacuccaacccccagaaguucaccuccuccgccaacggcgucaccacccacuacgucucccagaucggcgacuuccccgaccagaccgaggacggcggccucccccaguccggccgcaucgucgucgacuacaugguccagcgccccggcaagaccggcaccaucgucuaccagcgcggcguccuccucccccagaaggucuggugcgccuccggccgcuccaaggucaucaagggcucccucccccucaucggcgaggccgacugccuccacgagaaguacggcggccucaacaaguccaagcccuacuacaccggcgagcacgccaaggccaucggcaacugccccaucugggucaagaccccccucaagcucgccaacggcaccaaguaccgcccccccgccaagcuccucaaggagcgcggcuucuucggcgccaucgccggcuuccucgagggcggcugggagggcaugaucgccggcuggcacggcuacaccucccacggcgcccacggcgucgccgucgccgccgaccucaaguccacccaggaggccaucaacaagaucaccaagaaccucaacucccucuccgagcucgaggucaagaaccuccagcgccucuccggcgccauggacgagcuccacaacgagauccucgagcucgacgagaaggucgacgaccuccgcgccgacaccaucuccucccagaucgagcucgccguccuccucuccaacgagggcaucaucaacuccgaggacgagcaccuccucgcccucgagcgcaagcucaagaagaugcucggccccuccgccgucgacaucggcaacggcugcuucgagaccaagcacaagugcaaccagaccugccucgaccgcaucgccgccggcaccuucaacgccggcgaguucucccuccccaccuucgacucccucaacaucaccgccgccucccucaacgacgacggccucgacaaccacaccauccuccucuacuacuccaccgccgccuccucccucgccgucacccucaugcucgccaucuucaucgucuacauggucucccgcgacaacgucuccugcuccaucugccucuga

SEQ ID NO: 123829 - RNA, 1755 nt, Artificial Sequence
  derived and/or modified CDS sequence (opt2) from hemagglutinin__InfluenzaB__AGX24865
augaaggccaucaucguccuccucauggucgucaccuccaacgccgaccgcaucugcaccggcaucaccuccuccaacuccccccacgucgucaagaccgccacccagggcgaggucaacgucaccggcgucaucccccucaccaccacccccaccaaguccuacuucgccaaccucaagggcacccgcacccgcggcaagcucugccccgacugccucaacugcaccgaccucgacgucgcccucggccgccccaugugcgucggcaccacccccuccgccaaggccuccauccuccacgagguccgccccgucaccuccggcugcuuccccaucaugcacgaccgcaccaagauccgccagcuccccaaccuccuccgcggcuacgagaacauccgccucuccacccagaacgucaucgacgccgagaaggcccccggcggccccuaccgccucggcaccuccggcuccugccccaacgccaccuccaagaucggcuucuucgccaccauggccugggccguccccaaggacaacuacaagaacgccaccaacccccucaccgucgagguccccuacaucugcgccgagggcgaggaccagaucaccgucuggggcuuccacuccgacaacaagacccagaugaagaaccucuacggcgacuccaacccccagaaguucaccuccuccgccaacggcgucaccacccacuacgucucccagaucggcgacuuccccgaccagaccgaggacggcggccucccccaguccggccgcaucgucgucgacuacaugguccagcgccccggcaagaccggcaccaucgucuaccagcgcggcguccuccucccccagaaggucuggugcgccuccggccgcuccaaggucaucaagggcucccucccccucaucggcgaggccgacugccuccacgagaaguacggcggccucaacaaguccaagcccuacuacaccggcgagcacgccaaggccaucggcaacugccccaucugggucaagaccccccucaagcucgccaacggcaccaaguaccgcccccccgccaagcuccucaaggagcgcggcuucuucggcgccaucgccggcuuccucgagggcggcugggagggcaugaucgccggcuggcacggcuacaccucccacggcgcccacggcgucgccgucgccgccgaccucaaguccacccaggaggccaucaacaagaucaccaagaaccucaacucccucuccgagcucgaggucaagaaccuccagcgccucuccggcgccauggacgagcuccacaacgagauccucgagcucgacgagaaggucgacgaccuccgcgccgacaccaucuccucccagaucgagcucgccguccuccucuccaacgagggcaucaucaacuccgaggacgagcaccuccucgcccucgagcgcaagcucaagaagaugcucggccccuccgccgucgacaucggcaacggcugcuucgagaccaagcacaagugcaaccagaccugccucgaccgcaucgccgccggcaccuucaacgccggcgaguucucccuccccaccuucgacucccucaacaucaccgccgccucccucaacgacgacggccucgacaaccacaccauccuccucuacuacuccaccgccgccuccucccucgccgucacccucaugcucgccaucuucaucgucuacauggucucccgcgacaacgucuccugcuccaucugccucuga

SEQ ID NO: 123830 - RNA, 1755 nt, Artificial Sequence
  derived and/or modified CDS sequence (opt2) from hemagglutinin__InfluenzaB__AGX24876
augaaggccaucaucguccuccucauggucgucaccuccaacgccgaccgcaucugcaccggcaucaccuccuccaacuccccccacgucgucaagaccgccacccagggcgaggucaacgucaccggcgucaucccccucaccaccacccccaccaaguccuacuucgccaaccucaagggcacccgcacccgcggcaagcucugccccgacugccucaacugcaccgaccucgacgucgcccucggccgccccaugugcgucggcaccacccccuccgccaaggccuccauccuccacgagguccgccccgucaccuccggcugcuuccccaucaugcacgaccgcaccaagauccgccagcuccccaaccuccuccgcggcuacgagaacauccgccucuccacccagaacgucaucgacgccgagaaggcccccggcggccccuaccgccucggcaccuccggcuccugccccaacgccaccuccaagaucggcuucuucgccaccauggccugggccguccccaaggacaacuacaagaacgccaccaacucccucaccgucgagguccccuacaucugcaaggagggcgaggaccagaucaccgucuggggcuuccacuccgacaacaagccccagaugaagaaccucuacggcgacuccaacccccagaaguucaccuccuccgccaacggcgucaccacccacuacgucucccaggucggcgacuuccccgaccagaccgaggacggcggccucccccaguccggccgcaucgucgucgacuacaugaugcagaagcccggccgcaccggcaccaucgucuaccagcgcggcguccuccucccccagaaggucuggugcgccuccggccgcuccaaggucaucaagggcucccucccccucaucggcgaggccgacugccuccacgagaaguacggcggccucaacaaguccaagcccuacuacaccggcgagcacgccaaggccaucggcaacugccccaucugggucaagaccccccucaagcucgccaacggcaccaaguaccgcccccccgccaagcuccucaaggagcgcggcuucuucggcgccaucgccggcuuccucgagggcggcugggagggcaugaucgccggcuggcacggcuacaccucccacggcgcccacggcgucgccgucgccgccgaccucaaguccacccaggaggccaucaacaagaucaccaagaaccucaacucccucuccgagcucgaggucaagaaccuccagcgccucuccggcgccauggacgagcuccacaacgagauccucgagcucgacgagaaggucgacgaccuccgcgccgacaccaucuccucccagaucgagcucgccguccuccucuccaacgagggcaucaucaacuccgaggacgagcaccuccucgcccucgagcgcaagcucaagaagaugcucggccccuccgccgucgacaucggcaacggcugcuucgagaccaagcacaagugcaaccagaccugccucgaccgcaucgccgccggcaccuucaacgccggcgaguucucccuccccaccuucgacucccucaacaucaccgccgccucccucaacgacgacggccucgacaaccacaccauccuccucuacuacuccaccgccgccuccucccucgccgucacccucaugcucgccaucuucaucgucuacauggucucccgcgacaacgucuccugcuccaucugccucuga

SEQ ID NO: 123831 - RNA, 1755 nt, Artificial Sequence
  derived and/or modified CDS sequence (opt2) from hemagglutinin__InfluenzaB__AGX24887
augaaggccaucaucguccuccucauggucgucaccuccaacgccgaccgcaucugcaccggcaucaccuccuccaacuccccccacgucgucaagaccgccacccagggcgaggucaacgucaccggcgccaucccccucaccaccacccccaccaaguccuacuucgccaaccucaagggcacccgcacccgcggcaagcucugccccgacugccucaacugcaccgaccucgacgucgcccucggccgccccaugugcgucggcaccacccccuccgccaaggccuccauccuccacgagguccgccccgucaccuccggcugcuuccccaucaugcacgaccgcaccaagauccgccagcuccccaaccuccuccgcggcuacgagaacauccgccucuccacccagaacgucaucgacgccgagaaggcccccggcggccccuaccgccucggcaccuccggcuccugccccaacgccaccuccaagaucggcuucuucgccaccauggccugggccguccccaaggacaacuacaagaacgccaccaacccccagaccgucgagguccccuacaucugcaccgagggcgaggaccagaucaccgucuggggcuuccacuccgacaacaagacccagaugaagaaccucuacggcgacuccaacccccagaaguucaccuccuccgccaacggcgucaccacccacuacgucucccagaucggcgacuuccccgaccagaccgaggacggcggccucccccaguccggccgcaucgucgucgacuacaugguccagaagcccggcaagaccggcaccaucgucuaccagcgcggcguccuccucccccagaaggucuggugcgccuccggccgcuccaaggucaucaagggcucccucccccucaucggcgaggccgacugccuccacgagaaguacggcggccucaacaaguccaagcccuacuacaccggcgagcacgccaaggccaucggcaacugccccaucugggucaagaccccccucaagcucgccaacggcaccaaguaccgcccccccgccaagcuccucaaggagcgcggcuucuucggcgccaucgccggcuuccucgagggcggcugggagggcaugaucgccggcuggcacggcuacaccucccacggcgcccacggcgucgccgucgccgccgaccucaaguccacccaggaggccaucaacaagaucaccaagaaccucaacucccucuccgagcucgaggucaagaaccuccagcgccucuccggcgccauggacgagcuccacaacgagauccucgagcucgacgagaaggucgacgaccuccgcgccgacaccauguccucccagaucgagcucgccguccuccucuccaacgagggcaucaucaacuccgaggacgagcaccuccucgcccucgagcgcaagcucaagaagaugcucggccccuccgccgucgacaucggcaacggcugcuucgagaccaagcacaagugcaaccagaccugccucgaccgcaucgccgccggcaccuucaacgccggcgaguucucccuccccaccuucgacucccucaacaucaccgccgccucccucaacgacgacggccucgacaaccacaccauccuccucuacuacuccaccgccgccuccucccucgccgucacccucaugcucgccaucuucaucgucuacauggucucccgcgacaacgucuccugcuccaucugccucuga

SEQ ID NO: 123832 - RNA, 1755 nt, Artificial Sequence
  derived and/or modified CDS sequence (opt2) from hemagglutinin__InfluenzaB__AGX24898
augaaggccaucaucguccuccucauggucgucaccuccaacgccgaccgcaucugcaccggcaucaccuccuccaacuccccccacgucgucaagaccgccacccagggcgaggucaacgucaccggcgucaucccccucaccaccacccccaccaaguccuacuucgccaaccucaagggcacccgcacccgcggcaagcucugccccgacugccucaacugcaccgaccucgacgucgcccucggccgccccaugugcgucggcaccacccccuccgccaaggccuccauccuccacgagguccgccccgucaccuccggcugcuuccccaucaugcacgaccgcaccaagauccgccagcuccccaaccuccuccgcggcuacgagaagauccgccucuccacccagaacgucaucgacgccgagaaggcccccggcggccccuaccgccucggcaccuccggcuccugccccaacgccaccuccaagaucggcuucuucgccaccauggccugggccguccccaaggacaacuacaagaacgccaccaacccccucaccgucgagguccccuacaucugcaccggcggcgaggaccagaucaccgucuggggcuuccacuccgacaacaagacccagaugaagucccucuacggcgacuccaacccccagaaguucaccuccuccgccaacggcgucaccacccacuacgucucccagaucggcgacuuccccgaccagaccgaggacggcggccucccccaguccggccgcaucgucgucgacuacaugaugcagaagcccggcaagaccggcaccaucgucuaccagcgcggcguccuccucccccagaaggucuggugcgccuccggccgcuccaaggucaucaagggcucccucccccucaucggcgaggccgacugccuccacgagaaguacggcggccucaacaaguccaagcccuacuacaccggcgagcacgccaaggccaucggcaacugccccaucugggucaagaccccccucaagcucgccaacggcaccaaguaccgcccccccgccaagcuccucaaggagcgcggcuucuucggcgccaucgccggcuuccucgagggcggcugggagggcaugaucgccggcuggcacggcuacaccucccacggcgcccacggcgucgccgucgccgccgaccucaaguccacccaggaggccaucaacaagaucaccaagaaccucaacucccucuccgagcucgaggucaagaaccuccagcgccucuccggcgccauggacgagcuccacaacgagauccucgagcucgacgagaaggucgacgaccuccgcgccgacaccaucuccucccagaucgagcucgccguccuccucuccaacgagggcaucaucaacuccgaggacgagcaccuccucgcccucgagcgcaagcucaagaagaugcucggccccuccgccgucgacaucggcaacggcugcuucgagaccaagcacaagugcaaccagaccugccucgaccgcaucgccgccggcaccuucaacgccggcgaguucucccuccccaccuucgacucccucaacaucaccgccgccucccucaacgacgacggccucgacaaccacaccauccuccucuacuacuccaccgccgccuccucccucgccgucacccucaugcucgccaucuucaucgucuacauggucucccgcgacaacgucuccugcuccaucugccucuga

SEQ ID NO: 123833 - RNA, 1758 nt, Artificial Sequence; identical to SEQ ID NO: 122719
  derived and/or modified CDS sequence (opt2) from hemagglutinin__InfluenzaB__AGX84854

SEQ ID NO: 123834 - RNA, 1758 nt, Artificial Sequence
  derived and/or modified CDS sequence (opt2) from hemagglutinin__InfluenzaB__AGX84865
augaaggccaucaucguccuccucauggucgucaccuccaacgccgaccgcaucugcaccggcaucaccuccuccaacuccccccacaucgucaagaccgccacccagggcgaggucaacgucaccggcgucaucccccucaccaccacccccaccaagucccacuucgccaaccucaagggcaccgagacccgcggcaagcucugccccaagugccccaacugcaccgaccucgacgucgcccucggccgccccaagugcaccggcaagauccccuccgcccgcgucuccauccuccacgagguccgccccgucaccuccggcugcuuccccaucaugcacgaccgcaccaagauccgccagcuccccaaccuccuccgcggcuacgagcacauccgccucuccacccacaacgucaucaacgccgagaacgcccccggcggccccuacaagaucggcaccuccggcuccugccccaacgucaccaacggcaacggcuucuucgccaccauggccugggccguccccaagaacgacaagaacaagaccgccaccaacccccucaccaucgagguccccuacaucugcaccgagggcgaggaccagaucaccgucuggggcuuccacuccgacaacgagacccagauggccaagcucuacggcgacuccaagccccagaaguucaccuccuccgccaacggcgucaccacccacuacgucucccagaucggcggcuuccccaaccagaccgaggacggcggccucccccaguccggccgcaucgucgucgacuacaugguccagaaguccggcaagaccggcaccaucaccuaccagcgcggcauccuccucccccagaaggucuggugcgccuccggccgcuccaaggucaucaagggcucccucccccucaucggcgaggccgacugccuccacgagaaguacggcggccucaacaaguccaagcccuacuacaccggcgagcacgccaaggccaucggcaacugccccaucugggucaagaccccccucaagcucgccaacggcaccaaguaccgcccccccgccaagcuccucaaggagcgcggcuucuucggcgccaucgccggcuuccucgagggcggcugggagggcaugaucgccggcuggcacggcuacaccucccacggcgcccacggcgucgccgucgccgccgaccucaaguccacccaggaggccaucaacaagaucaccaagaaccucaacucccucuccgagcucgaggucaagaaccuccagcgccucuccggcgccauggacgagcuccacaacgagauccucgagcucgacgagaaggucgacgaccuccgcgccgacaccaucuccucccagaucgagcucgccguccuccucuccaacgagggcaucaucaacuccgaggacgagcaccuccucgcccucgagcgcaagcucaagaagaugcucggccccuccgccgucgagaucggcaacggcugcuucgagaccaagcacaagugcaaccagaccugccucgaccgcaucgccgccggcaccuucgacgccggcgaguucucccuccccaccuucgacucccucaacaucaccgccgccucccucaacgacgacggccucgacaaccacaccauccuccucuacuacuccaccgccgccuccucccucgccgucacccucaugaucgccaucuucgucgucuacauggucucccgcgacaacgucuccugcuccaucugccucuga

SEQ ID NO: 123835 - RNA, 1758 nt, Artificial Sequence; identical to SEQ ID NO: 123834
  derived and/or modified CDS sequence (opt2) from hemagglutinin__InfluenzaB__AGX84876

SEQ ID NO: 123836 - RNA, 1758 nt, Artificial Sequence; identical to SEQ ID NO: 123834
  derived and/or modified CDS sequence (opt2) from hemagglutinin__InfluenzaB__AGX84887

SEQ ID NO: 123837 - RNA, 1758 nt, Artificial Sequence; identical to SEQ ID NO: 122719
  derived and/or modified CDS sequence (opt2) from hemagglutinin__InfluenzaB__AGX84898

SEQ ID NO: 123838 - RNA, 1758 nt, Artificial Sequence
  derived and/or modified CDS sequence (opt2) from hemagglutinin__InfluenzaB__AGX84920
augaaggccaucaucguccuccucauggucgucaccuccaacgccgaccgcaucugcaccggcaucaccuccuccaacuccccccacgucgucaagaccgccacccagggcgaggucaacgucaccggcgucaucccccucaccaccacccccaccaagucccacuucgccaaccucaagggcaccgagacccgcggcaagcucugccccaagugccccaacugcaccgaccucgacgucgcccucggccgccccaagugcaccggcaagauccccuccgccggcgucuccauccuccacgagguccgccccgucaccuccggcugcuuccccaucaugcacgaccgcaccaagauccgccagcuccccaaccuccuccgcggcuacgagcacauccgccucuccacccacaacgucaucaacgccgagaacgcccccggcggccccuacaagaucggcaccuccggcuccugccccaacgucaccaacggcaacggcuucuucgccaccauggccugggccguccccaagaacgacaagaacaagaccgccaccaacccccucaccaucgagguccccuacaucugcaccgagggcgaggaccagaucaccgucuggggcuuccacuccgacaacgagacccagauggccaagcucuacggcgacuccaagccccagaaguucaccuccuccgccaacggcgucaccacccacuacgucucccagaucggcggcuuccccaaccagaccgaggacggcggccucccccaguccggccgcaucgucgucgacuacaugguccagaaguccggcaagaccggcaccaucaccuaccagcgcggcauccuccucccccagaaggucuggugcgccuccggccgcuccaaggucaucaagggcucccucccccucaucggcgaggccgacugccuccacgagaaguacggcggccucaacaaguccaagcccuacuacaccggcgagcacgccaaggccaucggcaacugccccaucugggucaagaccccccucaagcucgccaacggcaccaaguaccgcccccccgccaagcuccucaaggagcgcggcuucuucggcgccaucgccggcuuccucgagggcggcugggagggcaugaucgccggcuggcacggcuacaccucccacggcgcccacggcgucgccgucgccgccgaccucaaguccacccaggaggccaucaacaagaucaccaagaaccucaacucccucuccgagcucgaggucaagaaccuccagcgccucuccggcgccauggacgagcuccacaacgagauccucgagcucgacgagaaggucgacgaccuccgcgccgacaccaucuccucccagaucgagcucgccguccuccucuccaacgagggcaucaucaacuccgaggacgagcaccuccucgcccucgagcgcaagcucaagaagaugcucggccccuccgccgucgagaucggcaacggcugcuucgagaccaagcacaagugcaaccagaccugccucgaccgcaucgccgccggcaccuucgacgccggcgaguucucccuccccaccuucgacucccucaacaucaccgccgccucccucaacgacgacggccucgacaaccacaccauccuccucuacuacuccaccgccgccuccucccucgccgucacccucaugaucgccaucuucgucgucuacauggucucccgcgacaacgucuccugcuccaucugccucuga

SEQ ID NO: 123839 - RNA, 1758 nt, Artificial Sequence
  derived and/or modified CDS sequence (opt2) from hemagglutinin__InfluenzaB__AGZ59821
augaaggccaucaucguccuccucauggucgucaccuccaacgccgaccgcaucugcaccggcaucaccuccuccaacuccccccacgucgucaagaccgccacccagggcgaggucaacgucaccggcgucaucccccucaccaccacccccaccaagucccacuucgccaaccucaagggcaccaagacccgcggcaagcucugccccaagugcuucaacugcaccgaccucgacgucgcccucggccgccccaagugcaccggcaacauccccuccgccaaggucuccauccuccacgagguccgccccgucaccuccggcugcuuccccaucaugcacgaccgcaccaagguccgccagcuccccaaccuccuccgcggcuacgagcacauccgccucuccacccacaacgucaucaacgccgagaaggcccccggcggccccuacaagaucggcaccuccggcuccugccccaacgucaccaacggcaacggcuucuucgccaccauggccugggccguccccaagaacgacaacaacaagaccgccaccaacucccucaccaucgagguccccuacaucugcaccgagggcgaggaccagaucaccgucuggggcuuccacuccgacaacgagacccagauggccaagcucuacggcgacuccaagccccagaaguucaccuccuccgccaacggcgucaccacccacuacgucucccagaucggcggcuuccccaaccagaccgaggacggcggccucccccaguccggccgcaucgucgucgacuacaugguccagaaguccggcaagaccggcaccaucaccuaccagcgcggcauccuccucccccagaaggucuggugcgccuccggccgcuccaaggucaucaagggcucccucccccucaucggcgaggccgacugccuccacgagaaguacggcggccucaacaaguccaagcccuacuacaccggcgagcacgccaaggccaucggcaacugccccaucugggucaagaccccccucaagcucgccaacggcaccaaguaccgcccccccgccaagcuccucaaggagcgcggcuucuucggcgccaucgccggcuuccucgagggcggcugggagggcaugaucgccggcuggcacggcuacaccucccacggcgcccacggcgucgccgucgccgccgaccucaaguccacccaggaggccaucaacaagaucaccaagaaccucaacucccucuccgagcucgaggucaagaaccuccagcgccucuccggcgccauggacgagcuccacaacgagauccucgagcucgacgagaaggucgacgaccuccgcgccgacaccaucuccucccagaucgagcucgccguccuccucuccaacgagggcaucaucaacuccgaggacgagcaccuccucgcccucgagcgcaagcucaagaagaugcucggccccuccgccgucgagaucggcaacggcugcuucgagaccaagcacaagugcaaccagaccugccucgaccgcaucgccgccggcaccuucgacgccggcgaguucucccuccccaccuucgacucccucaacaucaccgccgccucccucaacgacgacggccucgacaaccacaccauccuccucuacuacuccaccgccgccuccucccucgccgucacccucaugaucgccaucuucgucgucuacauggucucccgcgacaacgucuccugcuccaucugccucuga

SEQ ID NO: 123840 - RNA, 1758 nt, Artificial Sequence
  derived and/or modified CDS sequence (opt2) from hemagglutinin__InfluenzaB__AGZ59832
augaaggccaucaucguccuccucauggucgucaccuccaacgccgaccgcaucugcaccggcaucaccuccuccaacuccccccacgucgucaagaccgccacccagggcgaggucaacgucaccggcgucaucccccucaccaccacccccaccaagucccacuucgccaaccucaagggcaccaagacccgcggcaagcucugccccaagugccucaacugcaccgaccucgacgucgcccucggccgccccaagugcaccggcaacauccccuccgccaaggucuccauccuccacgagguccgccccgucaccuccggcugcuuccccaucaugcacgaccgcaccaagauccgccagcuccccaaccuccuccgcggcuacgagcacauccgccucuccacccacaacgucaucaacgccgagaaggcccccggcggccccuacaagaucggcaccuccggcuccugccccaacgucaccaacggcaacggcuucuucgccaccauggccugggccguccccaagaacgacaacaacaagaccgccaccaacucccucaccaucgagguccccuacaucugcaccgagggcgaggaccagaucaccgucuggggcuuccacuccgacaacgagacccagauggccaagcucuacggcgacuccaagccccagaaguucaccuccuccgccaacggcgucaccacccacuacgucucccagaucggcggcuuccccaaccagaccgaggacggcggccucccccaguccggccgcaucgucgucgacuacaugguccagaaguccggcaagaccggcaccaucaccuaccagcgcggcauccuccucccccagaaggucuggugcgccuccggcaaguccaaggucaucaagggcucccucccccucaucggcgaggccgacugccuccacgagaaguacggcggccucaacaaguccaagcccuacuacaccggcgagcacgccaaggccaucggcaacugccccaucugggucaagaccccccucaagcucgccaacggcaccaaguaccgcccccccgccaagcuccucaaggagcgcggcuucuucggcgccaucgccggcuuccucgagggcggcugggagggcaugaucgccggcuggcacggcuacaccucccacggcgcccacggcgucgccgucgccgccgaccucaaguccacccaggaggccaucaacaagaucaccaagaaccucaacucccucuccgagcucgaggucaagaaccuccagcgccucuccggcgccauggacgagcuccacaacgagauccucgagcucgacgagaaggucgacgaccuccgcgccgacaccaucuccucccagaucgagcucgccguccuccucuccaacgagggcaucaucaacuccgaggacgagcaccuccucgcccucgagcgcaagcucaagaagaugcucggccccuccgccgucgagaucggcaacggcugcuucgagaccaagcacaagugcaaccagaccugccucgaccgcaucgccgccggcaccuucgacgccggcgaguucucccuccccaccuucgacucccucaacaucaccgccgccucccucaacgaggacggccucgacaaccacaccauccuccucuacuacuccaccgccgccuccucccucgccgucacccucaugaucgccaucuucgucgucuacauggucucccgcgacaacgucuccugcuccaucugccucuga

SEQ ID NO: 123841 - RNA, 1758 nt, Artificial Sequence
  derived and/or modified CDS sequence (opt2) from hemagglutinin__InfluenzaB__AGZ59843
augaaggccaucaucguccuccucauggucgucaccuccaacgccgaccgcaucugcaccggcaucaccuccuccaacuccccccacgucgucaagaccgccacccagggcgaggucaacgucaccggcgucaucccccucaccaccacccccaccaagucccacuucgccaaccucaagggcaccgagacccgcggcaagcucugccccaagugccucaacugcaccgaccucgacgucgcccucggccgccccaagugcaccggcaacauccccuccgcccgcgucuccauccuccacgagguccgccccgucaccuccggcugcuuccccaucaugcacgaccgcaccaagauccgccagcuccccaaccuccuccgcggcuacgagcacauccgccucuccacccacaacgucaucaacgccgagaacgcccccggcggccccuacaagaucggcaccuccggcuccugccccaacgucaccaacggcaacggcuucuucgccaccauggccugggccguccccaagaacgacaacaacaagaccgccaccaacucccucaccaucgagguccccuacaucugcaccgagggcgaggaccagaucaccgucuggggcuuccacuccgacaacgagacccagauggccaagcucuacggcgacuccaagccccagaaguucaccuccuccgccaacggcgucaccacccacuacgucucccagaucggcggcuuccccaaccagaccgaggacggcggccucccccaguccggccgcaucgucgucgacuacaugguccagaaguccggcaagaccggcaccaucaccuaccagcgcggcauccuccucccccagaaggucuggugcgccuccggccgcuccaaggucaucaagggcucccucccccucaucggcgaggccgacugccuccacgagaaguacggcggccucaacaaguccaagcccuacuacaccggcgagcacgccaaggccaucggcaacugccccaucugggucaagaccccccucaagcucgccaacggcaccaaguaccgcccccccgccaagcuccucaaggagcgcggcuucuucggcgccaucgccggcuuccucgagggcggcugggagggcaugaucgccggcuggcacggcuacaccucccacggcgcccacggcgucgccgucgccgccgaccucaaguccacccaggaggccaucaacaagaucaccaagaaccucaacucccucuccgagcucgaggucaagaaccuccagcgccucuccggcgccauggacgagcuccacaacgagauccucgagcucgacgagaaggucgacgaccuccgcgccgacaccaucuccucccagaucgagcucgccguccuccucuccaacgagggcaucaucaacuccgaggacgagcaccuccucgcccucgagcgcaagcucaagaagaugcucggccccuccgccgucgagaucggcaacggcugcuucgagaccaagcacaagugcaaccagaccugccucgaccgcaucgccgccggcaccuucgacgccggcgaguucucccuccccaccuucgacucccucaacaucaccgccgccucccucaacgacgacggccucgacaaccacaccauccuccucuacuacuccaccgccgccuccucccucgccgucacccucaugaucgccaucuucaucgucuacauggucucccgcgacaacgucuccugcuccaucugccucuga

SEQ ID NO: 123842 - RNA, 1758 nt, Artificial Sequence; identical to SEQ ID NO: 123188
  derived and/or modified CDS sequence (opt2) from hemagglutinin__InfluenzaB__AGZ59854

SEQ ID NO: 123843 - RNA, 1758 nt, Artificial Sequence; identical to SEQ ID NO: 122550
  derived and/or modified CDS sequence (opt2) from hemagglutinin__InfluenzaB__AGZ59865

SEQ ID NO: 123844 - RNA, 1758 nt, Artificial Sequence
  derived and/or modified CDS sequence (opt2) from hemagglutinin__InfluenzaB__AGZ59876
augaaggccaucaucguccuccucauggucgucaccuccaacgccgaccgcaucugcaccggcaucaccuccuccaacuccccccacgucgucaagaccgccacccagggcgaggucaacgucaccggcgucaucccccucaccaccacccccaccaagucccacuucgccaaccucaagggcaccgagacccgcggcaagcucugccccaagugccucaacugcaccgaccucgacgucgcccucggccgccccaagugcaccggcaacauccccuccgcccgcgucuccauccuccacgagguccgccccgucaccuccggcugcuuccccaucaugcacgaccgcaccaagauccgccagcuccccaaccuccuccgcggcuacgagcacauccgccucuccacccacaacgucaucaacgccgagaacgcccccggcggccccuacaagaucggcaccuccggcuccugccccaacgucaccaacggcaacggcuucuucgccaccauggccugggccguccccaagaacgacaagaacaagaccgccaccaacucccucaccaucgagguccccuacaucugcaccgagggcgaggaccagaucaccgucuggggcuuccacuccgacaacgagacccagauggccaagcucuacggcgacuccaagccccagaaguucaccuccuccgccaacggcgucaccacccacuacgucucccagaucggcggcuuccccaaccagaccgaggacggcggccucccccaguccggccgcaucgucgucgacuacaugguccagaaguccggcaagaccggcaccaucaccuaccagcgcggcauccuccucccccagaaggucuggugcaccuccggccgcuccaaggucaucaagggcucccucccccucaucggcgaggccgacugccuccacgagaaguacggcggccucaacaaguccaagcccuacuacaccggcgagcacgccaaggccaucggcaacugccccaucugggucaagaccccccucaagcucgccaacggcaccaaguaccgcccccccgccaagcuccucaaggagcgcggcuucuucggcgccaucgccggcuuccucgagggcggcugggagggcaugaucgccggcuggcacggcuacaccucccacggcgcccacggcgucgccgucgccgccgaccucaaguccacccaggaggccaucaacaagaucaccaagaaccucaacucccucuccgagcucgaggucaagaaccuccagcgccucuccggcgccauggacgagcuccacaacgagauccucgagcucgacgagaaggucgacgaccuccgcgccgacaccaucuccucccagaucgagcucgccguccuccucuccaacgagggcaucaucaacuccgaggacgagcaccuccucgcccucgagcgcaagcucaagaagaugcucggccccuccgccgucgagaucggcaacggcugcuucgagaccaagcacaagugcaaccagaccugccucgaccgcaucgccgccggcaccuucgacgccggcgaguucucccuccccaccuucgacucccucaacaucaccgccgccucccucaacgacgacggccucgacaaccacaccauccuccucuacuacuccaccgccgccuccucccucgccgucacccucaugaucgccaucuucgucgucuacauggucucccgcgacaacgucuccugcuccaucugccucuga

SEQ ID NO: 123845 - RNA, 1755 nt, Artificial Sequence; identical to SEQ ID NO: 122603
  derived and/or modified CDS sequence (opt2) from hemagglutinin__InfluenzaB__AGZ59887

SEQ ID NO: 123846 - RNA, 1758 nt, Artificial Sequence; identical to SEQ ID NO: 123025
  derived and/or modified CDS sequence (opt2) from hemagglutinin__InfluenzaB__AGZ59898

SEQ ID NO: 123847 - RNA, 1758 nt, Artificial Sequence; identical to SEQ ID NO: 123391
  derived and/or modified CDS sequence (opt2) from hemagglutinin__InfluenzaB__AGZ59909

SEQ ID NO: 123848 - RNA, 1758 nt, Artificial Sequence; identical to SEQ ID NO: 123025
  derived and/or modified CDS sequence (opt2) from hemagglutinin__InfluenzaB__AGZ59920

SEQ ID NO: 123849 - RNA, 1758 nt, Artificial Sequence; identical to SEQ ID NO: 123025
  derived and/or modified CDS sequence (opt2) from hemagglutinin__InfluenzaB__AGZ59931

SEQ ID NO: 123850 - RNA, 1758 nt, Artificial Sequence; identical to SEQ ID NO: 123025
  derived and/or modified CDS sequence (opt2) from hemagglutinin__InfluenzaB__AGZ59942

SEQ ID NO: 123851 - RNA, 1758 nt, Artificial Sequence; identical to SEQ ID NO: 123025
  derived and/or modified CDS sequence (opt2) from hemagglutinin__InfluenzaB__AGZ59953

SEQ ID NO: 123852 - RNA, 1758 nt, Artificial Sequence
  derived and/or modified CDS sequence (opt2) from hemagglutinin__InfluenzaB__AGZ59965
augaaggccaucaucguccuccucauggucgucaccuccaacgccgaccgcaucugcaccggcaucaccuccuccaacuccccccacgucgucaagaccgccacccagggcgaggucaacgucaccggcgucaucccccucaccaccacccccaccaagucccacuucgccaaccucaagggcaccgagacccgcggcaagcucugccccaagugccucaacugcaccgaccucgacgucgcccucggccgccccaagugcaccggcaagauccccuccgcccgcgucuccauccuccacgagguccgccccgucaccuccggcugcuuccccaucaugcacgaccgcaccaagauccgccagcuccccaaccuccuccgcggcuacgagcacauccgccucuccacccacaacgucaucaacgccgagaacgcccccggcggccccuacaagaucggcaccuccggcuccugccccaacaucaccaacggcaacggcuucuucgccaccauggccugggccguccccaagaacgacaagaacaagaccgccaccaacccccucaccaucgagguccccuacaucugcaccgagggcgaggaccagaucaccgucuggggcuuccacuccgacaacgagacccagauggccaagcucuacggcgacuccaagccccagaaguucaccuccuccgccaacggcgucaccacccacuacgucucccagaucggcggcuuccccaaccagaccgaggacggcggccucccccaguccggccgcgucgucgucgacuacaugaugcagaaguccggcaagaccggcaccaucaccuaccagcgcggcauccuccucccccagaaggucuggugcgccuccggccgcuccaaggucaucaagggcucccucccccucaucggcgaggccgacugccuccacgagaaguacggcggccucaacaaguccaagcccuacuacaccggcgagcacgccaaggccaucggcaacugccccaucugggucaagaccccccucaagcucgccaacggcaccaaguaccgcccccccgccaagcuccucaaggagcgcggcuucuucggcgccaucgccggcuuccucgagggcggcugggagggcaugaucgccggcuggcacggcuacaccucccacggcgcccacggcgucgccgucgccgccgaccucaaguccacccaggaggccaucaacaagaucaccaagaaccucaacucccucuccgagcucgaggucaagaaccuccagcgccucuccggcgccauggacgagcuccacaacgagauccucgagcucgacgagaaggucgacgaccuccgcgccgacaccaucuccucccagaucgagcucgccguccuccucuccaacgagggcaucaucaacuccgaggacgagcaccuccucgcccucgagcgcaagcucaagaagaugcucggccccuccgccgucgagaucggcaacggcugcuucgagaccaagcacaagugcaaccagaccugccucgaccgcaucgccgccggcaccuucgacgccggcgaguucucccuccccaccuucgacucccucaacaucaccgccgccucccucaacgacgacggccucgacaaccacaccauccuccucuacuacuccaccgccgccuccucccucgccgucacccucaugaucgccaucuucgucgucuacauggucucccgcgacaacgucuccugcuccaucugccucuga

SEQ ID NO: 123853 - RNA, 1758 nt, Artificial Sequence; identical to SEQ ID NO: 123025
  derived and/or modified CDS sequence (opt2) from hemagglutinin__InfluenzaB__AGZ59976

SEQ ID NO: 123854 - RNA, 1758 nt, Artificial Sequence; identical to SEQ ID NO: 123025
  derived and/or modified CDS sequence (opt2) from hemagglutinin__InfluenzaB__AGZ59987

SEQ ID NO: 123855 - RNA, 1758 nt, Artificial Sequence; identical to SEQ ID NO: 123025
  derived and/or modified CDS sequence (opt2) from hemagglutinin__InfluenzaB__AGZ59999

SEQ ID NO: 123856 - RNA, 1758 nt, Artificial Sequence; identical to SEQ ID NO: 122644
  derived and/or modified CDS sequence (opt2) from hemagglutinin__InfluenzaB__AGZ60010

SEQ ID NO: 123857 - RNA, 1758 nt, Artificial Sequence; identical to SEQ ID NO: 122644
  derived and/or modified CDS sequence (opt2) from hemagglutinin__InfluenzaB__AGZ60021

SEQ ID NO: 123858 - RNA, 1758 nt, Artificial Sequence; identical to SEQ ID NO: 122644
  derived and/or modified CDS sequence (opt2) from hemagglutinin__InfluenzaB__AGZ60033

SEQ ID NO: 123859 - RNA, 1755 nt, Artificial Sequence
  derived and/or modified CDS sequence (opt2) from hemagglutinin__InfluenzaB__AGZ60044
augaaggccaucaucguccuccucauggucgucaccuccaacgccgaccgcaucugcaccggcaucaccuccuccaacuccccccacgucgucaagaccgccacccagggcgaggucaacgucaccggcgucaucccccucaccaccacccccaccaaguccuacuucgccaaccucaagggcacccgcacccgcggcaagcucugccccgacugccucaacugcaccgaccucgacgucgcccucggccgccccaugugcgucggcaccacccccuccgccaaggccuccauccuccacgagguccgccccgucaccuccggcugcuuccccaucaugcacgaccgcaccaagauccgccagcuccccaaccuccuccgcggcuacgagaacauccgccucuccacccagaacgucaucgacgccgagaacgcccccggcggccccuaccgccucggcaccuccggcuccugccccaacgccaccuccaaguccggcuucuucgccaccauggccugggccguccccaaggacaacaacaagaacgccaccaacccccucaccgucgagguccccuacgucugcaccgagggcgaggaccagaucaccgucuggggcuuccacuccgacaacaagacccagaugaagaaccucuacggcgacuccaacccccagaaguucaccuccuccgccaacggcgucaccacccacuacgucucccagaucggcggcuuccccgcccagaccgaggacggcggccucccccaguccggccgcaucgucgucgacuacaugguccagaagccccgcaagaccggcaccaucgucuaccagcgcggcguccuccucccccagaaggucuggugcgccuccggccgcuccaaggucaucaagggcucccucccccucaucggcgaggccgacugccuccacgagaaguacggcggccucaacaaguccaagcccuacuacaccggcgagcacgccaaggccaucggcaacugccccaucugggucaagaccccccucaagcucgccaacggcaccaaguaccgcccccccgccaagcuccucaaggagcgcggcuucuucggcgccaucgccggcuuccucgagggcggcugggagggcaugaucgccggcuggcacggcuacaccucccacggcgcccacggcgucgccgucgccgccgaccucaaguccacccaggaggccaucaacaagaucaccaagaaccucaacucccucuccgagcucgaggucaagaaccuccagcgccucuccggcgccauggacgagcuccacaacgagauccucgagcucgacgagaaggucgacgaccuccgcgccgacaccaucuccucccagaucgagcucgccguccuccucuccaacgagggcaucaucaacuccgaggacgagcaccuccucgcccucgagcgcaagcucaagaagaugcucggccccuccgccgucgacaucggcaacggcugcuucgagaccaagcacaagugcaaccagaccugccucgaccgcaucgccgccggcaccuucaacgccggcgaguucucccuccccaccuucgacucccucaacaucaccgccgccucccucaacgacgacggccucgacaaccacaccauccuccucuacuacuccaccgccgccuccucccucgccgucacccucaugcucgccaucuucaucgucuacauggucucccgcgacaacgucuccugcuccaucugccucuga

SEQ ID NO: 123860 - RNA, 1755 nt, Artificial Sequence; identical to SEQ ID NO: 123062
  derived and/or modified CDS sequence (opt2) from hemagglutinin__InfluenzaB__AGZ60055

SEQ ID NO: 123861 - RNA, 1755 nt, Artificial Sequence
  derived and/or modified CDS sequence (opt2) from hemagglutinin__InfluenzaB__AGZ60066
augaaggccaucaucguccuccucauggucgucaccuccaacgccgaccgcaucugcaccggcaucaccuccuccaacuccccccacgucgucaagaccgccacccagggcgaggucaacgucaccggcgucaucccccucaccaccacccccaccaagucccacuucgccaaccucaagggcacccgcacccgcggcaagcucugccccgacugccucaacugcaccgaccucgacgucgcccucggccgccccaugugcgucggcaccacccccuccgccaaggccuccauccuccacgagguccgccccgucaccuccggcugcuuccccaucaugcacgaccgcaccaagauccgccagcuccccaaccuccuccgcggcuacgagaacauccgccucuccacccagaacgucaucgacgccgagaaggcccucggcggccccuaccgccucggcaccuccggcuccugccccaacgccaccuccaaguccggcuucuucgccaccauggccugggccguccccaaggacaacaacaagaacgccaccaacccccucaccgucgagguccccuacaucugcaccgagggcgaggaccagaucaccgucuggggcuuccacuccgacaacaagacccagaugaagaaccucuacggcgacuccaacccccagaaguucaccuccuccgccaacggcgucaccacccacuacgucucccagaucggcggcuuccccgaccagaccgaggacggcggccucccccaguccggccgcaucgucgucgacuacaugguccagaagcccggcaagaccggcaccaucgucuaccagcgcggcguccuccucccccagaaggucuggugcgccuccggccgcuccaaggucaucaagggcucccucccccucaucggcgaggccgacugccuccacgagaaguacggcggccucaacaaguccaagcccuacuacaccggcgagcacgccaaggccaucggcaacugccccaucugggucaagaccccccucaagcucgccaacggcaccaaguaccgcccccccgccaagcuccucaaggagcgcggcuucuucggcgccaucgccggcuuccucgagggcggcugggagggcaugaucgccggcuggcacggcuacaccucccacggcgcccacggcgucgccgucgccgccgaccucaaguccacccaggaggccaucaacaagaucaccaagaaccucaacucccucuccgagcucgaggucaagaaccuccagcgccucuccggcgccauggacgagcuccacaacgagauccucgagcucgacgagaaggucgacgaccuccgcgccgacaccaucuccucccagaucgagcucgccguccuccucuccaacgagggcaucaucaacuccgaggacgagcaccuccucgcccucgagcgcaagcucaagaagaugcucggccccuccgccgucgacaucggcaacggcugcuucgagaccaagcacaagugcaaccagaccugccucgaccgcaucgccgccggcaccuucaacgccggcgaguucucccuccccaccuucgacucccucaacaucaccgccgccucccucaacgacgacggccucgacaaccacaccauccuccucuacuacuccaccgccgccuccucccucgccgucacccucaugcucgccaucuucaucgucuacauggucucccgcgacaacgucuccugcuccaucugccucuga

SEQ ID NO: 123862 - RNA, 1755 nt, Artificial Sequence
  derived and/or modified CDS sequence (opt2) from hemagglutinin__InfluenzaB__AGZ60077
augaaggccaucaucguccuccucauggucgucaccuccaacgccgaccgcaucugcaccggcaucaccuccuccaacuccccccacgucgucaagaccgccacccagggcgaggucaacgucaccggcgucaucccccucaccaccacccccaccaaguccuacuucgccaaccucaagggcacccgcacccgcggcaagcucugccccgacugccucaacugcaccgaccucgacgucgcccucggcucccccaugugcgucggcaccacccccuccgccaaggccuccauccuccacgagguccgccccgucaccuccggcugcuuccccaucaugcacgaccgcaccaagauccgccagcucgccaaccuccuccgcggcuacgagaacauccgccucuccacccagaacgucaucgacgccgagaaggcccccggcggccccuaccgccucggcaccuccggcuccugccccaacgccaccuccaaguccggcuucuucgccaccauggccugggccguccccaaggacaacaacaagaacgccaccaacccccucaccgucgagguccccuacaucugcaccgagggcgaggaccagaucaccgucuggggcuuccacuccgacaacaagacccagaugaagaaccucuacggcgacuccaacccccagaaguucaccuccuccgccaacggcgucaccacccacuacgucucccagaucggcggcuuccccgaccagaccgaggacggcggccucccccaguccggccgcaucgucgucgacuacaugaugcagaaguccggcaagaccggcaccaucgucuaccagcgcggcguccuccucccccagaaggucuggugcgccuccggccgcuccaaggucaucaagggcucccucccccucaucggcgaggccgacugccuccacgagaaguacggcggccucaacaaguccaagcccuacuacaccggcgagcacgccaaggccaucggcaacugccccaucugggucaagaccccccucaagcucgccaacggcaccaaguaccgcccccccgccaagcuccucaaggagcgcggcuucuucggcgccaucgccggcuuccucgagggcggcugggagggcaugaucgccggcuggcacggcuacaccucccacggcgcccacggcgucgccgucgccgccgaccucaaguccacccaggaggccaucaacaagaucaccaagaaccucaacucccucuccgagcucgaggucaagaaccuccagcgccucuccggcgccauggacgagcuccacuccgagauccucgagcucgacgagaaggucgacgaccuccgcgccgacaccaucuccucccagaucgagcucgccguccuccucuccaacgagggcaucaucaacuccgaggacgagcaccuccucgcccucgagcgcaagcucaagaagaugcucggccccuccgccgucgacaucggcaacggcugcuucgagaccaagcacaagugcaaccagaccugccucgaccgcaucgccgccggcaccuucaacgccggcgaguucucccuccccaccuucgacucccucaacaucaccgccgccucccucaacgacgacggccucgacaaccacaccauccuccucuacuacuccaccgccgccuccucccucgccgucacccucaugcucgccaucuucaucgucuacauggucucccgcgacaacgucuccugcuccaucugccucuga

SEQ ID NO: 123863 - RNA, 1755 nt, Artificial Sequence; identical to SEQ ID NO: 122767
  derived and/or modified CDS sequence (opt2) from hemagglutinin__InfluenzaB__AGZ60088

SEQ ID NO: 123864 - RNA, 1755 nt, Artificial Sequence; identical to SEQ ID NO: 122462
  derived and/or modified CDS sequence (opt2) from hemagglutinin__InfluenzaB__AGZ60099

SEQ ID NO: 123865 - RNA, 1755 nt, Artificial Sequence
  derived and/or modified CDS sequence (opt2) from hemagglutinin__InfluenzaB__AGZ60131
augaaggccaucaucguccuccucauggucgucaccuccaacgccgaccgcaucugcaccggcaucaccuccuccaacuccccccacgucgucaagaccgccacccagggcgaggucaacgucaccggcgucaucccccucaccaccacccccaccaaguccuacuucgccaaccucaagggcacccgcacccgcggcaagcucugccccgacugccucaacugcaccgaccucgacgucgcccucggccgccccaugugcgucggcaccacccccuccgccaaggccuccauccuccacgagguccgccccaucaccuccggcugcuuccccaucaugcacgaccgcaccaagauccgccagcuccccaaccuccuccgcggcuacgagaacauccgccucuccacccagaacgucaucgacgccgagaaggcccccggcggccccuaccgccucggcaccuccggcuccugccccaacgccaccuccaaguccggcuucuucgccaccauggccugggccguccccaaggacaacaacaagaacgccaccaacccccucaccgucgagguccccuacaucugcaccgagggcgaggaccagaucaccgucuggggcuuccacuccgacaacaagacccagaugaagaaccucuacggcgacuccaacccccagaaguucaccuccuccgccaacggcgucaccacccacuacgucucccagaucggcuccuuccccgaccagaccgaggacggcggccucccccaguccggccgcaucgucgucgacuacaugaugcagaagcccggcaagaccggcaccaucgucuaccagcgcggcguccuccucccccagaaggucuggugcgccuccggccgcuccaaggucaucaagggcucccucccccucaucggcgaggccgacugccuccacgagaaguacggcggccucaacaaguccaagcccuacuacaccggcgagcacgccaaggccaucggcaacugccccaucugggucaagaccccccucaagcucgccaacggcaccaaguaccgcccccccgccaagcuccucaaggagcgcggcuucuucggcgccaucgccggcuuccucgagggcggcugggagggcaugaucgccggcuggcacggcuacaccucccacggcgcccacggcgucgccgucgccgccgaccucaaguccacccaggaggccaucaacaagaucaccaagaaccucaacucccucuccgagcucgaggucaagaaccuccagcgccucuccggcgccauggacgagcuccacaacgagauccucgagcucgacgagaaggucgacgaccuccgcgccgacaccaucuccucccagaucgagcucgccguccuccucuccaacgagggcaucaucaacuccgaggacgagcaccuccucgcccucgagcgcaagcucaagaagaugcucggccccuccgccgucgagaucggcaacggcugcuucgagaccaagcacaagugcaaccagaccugccucgaccgcaucgccgccggcaccuucaacgccggcgaguucucccuccccaccuucgacucccucaacaucaccgccgccucccucaacgacgacggccucgacaaccacaccauccuccucuacuacuccaccgccgccuccucccucgccgucacccucaugcucgccaucuucaucgucuacauggucucccgcgacaacgucuccugcuccaucugccucuga

SEQ ID NO: 123866 - RNA, 1755 nt, Artificial Sequence; identical to SEQ ID NO: 122767
  derived and/or modified CDS sequence (opt2) from hemagglutinin__InfluenzaB__AGZ60142

SEQ ID NO: 123867 - RNA, 1755 nt, Artificial Sequence; identical to SEQ ID NO: 122767
  derived and/or modified CDS sequence (opt2) from hemagglutinin__InfluenzaB__AGZ60160

SEQ ID NO: 123868 - RNA, 1755 nt, Artificial Sequence; identical to SEQ ID NO: 122856
  derived and/or modified CDS sequence (opt2) from hemagglutinin__InfluenzaB__AGZ60172

SEQ ID NO: 123869 - RNA, 1755 nt, Artificial Sequence; identical to SEQ ID NO: 122856
  derived and/or modified CDS sequence (opt2) from hemagglutinin__InfluenzaB__AGZ60183

SEQ ID NO: 123870 - RNA, 1755 nt, Artificial Sequence
  derived and/or modified CDS sequence (opt2) from hemagglutinin__InfluenzaB__AGZ60194
augaaggccaucaucguccuccucauggucgucaccuccaacgccgaccgcaucugcaccggcaucaccuccuccaacuccccccacgucgucaagaccgccacccagggcgaggucaacgucaccggcgucaucccccucaccaccacccccaccaaguccuacuucgccaaccucaagggcacccgcacccgcggcaagcucugccccgacugccucaacugcaccgaccucgacgucgcccucggccgccccaugugcgucggcaccacccccuccgccaaggccuccauccuccacgagguccgccccgucaccuccggcugcuuccccaucaugcacgaccgcaccaagauccgccagcuccccaaccuccuccgcggcuacgagaacauccgccucuccacccagaacgucaucgacgccgagaaggcccccggcggccccuaccgccucggcaccuccggcuccugccccaacgccaccuccaagaucggcuucuucgccaccauggccugggccguccccaaggacaacuacaagaacgccaccaacccccucaccgucgagguccccuacaucugcaccgagggcgaggaccagaucaccgucuggggcuuccacuccgacaacaagacccagaugaagaaccucuacggcgacuccaacccccagaaguucaccuccuccgccaacggcgucaccacccacuacgucucccagaucggcgacuuccccgaccagaccgaggacggcggccucccccaguccggccgcaucgucgucgacuacaugaugcagaagaccggcaagaccggcaccaucgucuaccagcgcggcguccuccucccccagaaggucuggugcgccuccggccgcuccaaggucaucaagggcucccucccccucaucggcgaggccgacugccuccacgagaaguacggcggccucaacaaguccaagcccuacuacaccggcgagcacgccaaggccaucggcaacugccccaucugggucaagaccccccucaagcucgccaacggcaccaaguaccgcccccccgccaagcuccucaaggagcgcggcuucuucggcgccaucgccggcuuccucgagggcggcugggagggcaugaucgccggcuggcacggcuacaccucccacggcgcccacggcgucgccgucgccgccgaccucaaguccacccaggaggccaucaacaagaucaccaagaaccucaacucccucuccgagcucgaggucaagaaccuccagcgccucuccggcgccauggacgagcuccacaacgagauccucgagcucgacgagaaggucgacgaccuccgcgccgacaccaucuccucccagaucgagcucgccguccuccucuccaacgagggcaucaucaacuccgaggacgagcaccuccucgcccucgagcgcaagcucaagaagaugcucggccccuccgccgucgacaucggcaacggcugcuucgagaccaagcacaagugcaaccagaccugccucgaccgcaucgccgccggcaccuucaacgccggcgaguucucccuccccaccuucgacucccucaacaucaccgccgccucccucaacgacgacggccucgacaaccacaccauccuccucuacuacuccaccgccgccuccucccucgccgucacccucaugcucgccaucuucaucgucuacauggucucccgcgacaacgucuccugcuccaucugccucuga

SEQ ID NO: 123871 - RNA, 1755 nt, Artificial Sequence
  derived and/or modified CDS sequence (opt2) from hemagglutinin__InfluenzaB__AGZ60206
augaaggccaucaucguccuccucauggucgucaccuccaacgccgaccgcaucugcaccggcaucaccuccuccaacuccccccacgucgucaagaccgccacccagggcgaggucaacgucaccggcgucaucccccucaccaccacccccaucaaguccuacuucgccaaccucaagggcacccgcacccgcggcaagcucugccccgacugccucaacugcaccgaccucgacgucgcccucggccgccccaugugcgucggcaccacccccuccgccaaggccuccauccuccacgagguccgccccgucaccuccggcugcuuccccaucaugcacgaccgcaccaagauccgccagcuccccaaccuccuccgcggcuacgagaacauccgccucuccacccagaacgucaucgacgccgagaaggcccccggcggccccuaccgccucggcaccuccggcuccugccccaacgccaccuccaagaucggcuucuucgccaccauggccugggccguccccaaggacaacuacaagaacgccaccaacccccucaccgucgagguccccuacaucugcaccgagggcgaggaccagaucaccgucuggggcuuccacuccgacaacaagacccagaugaagaaccucuacggcgacuccaacccccagaaguucaccuccuccgccaacggcgucaccacccacuacgucucccagaucggcgacuuccccgaccagaccgaggacggcggccucccccaguccggccgcaucgucgucgacuacaugaugcagaagcccggcaagaccggcaccaucgucuaccagcgcggcguccuccucccccagaaggucuggugcgccuccggccgcuccaaggucaucaagggcucccucccccucaucggcgaggccgacugccuccacgagaaguacggcggccucaacaaguccaagcccuacuacaccggcgagcacgccaaggccaucggcaacugccccaucugggucaagaccccccucaagcucgccaacggcaccaaguaccgcccccccgccaagcuccucaaggagcgcggcuucuucggcgccaucgccggcuuccucgagggcggcugggagggcaugaucgccggcuggcacggcuacaccucccacggcgcccacggcgucgccgucgccgccgaccucaaguccacccaggaggccaucaacaagaucaccaagaaccucaacucccucuccgagcucgaggucaagaaccuccagcgccucuccggcgccauggacgagcuccacaacgagauccucgagcucgacgagaaggucgacgaccuccgcgccgacaccaucuccucccagaucgagcucgccguccuccucuccaacgagggcaucaucaacuccgaggacgagcaccuccucgcccucgagcgcaagcucaagaagaugcucggccccuccgccgucgacaucggcaacggcugcuucgagaccaagcacaagugcaaccagaccugccucgaccgcaucgccgccggcaccuucaacgccggcgaguucucccuccccaccuucgacucccucaacaucaccgccgccucccucaacgacgacggccucgacaaccacaccauccuccucuacuacuccaccgccgccuccucccucgccgucacccucaugcucgccaucuucaucgucuacauggucucccgcgacaacgucuccugcuccaucugccucuga

SEQ ID NO: 123872 - RNA, 1755 nt, Artificial Sequence; identical to SEQ ID NO: 123801
  derived and/or modified CDS sequence (opt2) from hemagglutinin__InfluenzaB__AGZ60217

SEQ ID NO: 123873 - RNA, 1755 nt, Artificial Sequence
  derived and/or modified CDS sequence (opt2) from hemagglutinin__InfluenzaB__AGZ60268
augaaggccaucaucguccuccucauggucgucaccuccaacgccgaccgcaucugcaccggcaucaccuccuccaacuccccccacgucgucaagaccgccacccagggcgaggucaacgucaccggcgucaucccccucaccaccacccccaccaaguccuacuucgccaaccucaagggcacccgcacccgcggcaagcucugccccgacugccucaacugcaccgaccucgacgucgcccucggccgccccaugugcgucggcaccacccccuccgccaaggccuccauccuccacgagguccgccccgucaccuccggcugcuuccccaucaugcacgaccgcaccaagauccgccagcucgccaaccuccuccgcggcuacgagaacauccgccucuccacccagaacgucaucgacgccgagaaggcccccggcggccccuaccgccucggcaccuccggcuccugccccaacgccaccuccaaguccggcuucuucgccaccauggccugggccguccccaaggacaacaacaagaacgccaccaacccccucaccgucgagguccccuacaucugcaccgagggcgaggaccagaucaccgucuggggcuuccacuccgacaacaagacccagaugaagaaccucuacggcgacuccaacccccagaaguucaccuccuccgccaacggcgucaccacccacuacgucucccagaucggcggcuuccccgaccagaccgaggacggcggccucccccaguccggccgcaucgucgucgacuacaugaugcagaagcccggcaagaccggcaccaucgucuaccagcgcggcguccuccucccccagaaggucuggugcgccuccggccgcuccaaggucaucaagggcucccucccccucaucggcgaggccgacugccuccacgagaaguacggcggccucaacaaguccaagcccuacuacaccggcgagcacgccaaggccaucggcaacugccccaucugggucaagaccccccucaagcucgccaacggcaccaaguaccgcccccccgccaagcuccucaaggagcgcggcuucuucggcgccaucgccggcuuccucgagggcggcugggagggcaugaucgccggcuggcacggcuacaccucccacggcgcccacggcgucgccgucgccgccgaccucaaguccacccaggaggccaucaacaagaucaccaagaaccucaacucccucuccgagcucgaggucaagaaccuccagcgccucuccggcgccauggacgagcuccacaacgagauccucgagcucgacgagaaggucgacgaccuccgcgccgacaccaucuccucccagaucgagcucgccguccuccucuccaacgagggcaucaucaacuccgaggacgagcaccuccucgcccucgagcgcaagcucaagaagaugcucggccccuccgccaucgacaucggcaacggcugcuucgagaccaagcacaagugcaaccagaccugccucgaccgcaucgccgccggcaccuucaacgccggcgaguucucccuccccaccuucgacucccucaacaucaccgccgccucccucaacgacgacggccucgacaaccacaccauccuccucuacuacuccaccgccgccuccucccucgccgucacccucaugcucgccaucuucaucgucuacauggucucccgcgacaacgucuccugcuccaucugccucuga

SEQ ID NO: 123874 - RNA, 1755 nt, Artificial Sequence; identical to SEQ ID NO: 122890
  derived and/or modified CDS sequence (opt2) from hemagglutinin__InfluenzaB__AHE37993

SEQ ID NO: 123875 - RNA, 1755 nt, Artificial Sequence; identical to SEQ ID NO: 122935
  derived and/or modified CDS sequence (opt2) from hemagglutinin__InfluenzaB__AHE37994

SEQ ID NO: 123876 - RNA, 1755 nt, Artificial Sequence; identical to SEQ ID NO: 122890
  derived and/or modified CDS sequence (opt2) from hemagglutinin__InfluenzaB__AHE37995

SEQ ID NO: 123877 - RNA, 1755 nt, Artificial Sequence; identical to SEQ ID NO: 122890
  derived and/or modified CDS sequence (opt2) from hemagglutinin__InfluenzaB__AHE37996

SEQ ID NO: 123878 - RNA, 1755 nt, Artificial Sequence; identical to SEQ ID NO: 122935
  derived and/or modified CDS sequence (opt2) from hemagglutinin__InfluenzaB__AHE37997

SEQ ID NO: 123879 - RNA, 1755 nt, Artificial Sequence; identical to SEQ ID NO: 122935
  derived and/or modified CDS sequence (opt2) from hemagglutinin__InfluenzaB__AHE37998

SEQ ID NO: 123880 - RNA, 1755 nt, Artificial Sequence; identical to SEQ ID NO: 122935
  derived and/or modified CDS sequence (opt2) from hemagglutinin__InfluenzaB__AHE37999

SEQ ID NO: 123881 - RNA, 1755 nt, Artificial Sequence; identical to SEQ ID NO: 122890
  derived and/or modified CDS sequence (opt2) from hemagglutinin__InfluenzaB__AHE38000

SEQ ID NO: 123882 - RNA, 1755 nt, Artificial Sequence; identical to SEQ ID NO: 122890
  derived and/or modified CDS sequence (opt2) from hemagglutinin__InfluenzaB__AHE38001

SEQ ID NO: 123883 - RNA, 1755 nt, Artificial Sequence
  derived and/or modified CDS sequence (opt2) from hemagglutinin__InfluenzaB__AHE38002
augaaggccaucaucguccuccucauggucgucaccuccaacgccgaccgcaucugcaccggcaucaccuccuccaacuccccccacgucgucaagaccgccacccagggcgaggucaacgucaccggcgucaucccccucaccaccacccccaccaaguccuacuucgccaaccucaagggcaccaagacccgcggcaagcucugccccgacugccucaacugcaccgaccucgacgucgcccucggccgccccaugugcgucggcaccacccccuccgccaaggccuccauccuccacgagguccgccccgucaccuccggcugcuuccccaucaugcacgaccgcaccaagauccgccagcucgccaaccuccuccgcggcuacgagaacauccgccucuccacccagaacgucaucgacgccaagaaggcccccggcggccccuaccgccucggcaccuccggcuccugccccaacgccaccuccaaguccggcuucuucgccaccauggccugggccguccccaaggacaacaacaagaacgccaccaacccccucaccgucgagguccccuacaucugcgccgagggcgaggaccagaucaccgucuggggcuuccacuccgacaacaagacccagaugaagaaccucuacggcgacuccaacccccagaaguucaccuccuccgccaacggcgucaccacccacuacgucucccagaucggcggcuuccccgaccagaccgaggacggcggccucccccaguccggccgcaucgucgucgacuacaugaugcagaagcccggcaagaccggcaccaucgucuaccagcgcggcguccuccucccccagaaggucuggugcgccuccggccgcuccaaggucaucaagggcucccucccccucaucggcgaggccgacugccuccacgagaaguacggcggccucaacaaguccaagcccuacuacaccggcgagcacgccaaggccaucggcaacugccccaucugggucaagaccccccucaagcucgccaacggcaccaaguaccgcccccccgccaagcuccucaaggagcgcggcuucuucggcgccaucgccggcuuccucgagggcggcugggagggcaugaucgccggcuggcacggcuacaccucccacggcgcccacggcgucgccgucgccgccgaccucaaguccacccaggaggccaucaacaagaucaccaagaaccucaacucccucuccgagcucgaggucaagaaccuccagcgccucuccggcgccauggacgagcuccacaacgagauccucgagcucgacgagaaggucgacgaccuccgcgccgacaccaucuccucccagaucgagcucgccguccuccucuccaacgagggcaucaucaacuccgaggacgagcaccuccucgcccucgagcgcaagcucaagaagaugcucggccccuccgccgucgacaucggcaacggcugcuucgagaccaagcacaagugcaaccagaccugccucgaccgcaucgccgccggcaccuucaacgccggcgaguucucccuccccaccuucgacucccucaacaucaccgccgccucccucaacgacgacggccucgacaaccacaccauccuccucuacuacuccaccgccgccuccucccucgccgucacccucaugcucgccaucuucaucgucuacauggucucccgcgacaacgucuccugcuccaucugccucuga

SEQ ID NO: 123884 - RNA, 1755 nt, Artificial Sequence; identical to SEQ ID NO: 122890
  derived and/or modified CDS sequence (opt2) from hemagglutinin__InfluenzaB__AHE38003

SEQ ID NO: 123885 - RNA, 1755 nt, Artificial Sequence; identical to SEQ ID NO: 122890
  derived and/or modified CDS sequence (opt2) from hemagglutinin__InfluenzaB__AHE38004

SEQ ID NO: 123886 - RNA, 1755 nt, Artificial Sequence; identical to SEQ ID NO: 122890
  derived and/or modified CDS sequence (opt2) from hemagglutinin__InfluenzaB__AHE38005

SEQ ID NO: 123887 - RNA, 1755 nt, Artificial Sequence
  derived and/or modified CDS sequence (opt2) from hemagglutinin__InfluenzaB__AHE38006
augaaggccaucaucguccuccucauggucgucaccuccaacgccgaccgcaucugcaccggcaucaccuccuccaacuccccccacgucgucaagaccgccacccagggcgaggucaacgucaccggcgucaucccccucaccaccacccccaccaaguccuacuucgccaaccucaagggcaccaagacccgcggcaagcucugccccgacugccucaacugcaccgaccucgacgucgcccucggccgccccaugugcgucggcgccacccccuccgccaaggccuccauccuccacgagguccgccccgucaccuccggcugcuuccccaucaugcacgaccgcaccaagauccgccagcucgccaaccuccuccgcggcuacgagaacauccgccucuccacccagaacgucaucgacgccgagaaggcccccggcggccccuaccgccucggcaccuccggcuccugccccaacgccaccuccaaguccggcuucuucgccaccauggccugggccguccccaaggacaacaacaagaacgccaccaacccccucaccgucgagguccccuacaucugcgccgagggcgaggaccagaucaccgucuggggcuuccacuccgacaacaagacccagaugaagaaccucuacggcgacuccaacccccagaaguucaccuccuccgccaacggcgucaccacccacuacgucucccagaucggcggcuuccccgaccagaccgaggacggcggccucccccaguccggccgcaucgucgucgacuacaugaugcagaagcccggcaagaccggcaccaucgucuaccagcgcggcguccuccucccccagaaggucuggugcgccuccggccgcuccaaggucaucaagggcucccucccccucaucggcgaggccgacugccuccacgagaaguacggcggccucaacaaguccaagcccuacuacaccggcgagcacgccaaggccaucggcaacugccccaucugggucaagaccccccucaagcucgccaacggcaccaaguaccgcccccccgccaagcuccucaaggagcgcggcuucuucggcgccaucgccggcuuccucgagggcggcugggagggcaugaucgccggcuggcacggcuacaccucccacggcgcccacggcgucgccgucgccgccgaccucaaguccacccaggaggccaucaacaagaucaccaagaaccucaacucccucuccgagcucgaggucaagaaccuccagcgccucuccggcgccgucgacgagcuccacaacgagauccucgagcucgacgagaaggucgacgaccuccgcgccgacaccaucuccucccagaucgagcucgccguccuccucuccaacgagggcaucaucaacuccgaggacgagcaccuccucgcccucgagcgcaagcucaagaagaugcucggccccuccgccgucgacaucggcaacggcugcuucgagaccaagcacaagugcaaccagaccugccucgaccgcaucgccgccggcaccuucaacgccggcgaguucucccuccccaccuucgacucccucaacaucaccgccgccucccucaacgacgacggccucgacaaccacaccauccuccucuacuacuccaccgccgccuccucccucgccgucacccucaugcucgccaucuucaucgucuacauggucucccgcgacaacgucuccugcuccaucugccucuga

SEQ ID NO: 123888 - RNA, 1755 nt, Artificial Sequence; identical to SEQ ID NO: 122890
  derived and/or modified CDS sequence (opt2) from hemagglutinin__InfluenzaB__AHE38007

SEQ ID NO: 123889 - RNA, 1755 nt, Artificial Sequence
  derived and/or modified CDS sequence (opt2) from hemagglutinin__InfluenzaB__AHE38008
augaaggccaucaucgcccuccucauggucgucaccuccaacgccgaccgcaucugcaccggcaucaccuccuccaacuccccccacgucgucaagaccgccacccagggcgaggucaacgucaccggcgucaucccccucaccaccacccccaccaaguccuacuucgccaaccucaagggcaccaagacccgcggcaagcucugccccgacugccucaacugcaccgaccucgacgucgcccucggccgccccaugugcgucggcaccacccccuccgccaaggccuccauccuccacgagguccgccccgucaccuccggcugcuuccccaucaugcacgaccgcaccaagauccgccagcucgccaaccuccuccgcggcuacgagaacauccgccucuccacccagaacgucaucgacgccgagaaggcccccggcggccccuaccgccucggcaccuccggcuccugccccaacgccaccuccaaguccggcuucuucgccaccauggccugggccguccccaaggacaacaacaagaacgccaccaacccccucaccgucgagguccccuacaucugcgccgagggcgaggaccagaucgccgucuggggcuuccacuccgacaacaagacccagaugaagaaccucuacggcgacuccaacccccagaaguucaccuccuccgccaacggcgucaccacccacuacgucucccagaucggcggcuuccccgaccagaccgaggacggcggccucccccaguccggccgcaucgucgucgacuacaugaugcagaagcccggcaagaccggcaccaucgucuaccagcgcggcguccuccucccccagaaggucuggugcgccuccggccgcuccaaggucaucaagggcucccucccccucaucggcgaggccgacugccuccacgagaaguacggcggccucaacaaguccaagcccuacuacaccggcgagcacgccaaggccaucggcaacugccccaucugggucaagaccccccucaagcucgccaacggcaccaaguaccgcccccccgccaagcuccucaaggagcgcggcuucuucggcgccaucgccggcuuccucgagggcggcugggagggcaugaucgccggcuggcacggcuacaccucccacggcgcccacggcgucgccgucgccgccgaccucaaguccacccaggaggccaucaacaagaucaccaagaaccucaacucccucuccgagcucgaggucaagaaccuccagcgccucuccggcgccauggacgagcuccacaacgagauccucgagcucgacgagaaggucgacgaccuccgcgccgacaccaucuccucccagaucgagcucgccguccuccucuccaacgagggcaucaucaacuccgaggacgagcaccuccucgcccucgagcgcaagcucaagaagaugcucggccccuccgccgucgacaucggcaacggcugcuucgagaccaagcacaagugcaaccagaccugccucgaccgcaucgccgccggcaccuucaacgccggcgaguucucccuccccaccuucgacucccucaacaucaccgccgccucccucaacgacgacggccucgacaaccacaccauccuccucuacuacuccaccgccgccuccucccucgccgucacccucaugcucgccaucuucaucgucuacauggucucccgcgacaacgucuccugcuccaucugccucuga

SEQ ID NO: 123890 - RNA, 1755 nt, Artificial Sequence; identical to SEQ ID NO: 122935
  derived and/or modified CDS sequence (opt2) from hemagglutinin__InfluenzaB__AHE38009

SEQ ID NO: 123891 - RNA, 1755 nt, Artificial Sequence; identical to SEQ ID NO: 122935
  derived and/or modified CDS sequence (opt2) from hemagglutinin__InfluenzaB__AHE38010

SEQ ID NO: 123892 - RNA, 1755 nt, Artificial Sequence; identical to SEQ ID NO: 122890
  derived and/or modified CDS sequence (opt2) from hemagglutinin__InfluenzaB__AHE38012

SEQ ID NO: 123893 - RNA, 1755 nt, Artificial Sequence
  derived and/or modified CDS sequence (opt2) from hemagglutinin__InfluenzaB__AHE38013
augaaggccaucaucguccuccucauggucgucaccuccaacgccgaccgcaucugcaccggcaucaccuccuccaacuccccccacgucgucaagaccgccacccagggcgaggucaacgucaccggcgucaucccccucaccaccacccccaccaaguccuacuucgccaaccucaagggcaccaagacccgcggcaagcucugccccgacugccucaacugcaccgaccucgacgucgcccucggccgccccaugugcgucggcaccacccccuccgccaaggccuccauccuccacgagguccgccccgucaccuccggcugcuuccccaucaugcacgaccgcaccaagauccgccagcucgccaaccuccuccgcggcuacgagaacauccgccucuccacccagaacgucaucgacgccgagaaggcccccggcggccccuaccgccucggcaccuccggcuccugccccaacgccaccuccaaguccggcuucuucgccaccauggccugggccguccccaaggacaacaacaagaacgccaccaacccccucaccgucgagguccccuacaucugcgccgagggcgaggaccagaucaccgucuggggcuuccacuccgacaacaagacccagaugaagaaccucuacggcgacuccaacccccagaaguucaccuccuccgccaacggcgucaccacccacuacgucucccagaucggcggcuuccccgaccagaccgaggacggcggccucccccaguccggccgcaucgucgucgacuacaugaugcagaagcccggcaagaccggcaccaucgucuaccagcgcggcguccuccucccccagaaggucuggugcgucuccggccgcuccaaggucaucaagggcucccucccccucaucggcgaggccgacugccuccacgagaaguacggcggccucaacaaguccaagcccuacuacaccggcgagcacgccaaggccaucggcaacugccccaucugggucaagaccccccucaagcucgccaacggcaccaaguaccgcccccccgccaagcuccucaaggagcgcggcuucuucggcgccaucgccggcuuccucgagggcggcugggagggcaugaucgccggcuggcacggcuacaccucccacggcgcccacggcauggccgucgccgccgaccucaaguccacccaggaggccaucaacaagaucaccaagaaccucaacucccucuccgagcucgaggucaagaaccuccagcgccucuccggcgccauggacgagcuccacaacgagauccucgagcucgacgagaaggucgacgaccuccgcgccgacaccaucuccucccagaucgagcucgccguccuccucuccaacgagggcaucaucaacuccgaggacgagcaccuccucgcccucgagcgcaagcucaagaagaugcucggccccuccgccgucgacaucggcaacggcugcuucgagaccaagcacaagugcaaccagaccugccucgaccgcaucgccgccggcaccuucaacgccggcgaguucucccuccccaccuucgacucccucaacaucaccgccgccucccucaacgacgacggccucgacaaccacaccauccuccucuacuacuccaccgccgccuccucccucgccgucacccucaugcucgccaucuucaucgucuacauggucucccgcgacaacgucuccugcuccaucugccucuga

SEQ ID NO: 123894 - RNA, 1755 nt, Artificial Sequence; identical to SEQ ID NO: 122890
  derived and/or modified CDS sequence (opt2) from hemagglutinin__InfluenzaB__AHE38014

SEQ ID NO: 123895 - RNA, 1758 nt, Artificial Sequence; identical to SEQ ID NO: 122681
  derived and/or modified CDS sequence (opt2) from hemagglutinin__InfluenzaB__AHE38015

SEQ ID NO: 123896 - RNA, 1758 nt, Artificial Sequence
  derived and/or modified CDS sequence (opt2) from hemagglutinin__InfluenzaB__AHE38016
augaaggccaucaucguccuccucauggucgucaccuccaacgccgaccgcaucugcaccggcaucaccuccuccaacuccccccacgucgucaagaccgccacccagggcgaggucaacgucaccggcgucaucccccucaccaccacccccaccaagucccacuucgccaaccucaagggcaccgagacccgcggcaagcucugccccaagugccucaacugcaccgaccucgacgucgcccucggccgccccaagugcaccggcaagauccccuccgcccgcgucuccauccuccacgagguccgccccgucaccuccggcugcuuccccaucaugcacgaccgcaccaagauccgccagcuccccaaccuccuccgcggcuacgagcacauccgccucuccacccacaacgucaucaacgccgagaacgcccccggcggccccuacaagaucggcaccuccggcuccugccccaacgucaccaacggcaacggcuucuucgccaccauggccugggccguccccaagaacgacaagaacaagaccgccaccaacccccucaccaucgagguccccuacaucugcaccgagggcgaggaccagaucaccgucuggggcuuccacuccgacaacgagacccagauggccaagcucuacggcgacuccaagccccagaaguucaccuccuccgccaacggcgucaccacccacuacgucucccagaucggcggcuuccccaaccagaccgaggacggcggccucccccaguccggccgcaucgucgucgacuacaugguccagaaguccggcaagaccggcaccaucaccuaccagcgcggcauccuccucccccagaaggucuggugcgccuccggcaaguccaaggucaucaagggcucccucccccucaucggcgaggccgacugccuccacgagaaguacggcggccucaacaaguccaagcccuacuacaccggcgagcacgccaaggccaucggcaacugccccaucugggucaagaccccccucaagcucgccaacggcaccaaguaccgcccccccgccaagcuccucaaggagcgcggcuucuucggcgccaucgccggcuuccucgagggcggcugggagggcaugaucgccggcuggcacggcuacaccucccacggcgcccacggcgucgccgucgccgccgaccucaaguccacccaggaggccaucaacaagaucaccaagaaccucaacucccucuccgagcucgaggucaagaaccuccagcgccucuccggcgccauggacgagcuccacaacgagauccucgagcucgacgagaaggucgacgaccuccgcgccgacaccaucuccucccagaucgagcucgccguccuccucuccaacgagggcaucaucaacuccgaggacgagcaccuccucgcccucgagcgcaagcucaagaagaugcucggccccuccgccgucgagaucggcaacggcugcuucgagaccaagcacaagugcaaccagaccugccucgaccgcaucgccgccggcaccuucgacgccggcgaguucucccuccccaccuucgacucccucaacaucaccgccgccucccucaacgacgacggccucgacaaccacaucauccuccucuacuacuccaccgccgccuccucccucgccgucacccucaugaucgccaucuucgucgucuacauggucucccgcgacaacgucuccugcuccaucugccucuga

SEQ ID NO: 123897 - RNA, 1758 nt, Artificial Sequence; identical to SEQ ID NO: 123000
  derived and/or modified CDS sequence (opt2) from hemagglutinin__InfluenzaB__AHE38017

SEQ ID NO: 123898 - RNA, 1758 nt, Artificial Sequence; identical to SEQ ID NO: 122923
  derived and/or modified CDS sequence (opt2) from hemagglutinin__InfluenzaB__AHE38018

SEQ ID NO: 123899 - RNA, 1758 nt, Artificial Sequence; identical to SEQ ID NO: 122908
  derived and/or modified CDS sequence (opt2) from hemagglutinin__InfluenzaB__AHE38019

SEQ ID NO: 123900 - RNA, 1758 nt, Artificial Sequence
  derived and/or modified CDS sequence (opt2) from hemagglutinin__InfluenzaB__AHE38020
augaaggccaucaucguccuccucauggucgucaccuccaacgccgaccgcaucugcaccggcaucaccuccuccaacuccccccacgucgucaagaccgccacccagggcgaggucaacgucaccggcgucaucccccucaccaucacccccaccaagucccacuucgccaaccucaagggcaccgagacccgcggcaagcucugccccaagugccucaacugcaccgaccucgacgucgcccucggccgccccaagugcaccggcaagauccccuccgcccgcgucuccauccuccacgagguccgccccgucaccuccggcugcuuccccaucaugcacgaccgcaccaagauccgccagcuccccaaccuccuccgcggcuacgagcacauccgccucuccacccacaacgucaucaacgccgaggacgcccccggcggccccuacaagaucggcaccuccggcuccugccccaacgucaccaacggcaacggcuucuucgccaccauggccugggccguccccaagaacgacaagaacaagaccgccaccaacccccucaccaucgagguccccuacaucugcaccgagggcgaggaccagaucaccgucuggggcuuccacuccgacaacgagacccagauggccaagcucuacggcgacuccaagccccagaaguucaccuccuccgccaacggcgucaccacccacuacgucucccagaucggcggcuuccccaaccagaccgaggacggcggccucccccaguccggccgcaucgucgucgacuacaugguccagaaguccggcaagaccggcaccaucaccuaccagcgcggcauccuccucccccagaaggucuggugcgccuccggccgcuccaaggucaucaagggcucccucccccucaucggcgaggccgacugccuccacgagaaguacggcggccucaacaaguccaagcccuacuacaccggcgagcacgccaaggccaucggcaacugccccaucugggucaagaccccccucaagcucgccaacggcaccaaguaccgcccccccgccaagcuccucaaggagcgcggcuucuucggcgccaucgccggcuuccucgagggcggcugggagggcaugaucgccggcuggcacggcuacaccucccacggcgcccacggcgucgccgucgccgccgaccucaaguccacccaggaggccaucaacaagaucaccaagaaccucaacucccucuccgagcucgaggucaagaaccuccagcgccucuccggcgccauggacgagcuccacaacgagauccucgagcucgacgagaaggucgacgaccuccgcgccgacaccaucuccucccagaucgagcucgccguccuccucuccaacgagggcaucaucaacuccgaggacgagcaccuccucgcccucgagcgcaagcucaagaagaugcucggccccuccgccgucgagaucggcaacggcugcuucgagaccaagcacaagugcaaccagaccugccucgaccgcaucgccgccggcaccuucgacgccggcgaguucucccuccccaccuucgacucccucaacaucaccgccgccucccucaacgacgacggccucgacaaccacaccauccuccucuacuacuccaccgccgccuccucccucgccgucacccucaugaucgccaucuucgucgucuacauggucucccgcgacaacgucuccugcuccaucugccucuga

SEQ ID NO: 123901 - RNA, 1758 nt, Artificial Sequence
  derived and/or modified CDS sequence (opt2) from hemagglutinin__InfluenzaB__AHE38021
augaaggccaucaucguccuccucauggucgucaccuccaacgccgaccgcaucugcaccggcaucaccuccuccaacuccccccacgucgucaagaccgccacccagggcgaggucaacgucaccggcgucaucccccucaccaccacccccaccaagucccacuucgccaaccucaagggcaccgagacccgcggcaagcucugccccaagugccucaacugcaccgaccucgacgucgcccucggccgccccaagugcaccggcaagauccccuccgcccgcgucuccauccuccacgagguccgccccgucaccuccggcugcuuccccaucaugcacgaccgcaccaagauccgccagcuccccaaccuccuccgcggcuacgagcacauccgccucuccacccacaacgucaucaacgccgagaacgcccccggcggccccuacaagaucggcaccuccggcuccugccccaacgucaccaacggcaacggcuucuucgccaccauggccugggccguccccaagaacgacaagaacaagaccgccaccaacccccucaccaucgagguccccuacaucugcaccgagggcgaggaccagaucaccgucuggggcuuccacuccgacaacgagacccagauggccaagcucuacggcgacuccaacccccagaaguucaccuccuccgccaacggcgucaccacccacuacgucucccagaucggcggcuuccccaaccagaccgaggacggcggccucccccaguccggccgcaucgucgucgacuacaugguccagaaguccggcaagaccggcaccaucaccuaccagcgcggcauccuccucccccagaaggucuggugcgccuccggccgcuccaaggucaucaagggcucccucccccucaucggcgaggccgacugccuccacgagaaguacggcggccucaacaaguccaagcccuacuacaccggcgagcacgccaaggccaucggcaacugccccaucugggucaagaccccccucaagcucgccaacggcaccaaguaccgcccccccgccaagcuccucaaggagcgcggcuucuucggcgccaucgccggcuuccucgagggcggcugggagggcaugaucgccggcuggcacggcuacaccucccacggcgcccacggcgucgccgucgccgccgaccucaaguccacccaggaggccaucaacaagaucaccaagaaccucaacucccucuccgagcucgaggucaagaaccuccagcgccucuccggcgccauggacgagcuccacaacgagauccucgagcucgacgagaaggucgacgaccuccgcgccgacaccaucuccucccagaucgagcucgccguccuccucuccaacgagggcaucaucaacuccgaggacgagcaccuccucgcccucgagcgcaagcucaagaagaugcucggccccuccgccgucgagaucggcaacggcugcuucgagaccaagcacaagugcaaccagaccugccucgaccgcaucgccgccggcaccuucgacgccggcgaguucucccuccccaccuucgacucccucaacaucaccgccgccucccucaacgacgacggccucgacaaccacaccauccuccucuacuacuccaccgccgccuccucccucgccgucacccucaugaucgccaucuucgucgucuacauggucucccgcgacaacgucuccugcuccaucugccucuga

SEQ ID NO: 123902 - RNA, 1758 nt, Artificial Sequence; identical to SEQ ID NO: 122923
  derived and/or modified CDS sequence (opt2) from hemagglutinin__InfluenzaB__AHE38022

SEQ ID NO: 123903 - RNA, 1752 nt, Artificial Sequence
  derived and/or modified CDS sequence (opt2) from hemagglutinin__InfluenzaB__AHL91189
augaaggccaucaucguccuccucauggucgccaccuccaacgccgaccgcaucugcaccggcaucaccuccuccaacuccccccacgucgucaagaccgccacccagggcgaggucaacgucaccggcgucaucucccucaccaccacccccaccaagucccacuucgccaaccucaagggcaccaagacccgcggcaagcucugccccaacugccucaacugcaccgaccucgacgucgcccucggccgccccaucugcaucggcaccauccccuccgccaaggccuccauccuccacgagguccgccccgucaccuccggcugcuuccccaucaugcacgaccgcaccaagauccgccagcuccccaaccuccuccgcggcuacgagcacauccgccucuccacccacaacgucaucaacgccgagcgcgcccccggcggccccuaccgccucggcaccuccggcuccugccccaacgucaccucccgcuccggcuucuucgccaccauggccugggccgucccccgcgacaacaagaccgccaccaacccccucaccgucgagguccccuacaucugcaccaagggcgaggaccagaucaccgucuggggcuuccacuccgacaacaagacccagaugaagaaccucuacggcgacuccaacccccagaaguucaccuccuccgccaacggcgucaccacccacuacgucucccagaucggcggcuuccccaaccagaccgaggacggcggccucccccaguccggccgcaucgucgucgacuacaugguccagaagcccggcaagaccggcaccaucgucuaccagcgcggcguccuccucccccagaaggucuggugcgccuccggccgcuccaaggucaucaagggcucccucccccucaucggcgaggccgacugccuccacgagaaguacggcggccucaacaaguccaagcccuacuacaccggcgagcacgccaaggccaucggcaacugccccaucugggucaagaccccccucaagcucgccaacggcaccaaguaccgcccccccgccaagcuccucaaggagcgcggcuucuucggcgccaucgccggcuuccucgagggcggcugggagggcaugaucgccggcuggcacggcuacaccucccacggcgcccacggcgucgccgucgccgccgaccucaaguccacccaggaggccaucaacaagaucaccaagaaccucaacucccucuccgagcucgaggucaagaaccuccagcgccucuccggcgccauggacgagcuccacaacgagauccucgagcucgacgagaaggucgacgaccuccgcgccgacaccaucuccucccagaucgagcucgccguccuccucuccaacgagggcaucaucaacuccgaggacgagcaccuccucgcccucgagcgcaagcucaagaagaugcucggccccuccgccgucgacaucggcaacggcugcuucgagaccaagcacaagugcaaccagaccugccucgaccgcaucgccgccggcaccuucaacgccggcgaguucucccuccccaccuucgacucccucaacaucaccgccgccucccucaacgacgacggccucgacaaccacaccauccuccucuacuacuccaccgccgccuccucccucgccgucacccucaugaucgccaucuucaucgucuacauggucucccgcgacaacgucuccugcuccaucugccucuga

SEQ ID NO: 123904 - RNA, 1752 nt, Artificial Sequence
  derived and/or modified CDS sequence (opt2) from hemagglutinin__InfluenzaB__AHL91200
augaaggccaucaucguccuccucauggucgucaccuccaacgccgaccgcaucugcaccggcaucaccuccuccaacuccccccacgucgucaagaccgccacccagggcgaggucaacgucaccggcgucaucccccucaccaccacccccaccaagucccacuucgccaaccucaagggcaccaagacccgcggcaagcucugccccaacugccucaacugcaccgaccucgacgucgcccucggccgccccaugugcaucggcaccauccccuccgccaaggccuccauccuccacgagguccgccccgucaccuccggcugcuuccccaucaugcacgaccgcaccaagauccgccagcuccccaaccuccuccgcggcuacgagcacauccgccucuccacccacaacgucaucaacgccgagcgcgcccccggcggccccuaccgccucggcaccuccggcuccugccccaacgucaccucccgcuccggcuucuucgccaccauggccugggccgucccccgcgacaacaagaccgccaccaacccccucaccgucgagguccccuacaucugcaccaagggcgaggaccagaucaccgucuggggcuuccacuccgacaacaagacccagaugaagaaccucuacggcgacuccaacccccagaaguucaccuccuccgccaacggcgucaccacccacuacgucucccagaucggcgacuuccccaaccagaccgaggacggcggccucccccaguccggccgcaucgucgucgacuacaugguccagaagcccggcaagaccggcaccaucgucuaccagcgcggcguccuccucccccagaaggucuggugcgccuccggccgcuccaaggucaucaagggcucccucccccucaucggcgaggccgacugccuccacgagaaguacggcggccucaacaaguccaagcccuacuacaccggcgagcacgccaaggccaucggcaacugccccaucugggucaagaccccccucaagcucgccaacggcaccaaguaccgcccccccgccaagcuccucaaggagcgcggcuucuucggcgccaucgccggcuuccucgagggcggcugggagggcaugaucgccggcuggcacggcuacaccucccacggcgcccacggcgucgccgucgccgccgaccucaaguccacccaggaggccaucaacaagaucaccaagaaccucaacucccucuccgagcucgaggucaagaaccuccagcgccucuccggcgccauggacgagcuccacaacgagauccucgagcucgacgagaaggucgacgaccuccgcgccgacaccaucuccucccagaucgagcucgccguccuccucuccaacgagggcaucaucaacuccgaggacgagcaccuccucgcccucgagcgcaagcucaagaagaugcucggccccuccgccgucgacaucggcaacggcugcuucgagaccaagcacaagugcaaccagaccugccucgaccgcaucgccgccggcaccuucaacgccggcgaguucucccuccccaccuucgacucccucaacaucaccgccgccucccucaacgacgacggccucgacaaccacaccauccuccucuacuacuccaccgccgccuccucccucgccgucacccucaugaucgccaucuucaucgucuacauggucucccgcgacaacgucuccugcuccaucugccucuga

SEQ ID NO: 123905 - RNA, 1752 nt, Artificial Sequence
  derived and/or modified CDS sequence (opt2) from hemagglutinin__InfluenzaB__AHL91211
augaaggccaucaucguccuccucauggucgccaccuccaacgccgaccgcaucugcaccggcaucaccuccuccaacuccccccacgucgucaagaccgccacccagggcgaggucaacgucaccggcgucaucucccucaccaccacccccaccaagucccacuucgccaaccucaagggcaccaagacccgcggcaagcucugccccaacugccucaacugcaccgaccucgacgucgcccucggccgccccaugugcaucggcaccauccccuccgccaaggccuccauccuccacgagguccgccccgucaccuccggcugcuuccccaucaugcacgaccgcaccaagauccgccagcuccccaaccuccuccgcggcuacgagcacauccgccucuccacccacaacgucaucaacgccgagcgcgcccccggcggccccuaccgccucggcaccuccggcuccugccccaacgucaccucccgcuccggcuucuucgccaccauggccugggccgucccccgcgacaacaagaccgccaccaacccccucaccgucgagguccccuacaucugcaccaagggcgaggaccagaucaccgucuggggcuuccacuccgacaacaagacccagaugaagaaccucuacggcgacuccaacccccagaaguucaccuccuccgccaacggcgucaccacccacuacgucucccagaucggcggcuuccccaaccagaccgaggacggcggccucccccaguccggccgcaucgucgucgacuacaugguccagaagcccggcaagaccggcaccaucgucuaccagcgcggcguccuccucccccagaaggucuggugcgccuccggccgcuccaaggucaucaagggcucccucccccucaucggcgaggccgacugccuccacgagaaguacggcggccucaacaaguccaagcccuacuacaccggcgagcacgccaaggccaucggcaacugccccaucugggucaagaccccccucaagcucgccaacggcaccaaguaccgcccccccgccaagcuccucaaggagcgcggcuucuucggcgccaucgccggcuuccucgagggcggcugggagggcaugaucgccggcuggcacggcuacaccucccacggcgcccacggcgucgccgucgccgccgaccucaaguccacccaggaggccaucaacaagaucaccaagaaccucaacucccucuccgagcucgaggucaagaaccuccagcgccucuccggcgccauggacgagcuccacaacgagauccucgagcucgacgagaaggucgacgaccuccgcgccgacaccaucuccucccagaucgagcucgccguccuccucuccaacgagggcaucaucaacuccgaggacgagcaccuccucgcccucgagcgcaagcucaagaagaugcucggccccuccgccgucgacaucggcaacggcugcuucgagaccaagcacaagugcaaccagaccugccucgaccgcaucgccgccggcaccuucaacgccggcgaguucucccuccccaccuucgacucccucaacaucaccgccgccucccucaacgacgacggccucgacaaccacaccauccuccucuacuacuccaccgccgccuccucccucgccgucacccucaugaucgccaucuucaucgucuacauggucucccgcgacaacgucuccugcuccaucugccucuga

SEQ ID NO: 123906 - RNA, 1755 nt, Artificial Sequence
  derived and/or modified CDS sequence (opt2) from hemagglutinin__InfluenzaB__AHL91222
augaaggccaucaucguccuccucauggucgucaccuccaacgccgaccgcaucugcaccggcaucaccuccuccaacuccccccacgucgucaagaccgccacccagggcgaggucaacgucaccggcgucaucccccucaccaccacccccaccaagucccacuucgccaaccucaagggcaccaagacccgcggcaagcucugccccaacugccucaacugcaccgaccucgacgucgcccucggccgccccaugugcgucggcaccacccccuccgccaaggccuccauccuccacgagguccgccccgucaccuccggcugcuuccccaucaugcacgaccgcaccaagauccgccagcuccccaaccuccuccgcggcuacgagaacauccgccucuccacccagaacgucaucaacgccgagaaggcccccggcggccccuaccgccucggcaccuccggcuccugccccaacgccaccucccgcuccggcuucuucgccaccauggccugggccgucccccgcgacaacaacaagaccgccaccaacccccucaccgucgagguccccuacgucugcaccgagggcgaggaccagaucaccgucuggggcuuccacuccgacaacaagacccagaugaagaaccucuacggcgacuccaacccccagaaguucaccuccuccgccaacggcgucaccacccacuacgucucccagaucggcggcuuccccgaccagaccgaggacggcggccucccccaguccggccgcaucgucgucgacuacaugguccagaagcccggcaagaccggcaccaucgucuaccagcgcggcguccuccucccccagaaggucuggugcgccuccggccgcuccaaggucaucaagggcucccucccccucaucggcgaggccgacugccuccacgagaaguacggcggccucaacaaguccaagcccuacuacaccggcgagcacgccaaggccaucggcaacugccccaucugggucaagaccccccucaagcucgccaacggcaccaaguaccgcccccccgccaagcuccucaaggagcgcggcuucuucggcgccaucgccggcuuccucgagggcggcugggagggcaugaucgccggcuggcacggcuacaccucccacggcgcccacggcgucgccgucgccgccgaccucaaguccacccaggaggccaucaacaagaucaccaagaaccucaacucccucuccgagcucgaggucaagaaccuccagcgccucuccggcgccauggacgagcuccacaacgagauccucgagcucgacgagaaggucgacgaccuccgcgccgacaccaucuccucccagaucgagcucgccguccuccucuccaacgagggcaucaucaacuccgaggacgagcaccuccucgcccucgagcgcaagcucaagaagaugcucggccccuccgccgucgacaucggcaacggcugcuucgagaccaagcacaagugcaaccagaccugccucgaccgcaucgccgccggcaccuucaacgccggcgaguucucccuccccaccuucgacucccucaacaucaccgccgccucccucaacgacgacggccucgacaaccacaccauccuccucuacuacuccaccgccgccuccucccucgccgucacccucaugaucgccaucuucaucgucuacauggucucccgcgacaacaucuccugcuccaucugccucuga

SEQ ID NO: 123907 - RNA, 1755 nt, Artificial Sequence
  derived and/or modified CDS sequence (opt2) from hemagglutinin__InfluenzaB__AHL91244
augaaggccaucaucguccuccucauggucgucaccuccaacgccgaccgcaucugcaccggcaucaccuccuccaacuccccccacgucgucaagaccgccacccagggcgaggucaacgucaccggcgucaucccccucaccaccacccccaccaagucccacuucgccaaccucaagggcaccaagacccgcggcaagcucugccccaccugccucaacugcaccgaccucgacgucgcccucggccgccccaugugcgucggcaccacccccuccgccaaggccuccauccuccacgagguccgccccgucaccuccggcugcuuccccaucaugcacgaccgcaccaagauccgccagcuccccaaccuccuccgcggcuacgagaagauccgccucuccacccagaacgucaucaacgccgagaaggcccccggcggccccuaccgccucggcaccuccggcuccugccccaacgccaccucccgcuccggcuucuucgccaccauggccugggccgucccccgcgacaacaacaagaccgccaccaacccccucaccgucgagguccccuacaucugcaccaaggaggaggaccagaucaccgucuggggcuuccacuccgacaacaagacccagaugaagaaccucuacggcgacuccaacccccagaaguucaccuccuccgccaacggcgucaccacccacuacgucucccagaucggcggcuuccccgaccagaccgaggacggcggccucccccaguccggccgcaucgucgucgacuacaugguccagaagcccggcaagaccggcaccaucgucuaccagcgcggcguccuccucccccagaaggucuggugcgccuccggccgcuccaaggucaucaagggcucccucccccucaucggcgaggccgacugccuccacgagaaguacggcggccucaacaaguccaagcccuacuacaccggcgagcacgccaaggccaucggcaacugccccaucugggucaagaccccccucaagcucgccaacggcaccaaguaccgcccccccgccaagcuccucaaggagcgcggcuucuucggcgccaucgccggcuuccucgagggcggcugggagggcaugaucgccggcuggcacggcuacaccucccacggcgcccacggcgucgccgucgccgccgaccucaaguccacccaggaggccaucaacaagaucaccaagaaccucaacucccucuccgagcucgaggucaagaaccuccagcgccucuccggcgccauggacgagcuccacaacgagauccucgagcucgacgagaaggucgacgaccuccgcgccgacaccaucuccucccagaucgagcucgccguccuccucuccaacgagggcaucaucaacuccgaggacgagcaccuccucgcccucgagcgcaagcucaagaagaugcucggccccuccgccgucgacaucggcaacggcugcuucgagaccaagcacaagugcaaccagaccugccucgaccgcaucgccgccggcaccuucaacgccggcgaguucucccuccccaccuucgacucccucaacaucaccgccgccucccucaacgacgacggccucgacaaccacaccauccuccucuacuacuccaccgccgccuccucccucgccgucacccucaugaucgccaucuucaucgucuacauggucucccgcgacaacgucuccugcuccaucugccucuga

SEQ ID NO: 123908 - RNA, 1755 nt, Artificial Sequence; identical to SEQ ID NO: 122537
  derived and/or modified CDS sequence (opt2) from hemagglutinin__InfluenzaB__AHL91255

SEQ ID NO: 123909 - RNA, 1755 nt, Artificial Sequence; identical to SEQ ID NO: 122537
  derived and/or modified CDS sequence (opt2) from hemagglutinin__InfluenzaB__AHL91266

SEQ ID NO: 123910 - RNA, 1752 nt, Artificial Sequence
  derived and/or modified CDS sequence (opt2) from hemagglutinin__InfluenzaB__AHL91277
augaaggccaucaucguccuccucauggucgucaccuccaacgccgaccgcaucugcaccggcaucaccuccuccaacuccccccacgucgucaagaccgccacccagggcgaggucaacgucaccggcgucaucccccucaccaccacccccaccaagucccacuucgccaaccucaagggcaccaagacccgcggcaagcucugccccaacugccucaacugcaccgaccucgacgucgcccucggccgccccaugugcaucggcaucacccccuccgccaaggccuccauccuccacgagguccgccccgucaccuccggcugcuuccccaucaugcacgaccgcaccaagauccgccagcuccccaaccuccuccgcggcuacgagcacauccgccucuccacccacaacgucaucaacgccgagcgcgcccccggcggccccuaccgccucggcaccuccggcuccugccccaacgucaccucccgcuccggcuucuucgccaccauggccugggccgucccccgcgacaacaagaccgccaccaacccccucaccgucgagguccccuacaucugcaccaagggcgaggaccagaucaccgucuggggcuuccacuccgacaacaagacccagaugaagaaccucuacggcgacuccaacccccagaaguucaccuccuccgccaacggcaucaccacccacuacgucucccagaucggcggcuuccccaaccagaccgaggacggcggccucccccaguccggccgcaucgucgucgacuacaugguccagaagcccggcaagaccggcaccaucgucuaccagcgcggcguccuccucccccagaaggucuggugcgccuccggccgcuccaaggucaucaagggcucccucccccucaucggcgaggccgacugccuccacgagaaguacggcggccucaacaaguccaagcccuacuacaccggcgagcacgccaaggccaucggcaacugccccaucugggucaagaccccccucaagcucgccaacggcaccaaguaccgcccccccgccaagcuccucaaggagcgcggcuucuucggcgccaucgccggcuuccucgagggcggcugggagggcaugaucgccggcuggcacggcuacaccucccacggcgcccacggcgucgccgucgccgccgaccucaaguccacccaggaggccaucaacaagaucaccaagaaccucaacucccucuccgagcucgaggucaagaaccuccagcgccucuccggcgccauggacgagcuccacaacgagauccucgagcucgacgagaaggucgacgaccuccgcgccgacaccaucuccucccagaucgagcucgccguccuccucuccaacgagggcaucaucaacuccgaggacgagcaccuccucgcccucgagcgcaagcucaagaagaugcucggccccuccgccgucgacaucggcaacggcugcuucgagaccaagcacaagugcaaccagaccugccucgaccgcaucgccgccggcaccuucaacgccggcgaguucucccuccccaccuucgacucccucaacaucaccgccgccucccucaacgacgacggccucgacaaccacaccauccuccucuacuacuccaccgccgccuccucccucgccgucacccucaugaucgccaucuucaucgucuacauggucucccgcgacaacgucuccugcuccaucugccucuga

SEQ ID NO: 123911 - RNA, 1755 nt, Artificial Sequence
  derived and/or modified CDS sequence (opt2) from hemagglutinin__InfluenzaB__AHL91299
augaaggccaucaucguccuccucauggucgucaccuccaacgccgaccgcaucugcaccggcaucaccuccuccaacuccccccacgucgucaagaccgccacccagggcgaggucaacgucaccggcgucaucccccucaccaccacccccacccgcucccacuucgccaaccucaagggcaccaagacccgcggcaagcucugccccaccugccucaacugcaccgaccucgacgucgcccucggccgccccaugugcgucggcaccacccccuccgccaaggccuccauccuccacgagguccgccccgucaccuccggcugcuuccccaucaugcacgaccgcaccaagauccgccagcuccccaaccuccuccgcggcuacgagaagauccgccucuccacccagaacgucaucaacgccgagaaggcccccggcggccccuaccgccucggcaccuccggcuccugccccaacgccaccucccgcuccggcuucuucgccaccauggccugggccgucccccgcgacaacaacaagaccgccaccaacccccucaccgucgagguccccuacaucugcaccaaggaggaggaccagaucaccgucuggggcuuccacuccgacaacaagacccagaugaagaaccucuacggcgacuccaacccccagaaguucaccuccuccgccaacggcgucaccacccacuacgucucccagaucggcggcuuccccgaccagaccgaggacggcggccucccccaguccggccgcaucgucgucgacuacaugguccagaagcccggcaagaccggcaccaucgucuaccagcgcggcauccuccucccccagaaggucuggugcgccuccggccgcuccaaggucaucaagggcucccucccccucaucggcgaggccgacugccuccacgagaaguacggcggccucaacaaguccaagcccuacuacaccggcgagcacgccaaggccaucggcaacugccccaucugggucaagaccccccucaagcucgccaacggcaccaaguaccgcccccccgccaagcuccucaaggagcgcggcuucuucggcgccaucgccggcuuccucgagggcggcugggagggcaugaucgccggcuggcacggcuacaccucccacggcgcccacggcgucgccgucgccgccgaccucaaguccacccaggaggccaucaacaagaucaccaagaaccucaacucccucuccgagcucgaggucaagaaccuccagcgccucuccggcgccauggacgagcuccacaacgagauccucgagcucgacgagaaggucgacgaccuccgcgccgacaccaucuccucccagaucgagcucgccguccuccucuccaacgagggcaucaucaacuccgaggacgagcaccuccucgcccucgagcgcaagcucaagaagaugcucggccccuccgccgucgacaucggcaacggcugcuucgagaccaagcacaagugcaaccagaccugccucgaccgcaucgccgccggcaccuucaacgccggcgaguucucccuccccaccuucgacucccucaacaucaccgccgccucccucaacgacgacggccucgacaaccacaccauccuccucuacuacuccaccgccgccuccucccucgccgucacccucaugaucgccaucuucaucgucuacaugaucucccgcgacaacgucuccugcuccaucugccucuga

SEQ ID NO: 123912 - RNA, 1755 nt, Artificial Sequence
  derived and/or modified CDS sequence (opt2) from hemagglutinin__InfluenzaB__AHL91310
augaaggccaucaucguccuccucauggucgucaccuccaacgccgaccgcaucugcaccggcaucaccuccuccaacuccccccacgucgucaagaccgccacccagggcgaggucaacgucaccggcgucaucccccucaccaccacccccaccaagucccacuucgccaaccucaagggcaccaagacccgcggcaagcucugccccaccugccucaacugcaccgaccucgacgucgcccucggccgccccaugugcgucggcaccacccccuccgccaaggccuccauccuccacgagguccgccccgucaccuccggcugcuuccccaucaugcacgaccgcaccaagauccgccagcuccccaaccuccuccgcggcuacgagaagauccgccucuccacccagaacgucaucaacgccgagaaggcccccggcggccccuaccgccucggcaccuccggcuccugccccaacgccaccucccgcuccggcuucuucgccaccauggccugggccgucccccgcgacaacaacaagaccgccaccaacccccucaccgucgagguccccuacaucugcaccaaggaggaggaccagaucaccgucuggggcuuccacuccgacaacaagacccagaugaagaaccucuacggcgacuccaacccccagaaguucaccuccuccgccaacggcgucaccacccacuacgucucccagaucggcggcuuccccgaccagaccgaggacggcggccucccccaguccggccgcaucgucgucgacuacaugguccagaagcccggcaagaccggcaccaucgucuaccagcgcggcauccuccucccccagaaggucuggugcgccuccggccgcuccaaggucaucaagggcucccucccccucaucggcgaggccgacugccuccacgagaaguacggcggccucaacaaguccaagcccuacuacaccggcgagcacgccaaggccaucggcaacugccccaucugggucaagaccccccucaagcucgccaacggcaccaaguaccgcccccccgccaagcuccucaaggagcgcggcuucuucggcgccaucgccggcuuccucgagggcggcugggagggcaugaucgccggcuggcacggcuacaccucccacggcgcccacggcgucgccgucgccgccgaccucaaguccacccaggaggccaucaacaagaucaccaagaaccucaacucccucuccgagcucgaggucaagaaccuccagcgccucuccggcgccauggacgagcuccacaacgagauccucgagcucgacgagaaggucgacgaccuccgcgccgacaccaucuccucccagaucgagcucgccguccuccucuccaacgagggcaucaucaacuccgaggacgagcaccuccucgcccucgagcgcaagcucaagaagaugcucggccccuccgccgucgacaucggcaacggcugcuucgagaccaagcacaagugcaaccagaccugccucgaccgcaucgccgccggcaccuucaacgccggcgaguucucccuccccaccuucgacucccucaacaucaccgccgccucccucaacgacgacggccucgacaaccacaccauccuccucuacuacuccaccgccgccuccucccucgccgucacccucaugaucgccaucuucaucgucuacaugaucucccgcgacaacgucuccugcuccaucugccucuga

SEQ ID NO: 123913 - RNA, 1755 nt, Artificial Sequence
  derived and/or modified CDS sequence (opt2) from hemagglutinin__InfluenzaB__AHL91321
augaaggccaucaucguccuccucauggucgucaccuccaacgccgaccgcaucugcaccggcaucaccuccuccaacuccccccacgucgucaagaccgccacccagggcgaggucaacgucaccggcgucaucccccucaccaccacccccaccaagucccacuucgccaaccucaagggcaccaagacccgcggcaagcucugccccaccugccucaacugcaccgaccucgacgucgcccucggccgccccaugugcgucggcaccacccccuccgccaaggccuccauccuccacgagguccgccccgucaccuccggcugcuuccccaucaugcacgaccgcaccaagauccgccagcuccccaaccuccuccgcggcuacgagaagauccgccucuccacccagaacgucaucaacgccgagaaggcccccggcggccccuaccgccucggcaccuccggcuccugccccaacgccaccucccgcuccggcuucuucgccaccauggccugggccgucccccgcgacaacaacaagaccgccaccaacccccucaccgucgagguccccuacaucugcaccaaggaggaggaccagaucaccgucuggggcuuccacuccgacaacaagacccagaugaagaaccucuacggcgacuccaacccccagaaguucaccuccuccgccaacggcgucaccacccacuacgucucccagaucggcggcuuccccgaccagaccgaggacggcggccucccccaguccggccgcaucgucgucgacuacaugguccagaagcccggcaagaccggcaccaucgucuaccagcgcggcguccuccucccccagaaggucuggugcgccuccggccgcuccaaggucaucaagggcucccucccccucaucggcgaggccgacugccuccacgagaaguacggcggccucaacaaguccaagcccuacuacaccggcgagcacgccaaggccaucggcaacugccccaucugggucaagaccccccucaagcucgccaacggcaccaaguaccgcccccccgccaagcuccucaaggagaagggcuucuucggcgccaucgccggcuuccucgagggcggcugggagggcaugaucgccggcuggcacggcuacaccucccacggcgcccacggcgucgccgucgccgccgaccucaaguccacccaggaggccaucaacaagaucaccaagaaccucaacucccucuccgagcucgaggucaagaaccuccagcgccucuccggcgccauggacgagcuccacaacgagauccucgagcucgacgagaaggucgacgaccuccgcgccgacaccaucuccucccagaucgagcucgccguccuccucuccaacgagggcaucaucaacuccgaggacgagcaccuccucgcccucgagcgcaagcucaagaagaugcucggccccuccgccgucgacaucggcaacggcugcuucgagaccaagcacaagugcaaccagaccugccucgaccgcaucgccgccggcaccuucaacgccggcgaguucucccuccccaccuucgacucccucaacaucaccgccgccucccucaacgacgacggccucgacaaccacaccauccuccucuacuacuccaccgccgccuccucccucgccgucacccucaugaucgccaucuucaucgucuacauggucucccgcgacaacgucuccugcuccaucugccucuga

SEQ ID NO: 123914 - RNA, 1755 nt, Artificial Sequence; identical to SEQ ID NO: 123912
  derived and/or modified CDS sequence (opt2) from hemagglutinin__InfluenzaB__AHL91332

SEQ ID NO: 123915 - RNA, 1755 nt, Artificial Sequence; identical to SEQ ID NO: 123912
  derived and/or modified CDS sequence (opt2) from hemagglutinin__InfluenzaB__AHL91343

SEQ ID NO: 123916 - RNA, 1755 nt, Artificial Sequence; identical to SEQ ID NO: 123912
  derived and/or modified CDS sequence (opt2) from hemagglutinin__InfluenzaB__AHL91354

SEQ ID NO: 123917 - RNA, 1755 nt, Artificial Sequence; identical to SEQ ID NO: 122515
  derived and/or modified CDS sequence (opt2) from hemagglutinin__InfluenzaB__AHL91365

SEQ ID NO: 123918 - RNA, 1755 nt, Artificial Sequence
  derived and/or modified CDS sequence (opt2) from hemagglutinin__InfluenzaB__AHL91376
augaaggccaucaucguccuccucauggucgucaccuccaacgccgaccgcaucugcaccggcaucaccuccuccaacuccccccacgucgucaagaccgccacccagggcgaggucaacgucaccggcgucaucccccucaccgccacccccaccaagucccacuucgccaaccucaagggcaccaagacccgcggcaagcucugccccaccugccucaacugcaccgaccucgacgucgcccucggccgccccaugugcgucggcgucacccccuccgccaaggccuccauccuccacgagguccgccccgucaccuccggcugcuuccccaucaugcacgaccgcaccaagauccgccagcuccccaaccuccuccgcggcuacgagaagauccgccucuccacccagaacgucaucaacgccgagaaggcccccggcggccccuaccgccucggcaccuccggcuccugccccaacgccaccucccgcuccggcuucuucgccaccauggccugggccgucccccgcgacaacaacaagaccgccaccaacccccucaccgucgaggucccccacaucugcaccaaggaggaggaccagaucaccgucuggggcuuccacuccgacaacaagacccagaugaagaaccucuacggcgacuccaacccccagaaguucaccuccuccgccaacggcgucaccacccacuacgucucccagaucggcggcuuccccgaccagaccgaggacggcggccucccccaguccggccgcaucgucgucgacuacaugguccagaagcccggcaagaccggcaccaucgucuaccagcgcggcauccuccucccccagaaggucuggugcgccuccggccgcuccaaggucaucaagggcucccucccccucaucggcgaggccgacugccuccacgagaaguacggcggccucaacaaguccaagcccuacuacaccggcgagcacgccaaggccaucggcaacugccccaucugggucaagaccccccucaagcucgccaacggcaccaaguaccgcccccccgccaagcuccucaaggagcgcggcuucuucggcgccaucgccggcuuccucgagggcggcugggagggcaugaucgccggcuggcacggcuacaccucccacggcgcccacggcgucgccgucgccgccgaccucaaguccacccaggaggccaucaacaagaucaccaagaaccucaacucccucuccgagcucgaggucaagaaccuccagcgccucuccggcgccauggacgagcuccacaacgagauccucgagcucgacgagaaggucgacgaccuccgcgccgacaccaucuccucccagaucgagcucgccguccuccucuccaacgagggcaucaucaacuccgaggacgagcaccuccucgcccucgagcgcaagcucaagaagaugcucggccccuccgccgucgacaucggcaacggcugcuucgagaccaagcacaagugcaaccagaccugccucgaccgcaucgccgccggcaccuucaacgccggcgaguucucccuccccaccuucgacucccucaacaucaccgccgccucccucaacgacgacggccucgacaaccacaccauccuccucuacuacuccaccgccgccuccucccucgccgucacccucaugaucgccaucuucaucgucuacaugaucucccgcgacaacgucuccugcuccaucugccucuga

SEQ ID NO: 123919 - RNA, 1755 nt, Artificial Sequence
  derived and/or modified CDS sequence (opt2) from hemagglutinin__InfluenzaB__AHL91387
augaaggccaucaucguccuccucauggucgucaccuccaacgccgaccgcaucugcaccggcaucaccuccuccaacuccccccacgucgucaagaccgccacccagggcgaggucaacgucaccggcgucaucccccucaccaccacccccgccaagucccacuucgccaaccucaagggcaccaagacccgcggcaagcucugccccaccugccucaacugcaccgaccucgacgucgcccucggccgccccaugugcgucggcgucacccccuccgccaaggccuccauccuccacgagguccgccccgucaccuccggcugcuuccccaucaugcacgaccgcaccaagauccgccagcuccccaaccuccuccgcggcuacgagaagauccgccucuccacccagaacgucaucaacgccgagaaggcccccggcggccccuaccgccucggcaccuccggcuccugccccaacgccaccucccgcuccggcuucuucgccaccauggccugggccgucccccgcgacaacaacaagaccgccaccaacccccucaccgucgaggucccccacaucugcaccaaggaggaggaccagaucaccgucuggggcuuccacuccgacaacaagacccagaugaagaaccucuacggcgacuccaacccccagaaguucaccuccuccgccaacggcgucaccacccacuacgucucccagaucggcggcuuccccgaccagaccgaggacggcggccucccccaguccggccgcaucgucgucgacuacaugguccagaagcccggcaagaccggcaccaucgucuaccagcgcggcauccuccucccccagaaggucuggugcgccuccggccgcuccaaggucaucaagggcucccucccccucaucggcgaggccgacugccuccacgagaaguacggcggccucaacaaguccaagcccuacuacaccggcgagcacgccaaggccaucggcaacugccccaucugggucaagaccccccucaagcucgccaacggcaccaaguaccgcccccccgccaagcuccucaaggagcgcggcuucuucggcgccaucgccggcuuccucgagggcggcugggagggcaugaucgccggcuggcacggcuacaccucccacggcgcccacggcgucgccgucgccgccgaccucaaguccacccaggaggccaucaacaagaucaccaagaaccucaacucccucuccgagcucgaggucaagaaccuccagcgccucuccggcgccauggacgagcuccacaacgagauccucgagcucgacgagaaggucgacgaccuccgcgccgacaccaucuccucccagaucgagcucgccguccuccucuccaacgagggcaucaucaacuccgaggacgagcaccuccucgcccucgagcgcaagcucaagaagaugcucggccccuccgccgucgacaucggcaacggcugcuucgagaccaagcacaagugcaaccagaccugccucgaccgcaucgccgccggcaccuucaacgccggcgaguucucccuccccaccuucgacucccucaacaucaccgccgccucccucaacgacgacggccucgacaaccacaccauccuccucuacuacuccaccgccgccuccucccucgccgucacccucaugaucgccaucuucaucgucuacaugaucucccgcgacaacgucuccugcuccaucugccucuga

SEQ ID NO: 123920 - RNA, 1755 nt, Artificial Sequence
  derived and/or modified CDS sequence (opt2) from hemagglutinin__InfluenzaB__AHL91409
augaaggccaucaucguccuccucauggucgucaccuccaacgccgaccgcaucugcaccggcaucaccuccuccgacuccccccacgucgucaagaccgccacccagggcgaggucaacgucaccggcgccaucccccucaccaccacccccaccaaguccuacuucgccaaccucaagggcaccaagacccgcggcaagcucugccccaccugccucaacugcaccgaccucgacgucgcccucggccgccccaugugcgucggcaucacccccuccgccaaggccuccauccuccacgagguccgccccgucaccuccggcugcuuccccaucaugcacgaccgcaccaagauccgccagcuccccaaccuccuccgcggcuacgagaagauccgccucuccacccagaacgucaucaacgccgagaaggcccccggcggccccuaccgccucggcaccuccggcuccugccccaacgccaccucccgcuccggcuucuucgccaccauggccugggccgucccccgcgacaacaacaagaccgccaccaacccccucaccgucgaggucccccacaucugcaccaaggaggaggaccagaucaccgucuggggcuuccacuccgacaacaagacccagaugaagaaccucuacggcgacuccaacccccagaaguucaccuccuccgccaacggcaucaccacccacuacgucucccagaucggcggcuuccccgaccagaccgaggacggcggccucccccaguccggccgcaucgucgucgacuacaugguccagaagcccggcaagaccggcaccaucgucuaccagcgcggcauccuccucccccagaaggucuggugcgccuccggccgcuccaaggucaucaagggcucccucccccucaucggcgaggccgacugccuccacgagaaguacggcggccucaacaaguccaagcccuacuacaccggcgagcacgccaaggccaucggcaacugccccaucugggucaagaccccccucaagcucgccaacggcaccaaguaccgcccccccgccaagcuccucaaggagcgcggcuucuucggcgccaucgccggcuuccucgagggcggcugggagggcauggucgccggcuggcacggcuacaccucccacggcgcccacggcgucgccgucgccgccgaccucaaguccacccaggaggccaucaacaagaucaccaagaaccucaacucccucuccgagcucgaggucaagaaccuccagcgccucuccggcgccauggacgagcuccacaacgagauccucgagcucgacgagaaggucgacgaccuccgcgccgacaccaucuccucccagaucgagcucgccguccuccucuccaacgagggcaucaucaacuccgaggacgagcaccuccucgcccucgagcgcaagcucaagaagaugcucggccccuccgccgucgacaucggcaacggcugcuucgagaccaagcacaagugcaaccagaccugccucgaccgcaucgccgccggcaccuucaacgccggcgaguucucccuccccaccuucgacucccucaacaucaccgccgccucccucaacgacgacggccucgacaaccacaccauccuccucuacuacuccaccgccgccuccucccucgccgucacccucaugaucgccaucuucaucgucuacaugaucucccgcgacaacgucuccugcuccaucugccucuga

SEQ ID NO: 123921 - RNA, 1755 nt, Artificial Sequence
  derived and/or modified CDS sequence (opt2) from hemagglutinin__InfluenzaB__AHL91431
augaaggccaucaucguccuccucauggucgucaccuccaacgccgaccgcaucugcaccggcaucaccuccuccaacuccccccacgucgucaagaccgccacccagggcgaggucaacgucaccggcgccaucccccucaccaccacccccaccaagucccacuucgccaaccucaagggcaccaagacccgcggcaagcucugccccaccugccucaacugcaccgaccucgacgucgcccucggccgccccaugugcgucggcaucacccccuccgccaaggccuccauccuccacgagguccgccccgucaccuccggcugcuuccccaucaugcacgaccgcaccaagauccgccagcuccccaaccuccuccgcggcuacgagaagauccgccucuccacccagaacgucaucaacgccgagaaggcccccggcggccccuaccgccucggcaccuccggcuccugccccaacgccaccuccaaguccggcuucuucgccaccauggccugggccgucccccgcgacaacaacaagaccgccaccaacccccucaccgucgaggucccccacaucugcaccaaggaggaggaccagaucaccgucuggggcuuccacuccgacaacaagacccagaugaagaaccucuacggcgacuccaacccccagaaguucaccuccuccgccaacggcaucaccacccacuacgucucccagaucggcggcuuccccgaccagaccgaggacggcggccucccccaguccggccgcaucgucgucgacuacaugguccagaagcccggcaagaccggcaccaucgucuaccagcgcggcauccuccucccccagaaggucuggugcgccuccggccgcuccaaggucaucaagggcucccucccccucaucggcgaggccgacugccuccacgagaaguacggcggccucaacaaguccaagcccuacuacaccggcgagcacgccaaggccaucggcaacugccccaucugggucaagaccccccucaagcucgccaacggcaccaaguaccgcccccccgccaagcuccucaaggagcgcggcuucuucggcgccaucgccggcuuccucgagggcggcugggagggcaugaucgccggcuggcacggcuacaccucccacggcgcccacggcgucgccgucgccgccgaccucaaguccacccaggaggccaucaacaagaucaccaagaaccucaacuuccucuccgagcucgaggucaagaaccuccagcgccucuccggcgccauggacgagcuccacaacgagauccucgagcucgacgagaaggucgacgaccuccgcgccgacaccaucuccucccagaucgagcucgccguccuccucuccaacgagggcaucaucaacuccgaggacgagcaccuccucgcccucgagcgcaagcucaagaagaugcucggccccuccgccgucgacaucggcaacggcugcuucgagaccaagcacaagugcaaccagaccugccucgaccgcaucgccgccggcaccuucaacgccggcgaguucucccuccccaccuucgacucccucaacaucaccgccgccucccucaacgacgacggccucgacaaccacaccauccuccucuacuacuccaccgccgccuccucccucgccgucacccucaugaucgccaucuucaucgucuacaugaucucccgcgacaacgucuccugcuccaucugccucuga

SEQ ID NO: 123922 - RNA, 1755 nt, Artificial Sequence
  derived and/or modified CDS sequence (opt2) from hemagglutinin__InfluenzaB__AHL91442
augaaggccaucaucguccuccucauggucgucaccuccaacgccgaccgcaucugcaccggcaucaccuccuccaacuccccccacgucgucaagaccgccacccagggcgaggucaacgucaccggcgccaucccccucaccaccacccccaccaagucccacuucgccaaccucaagggcaccaagacccgcggcaagcucugccccaccugccucaacugcaccgaccucgacgucgcccucggccgccccaugugcgucggcaucacccccuccgccaaggccuccauccuccacgagguccgccccgucaccuccggcugcuuccccaucaugcacgaccgcaccaagauccgccagcuccccaaccuccuccgcggcuacgagaagauccgccucuccacccagaacgucaucaacgccgagaccgcccccggcggccccuaccgccucggcaccuccggcuccugccccaacgccaccuccaaguccggcuucuucgccaccauggccugggccgucccccgcgacaacaacaagaccgccaccaacccccucaccgucgaggucccccacaucugcaccaaggaggaggaccagaucaccgucuggggcuuccacuccgacaacaagacccagaugaagaaccucuacggcgacuccaacccccagaaguucaccuccuccgccaacggcaucaccacccacuacgucucccagaucggcggcuuccccgaccagaccgaggacggcggccucccccaguccggccgcaucgucgucgacuacaugguccagaagcccggcaagaccggcaccaucgucuaccagcgcggcauccuccucccccagaaggucuggugcgccuccggccgcuccaaggucaucaagggcucccucccccucaucggcgaggccgacugccuccacgagaaguacggcggccucaacaaguccaagcccuacuacaccggcgagcacgccaaggccaucggcaacugccccaucugggucaagaccccccucaagcucgccaacggcaccaaguaccgcccccccgccaagcuccucaaggagcgcggcuucuucggcgccaucgccggcuuccucgagggcggcugggagggcaugaucgccggcuggcacggcuacaccucccacggcgcccacggcgucgccgucgccgccgaccucaaguccacccaggaggccaucaacaagaucaccaagaaccucaacucccucuccgagcucgaggucaagaaccuccagcgccucuccggcgccauggacgagcuccacaacgagauccucgagcucgacgagaaggucgacgaccuccgcgccgacaccaucuccucccagaucgagcucgccguccuccucuccaacgagggcaucaucaacuccgaggacgagcaccuccucgcccucgagcgcaagcucaagaagaugcucggccccuccgccgucgacaucggcaacggcugcuucgagaccaagcacaagugcaaccagaccugccucgaccgcaucgccgccggcaccuucaacgccggcgaguucucccuccccaccuucgacucccucaacaucaccgccgccucccucaacgacgacggccucgacaaccacaccauccuccucuacuacuccaccgccgccuccucccucgccgucacccucaugaucgccaucuucaucgucuacaugaucucccgcgacaacgucuccugcuccaucugccucuga

SEQ ID NO: 123923 - RNA, 1755 nt, Artificial Sequence
  derived and/or modified CDS sequence (opt2) from hemagglutinin__InfluenzaB__AHL91453
augaaggccaucaucguccuccucauggucgucaccuccaacgccgaccgcaucugcaccggcaucaccuccuccaacuccccccacgucgucaagaccgccacccagggcgaggucaacgucaccggcgccaucccccucaccaccacccccaccaagucccacuucgccaaccucaagggcaccaagacccgcggcaagcucugccccaccugccucaacugcaccgaccucgacgucgcccucggccgccccaugugcgucggcaucacccccuccgccaaggccuccauccuccacgagguccgccccgucaccuccggcugcuuccccaucaugcacgaccgcaccaagauccgccagcuccccaaccuccuccgcggcuacgagaagauccgccucuccacccagaacgucaucaacgccgagaaggcccccggcggccccuaccgccucggcaccuccggcuccugccccaacgccaccuccaaguccggcuucuucgccaccauggccugggccgucccccgcgacaacaacaagaccgccaccaacccccucaccaucgaggucccccacgucugcaccaaggaggaggaccagaucaccgucuggggcuuccacuccgacaacaagacccagaugaagaaccucuacggcgacuccaacccccagaaguucaccuccuccgccaacggcaucaccacccacuacgucucccagaucggcggcuuccccgaccagaccgaggacggcggccucccccaguccggccgcaucgucgucgacuacaugguccagaagcccggcaagaccggcaccaucgucuaccagcgcggcauccuccucccccagaaggucuggugcgccuccggccgcuccaaggucaucaagggcucccucccccucaucggcgaggccgacugccuccacgagaaguacggcggccucaacaaguccaagcccuacuacaccggcgagcacgccaaggccaucggcaacugccccaucugggucaagaccccccucaagcucgccaacggcaccaaguaccgcccccccgccaagcuccucaaggagcgcggcuucuucggcgccaucgccggcuuccucgagggcggcugggagggcaugaucgccggcuggcacggcuacaccucccacggcgcccacggcgucgccgucgccgccgaccucaaguccacccaggaggccaucaacaagaucaccaagaaccucaacucccucuccgagcucgaggucaagaaccuccagcgccucuccggcgccauggacgagcuccacaacgagauccucgagcucgacgagaaggucgacgaccuccgcgccgacaccaucuccucccagaucgagcucgccguccuccucuccaacgagggcaucaucaacuccgaggacgagcaccuccucgcccucgagcgcaagcucaagaagaugcucggccccuccgccgucgacaucggcaacggcugcuucgagaccaagcacaagugcaaccagaccugccucgaccgcaucgccgccggcaccuucaacgccggcgaguucucccuccccaccuucgacucccucaacaucaccgccgccucccucaacgacgacggccucgacaaccacaccauccuccucuacuacuccaccgccgccuccucccucgccgucacccucaugaucgccaucuucaucgucuacaugaucucccgcgacaacgucuccugcuccaucugccucuga

SEQ ID NO: 123924 - RNA, 1755 nt, Artificial Sequence; identical to SEQ ID NO: 122441
  derived and/or modified CDS sequence (opt2) from hemagglutinin__InfluenzaB__AHL91464

SEQ ID NO: 123925 - RNA, 1755 nt, Artificial Sequence; identical to SEQ ID NO: 122547
  derived and/or modified CDS sequence (opt2) from hemagglutinin__InfluenzaB__AHL91475

SEQ ID NO: 123926 - RNA, 1755 nt, Artificial Sequence; identical to SEQ ID NO: 123922
  derived and/or modified CDS sequence (opt2) from hemagglutinin__InfluenzaB__AHL91486

SEQ ID NO: 123927 - RNA, 1755 nt, Artificial Sequence; identical to SEQ ID NO: 123922
  derived and/or modified CDS sequence (opt2) from hemagglutinin__InfluenzaB__AHL91497

SEQ ID NO: 123928 - RNA, 1755 nt, Artificial Sequence; identical to SEQ ID NO: 123922
  derived and/or modified CDS sequence (opt2) from hemagglutinin__InfluenzaB__AHL91530

SEQ ID NO: 123929 - RNA, 1755 nt, Artificial Sequence; identical to SEQ ID NO: 122441
  derived and/or modified CDS sequence (opt2) from hemagglutinin__InfluenzaB__AHL91541

SEQ ID NO: 123930 - RNA, 1755 nt, Artificial Sequence; identical to SEQ ID NO: 123922
  derived and/or modified CDS sequence (opt2) from hemagglutinin__InfluenzaB__AHL91552

SEQ ID NO: 123931 - RNA, 1755 nt, Artificial Sequence; identical to SEQ ID NO: 123922
  derived and/or modified CDS sequence (opt2) from hemagglutinin__InfluenzaB__AHL91574

SEQ ID NO: 123932 - RNA, 1755 nt, Artificial Sequence
  derived and/or modified CDS sequence (opt2) from hemagglutinin__InfluenzaB__AHL91585
augaaggccaucaucguccuccucauggucgucaccuccaacgccgaccgcaucugcaccggcaucaccuccuccaacuccccccacgucgucaagaccgccacccagggcgaggucaacgucaccggcgccaucccccucaccaccacccccaccaagucccacuucgccaaccucaagggcaccaagacccgcggcaagcucugccccaccugccucaacugcaccgaccucgacgucgcccucggccgccccaugugcgucggcaucacccccuccgccaaggccuccauccuccacgagguccgccccgucaccuccggcugcuuccccaucaugcacgaccgcaccaagauccgccagcuccccaaccuccuccgcggcuacgagaagauccgccucuccacccagaacgucaucaacgccgagaaggcccccggcggccccuaccgccucggcaccuccggcuccugccccaacgccaccuccaaguccggcuucuucgccaccauggccugggccgucccccgcgacaacaacaagaccgccaccaacccccucaccgucgaggucccccacaucugcaccaaggaggaggaccagaucaccgucuggggcuuccacuccgacaacaagacccagaugaagaaccucuacggcgacuccaacccccagaaguucaccuccuccgccaacggcaugaccacccacuacgucucccagaucggcggcuuccccgaccagaccgaggacggcggccucccccaguccggccgcaucgucgucgacuacaugguccagaagcccggcaagaccggcaccaucgucuaccagcgcggcauccuccucccccagaaggucuggugcgccuccggccgcuccaaggucaucaagggcucccucccccucaucggcgaggccgacugccuccacgagaaguacggcggccucaacaaguccaagcccuacuacaccggcgagcacgccaaggccaucggcaacugccccaucugggucaagaccccccucaagcucgccaacggcaccaaguaccgcccccccgccaagcuccucaaggagcgcggcuucuucggcgccaucgccggcuuccucgagggcggcugggagggcaugaucgccggcuggcacggcuacaccucccacggcgcccacggcgucgccgucgccgccgaccucaaguccacccaggaggccaucaacaagaucaccaagaaccucaacucccucuccgagcucgaggucaagaaccuccagcgccucuccggcgccauggacgagcuccacaacgagauccucgagcucgacgagaaggucgacgaccuccgcgccgacaccaucuccucccagaucgagcucgccguccuccucuccaacgagggcaucaucaacuccgaggacgagcaccuccucgcccucgagcgcaagcucaagaagaugcucggccccuccgccgucgacaucggcaacggcugcuucgagaccaagcacaagugcaaccagaccugccucgaccgcaucgccgccggcaccuucaacgccggcgaguucucccuccccaccuucgacucccucaacaucaccgccgccucccucaacgacgacggccucgacaaccacaccauccuccucuacuacuccaccgccgccuccucccucgccgucacccucaugaucgccaucuucaucgucuacaugaucucccgcgacaacgucuccugcuccaucugccucuga

SEQ ID NO: 123933 - RNA, 1755 nt, Artificial Sequence
  derived and/or modified CDS sequence (opt2) from hemagglutinin__InfluenzaB__AHL91596
augaaggccaucaucguccuccucauggucgucaccuccaacgccgaccgcaucugcaccggcaucaccuccuccaacuccccccacgucgucaagaccgccacccagggcgaggucaacgucaccggcgccaucccccucaccaccacccccaccaagucccacuucgccaaccucaagggcaccaagacccgcggcaagcucugccccaccugccucaacugcaccgaccucgacgucgcccucggccgccccaugugcgucggcaucacccccuccgccaaggccuccauccuccacgagguccgccccgucaccuccggcugcuuccccaucaugcacgaccgcaccaagauccgccagcuccccaaccuccuccgcggcuacgagaagauccgccucuccacccagaacgucaucaacgccgagaaggcccccggcggccccuaccgccucggcaccuccggcuccugccccaacgccaccuccaaguccggcuucuucgccaccauggccugggccgucccccgcgacaacaacaagaccgccaccaacccccucaccgucgaggucccccacaucugcaccaaggaggaggaccagaucaccgucuggggcuuccacuccgacaacaagacccagaugaagaaccucuacggcgacuccaacccccagaaguucaccuccuccgccaacggcaucaccacccacuacgucucccagaucggcggcuuccccgaccagaccgaggacggcggccucccccaguccggccgcaucgucgucgacuacaugguccagaagcccggcaagaccggcaccaucgucuaccagcgcggcauccuccucccccagaaggucuggugcgccuccggccgcuccaaggucaucaagggcucccucccccucaucggcgaggccgacugccuccacgagaaguacggcggccucaacaaguccaagcccuacuacaccggcgagcacgccaaggccaucggcaacugccccaucugggucaagaccccccucaagcucgccaacggcaccaaguaccgcccccccgccaagauccucaaggagcgcggcuucuucggcgccaucgccggcuuccucgagggcggcugggagggcaugaucgccggcuggcacggcuacaccucccacggcgcccacggcgucgccgucgccgccgaccucaaguccacccaggaggccaucaacaagaucaccaagaaccucaacucccucuccgagcucgaggucaagaaccuccagcgccucuccggcgccauggacgagcuccacaacgagauccucgagcucgacgagaaggucgacgaccuccgcgccgacaccaucuccucccagaucgagcucgccguccuccucuccaacgagggcaucaucaacuccgaggacgagcaccuccucgcccucgagcgcaagcucaagaagaugcucggccccuccgccgucgacaucggcaacggcugcuucgagaccaagcacaagugcaaccagaccugccucgaccgcaucgccgccggcaccuucaacgccggcgaguucucccuccccaccuucgacucccucaacaucaccgccgccucccucaacgacgacggccucgacaaccacaccauccuccucuacuacuccaccgccgccuccucccucgccgucacccucaugaucgccaucuucaucgucuacaugaucucccgcgacaacgucuccugcuccaucugccucuga

SEQ ID NO: 123934 - RNA, 1755 nt, Artificial Sequence; identical to SEQ ID NO: 123933
  derived and/or modified CDS sequence (opt2) from hemagglutinin__InfluenzaB__AHL91607

SEQ ID NO: 123935 - RNA, 1755 nt, Artificial Sequence
  derived and/or modified CDS sequence (opt2) from hemagglutinin__InfluenzaB__AHL91618
augaaggccaucaucguccuccucauggucgucaccuccaacgccgaccgcaucugcaccggcaucaccuccuccaacuccccccacgucgucaagaccgccacccagggcgaggucaacgucaccggcgccaucccccucaccaccacccccaccaagucccacuucgccaaccucaagggcaccaagacccgcggcaagcucugccccaccugccucaacugcaccgaccucgacgucgcccucggccgccccaugugcgucggcaucacccccuccgccaaggccuccauccuccacgagguccgccccgucaccuccggcugcuuccccaucaugcacgaccgcaccaagauccgccagcuccccaaccuccuccgcggcuacgagaagauccgccucuccacccagaacgucaucaacgccgagaccgcccccggcggccccuaccgccucggcaccuccggcuccugccccaacgccaccuccaaguccggcuucuucgccaccauggccugggccgucccccgcgacaacaacaagaccgccaccaacccccucaccgucgaggucccccacaucugcaccaaggaggaggaccagaucaccgucuggggcuuccacuccgacaacaagacccagaugaagaaccucuacggcgacuccaacccccagaaguucaccuccuccgccaacggcaucaccacccacuacgucucccagaucggcggcuuccccgaccagaccgaggacggcggccucccccaguccggccgcaucgucgucgacuacaugguccagaagcccggcaagaccggcaccaucgucuaccagcgcggcauccuccucccccagaaggucuggugcgccuccggccgcuccaaggucaucaagggcucccucccccucaucggcgaggccgacugccuccacgagaaguacggcggccucaacaaguccaagcccuacuacaccggcgagcacgccaaggccaucggcaacugccccaucugggucaagaccccccucaagcucgccaacggcaccaaguaccgcccccccgccaagcuccucaaggagcgcggcuucuucggcgccaucgccggcuuccucgagggcggcugggagggcaugaucgccggcuggcacggcuacaccucccacggcgcccacggcgucgccgucgccgccgaccucaaguccacccaggaggccaucaacaagaucaccaagaaccucaacucccucuccgagcucgaggucaagaaccuccagcgccucuccggcgccauggacgagcuccacaacgagauccucgagcucgacgagaaggucgacgaccuccgcgccgacaccaucuccucccagaucgagcucgccguccuccucuccaacgagggcaucaucaacuccgaggacgagcaccuccucgcccucgagcgcaagcucaagaagaugcucggccccuccgccgucgacaucggcaacggcugcuucgagaccaagcacaagugcaaccagaccugccucgaccgcaucgccgccggcaccuucaacgucggcgaguucucccuccccaccuucgacucccucaacaucaccgccgccucccucaacgacgacggccucgacaaccacaccauccuccucuacuacuccaccgccgccuccucccucgccgucacccucaugaucgccaucuucaucgucuacaugaucucccgcgacaacgucuccugcuccaucugccucuga

SEQ ID NO: 123936 - RNA, 1755 nt, Artificial Sequence
  derived and/or modified CDS sequence (opt2) from hemagglutinin__InfluenzaB__AHL91629
augaaggccaucaucguccuccucauggucgucaccuccaacgccgaccgcaucugcaccggcaucaccuccuccaacuccccccacgucgucaagaccgccacccagggcgaggucaacgucaccggcgccaucccccucaccaccacccccaccaagucccacuucgccaaccucaagggcaccaagacccgcggcaagcucugccccaccugcuucaacugcaccgaccucgacgucgcccucggccgccccaugugcgucggcaucacccccuccgccaaggccuccauccuccacgagguccgccccgucaccuccggcugcuuccccaucaugcacgaccgcaccaagauccgccagcuccccaaccuccuccgcggcuacgagaagauccgccucuccacccagaacgucaucgacgccgagaaggcccccggcggccccuacaagcucggcaccuccggcuccugccccaacgccaccuccaaguccggcuucuucgccaccauggccugggccgucccccgcgacaacaacaagaccgccaccaacccccucaccgucgaggucccccacaucugcaccaaggaggaggaccagaucaccgucuggggcuuccacuccgacaacaagacccagaugaagaaccucuacggcgacuccaacccccagaaguucaccuccuccgccaacggcaucaccacccacuacgucucccagaucggcggcuuccccgaccagaccgaggacggcggccucccccaguccggccgcaucgucgucgacuacaugguccagaagcccggcaagaccggcaccaucgucuaccagcgcggcauccuccucccccagaaggucuggugcgccuccggccgcuccaaggucaucaagggcucccucccccucaucggcgaggccgacugccuccacgagaaguacggcggccucaacaaguccaagcccuacuacaccggcgagcacgccaaggccaucggcaacugccccaucugggucaagaccccccucaagcucgccaacggcaccaaguaccgcccccccgccaagcuccucaaggagcgcggcuucuucggcgccaucgccggcuuccucgagggcggcugggagggcaugaucgccggcuggcacggcuacaccucccacggcgcccacggcgucgccgucgccgccgaccucaaguccacccaggaggccaucaacaagaucaccaagaaccucaacucccucuccgagcucgaggucaagaaccuccagcgccucuccggcgccauggacgagcuccacaacgagauccucgagcucgacgagaaggucgacgaccuccgcgccgacaccaucuccucccagaucgagcucgccguccuccucuccaacgagggcaucaucaacuccgaggacgagcaccuccucgcccucgagcgcaagcucaagaagaugcucggccccuccgccgucgacaucggcaacggcugcuucgagaccaagcacaagugcaaccagaccugccucgaccgcaucgccgccggcaccuucaacgccggcgaguucucccuccccaccuucgacucccucaacaucaccgccgccucccucaacgacgacggccucgacaaccacaccauccuccucuacuacuccaccgccgccuccucccucgccgucacccucaugaucgccaucuucaucgucuacaugaucucccgcgacaacgucuccugcuccaucugccucuga

SEQ ID NO: 123937 - RNA, 1755 nt, Artificial Sequence; identical to SEQ ID NO: 123936
  derived and/or modified CDS sequence (opt2) from hemagglutinin__InfluenzaB__AHL91640

SEQ ID NO: 123938 - RNA, 1755 nt, Artificial Sequence; identical to SEQ ID NO: 122443
  derived and/or modified CDS sequence (opt2) from hemagglutinin__InfluenzaB__AHL91651

SEQ ID NO: 123939 - RNA, 1752 nt, Artificial Sequence
  derived and/or modified CDS sequence (opt2) from hemagglutinin__InfluenzaB__AHL91662
augaaggccaucaucguccuccucauggucgucaccuccaacgccgaccgcaucugcaccggcaucaccuccuccaacuccccccacgucgucaagaccgccacccagggcgaggucaacgucaccggcgccaucccccucaccaccacccccaccaagucccacuucgccaaccucaagggcaccaagacccgcggcaagcucugccccaccugccucaacugcaccgaccucgacgucgcccucggccgccccaugugcgucggcaucacccccuccgccaaggccuccauccuccacgagguccgccccgucaccuccggcugcuuccccaucaugcacgaccgcaccaagauccgccagcuccccaaccuccuccgcggcuacgagaagauccgccucuccacccagaacgucaucaacgccgagaccgcccccggcggccccuaccgccucggcaccuccggcuccugccccaacgccaccuccaaguccggcuucuucgccaccauggccugggccgucccccgcgacaacaacaagaccgccaccaacccccucaccgucgaggucccccacaucugcaccaaggaggaggaccagaucaccgucuggggcuuccacuccgacaacaagacccagaugaagaaccucuacggcgacuccaacccccagaaguucaccuccuccgccaacggcaucaccacccacuacgucucccagaucggcggcuuccccgaccagaccgaggacggcggccucccccaguccggccgcaucgucgucgacuacaugguccagaagcccggcaagaccggcaccaucgucuaccagcgcggcauccuccucccccagaaggucuggugcgccuccggccgcuccaaggucaucaagggcucccucccccucaucggcgaggccgacugccuccacgagaaguacggcggccucaacaaguccaagcccuacuacaccggcgagcacgccaaggccaucggcaacugccccaucugggucaagaccccccucaagcucgccaacggcaccaaguaccgcccccccgccaagcuccucaaggagcgcggcuucuucggcgccaucgccggcuuccucgagggcggcugggagggcaugaucgccggcuggcacggcuacaccucccacggcgcccacggcgucgccgucgccgccgaccucaaguccacccaggaggccaucaacaagaucaccaagaaccucaacucccucuccgagcucgaggucaagaaccuccagcgccucuccggcgccauggacgagcuccacaacgagauccucgagcucgacgagaaggucgacgaccuccgcgccgacaccaucuccucccagaucgagcucgccguccuccucuccaacgagggcaucaucaacuccgaggacgagcaccuccucgcccucgagcgcaagcucaagaagaugcucggccccuccgccgucgacaucggcaacggcugcuucgagaccaagcacaagugcaaccagaccugccucgaccgcaucgccgccggcaccuucaacgccggcgaguucucccuccccaccuucgacucccucaacaucaccgccgccucccucaacgacggccucgacaaccacaccauccuccucuacuacuccaccgccgccuccucccucgccgucacccucaugaucgccaucuucaucgucuacaugaucucccgcgacaacgucuccugcuccaucugccucuga

SEQ ID NO: 123940 - RNA, 1755 nt, Artificial Sequence; identical to SEQ ID NO: 122547
  derived and/or modified CDS sequence (opt2) from hemagglutinin__InfluenzaB__AHL91673

SEQ ID NO: 123941 - RNA, 1755 nt, Artificial Sequence
  derived and/or modified CDS sequence (opt2) from hemagglutinin__InfluenzaB__AHL91684
augaaggccaucaucguccuccucauggucgucaccuccaacgccgaccgcaucugcaccggcaucaccuccuccaacuccccccacgucgucaagaccgccacccagggcgaggucaacgucaccggcgccaucccccucaccaccacccccaccaagucccacuucgccaaccucaagggcaccaagacccgcggcaagcucugccccaccugccucaacugcaccgaccucgacgucgcccucggccgccccaugugcgucggcaucacccccuccgccaaggccuccauccuccacgagguccgccccgucaccuccggcugcuuccccaucaugcacgaccgcaccaagauccgccagcuccccaaccuccuccgcggcuacgagaagauccgccucuccacccagaacgucaucaacgccgagaaggcccccggcggccccuaccgccucggcaccuccggcuccugccccaacgccaccuccaaguccggcuucuucgccaccauggccugggccgucccccgcgacaacaacaagaccgccaccaacccccucaccaucgaggucccccacaucugcaccaaggaggaggaccagaucaccgucuggggcuuccacuccgacaacaagacccagaugaagaaccucuacggcgacuccaacccccagaaguucaccuccuccgccaacggcaucaccacccacuacgucucccagaucggcggcuuccccgaccagaccgaggacggcggccucccccaguccggccgcaucgucgucgacuacaugguccagaagcccggcaagaccggcaccaucgucuaccagcgcggcauccuccucccccagaaggucuggugcgccuccggccgcuccaaggucaucaagggcuuccucccccucaucggcgaggccgacugccuccacgagaaguacggcggccucaacaaguccaagcccuacuacaccggcgagcacgccaaggccaucggcaacugccccaucugggucaagaccccccucaagcucgccaacggcaccaaguaccgcccccccgccaagcuccucaaggagcgcggcuucuucggcgccaucgccggcuuccucgagggcggcugggagggcaugaucgccggcuggcacggcuacaccucccacggcgcccacggcgucgccgucgccgccgaccucaaguccacccaggaggccaucaacaagaucaccaagaaccucaacucccucuccgagcucgaggucaagaaccuccagcgccucuccggcgccauggacgagcuccacaacgagauccucgagcucgacgagaaggucgacgaccuccgcgccgacaccaucuccucccagaucgagcucgccguccuccucuccaacgagggcaucaucaacuccgaggacgagcaccuccucgcccucgagcgcaagcucaagaagaugcucggccccuccgccgucgacaucggcaacggcugcuucgagaccaagcacaagugcaaccagaccugccucgaccgcaucgccgccggcaccuucaacgccggcgaguucucccuccccaccuucgacucccucaacaucaccgccgccucccucaacgacgacggccucgacaaccacaccauccuccucuacuacuccaccgccgccuccucccucgccgucacccucaugaucgccaucuucaucgucuacaugaucucccgcgacaacgucuccugcuccaucugccucuga

SEQ ID NO: 123942 - RNA, 1755 nt, Artificial Sequence; identical to SEQ ID NO: 122443
  derived and/or modified CDS sequence (opt2) from hemagglutinin__InfluenzaB__AHL91695

SEQ ID NO: 123943 - RNA, 1755 nt, Artificial Sequence; identical to SEQ ID NO: 122547
  derived and/or modified CDS sequence (opt2) from hemagglutinin__InfluenzaB__AHL91706

SEQ ID NO: 123944 - RNA, 1758 nt, Artificial Sequence; identical to SEQ ID NO: 123015
  derived and/or modified CDS sequence (opt2) from hemagglutinin__InfluenzaB__AHL91717

SEQ ID NO: 123945 - RNA, 1758 nt, Artificial Sequence; identical to SEQ ID NO: 123015
  derived and/or modified CDS sequence (opt2) from hemagglutinin__InfluenzaB__AHL91728

SEQ ID NO: 123946 - RNA, 1758 nt, Artificial Sequence; identical to SEQ ID NO: 123015
  derived and/or modified CDS sequence (opt2) from hemagglutinin__InfluenzaB__AHL91739

SEQ ID NO: 123947 - RNA, 1755 nt, Artificial Sequence; identical to SEQ ID NO: 122547
  derived and/or modified CDS sequence (opt2) from hemagglutinin__InfluenzaB__AHL91750

SEQ ID NO: 123948 - RNA, 1758 nt, Artificial Sequence; identical to SEQ ID NO: 123015
  derived and/or modified CDS sequence (opt2) from hemagglutinin__InfluenzaB__AHL91761

SEQ ID NO: 123949 - RNA, 1758 nt, Artificial Sequence
  derived and/or modified CDS sequence (opt2) from hemagglutinin__InfluenzaB__AHL91772
augaaggccaucaucguccuccucauggucgucaccuccaacgccgaccgcaucugcaccggcaucaccuccuccaacuccccccacgucgucaagaccgccacccagggcgaggucaacgucaccggcgucaucccccucaccaccacccccaccaagucccacuucgccaaccucaagggcaccaagacccgcggcaagcucugccccaagugccucaacugcaccgaccucgacgucgcccucggccgccccaagugcaccggcaacauccccuccgccaaggucuccauccuccacgagguccgccccgucaccuccggcugcuuccccaucaugcacgaccgcaccaagauccgccagcuccccaaccuccuccgcggcuacgagcacauccgccucuccacccacaacgucaucaacgccgagaaggcccccggcggccccuacaagaucggcaccuccggcuccugccccaacaucaccaacggcaacggcuucuucgccaccauggccugggccguccccaagaacgacaacaacaagaccgccaccaacucccucaccaucgagguccccuacaucugcaccgagggcgaggaccagaucaccgucuggggcuuccacuccgacaacgagacccagauggccaagcucuacggcgacuccaagccccagaaguucaccuccuccgccaacggcgucaccacccacuacgucucccagaucggcggcuuccccaaccagaccgaggacggcggccucccccaguccggccgcaucgucgucgacuacaugguccagaaguccggcaagaccggcaccaucaccuaccagcgcggcauccuccucccccagaaggucuggugcgccuccggccgcuccaaggucaucaagggcucccucccccucaucggcgaggccgacugccuccacgagaaguacggcggccucaacaaguccaagcccuacuacaccggcgagcacgccaaggccaucggcaacugccccaucugggucaagaccccccucaagcucgccaacggcaccaaguaccgcccccccgccaagcuccucaaggagcgcggcuucuucggcgccaucgccggcuuccucgagggcggcugggagggcaugaucgccggcuggcacggcuacaccucccacggcgcccacggcgucgccgucgccgccgaccucaaguccacccaggaggccaucaacaagaucaccaagaaccucaacucccucuccgagcucgaggucaagaaccuccagcgccucuccggcgccauggacgagcuccacaacgagauccucgagcucgacgagaaggucgacgaccuccgcgccgacaccaucuccucccagaucgagcucgccguccuccucuccaacgagggcaucaucaacuccgaggacgagcaccuccucgcccucgagcgcaagcucaagaagaugcucggccccuccgccgucgagaucggcaacggcugcuucgagaccaagcacaagugcaaccagaccugccucgaccgcaucgccgccggcaccuucgacgccggcgaguucucccuccccaccuucgacucccucaacaucaccgccgccucccucaacgacgacggccucgacaaccacaccauccuccucuacuacuccaccgccgccuccucccucgccgucacccucaugaucgccaucuucgucgucuacauggucucccgcgacaacgucuccugcuccaucugccucuga

SEQ ID NO: 123950 - RNA, 1758 nt, Artificial Sequence; identical to SEQ ID NO: 123949
  derived and/or modified CDS sequence (opt2) from hemagglutinin__InfluenzaB__AHL91783

SEQ ID NO: 123951 - RNA, 1758 nt, Artificial Sequence; identical to SEQ ID NO: 123949
  derived and/or modified CDS sequence (opt2) from hemagglutinin__InfluenzaB__AHL91794

SEQ ID NO: 123952 - RNA, 1758 nt, Artificial Sequence
  derived and/or modified CDS sequence (opt2) from hemagglutinin__InfluenzaB__AHL91805
augaaggccaucaucguccuccucauggucgucaccuccaacgccgaccgcaucugcaccggcaucaccuccuccaacuccccccacgucgucaagaccgccacccagggcgaggucaacgucaccggcgucaucccccucaccaccacccccaccaagucccacuucgccaaccucaagggcaccaagacccgcggcaagcucugccccaagugcuucaacugcaccgaccucgacgucgcccucggccgccccaagugcaccggcaacauccccuccgccgaggucuccauccuccacgagguccgccccgucaccuccggcugcuuccccaucaugcacgaccgcaccaagauccgccagcuccccaaccuccuccgcggcuacgagcacauccgccucuccacccacaacgucaucaacgccgagaaggcccccggcggccccuacaagaucggcaccuccggcuccugccccaacgucaccaacggcaacggcuucuucgccaccauggccugggccguccccaagaacgacaacaacaagaccgccaccaacucccucaccaucgagguccccuacaucugcaccgagggcgaggaccagaucaccgucuggggcuuccacuccgacaacgagacccagauggccaagcucuacggcgacuccaagccccagaaguucaccuccuccgccaacggcgucaccacccacuacgucucccagaucggcggcuuccccaaccagaccgaggacggcggccucccccaguccggccgcaucgucgucgacuacaugguccagaaguccggcaagaccggcaccaucaccuaccagcgcggcauccuccucccccagaaggucuggugcgccuccggccgcuccaaggucaucaagggcucccucccccucaucggcgaggccgacugccuccacgagaaguacggcggccucaacaaguccaagcccuacuacaccggcgagcacgccaaggccaucggcaacugccccaucugggucaagaccccccucaagcucgccaacggcaccaaguaccgcccccccgccaagcuccucaaggagcgcggcuucuucggcgccaucgccggcuuccucgagggcggcugggagggcaugaucgccggcuggcacggcuacaccucccacggcgcccacggcgucgccgucgccgccgaccucaaguccacccaggaggccaucaacaagaucaccaagaaccucaacucccucuccgagcucgaggucaagaaccuccagcgccucuccggcgccauggacgagcuccacaacgagauccucgagcucgacgagaaggucgacgaccuccgcgccgacaccaucuccucccagaucgagcucgccguccuccucuccaacgagggcaucaucaacuccgaggacgagcaccuccucgcccucgagcgcaagcucaagaagaugcucggccccuccgccgucgagaucggcaacggcugcuucgagaccaagcacaagugcaaccagaccugccucgaccgcaucgccgccggcaccuucgacgccggcgaguucucccuccccaccuucgacucccucaacaucaccgccgccucccucaacgacgacggccucgacaaccacaccauccuccucuacuacuccaccgccgccuccucccucgccgucacccucaugaucgccaucuucgucgucuacauggucucccgcgacaacgucuccugcuccaucugccucuga

SEQ ID NO: 123953 - RNA, 1758 nt, Artificial Sequence; identical to SEQ ID NO: 122455
  derived and/or modified CDS sequence (opt2) from hemagglutinin__InfluenzaB__AHL91816

SEQ ID NO: 123954 - RNA, 1758 nt, Artificial Sequence; identical to SEQ ID NO: 122455
  derived and/or modified CDS sequence (opt2) from hemagglutinin__InfluenzaB__AHL91827

SEQ ID NO: 123955 - RNA, 1755 nt, Artificial Sequence; identical to SEQ ID NO: 123062
  derived and/or modified CDS sequence (opt2) from hemagglutinin__InfluenzaB__AHL91838

SEQ ID NO: 123956 - RNA, 1755 nt, Artificial Sequence
  derived and/or modified CDS sequence (opt2) from hemagglutinin__InfluenzaB__AHL91849
augaaggccaucaucguccuccucauggucgucaccuccaacgccgaccgcaucugcaccggcaucaccuccuccaacuccccccacgucgucaagaccgccacccagggcgaggucaacgucaccggcgucaucccccucaccaccacccccaccaaguccuacuucgccaaccucaagggcacccgcacccgcggcaagcucugccccgacugccucaacugcaccgaccucgacgucgcccucggccgccccaugugcgucggcaccacccccuccgccaaggccuccauccuccacgaggcccgccccgucaccuccggcugcuuccccaucaugcacgaccgcaccaagauccgccagcuccccaaccuccuccgcggcuacgagaacauccgccucuccacccagaacgucaucgacgccgagaacgcccccggcggccccuaccgccucggcaccuccggcuccugccccaacgccaccuccaaguccggcuucuucgccaccauggccugggccguccccaaggacaacaacaagaacgccaccaacccccucaccgucgagguccccuacaucugcaaggagggcgaggaccagaucaccgucuggggcuuccacuccgacaacaagacccagaugaagaaccucuacggcgacuccaacccccagaaguucaccuccuccgccaacggcgucaccacccacuacgucucccagaucuccggcuuccccgcccagaccgaggacggcggccucccccaguccggccgcaucgucgucgacuacaugguccagaagccccgcaagaccggcaccaucgucuaccagcgcggcguccuccucccccagaaggucuggugcgccuccggccgcuccaaggucaucaagggcucccucccccucaucggcgaggccgacugccuccacgagaaguacggcggccucaacaaguccaagcccuacuacaccggcgagcacgccaaggccaucggcaacugccccaucugggucaagaccccccucaagcucgccaacggcaccaaguaccgcccccccgccaagcuccucaaggagcgcggcuucuucggcgccaucgccggcuuccucgagggcggcugggagggcaugaucgccggcuggcacggcuacaccucccacggcgcccacggcgucgccgucgccgccgaccucaaguccacccaggaggccaucaacaagaucaccaagaaccucaacucccucuccgagcucgaggucaagaaccuccagcgccucuccggcgccauggacgagcuccacaacgagauccucgagcucgacgagaaggucgacgaccuccgcgccgacaccaucuccucccagaucgagcucgccguccuccucuccaacgagggcaucaucaacuccgaggacgagcaccuccucgcccucgagcgcaagcucaagaagaugcucggccccuccgccgucgacaucggcaacggcugcuucgagaccaagcacaagugcaaccagaccugccucgaccgcaucgccgccggcaccuucaacgccggcgaguucucccuccccaccuucgacucccucaacaucaccgccgccucccucaacgacgacggccucgacaaccacaccauccuccucuacuacuccaccgccgccuccucccucgccgucacccucaugcucgccaucuucaucgucuacauggucucccgcgacaacgucuccugcuccaucugccucuga

SEQ ID NO: 123957 - RNA, 1755 nt, Artificial Sequence
  derived and/or modified CDS sequence (opt2) from hemagglutinin__InfluenzaB__AHL91860
augaaggccaucaucguccuccucauggucgucaccuccaacgccgaccgcaucugcaccggcaucaccuccuccaacuccccccacgucgucaagaccgccacccagggcgaggucaacgucaccggcgucaucccccucaccaccacccccaccaaguccuacuucgccaaccucaagggcacccgcacccgcggcaagcucugccccgacugccucaacugcaccgaccucgacgucgcccucggccgccccaugugcgucggcaccacccccuccgccaaggccuccauccuccacgagguccgccccgucaccuccggcugcuuccccaucaugcacgaccgcaccaagauccgccagcuccccaaccuccuccgcggcuacgagaacauccgccucuccacccagaacgucaucgacgccgagaaggcccccggcggccccuaccgccucggcaccuccggcuccugccccaacgccaccuccaaguccggcuucuucgccaccauggccugggccguccccaaggacaacaacaagaacgccaccaacccccucaccgucgagauccccuacaucugcaccgagggcgaggaccagaucaccgucuggggcuuccacuccgacaacaagacccagaugaagaaccucuacggcgacuccaacccccagaaguucaccuccuccgccaacggcgucaccacccacuacgucucccagaucggcggcuuccccgaccagaccgaggacggcggccucccccaguccggccgcaucgucgucgacuacaugaugcagaagcccggcaagaccggcaccaucgucuaccagcgcggcguccuccucccccagaaggucuggugcgccuccggccgcuccaaggucaucaagggcucccucccccucaucggcgaggccgacugccuccacgagaaguacggcggccucaacaaguccaagcccuacuacaccggcgagcacgccaaggccaucggcaacugccccaucugggucaagaccccccucaagcucgccaacggcaccaaguaccgcccccccgccaagcuccucaaggagcgcggcuucuucggcgccaucgccggcuuccucgagggcggcugggagggcaugaucgccggcuggcacggcuacaccucccacggcgcccacggcgucgccgucgccgccgaccucaaguccacccaggaggccaucaacaagaucaccaagaaccucaacucccucuccgagcucgaggucaagaaccuccagcgccucuccggcgccauggacgagcuccacaacgagauccucgagcucgacgagaaggucgacgaccuccgcgccgacaccaucuccucccagaucgagcucgccguccuccucuccaacgagggcaucaucaacuccgaggacgagcaccuccucgcccucgagcgcaagcucaagaagaugcucggccccuccgccgucgagaucggcaacggcugcuucgagaccaagcacaagugcaaccagaccugccucgaccgcaucgccgccggcaccuucaacgccggcgaguucucccuccccaccuucgacucccucaacaucaccgccgccucccucaacgacgacggccucgacaaccacgccauccuccucuacuacuccaccgccgccuccucccucgccgucacccucaugcucgccaucuucaucgucuacauggucucccgcgacaacgucuccugcuccaucugccucuga

SEQ ID NO: 123958 - RNA, 1755 nt, Artificial Sequence
  derived and/or modified CDS sequence (opt2) from hemagglutinin__InfluenzaB__AHL91871
augaaggccaucaucguccuccucauggucgucaccuccaacgccgaccgcaucugcaccggcaucaccuccuccaacuccccccacgucgucaagaccgccacccagggcgaggucaacgucaccggcgucaucccccucaccaccacccccaccaaguccuacuucgccaaccucaagggcacccgcacccgcggcaagcucugccccgacugccucaacugcaccgaccucgacgucgcccucggccgccccaugugcgucggcaccacccccuccgccaaggccuccauccuccacgagguccgccccgucaccuccggcugcuuccccaucaugcacgaccgcaccaagauccgccagcuccccaaccuccuccgcggcuacgagaacauccgccucuccacccagaacgucaucgacgccgagaaggcccccggcggccccuaccgccucggcaccuccggcuccugccccaacgccaccuccaaguccggcuucuucgccaccauggccugggccguccccaaggacaacaacaagaacgccaccaacccccucaccgucgagauccccuacaucugcaccgagggcgaggaccagaucaccgucuggggcuuccacuccgacaacaagacccagaugaagaaccucuacggcgacuccaacccccagaaguucaccuccuccgccaacggcgucaccacccacuacgucucccagaucggcggcuuccccgaccagaccgaggacggcggccucccccaguccggccgcaucgucgucgacuacaugaugcagaagcccggcaagaccggcaccaucgucuaccagcgcggcguccuccucccccagaaggucuggugcgccuccggccgcuccaaggucaucaagggcucccucccccucaucggcgaggccgacugccuccacgagaaguacggcggccucaacaaguccaagcccuacuacaccggcgagcacgccaaggccaucggcaacugccccaucugggucaagaccccccucaagcucgccaacggcaccaaguaccgcccccccgccaagcuccucaaggagcgcggcuucuucggcgccaucgccggcuuccucgagggcggcugggagggcaugaucgccggcuggcacggcuacaccucccacggcgcccacggcgucgccgucgccgccgaccucaaguccacccaggaggccaucaacaagaucaccaagaaccucaacucccucuccgagcucgaggucaagaaccuccagcgccucuccggcgccauggacgagcuccacaacgagauccucgagcucgacgagaaggucgacgaccuccgcgccgacaccaucuccucccagaucgagcucgccguccuccucuccaacgagggcaucaucaacuccgaggacgagcaccuccucgcccucgagcgcaagcucaagaagaugcucggccccuccgccgucgagaucggcaacggcugcuucgagaccaagcacaagugcaaccagaccugccucgaccgcaucgccgccggcaccuucaacgccggcgaguucucccuccccaccuucgacucccucaacaucaccgccgccucccucaacgacgacggccucgacaaccacaccauccuccucuacuacuccaccgccgccuccucccucgccgucacccucaugcucgccaucuucaucgucuacauggucucccgcgacaacgucuccugcuccaucugccucuga

SEQ ID NO: 123959 - RNA, 1755 nt, Artificial Sequence; identical to SEQ ID NO: 122462
  derived and/or modified CDS sequence (opt2) from hemagglutinin__InfluenzaB__AHL91882

SEQ ID NO: 123960 - RNA, 1755 nt, Artificial Sequence
  derived and/or modified CDS sequence (opt2) from hemagglutinin__InfluenzaB__AHL91904
augaaggccaucaucguccuccucauggucgucaccuccaacgccgaccgcaucugcaccggcaucaccuccuccaacuccccccacgucgucaagaccgccacccagggcgaggucaacgucaccggcgucaucccccucaccaccacccccaccaaguccuacuucgccaaccucaagggcacccgcacccgcggcaagcucugccccgacugccucaacugcaccgaccucgacgucgcccucggccgccccaugugcgucggcaccacccccuccgccaaggccuccauccuccacgagguccgccccgucaccuccggcugcuuccccaucaugcacgaccgcaccaagauccgccagcucgccaaccuccuccgcggcuacgagaacauccgccucuccacccagaacgucaucgacgccgagaaggcccccggcggccccuaccgccucggcaccuccggcuccugccccaacgccaccuccaaguccggcuucuucgccaccauggccugggccguccccaaggacaacaacaagaacgccaccaacccccucaccgucgagguccccuacaucugcaccgagggcgaggaccagaucaccgucuggggcuuccacuccgacaacaagacccagaugaagaaccucuacggcgacuccaacccccagaaguucaccuccuccgccaacggcgucaccacccacuacgucucccagaucggcggcuuccccgaccagaccgaggacggcggccucccccaguccggccgcaucgucgucgacuacaugaugcagaagcacggcaagaccggcaccaucgucuaccagcgcggcguccuccucccccagaaggucuggugcgccuccggccgcuccaaggucaucaagggcucccucccccucaucggcgaggccgacugccuccacgagaaguacggcggccucaacaaguccaagcccuacuacaccggcgagcacgccaaggccaucggcaacugccccaucugggucaagaccccccucaagcucgccaacggcaccaaguaccgcccccccgccaagcuccucaaggagcgcggcuucuucggcgccaucgccggcuuccucgagggcggcugggagggcaugaucgccggcuggcacggcuacaccucccacggcgcccacggcgucgccgucgccgccgaccucaaguccacccaggaggccaucaacaagaucaccaagaaccucaacucccucuccgagcucgaggucaagaaccuccagcgccucuccggcgccauggacgagcuccacaacgagauccucgagcucgacgagaaggucgacgaccuccgcgccgacaccaucuccucccagaucgagcucgccguccuccucuccaacgagggcaucaucaacuccgaggacgagcaccuccucgcccucgagcgcaagcucaagaagaugcucggccccuccgccgucgacaucggcaacggcugcuucgagaccaagcacaagugcaaccagaccugccucgaccgcaucgccgccggcaccuucaacgccggcgaguucucccuccccaccuucgacucccucaacaucaccgccgccucccucaacgacgacggccucgacaaccacaccauccuccucuacuacuccaccgccgccuccucccucgccgucacccucaugcucgccaucuucaucgucuacauggucucccgcgacaacgucuccugcuccaucugccucuga

SEQ ID NO: 123961 - RNA, 1755 nt, Artificial Sequence
  derived and/or modified CDS sequence (opt2) from hemagglutinin__InfluenzaB__AHL91915
augaaggccaucaucguccuccucauggucgucaccuccaacgccgaccgcaucugcaccggcaucaccuccuccaacuccccccacgucgucaagaccgccacccagggcgaggucaacgucaccggcgucaucccccucaccaccacccccaccaaguccuacuucgccaaccucaagggcacccgcacccgcggcaagcucugccccgacugccucaacugcaccgaccucgacgucgcccucggccgccccaugugcgucggcaccacccccuccgccaaggccuccauccuccacgagguccgccccgucaccuccggcugcuuccccaucaugcacgaccgcaccaagauccgccagcuccccaaccuccuccgcggcuacgagaacauccgccucuccacccagaacgucaucgacgccgagaaggcccccggcggccccuaccgccucggcaccuccggcuccugccccaacgccaccuccaaguccggcuucuucgccaccauggccugggccguccccaaggacaacuacaagaacgccaccaacccccucaccgucgagguccccuacaucugcaccgagggcgaggaccagaucaccgucuggggcuuccacuccgacaacaagacccagaugaagaaccucuacggcgacuccaacccccagaaguucaccuccuccgccaacggcgucaccacccacuacgucucccagaucggcggcuuccccgaccagaccgaggacggcggccucccccaguccggccgcaucgucgucgacuacaugaugcagaagcccggcaagaccggcaccaucgucuaccagcgcggcguccuccucccccagaaggucuggugcgccuccggccgcuccaaggucaucaagggcucccucccccucaucggcgaggccgacugccuccacgagaaguacggcggccucaacaaguccaagcccuacuacaccggcgagcacgccaaggccaucggcaacugccccaucugggucaagaccccccucaagcucgccaacggcaccaaguaccgcccccccgccaagcuccucaaggagcgcggcuucuucggcgccaucgccggcuuccucgagggcggcugggagggcaugaucgccggcuggcacggcuacaccucccacggcgcccacggcgucgccgucgccgccgaccucaaguccacccaggaggccaucaacaagaucaccaagaaccucaacucccucuccgagcucgaggucaagaaccuccagcgccucuccggcgccauggacgagcuccacaacgagauccucgagcucgacgagaaggucgacgaccuccgcgccgacaccaucuccucccagaucgagcucgccguccuccucuccaacgagggcaucaucaacuccgaggacgagcaccuccucgcccucgagcgcaagcucaagaagaugcucggccccuccgccgucgacaucggcaacggcugcuucgagaccaagcacaagugcaaccagaccugccucgaccgcaucgccgccggcaccuucaacgccggcgaguucucccuccccaccuucgacucccucaacaucaccgccgccucccucaacgacgacggccucgacaaccacaccauccuccucuacuacuccaccgccgccuccucccucgccgucacccucaugcucgccaucuucaucgucuacauggucucccgcgacaacgucuccugcuccaucugccucuga

SEQ ID NO: 123962 - RNA, 1755 nt, Artificial Sequence; identical to SEQ ID NO: 123060
  derived and/or modified CDS sequence (opt2) from hemagglutinin__InfluenzaB__AHL91926

SEQ ID NO: 123963 - RNA, 1755 nt, Artificial Sequence; identical to SEQ ID NO: 123635
  derived and/or modified CDS sequence (opt2) from hemagglutinin__InfluenzaB__AHL91937

SEQ ID NO: 123964 - RNA, 1755 nt, Artificial Sequence; identical to SEQ ID NO: 122462
  derived and/or modified CDS sequence (opt2) from hemagglutinin__InfluenzaB__AHL91948

SEQ ID NO: 123965 - RNA, 1758 nt, Artificial Sequence
  derived and/or modified CDS sequence (opt2) from hemagglutinin__InfluenzaB__AHL91959
augaaggccaucaucguccuccucauggucgucaccuccaacgccgaccgcaucugcaccggcaucaccuccuccaacuccccccacgucgucaagaccgccacccagggcgaggucaacgucaccggcgucaucccccucaccaccacccccaccaagucccacuucgccaaccucaagggcaccaagacccgcggcaagcucugccccaagugccucaacugcaccgaccucgacgucgcccucggccgccccaagugcaccggcaacauccccuccgccgaggucuccauccuccacgagguccgccccgucaccuccggcugcuuccccaucaugcacgaccgcaccaagauccgccagcuccccaaccuccuccgcggcuacgagcacauccgccucuccacccacaacgucaucaacgccgagaaggcccccggcggccccuacaagaucggcaccuccggcuccugccccaacgucaccaacggcaacggcuucuucgccaccauggccugggccguccccaagaacgacaacaacaagaccgccaccaacucccucaccaucgagguccccuacaucugcaccgagggcgaggaccagaucaccaucuggggcuuccacuccgacaacgagacccagauggccaagcucuacggcgacuccaagccccagaaguucaccuccuccgccaacggcgucaccacccacuacgucucccagaucggcggcuuccccaaccagaccgaggacggcggccucccccaguccggccgcaucgucgucgacuacaugguccagaaguccggcaagaccggcaccaucaccuaccagcgcggcauccuccucccccagaaggucuggugcgccuccggccgcuccaaggucaucaagggcucccucccccucaucggcgaggccgacugccuccacgagaaguacggcggccucaacaaguccaagcccuacuacaccggcgagcacgccaaggccaucggcaacugccccaucugggucaagaccccccucaagcucgccaacggcaccaaguaccgcccccccgccaagcuccucaaggagcgcggcuucuucggcgccaucgccggcuuccucgagggcggcugggagggcaugaucgccggcuggcacggcuacaccucccacggcgcccacggcgucgccgucgccgccgaccucaaguccacccaggaggccaucaacaagaucaccaagaaccucaacucccucuccgagcucgaggucaagaaccuccagcgccucuccggcgccauggacgagcuccacaacgagauccucgagcucgacgagaaggucgacgaccuccgcgccgacaccaucuccucccagaucgagcucgccguccuccucuccaacgagggcaucaucaacuccgaggacgagcaccuccucgcccucgagcgcaagcucaagaagaugcucggccccuccgccgucgagaucggcaacggcugcuucgagaccaagcacaagugcaaccagaccugccucgaccgcaucgccgccggcaccuucgacgccggcgaguucucccuccccaccuucgacucccucaacaucaccgccgccuccuucaacgacgacggccucgacaaccacaccauccuccucuacuacuccaccgccgccuccucccucgccgucacccucaugaucgccaucuucgucgucuacauggucucccgcgacaacgucuccugcuccaucugccucuga

SEQ ID NO: 123966 - RNA, 1758 nt, Artificial Sequence; identical to SEQ ID NO: 122674
  derived and/or modified CDS sequence (opt2) from hemagglutinin__InfluenzaB__AHL91970

SEQ ID NO: 123967 - RNA, 1755 nt, Artificial Sequence
  derived and/or modified CDS sequence (opt2) from hemagglutinin__InfluenzaB__AHL91991
augaaggccaucaucguccuccucauggucgucaccuccaacgccgaccgcaucugcaccggcaucaccuccuccaacuccccccacgucgucaagaccgccacccagggcgaggucaacgucaccggcgucaucccccucaccaccacccccaccaaguccuacuucgccaaccucaagggcacccgcacccgcggcaagcucugccccgacugccucaacugcaccgaccucgacgucgcccucggccgccccaugugcgucggcaccacccccuccgccaaggccuccauccuccacgagguccgccccgucaccuccggcugcuuccccaucaugcacgaccgcaccaagauccgccagcucgccaaccuccuccgcggcuacgagaacauccgccucuccacccagaacgucaucgacgccgagaaggcccccggcggccccuaccgccucggcaccuccggcuccugccccaacgccaccaacaaguccggcuucuucgccaccauggccugggccguccccaaggacaacaacaagaacgccaccaacccccucaccgucgagguccccuacaucugcaccgagggcgaggaccagaucaccgucuggggcuuccacuccgacaacaagacccagaugaagaaccucuacggcgacuccaacccccagaaguucaccuccuccgccaacggcgucaccacccacuacgucucccagaucggcggcuuccccgaccagaccgaggacggcggccucccccaguccggccgcaucgucgucgacuacaugaugcagaagcccggcaagaccggcaccaucgucuaccagcgcggcguccuccucccccagaaggucuggugcgccuccggccgcuccaaggucaucaagggcucccucccccucaucggcgaggccgacugccuccacgagaaguacggcggccucaacaaguccaagcccuacuacaccggcgagcacgccaaggccaucggcaacugccccaucugggucaagaccccccucaagcucgccaacggcaccaaguaccgcccccccgccaagcuccucaaggagcgcggcuucuucggcgccaucgccggcuuccucgagggcggcugggagggcaugaucgccggcuggcacggcuacaccucccacggcgcccacggcgucgccgucgccgccgaccucaaguccacccaggaggccaucaacaagaucaccaagaaccucaacucccucuccgagcucgaggucaagaaccuccagcgccucuccggcgccauggacgagcuccacaacgagauccucgagcucgacgagaaggucgacgaccuccgcgccgacaccaucuccucccagaucgagcucgccguccuccucuccaacgagggcaucaucaacuccgaggacgagcaccuccucgcccucgagcgcaagcucaagaagaugcucggccccuccgccgucgacaucggcaacggcugcuucgagaccaagcacaagugcaaccagaccugccucgaccgcaucgccgccggcaccuucaacgccggcgaguucucccuccccaccuucgacucccucaacaucaccgccgccucccucaacgacgacggccucgacaaccacaccauccuccucuacuacuccaccgccgccuccucccucgccgucacccucaugcucgccaucuucaucgucuacauggucucccgcgacaacgucuccugcuccaucugccucuga

SEQ ID NO: 123968 - RNA, 1758 nt, Artificial Sequence; identical to SEQ ID NO: 122550
  derived and/or modified CDS sequence (opt2) from hemagglutinin__InfluenzaB__AHL92002

SEQ ID NO: 123969 - RNA, 1758 nt, Artificial Sequence; identical to SEQ ID NO: 122550
  derived and/or modified CDS sequence (opt2) from hemagglutinin__InfluenzaB__AHL92013

SEQ ID NO: 123970 - RNA, 1758 nt, Artificial Sequence; identical to SEQ ID NO: 122550
  derived and/or modified CDS sequence (opt2) from hemagglutinin__InfluenzaB__AHL92024

SEQ ID NO: 123971 - RNA, 1758 nt, Artificial Sequence; identical to SEQ ID NO: 122550
  derived and/or modified CDS sequence (opt2) from hemagglutinin__InfluenzaB__AHL92035

SEQ ID NO: 123972 - RNA, 1758 nt, Artificial Sequence; identical to SEQ ID NO: 122550
  derived and/or modified CDS sequence (opt2) from hemagglutinin__InfluenzaB__AHL92046

SEQ ID NO: 123973 - RNA, 1758 nt, Artificial Sequence; identical to SEQ ID NO: 122550
  derived and/or modified CDS sequence (opt2) from hemagglutinin__InfluenzaB__AHL92057

SEQ ID NO: 123974 - RNA, 1758 nt, Artificial Sequence
  derived and/or modified CDS sequence (opt2) from hemagglutinin__InfluenzaB__AHL92068
augaaggccaucaucguccuccucauggucgucaccuccaacgccgaccgcaucugcaccggcaucaccuccuccaacuccccccacgucgucaagaccgccacccagggcgaggucaacgucaccggcgucaucccccucaccaccacccccaccaagucccacuucgccaaccucaagggcaccgagacccgcggcaagcucugccccaagugccucaacugcaccgaccucgacgucgcccucggccgccccaagugcaccggcaacauccccuccgcccgcgucuccauccuccacgagguccgccccgucaccuccggcugcuuccccaucaugcacgaccgcaccaagauccgccagcuccccaaccuccuccgcggcuacgagcacauccgccucuccacccacaacgucaucaacgccgagaacgcccccggcggccccuacaagaucggcaccuccggcuccugccccaacaucaccaacggcaacggcuucuucgccaccauggccugggccguccccaagaacgacaacaacaagaccgccaccaacucccucaccaucgagguccccuacaucugcaccgagggcgaggaccagaucaccgucuggggcuuccacuccgacaacgagacccagauggccaagcucuacggcgacuccaagccccagaaguucaccuccuccgccaacggcgucaccacccacuacgucucccaggucggcggcuuccccaaccagaccgaggacggcggccucccccaguccggccgcaucgucgucgacuacaugguccagaaguccggcaagaccggcaccaucaccuaccagcgcggcauccuccucccccagaaggucuggugcgccuccggccgcuccaaggucaucaagggcucccucccccucaucggcgaggccgacugccuccacgagaaguacggcggccucaacaaguccaagcccuacuacaccggcgagcacgccaaggccaucggcaacugccccaucugggucaagaccccccucaagcucgccaacggcaccaaguaccgcccccccgccaagcuccucaaggagcgcggcuucuucggcgccaucgccggcuuccucgagggcggcugggagggcaugaucgccggcuggcacggcuacaccucccacggcgcccacggcgucgccgucgccgccgaccucaaguccacccaggaggccaucaacaagaucaccaagaaccucaacucccucuccgagcucgaggucaagaaccuccagcgccucuccggcgccauggacgagcuccacaacgagauccucgagcucgacgagaaggucgacgaccuccgcgccgacaccaucuccucccagaucgagcucgccguccuccucuccaacgagggcaucaucaacuccgaggacgagcaccuccucgcccucgagcgcaagcucaagaagaugcucggccccuccgccgucgagaucggcaacggcugcuucgagaccaagcacaagugcaaccagaccugccucgaccgcaucgccgccggcaccuucgacgccggcgaguucucccuccccaccuucgacucccucaacaucaccgccgccucccucaacgacgacggccucgacaaccacaccauccuccucuacuacuccaccgccgccuccucccucgccgucacccucaugaucgccaucuucgucgucuacauggucucccgcgacaacgucuccugcuccaucugccucuga

SEQ ID NO: 123975 - RNA, 1758 nt, Artificial Sequence
  derived and/or modified CDS sequence (opt2) from hemagglutinin__InfluenzaB__AHL92079
augaaggccaucaucguccuccucauggucgucaccuccaacgccgaccgcaucugcaccggcaucaccuccuccaacuccccccacgucgucaagaccgccacccagggcgaggucaacgucaccggcgucaucccccucaccaccacccccaccaagucccacuucgccaaccucaagggcaccgagacccgcggcaagcucugccccaagugccucaacugcaccgaccucgacgucgcccucggccgccccaagugcaccggcaacauccccuccgcccgcgucuccauccuccacgagguccgccccgucaccuccggcugcuuccccaucaugcacgaccgcaccaagauccgccagcuccccaaccuccuccgcggcuacgagcacauccgccucuccacccacaacgucaucaacgccgagaacgcccccggcggccccuacaagaucggcaccuccggcuccugccccaacaucaccaacggcaacggcuucuucgccaccauggccugggccguccccaagaacgacaacaacaagaccgccaccaacucccucaccaucgagguccccuacaucugcaccgagggcgaggaccagaucaccgucuggggcuuccacuccgacaacgagacccagauggccaagcucuacggcgacuccaagccccagaaguucaccuccuccgccaacggcgucaccacccacuacgucucccagaucggcggcuuccccaaccagaccgaggacggcggccucccccaguccggccgcaucgucgucgacuacaugguccagaaguccggcaagaccggcaccaucaccuaccagcgcggcauccuccucccccagaaggucuggugcgccuccggccgcuccaaggucaucaagggcucccucccccucaucggcgaggccgacugccuccacgagaaguacggcggccucaacaaguccaagcccuacuacaccggcgagcacgccaaggccaucggcaacugccccaucugggucaagaccccccucaagcucgccaacggcaccaaguaccgcccccccgccaagcuccucaaggagcgcggcuucuucggcgccaucgccggcuuccucgagggcggcugggagggcaugaucgccggcuggcacggcuacaccucccacggcgcccacggcgucgccgucgccgccgaccucaaguccacccaggaggccaucaacaagaucaccaagaaccucaacucccucuccgagcucgaggucaagaaccuccagcgccucuccggcgccauggacgagcuccacaacgagauccucgagcucgacgagaaggucgacgaccuccgcgccgacaccaucuccucccagaucgagcucgccguccuccucuccaacgagggcaucaucaacuccgaggacgagcaccuccucgcccucgagcgcaagcucaagaagaugcucggccccuccgccgucgagaucggcaacggcugcuucgagaccaagcacaagugcaaccagaccugccucgaccgcaucgccgccggcaccuucgacgccggcgaguucucccuccccaccuucgacucccucaacaucaccgccgccucccucaacgacgacggccucgacaaccacaccauccuccucuacuacuccaccgccgccuccucccucgccgucacccucaugaucgccaucuucgucgucuacauggucucccgcgacaacgucuccugcuccaucugccucuga

SEQ ID NO: 123976 - RNA, 1758 nt, Artificial Sequence; identical to SEQ ID NO: 123975
  derived and/or modified CDS sequence (opt2) from hemagglutinin__InfluenzaB__AHL92090

SEQ ID NO: 123977 - RNA, 1758 nt, Artificial Sequence; identical to SEQ ID NO: 122550
  derived and/or modified CDS sequence (opt2) from hemagglutinin__InfluenzaB__AHL92101

SEQ ID NO: 123978 - RNA, 1755 nt, Artificial Sequence; identical to SEQ ID NO: 122603
  derived and/or modified CDS sequence (opt2) from hemagglutinin__InfluenzaB__AHL92112

SEQ ID NO: 123979 - RNA, 1758 nt, Artificial Sequence; identical to SEQ ID NO: 122550
  derived and/or modified CDS sequence (opt2) from hemagglutinin__InfluenzaB__AHL92123

SEQ ID NO: 123980 - RNA, 1758 nt, Artificial Sequence; identical to SEQ ID NO: 123975
  derived and/or modified CDS sequence (opt2) from hemagglutinin__InfluenzaB__AHL92134

SEQ ID NO: 123981 - RNA, 1758 nt, Artificial Sequence; identical to SEQ ID NO: 123975
  derived and/or modified CDS sequence (opt2) from hemagglutinin__InfluenzaB__AHL92145

SEQ ID NO: 123982 - RNA, 1758 nt, Artificial Sequence; identical to SEQ ID NO: 122550
  derived and/or modified CDS sequence (opt2) from hemagglutinin__InfluenzaB__AHL92156

SEQ ID NO: 123983 - RNA, 1758 nt, Artificial Sequence; identical to SEQ ID NO: 123975
  derived and/or modified CDS sequence (opt2) from hemagglutinin__InfluenzaB__AHL92167

SEQ ID NO: 123984 - RNA, 1758 nt, Artificial Sequence; identical to SEQ ID NO: 122550
  derived and/or modified CDS sequence (opt2) from hemagglutinin__InfluenzaB__AHL92178

SEQ ID NO: 123985 - RNA, 1758 nt, Artificial Sequence; identical to SEQ ID NO: 122550
  derived and/or modified CDS sequence (opt2) from hemagglutinin__InfluenzaB__AHL92189

SEQ ID NO: 123986 - RNA, 1755 nt, Artificial Sequence; identical to SEQ ID NO: 122603
  derived and/or modified CDS sequence (opt2) from hemagglutinin__InfluenzaB__AHL92200

SEQ ID NO: 123987 - RNA, 1758 nt, Artificial Sequence; identical to SEQ ID NO: 122550
  derived and/or modified CDS sequence (opt2) from hemagglutinin__InfluenzaB__AHL92211

SEQ ID NO: 123988 - RNA, 1758 nt, Artificial Sequence; identical to SEQ ID NO: 122550
  derived and/or modified CDS sequence (opt2) from hemagglutinin__InfluenzaB__AHL92222

SEQ ID NO: 123989 - RNA, 1755 nt, Artificial Sequence; identical to SEQ ID NO: 123865
  derived and/or modified CDS sequence (opt2) from hemagglutinin__InfluenzaB__AHL92233

SEQ ID NO: 123990 - RNA, 1758 nt, Artificial Sequence; identical to SEQ ID NO: 123975
  derived and/or modified CDS sequence (opt2) from hemagglutinin__InfluenzaB__AHL92244

SEQ ID NO: 123991 - RNA, 1758 nt, Artificial Sequence; identical to SEQ ID NO: 122550
  derived and/or modified CDS sequence (opt2) from hemagglutinin__InfluenzaB__AHL92255

SEQ ID NO: 123992 - RNA, 1758 nt, Artificial Sequence; identical to SEQ ID NO: 122550
  derived and/or modified CDS sequence (opt2) from hemagglutinin__InfluenzaB__AHL92266

SEQ ID NO: 123993 - RNA, 1758 nt, Artificial Sequence
  derived and/or modified CDS sequence (opt2) from hemagglutinin__InfluenzaB__AHL92277
augaaggccaucaucguccuccucauggucgucaccuccaacgccgaccgcaucugcaccggcaucaccuccuccaacuccccccacgucgucaagaccgccacccagggcgaggucaacgucaccggcgucaucccccucaccaccacccccaccaagucccacuucgccaaccucaagggcaccgagacccgcggcaagcucugccccaagugccucaacugcaccgaccucgacgucgcccucggccgccccaagugcaccggcaacauccccuccgcccgcgucuccauccuccacgagguccgccccgucaccuccggcugcuuccccaucaugcacgaccgcaccaagauccgccagcuccccaaccuccuccgcggcuacgagcacauccgccucuccacccacaacgucaucaacgccgagaacgcccccggcggccccuacaagaucggcaccuccggcuccugccccaacgucaccaacggcaacggcuucuucgccaccauggccugggccguccccaagaacgacaacaacaagaccgccaccaacucccucaccaucgagguccccuacaucugcaccgagggcgaggaccagaucaccgucuggggcuuccacuccgacaacgagacccagauggccaagcucuacggcgacuccaagccccagaaguucaccuccuccgccaacggcgucaccacccacuacgucucccagaucggcggcuuccccaaccagaccgaggacggcggccucccccaguccggccgcaucgucgucgacuacaugguccagaaguccggcaagaccggcaccaucaccuaccagcgcggcauccuccucccccagaaggucuggugcgccuccggccgcuccaaggucaucaagggcucccucccccucaucggcgaggccgacugccuccacgagaaguacggcggccucaacaaguccaagcccuacuacaccggcgagcacgccaaggccaucggcaacugccccaucugggucaagaccccccucaagcucgccaacggcaccaaguaccgcccccccgccaagcuccucaaggagcgcggcuucuucggcgccaucgccggcuuccucgagggcggcugggagggcaugaucgccggcuggcacggcuacaccucccacggcgcccacggcgucgccgucgccgccgaccucaaguccacccaggaggccaucaacaagaucaccaagaaccucaacucccucuccgagcucgaggucaagaaccuccagcgccucuccggcgccauggacgagcuccacaacgagauccucgagcucgacgagaaggucgacgaccuccgcgccgacaccaucuccucccagaucgagcucgccguccuccucuccaacgagggcaucaucaacuccgaggacgagcaccuccucgcccucgagcgcaagcucaagaagaugcucggccccuccgccgucgagaucggcaacggcugcuucgagaccaagcacaagugcaaccagaccugccucgaccgcaucgccaccggcaccuucgacgccggcgaguucucccuccccaccuucgacucccucaacaucaccgccgccucccucaacgacgacggccucgacaaccacaccauccuccucuacuacuccaccgccgccuccucccucgccgucacccucaugaucgccaucuucgucgucuacauggucucccgcgacaacgucuccugcuccaucugccucuga

SEQ ID NO: 123994 - RNA, 1758 nt, Artificial Sequence; identical to SEQ ID NO: 122550
  derived and/or modified CDS sequence (opt2) from hemagglutinin__InfluenzaB__AHL92288

SEQ ID NO: 123995 - RNA, 1758 nt, Artificial Sequence; identical to SEQ ID NO: 122550
  derived and/or modified CDS sequence (opt2) from hemagglutinin__InfluenzaB__AHL92299

SEQ ID NO: 123996 - RNA, 1755 nt, Artificial Sequence; identical to SEQ ID NO: 123668
  derived and/or modified CDS sequence (opt2) from hemagglutinin__InfluenzaB__AHL92310

SEQ ID NO: 123997 - RNA, 1755 nt, Artificial Sequence; identical to SEQ ID NO: 122603
  derived and/or modified CDS sequence (opt2) from hemagglutinin__InfluenzaB__AHL92321

SEQ ID NO: 123998 - RNA, 1755 nt, Artificial Sequence; identical to SEQ ID NO: 122603
  derived and/or modified CDS sequence (opt2) from hemagglutinin__InfluenzaB__AHL92332

SEQ ID NO: 123999 - RNA, 1755 nt, Artificial Sequence
  derived and/or modified CDS sequence (opt2) from hemagglutinin__InfluenzaB__AHL92354
augaaggccaucaucguccuccucauggucgucaccuccaacgccgaccgcaucugcaccggcaucaccuccuccaacuccccccacgucgucaagaccgccacccagggcgaggucaacgucaccggcgucaucccccucaccaccacccccaccaaguccuacuucgccaaccucaagggcacccgcacccgcggcaagcucugccccgacugccucaacugcaccgaccucgacgucgcccucggccgccccaugugcgucggcaucacccccuccgccaaggccuccauccuccacgagguccgccccgucaccuccggcugcuuccccaucaugcacgaccgcaccaagauccgccagcucgccaaccuccuccgcggcuacgagaacauccgccucuccacccagaacgucgucgacgccgagaaggcccccggcggccccuaccgccucggcaccuccggcuccugccccaacgccaccuccaaguccggcuucuucgccaccauggccugggccguccccaaggacaacaacaagaacgccaccaacccccucaccgucgagguccccuacaucugcaccgagggcgaggaccagaucaccgucuggggcuuccacuccgacaacaagacccagaugaagaaccucuacggcgacuccaacccccagaaguucaccuccuccgccaacggcgucaccacccacuacgucucccagaucggcggcuuccccgaccagaccgaggacggcggccucccccaguccggccgcaucgucgucgacuacaugaugcagaagcccggcaagaccggcaccaucgucuaccagcgcggcguccuccucccccagaaggucuggugcgccuccggccgcuccaaggucaucaagggcucccucccccucaucggcgaggccgacugccuccacgagaaguacggcggccucaacaaguccaagcccuacuacaccggcgagcacgccaaggccaucggcaacugccccaucugggucaagaccccccucaagcucgccaacggcaccaaguaccgcccccccgccaagcuccucaaggagcgcggcuucuucggcgccaucgccggcuuccucgagggcggcugggagggcaugaucgccggcuggcacggcuacaccucccacggcgcccacggcgucgccgucgccgccgaccucaaguccacccaggaggccaucaacaagaucaccaagaaccucaacucccucuccgagcucgaggucaagaaccuccagcgccucuccggcgccauggacgagcuccacaacgagauccucgagcucgacgagaaggucgacgaccuccgcgccgacaccaucuccucccagaucgagcucgccguccuccucuccaacgagggcaucaucaacuccgaggacgagcaccuccucgcccucgagcgcaagcucaagaagaugcucggccccuccgccgucgacaucggcaacggcugcuucgagaccaagcacaagugcaaccagaccugccucgaccgcaucgccgccggcaccuucaacgccggcgaguucucccuccccaccuucgacucccucaacaucaccgccgccucccucaacgacgacggccucgacaaccacaccauccuccucuacuacuccaccgccgccuccucccucgccgucacccucaugcucgccaucuucaucgucuacauggucucccgcgacaacgucuccugcuccaucugccucuga

SEQ ID NO: 124000 - RNA, 1755 nt, Artificial Sequence; identical to SEQ ID NO: 123999
  derived and/or modified CDS sequence (opt2) from hemagglutinin__InfluenzaB__AHL92365

SEQ ID NO: 124001 - RNA, 1755 nt, Artificial Sequence; identical to SEQ ID NO: 122856
  derived and/or modified CDS sequence (opt2) from hemagglutinin__InfluenzaB__AHL92376

SEQ ID NO: 124002 - RNA, 1755 nt, Artificial Sequence; identical to SEQ ID NO: 122856
  derived and/or modified CDS sequence (opt2) from hemagglutinin__InfluenzaB__AHL92387

SEQ ID NO: 124003 - RNA, 1755 nt, Artificial Sequence; identical to SEQ ID NO: 122856
  derived and/or modified CDS sequence (opt2) from hemagglutinin__InfluenzaB__AHL92398

SEQ ID NO: 124004 - RNA, 1755 nt, Artificial Sequence; identical to SEQ ID NO: 122856
  derived and/or modified CDS sequence (opt2) from hemagglutinin__InfluenzaB__AHL92409

SEQ ID NO: 124005 - RNA, 1755 nt, Artificial Sequence; identical to SEQ ID NO: 122856
  derived and/or modified CDS sequence (opt2) from hemagglutinin__InfluenzaB__AHL92420

SEQ ID NO: 124006 - RNA, 1755 nt, Artificial Sequence; identical to SEQ ID NO: 122603
  derived and/or modified CDS sequence (opt2) from hemagglutinin__InfluenzaB__AHL92431

SEQ ID NO: 124007 - RNA, 1755 nt, Artificial Sequence; identical to SEQ ID NO: 122856
  derived and/or modified CDS sequence (opt2) from hemagglutinin__InfluenzaB__AHL92442

SEQ ID NO: 124008 - RNA, 1755 nt, Artificial Sequence; identical to SEQ ID NO: 122856
  derived and/or modified CDS sequence (opt2) from hemagglutinin__InfluenzaB__AHL92453

SEQ ID NO: 124009 - RNA, 1755 nt, Artificial Sequence; identical to SEQ ID NO: 122856
  derived and/or modified CDS sequence (opt2) from hemagglutinin__InfluenzaB__AHL92464

SEQ ID NO: 124010 - RNA, 1755 nt, Artificial Sequence
  derived and/or modified CDS sequence (opt2) from hemagglutinin__InfluenzaB__AHL92475
augaaggccaucaucguccuccucauggucgucaccuccaacgccgaccgcaucugcaccggcaucaccuccuccaacuccccccacgucgucaagaccgccacccagggcgaggucaacgucaccggcgucaucccccucaccaccacccccaccaaguccuacuucgccaaccucaagggcacccgcacccgcggcaagcucugccccgacugccucaacugcaccgaccucgacgucgcccucggccgccccaugugcgucggcaccacccccuccgccaaggccuccauccuccacgagguccgccccgucaccuccggcugcuuccccaucaugcacgaccgcaccaagauccgccagcuccccaaccuccuccgcggcuacgagaacauccgccucuccacccagaacgucaucgacgccgagaaggcccccggcggccccuaccgccucggcaccuccggcuccugccccaacgccaccuccaagaucggcuucuucgccaccauggccugggccguccccaaggacaacuacaagaacgccaccaacccccucaccgucgagguccccuacaucugcaccgagggcgaggaccagaucaccgucuggggcuuccacuccgacaacaagacccagaugaagaaccucuacggcgacuccaacccccagaaguucaccuccuccgccaacggcgucaccacccacuacgucucccagaucggcgacuuccccgaccagaccgaggacggcggccucccccaguccggccgcaucgucgucgacuacaugaugcagaagcccggcaagaccggcaccaucgucuaccagcgcggcguccuccucccccagaaggucuggugcgccuccggccgcuccaaggucaucaagggcucccucccccucaucggcgaggccgacugccuccacgagaaguacggcggccucaacaaguccaagcccuacuacaccggcgagcacgccaaggccaucggcaacugccccaucugggucaagaccccccucaagcucgccaacggcaccaaguaccgcccccccgccaagcuccucaaggagcgcggcuucuucggcgccaucgccggcuuccucgagggcggcugggagggcaugaucgccggcuggcacggcuacaccucccacggcgcccacggcgucgccgucgccgccgaccucaaguccacccaggaggccaucaacaagaucaccaagaaccucaacucccucuccgagcucgaggucaagaaccuccagcgccucuccggcgccauggacgagcuccacaacgagauccucgagcucgacgagaaggucgacgaccuccgcgccgacaccaucuccucccagaucgagcucgccguccuccucuccaacgagggcaucaucaacuccgaggacgagcaccuccucgcccucgagcgcaagcucaagaagaugcucggccccuccgccgucgacaucggcaacggcugcuucgagaccaagcacaagugcaaccaggccugccucgaccgcaucgccgccggcaccuucaacgccggcgaguucucccuccccaccuucgacucccucaacaucaccgccgccucccucaacgacgacggccucgacaaccacaccauccuccucuacuacuccaccgccgccuccucccucgccgucacccucaugcucgccaucuucaucgucuacauggucucccgcgacaacgucuccugcuccaucugccucuga

SEQ ID NO: 124011 - RNA, 1755 nt, Artificial Sequence; identical to SEQ ID NO: 122603
  derived and/or modified CDS sequence (opt2) from hemagglutinin__InfluenzaB__AHL92486

SEQ ID NO: 124012 - RNA, 1755 nt, Artificial Sequence; identical to SEQ ID NO: 122856
  derived and/or modified CDS sequence (opt2) from hemagglutinin__InfluenzaB__AHL92497

SEQ ID NO: 124013 - RNA, 1755 nt, Artificial Sequence; identical to SEQ ID NO: 122856
  derived and/or modified CDS sequence (opt2) from hemagglutinin__InfluenzaB__AHL92508

SEQ ID NO: 124014 - RNA, 1755 nt, Artificial Sequence; identical to SEQ ID NO: 122856
  derived and/or modified CDS sequence (opt2) from hemagglutinin__InfluenzaB__AHL92519

SEQ ID NO: 124015 - RNA, 1755 nt, Artificial Sequence; identical to SEQ ID NO: 122856
  derived and/or modified CDS sequence (opt2) from hemagglutinin__InfluenzaB__AHL92530

SEQ ID NO: 124016 - RNA, 1755 nt, Artificial Sequence; identical to SEQ ID NO: 122603
  derived and/or modified CDS sequence (opt2) from hemagglutinin__InfluenzaB__AHL92541

SEQ ID NO: 124017 - RNA, 1752 nt, Artificial Sequence
  derived and/or modified CDS sequence (opt2) from hemagglutinin__InfluenzaB__AHL92563
augaaggccaucaucguccuccucauggucgucaccuccaacgccgaccgcaucugcaccggcaucaccuccuccaacuccccccacgucgucaagaccgccacccagggcgaggucaacgucaccggcgucaucccccucaccaccacccccaagaaguccuacuucgccaaccucaagggcacccgcacccgcggcaagcucugccccgacugccucaacugcaccgaccucgacgucgcccucggccgccccaugugcgucggcaccacccccuccgccaaggccuccauccuccacgagguccgccccgucaccuccggcugcuuccccaucaugcacgaccgcaccaagauccgccagcuccccaaccuccuccgcggcuacgagaacauccgccucuccacccagaacgucaucgacgccgagaaggcccccggcggccccuaccgccucggcaccuccggcuccugccccaacgccaccuccaagaucggcuucuucgccaccauggccugggccguccccaaggacaacuacaagaacgccaccaacccccucaccgucgagguccccuacaucugcaccgagggcgaggaccagaucaccgucuggggcuuccacuccgacaacaagacccagaugaagaaccucuacggcgacuccaacccccagaaguucaccuccuccgccaacggcgucaccacccacuacgucucccagaucggcgacuuccccgaccagaccgaggacggcggccucccccaguccggccgcaucgucgucgacuacaugaugcagaagcccggcaagaccggcaccaucgucuaccagcgcggcguccuccucccccagaaggucuggugcgccuccggccgcuccaaggucaucaagggcucccucccccucaucggcgaggccgacugccuccacgagaaguacggcggccucaacaaguccaagcccuacuacaccggcgagcacgccaaggccaucggcaacugccccaucugggucaagaccccccucaagcucgccaacggcaccaaguaccgcccccccgccaagcuccucaaggagcgcggcuucuucggcgccaucgccggcuuccucgagggcggcugggagggcaugaucgccggcuggcacggcuacaccucccacggcgcccacggcgucgccgucgccgccgaccucaaguccacccaggaggccaucaacaagaucaccaagaaccucaacucccucuccgagcucgaggucaagaaccuccagcgccucuccggcgccauggacgagcuccacaacgagauccucgagcucgacgagaaggucgacgaccuccgcgccgacaccaucuccucccagaucgagcucgccguccuccucuccaacgagggcaucaucaacuccgaggacgagcaccuccucgcccucgagcgcaagcucaagaagaugcucggccccuccgccgucgacaucggcaacggcugcuucgagaccaagcacaagugcaaccagaccugccucgaccgcaucgccgccggcaccuucaacgccggcgaguucucccuccccaccuucgacucccucaacaucaccgccgccucccucaacgacggccucgacaaccacaccauccuccucuacuacuccaccgccgccuccucccucgccgucacccucaugcucgccaucuucaucgucuacauggucucccgcgacaacgucuccugcuccaucugccucuga

SEQ ID NO: 124018 - RNA, 1755 nt, Artificial Sequence; identical to SEQ ID NO: 122856
  derived and/or modified CDS sequence (opt2) from hemagglutinin__InfluenzaB__AHL92574

SEQ ID NO: 124019 - RNA, 1755 nt, Artificial Sequence
  derived and/or modified CDS sequence (opt2) from hemagglutinin__InfluenzaB__AHL92585
augaaggccaucaucguccuccucauggucgucaccuccaacgccgaccgcaucugcaccggcaucaccuccuccaacuccccccacgucgucaagaccgccacccagggcgaggucaacgucaccggcgucaucccccucaccaccacccccaccaaguccuacuucgccaaccucaagggcacccgcacccgcggcaagcucugccccgacugccucaacugcaccgaccucgacgucgcccucggccgccccaugugcgucggcgccacccccuccgccaaggccuccauccuccacgagguccgccccgucaccuccggcugcuuccccaucaugcacgaccgcaccaagauccgccagcuccccaaccuccuccgcggcuacgagaacauccgccucuccacccagaacgucaucgacgccgagaaggcccccggcggccccuaccgccucggcaccuccggcuccugccccaacgccaccuccaaguccggcuucuucgccaccauggccugggccguccccaaggacaacaacaagaacgccaccaacccccucaccgucgagguccccuacaucugcaccgagggcgaggaccagaucaccgucuggggcuuccacuccgacaacaagacccagaugaagaaccucuacggcgacuccaacccccagaaguucaccuccuccgccaacggcgucaccacccacuacgucucccagaucggcuccuuccccgaccagaccgaggacggcggccucccccaguccggccgcaucgucgucgacuacaugaugcagaagcccggcaagaccggcaccaucgucuaccagcgcggcguccuccucccccagaaggucuggugcgccuccggccgcuccaaggucaucaagggcucccucccccucaucggcgaggccgacugccuccacgagaaguacggcggccucaacaaguccaagcccuacuacaccggcgagcacgccaaggccaucggcaacugccccaucugggucaagaccccccucaagcucgccaacggcaccaaguaccgcccccccgccaagcuccucaaggagcgcggcuucuucggcgccaucgccggcuuccucgagggcggcugggagggcaugaucgccggcuggcacggcuacaccucccacggcgcccacggcgucgccgucgccgccgaccucaaguccacccaggaggccaucaacaagaucaccaagaaccucaacucccucuccgagcucgaggucaagaaccuccagcgccucuccggcgccauggacgagcuccacaacgagauccucgagcucgacgagaaggucgacgaccuccgcgccgacaccaucuccucccagaucgagcucgccguccuccucuccaacgagggcaucaucaacuccgaggacgagcaccuccucgcccucgagcgcaagcucaagaagaugcucggccccuccgccgucgagaucggcaacggcugcuucgagaccaagcacaagugcaaccagaccugccucgaccgcaucgccgccggcaccuucaacgccggcgaguucucccuccccaccuucgacucccucaacaucaccgccgccucccucaacgacgacggccucgacaaccacaccauccuccucuacuacuccaccgccgccuccucccucgccgucacccucaugcucgccaucuucaucgucuacauggucucccgcgacaacgucuccugcuccaucugccucuga

SEQ ID NO: 124020 - RNA, 1755 nt, Artificial Sequence; identical to SEQ ID NO: 122856
  derived and/or modified CDS sequence (opt2) from hemagglutinin__InfluenzaB__AHL92596

SEQ ID NO: 124021 - RNA, 1755 nt, Artificial Sequence; identical to SEQ ID NO: 122603
  derived and/or modified CDS sequence (opt2) from hemagglutinin__InfluenzaB__AHL92607

SEQ ID NO: 124022 - RNA, 1755 nt, Artificial Sequence
  derived and/or modified CDS sequence (opt2) from hemagglutinin__InfluenzaB__AHL92629
augaaggccaucaucguccuccucauggucgucaccuccaacgccgaccgcaucugcaccggcaucaccuccuccaacuccccccacgucgucaagaccgccacccagggcgaggucaacgucaccggcgucaucccccucaccaccacccccgagaaguccuacuucgccaaccucaagggcacccgcacccgcggcaagcucugccccgacugccucaacugcaccgaccucgacgucgcccucggccgccccaugugcgucggcaccacccccuccgccaaggccuccauccuccacgagguccgccccgucaccuccggcugcuuccccaucaugcacgaccgcaccaagauccgccagcuccccaaccuccuccgcggcuacgagaacauccgccucuccacccagaacgucaucgacgccgagaaggcccccggcggccccuaccgccucggcaccuccggcuccugccccaacgccaccuccaagaucggcuucuucgccaccauggccugggccguccccaaggacaacuacaagaacgccaccaacccccucaccgucgagguccccuacaucugcaccgagggcgaggaccagaucaccgucuggggcuuccacuccgacaacaagacccagaugaagaaccucuacggcgacuccaacccccagaaguucaccuccuccgccaacggcgucaccacccacuacgucucccagaucggcgacuuccccgaccagaccgaggacggcggccucccccaguccggccgcaucgucgucgacuacaugaugcagaagcccggcaagaccggcaccaucgucuaccagcgcggcguccuccucccccagaaggucuggugcgccuccggccgcuccaaggucaucaagggcucccucccccucaucggcgaggccgacugccuccacgagaaguacggcggccucaacaaguccaagcccuacuacaccggcgagcacgccaaggccaucggcaacugccccaucugggucaagaccccccucaagcucgccaacggcaccaaguaccgcccccccgccaagcuccucaaggagcgcggcuucuucggcgccaucgccggcuuccucgagggcggcugggagggcaugaucgccggcuggcacggcuacaccucccacggcgcccacggcgucgccgucgccgccgaccucaaguccacccaggaggccaucaacaagaucaccaagaaccucaacucccucuccgagcucgaggucaagaaccuccagcgccucuccggcgccauggacgagcuccacaacgagauccucgagcucgacgagaaggucgacgaccuccgcgccgacaccaucuccucccagaucgagcucgccguccuccucuccaacgagggcaucaucaacuccgaggacgagcaccuccucgcccucgagcgcaagcucaagaagaugcucggccccuccgccgucgacaucggcaacggcugcuucgagaccaagcacaagugcaaccagaccugccucgaccgcaucgccgccggcaccuucaacgccggcgaguucucccuccccaccuucgacucccucaacaucaccgccgccucccucaacgacgacggccucgacaaccacaccauccuccucuacuacuccaccgccgccuccucccucgccgucacccucaugcucgccaucuucaucgucuacauggucucccgcgacaacgucuccugcuccaucugccucuga

SEQ ID NO: 124023 - RNA, 1755 nt, Artificial Sequence; identical to SEQ ID NO: 122603
  derived and/or modified CDS sequence (opt2) from hemagglutinin__InfluenzaB__AHL92640

SEQ ID NO: 124024 - RNA, 1755 nt, Artificial Sequence; identical to SEQ ID NO: 122603
  derived and/or modified CDS sequence (opt2) from hemagglutinin__InfluenzaB__AHL92651

SEQ ID NO: 124025 - RNA, 1755 nt, Artificial Sequence
  derived and/or modified CDS sequence (opt2) from hemagglutinin__InfluenzaB__AHL92684
augaaggccaucaucguccuccucauggucgucaccuccaacgccgaccgcaucugcaccggcaucaccuccuccaacuccccccacgucgucaagaccgccacccagggcgaggucaacgucaccggcgucaucccccucaccaccacccccaccaaguccuacuucgccaaccucaagggcacccgcacccgcggcaagcucugccccgacugccucaacugcaccgaccucgacgucgcccucggccgccccaugugcgucggcaccacccccuccgccaaggccuccauccuccacgagguccgccccgucaccuccggcugcuuccccaucaugcacgaccgcaccaagauccgccagcuccccaaccuccuccgcggcuacgagaacauccgccucuccacccagaacgucaucgacgccgagaaggcccccggcggccccuaccgccucggcaccuccggcuccugccccaacgccaccuccaaguccggcuucuucgccaccauggccugggccguccccaaggacaacaacaagaacgccaccaacccccucaccgucgagguccccuacaucugcaccgagggcgaggaccagaucaccgucuggggcuuccacuccgacaacaagacccagaugaagaaccucuacggcgacuccaacccccagaaguucaccuccuccgccaacggcgucaccacccacuacgucucccagaucggcuccuuccccgaccagaccgaggacggcggccucccccaguccggccgcaucgucgucgacuacaugaugcagaagcccggcaagaccggcaccaucgucuaccagcgcggcguccuccucccccagaaggucuggugcgccuccggccgcuccaaggucaucaagggcucccucccccucaucggcgaggccgacugccuccacgagaaguacggcggccucaacaaguccaagcccuacuacaccggcgagcacgccaaggccaucggcaacugccccaucugggucaagaccccccucaagcucgccaacggcaccaaguaccgcccccccgccaagcuccucaaggagcgcggcuucuucggcgccaucgccggcuuccucgagggcggcugggagggcaugaucgccggcuggcacggcuacaccucccacggcgcccacggcgucgccgucgccgccgaccucaaguccacccaggaggccaucaacaagaucaccaagaaccucaacucccucuccgagcucgaggucaagaaccuccagcgccucuccggcgccauggacgagcuccacaacgagauccucgagcucgacgagaaggucgacgaccuccgcgccgacaccaucuccucccagaucgagcucgccguccuccucuccaacgagggcaucaucaacuccgaggacgagcaccuccucgcccucgagcgcaagcucaagaagaugcucggccccuccgccgucgagaucggcaacggcugcuucgagaccaagcacaagugcaaccagaccugccucgaccgcaucgccgccggcaccuucaacgccggcgaguucucccuccccaccuucgacucccucaacaucaccgccgccucccucaacgacgacggccucgacaaccacaucauccuccucuacuacuccaccgccgccuccucccucgccgucacccucaugcucgccaucuucaucgucuacauggucucccgcgacaacgucuccugcuccaucugccucuga

SEQ ID NO: 124026 - RNA, 1755 nt, Artificial Sequence; identical to SEQ ID NO: 122856
  derived and/or modified CDS sequence (opt2) from hemagglutinin__InfluenzaB__AHL92695

SEQ ID NO: 124027 - RNA, 1755 nt, Artificial Sequence; identical to SEQ ID NO: 122856
  derived and/or modified CDS sequence (opt2) from hemagglutinin__InfluenzaB__AHL92706

SEQ ID NO: 124028 - RNA, 1755 nt, Artificial Sequence
  derived and/or modified CDS sequence (opt2) from hemagglutinin__InfluenzaB__AHL92728
augaaggccaucaucguccuccucauggucgucaccuccaacgccgaccgcaucugcaccggcaucaccuccuccaacuccccccacgucgucaagaccgccacccagggcgaggucaacgucaccggcgucaucccccucaccaccacccccaccaaguccuacuucgccaaccucaagggcacccgcacccgcggcaagcucugccccgacugccucaacugcaccgaccucgacgucgcccucggccgccccaugugcgucggcaccacccccuccgccaaggccuccauccuccacgagguccgccccgucaccuccggcugcuuccccaucaugcacgaccgcaccaagauccgccagcuccccaaccuccuccgcggcuacgagaacauccgccucuccacccagaacgucaucgacgccgagaaggcccccggcggccccuaccgccucggcaccuccggcuccugccccaacgccaccuccaagaucggcuucuucgccaccauggccugggccguccccaaggacaacuacaagaacgccaccaacccccucaccgucgagguccccuacaucugcaccgagggcgaggaccagaucaccgucuggggcuuccacuccgacaacaagacccagaugaagaaccucuacggcgacuccaacccccagaaguucaccuccuccgccaacggcgucaccacccacuacgucucccagaucggcgacuuccccgaccagaccgaggacggcggccucccccaguccggccgcaucgucgucgacuacaugaugcagaagcccggcaagaccggcaccaucgucuaccagcgcggcguccuccucccccagaaggucuggugcgccuccggccgcuccaaggucaucaagggcucccucccccucaucggcgaggccgacugccuccacgagaaguacggcggccucaacaaguccaagcccuacuacaccggcaagcacgccaaggccaucggcaacugccccaucugggucaagaccccccucaagcucgccaacggcaccaaguaccgcccccccgccaagcuccucaaggagcgcggcuucuucggcgccaucgccggcuuccucgagggcggcugggagggcaugaucgccggcuggcacggcuacaccucccacggcgcccacggcgucgccgucgccgccgaccucaaguccacccaggaggccaucaacaagaucaccaagaaccucaacucccucuccgagcucgaggucaagaaccuccagcgccucuccggcgccauggacgagcuccacaacgagaucaucgagcucgacgagaaggucgacgaccuccgcgccgacaccaucuccucccagaucgagcucgccguccuccucuccaacgagggcaucaucaacuccgaggacgagcaccuccucgcccucgagcgcaagcucaagaagaugcucggccccuccgccgucgacaucggcaacggcugcuucgagaccaagcacaagugcaaccagaccugccucgaccgcaucgccgccggcaccuucaacgccggcgaguucucccuccccaccuucgacucccucaacaucaccgccgccucccucaacgacgacggccucgacaaccacaccauccuccucuacuacuccaccgccgccuccucccucgccgucacccucaugcucgccaucuucaucgucuacauggucucccgcgacaacgucuccugcuccaucugccucuga

SEQ ID NO: 124029 - RNA, 1755 nt, Artificial Sequence; identical to SEQ ID NO: 124028
  derived and/or modified CDS sequence (opt2) from hemagglutinin__InfluenzaB__AHL92739

SEQ ID NO: 124030 - RNA, 1755 nt, Artificial Sequence; identical to SEQ ID NO: 124028
  derived and/or modified CDS sequence (opt2) from hemagglutinin__InfluenzaB__AHL92750

SEQ ID NO: 124031 - RNA, 1755 nt, Artificial Sequence; identical to SEQ ID NO: 122856
  derived and/or modified CDS sequence (opt2) from hemagglutinin__InfluenzaB__AHL92761

SEQ ID NO: 124032 - RNA, 1755 nt, Artificial Sequence
  derived and/or modified CDS sequence (opt2) from hemagglutinin__InfluenzaB__AHL92772
augaaggccaucaucguccuccucauggucgucaccuccaacgccgaccgcaucugcaccggcaucaccuccuccaacuccccccacgucgucaagaccgccacccagggcgaggucaacgucaccggcgucaucccccucaccaccacccccaccaaguccuacuucgccaaccucaagggcacccgcacccgcggcaagcucugccccgacugccucaacugcaccgaccucgacgucgcccucggccgccccaugugcaugggcaccacccccuccgccaaggccuccauccuccacgagguccgccccgucaccuccggcugcuuccccaucaugcacgaccgcaccaagauccgccagcuccccaaccuccuccgcggcuacgagaacauccgccucuccacccagaacgucaucgacgccgagaaggcccccggcggccccuaccgccucggcaccuccggcuccugccccaacgccaccuccaagaucggcuucuucgccaccauggccugggccguccccaaggacaacuacaagaacgccaccaacccccucaccgucgagguccccuacaucugcaccgagggcgaggaccagaucaccgucuggggcuuccacuccgacaacaagacccagaugaagaaccucuacggcgacuccaacccccagaaguucaccuccuccgccaacggcgucaccacccacuacgucucccagaucggcgacuuccccgaccagaccgaggacggcggccucccccaguccggccgcaucgucgucgacuacaugaugcagaagcccggcaagaccggcaccaucgucuaccagcgcggcguccuccucccccagaaggucuggugcgccuccggccgcuccaaggucaucaagggcucccucccccucaucggcgaggccgacugccuccacgagaaguacggcggccucaacaaguccaagcccuacuacaccggcgagcacgccaaggccaucggcaacugccccaucugggucaagaccccccucaagcucgccaacggcaccaaguaccgcccccccgccaagcuccucaaggagcgcggcuucuucggcgccaucgccggcuuccucgagggcggcugggagggcaugaucgccggcuggcacggcuacaccucccacggcgcccacggcgucgccgucgccgccgaccucaaguccacccaggaggccaucaacaagaucaccaagaaccucaacucccucuccgagcucgaggucaagaaccuccagcgccucuccggcgccauggacgagcuccacaacgagauccucgagcucgacgagaaggucgacgaccuccgcgccgacaccaucuccucccagaucgagcucgccguccuccucuccaacgagggcaucaucaacuccgaggacgagcaccuccucgcccucgagcgcaagcucaagaagaugcucggccccuccgccgucgacaucggcaacggcugcuucgagaccaagcacaagugcaaccagaccugccucgaccgcaucgccgccggcaccuucaacgccggcgaguucucccuccccaccuucgacucccucaacaucaccgccgccucccucaacgacgacggccucgacaaccacaccauccuccucuacuacuccaccgccgccuccucccucgccgucacccucaugcucgccaucuucaucgucuacauggucucccgcgacaacgucuccugcuccaucugccucuga

SEQ ID NO: 124033 - RNA, 1755 nt, Artificial Sequence; identical to SEQ ID NO: 122856
  derived and/or modified CDS sequence (opt2) from hemagglutinin__InfluenzaB__AHL92794

SEQ ID NO: 124034 - RNA, 1755 nt, Artificial Sequence; identical to SEQ ID NO: 122856
  derived and/or modified CDS sequence (opt2) from hemagglutinin__InfluenzaB__AHL92805

SEQ ID NO: 124035 - RNA, 1755 nt, Artificial Sequence; identical to SEQ ID NO: 122856
  derived and/or modified CDS sequence (opt2) from hemagglutinin__InfluenzaB__AHL92816

SEQ ID NO: 124036 - RNA, 1755 nt, Artificial Sequence
  derived and/or modified CDS sequence (opt2) from hemagglutinin__InfluenzaB__AHL92827
augaaggccaucaucguccuccucauggucgucaccuccaacgccgaccgcaucugcaccggcaucaccuccuccaacuccccccacgucgucaagaccgccacccagggcgaggucaacgucaccggcgucaucccccucaccaccacccccaccaaguccuacuucgccaaccucaagggcacccgcacccgcggcaagcucugccccgacugccucaacugcaccgaccucgacgucgcccucggccgccccaugugcgucggcaccacccccuccgccaaggccuccauccuccacgagguccgccccgucaccuccggcugcuuccccaucaugcacgaccgcaccaagauccgccagcuccccaaccuccuccgcggcuacgagaacauccgccucuccacccagaacgucaucgacgccgagaaggcccccggcggccccuaccgccucggcaccuccggcuccugccccaacgccaccuccaagaucggcuucuucgccaccauggccugggccguccccaaggacaacuacaagaacgccaccaacccccucaccgucgagguccccuacaucugcaccgagggcgaggaccagaucaccgucuggggcuuccacuccgacaacaagacccagaugaagaaccucuacggcgacuccaacccccagaaguucaccuccuccgccaacggcgucaccacccacuacgucucccagaucggcgacuuccccgaccagaccgaggacggcggccucccccaguccggccgcaucgucgucgacuacaugaugcagaagcccggcaagaccggcaccaucgucuaccagcgcggcguccuccucccccagaaggucuggugcgccuccggccgcuccaaggucaucaagggcucccucccccucaucggcgaggccgacugccuccacgagaaguacggcggccucaacaaguccaagcccuacuacaccggcgagcacgccaaggccaucggcaacugccccaucugggucaagaccccccucaagcucgccaacggcaccaaguaccgcccccccgccaagcuccucaaggagcgcggcuucuucggcgccaucgccggcuuccucgagggcggcugggagggcaugaucgccggcuggcacggcuacaccucccacggcgcccacggcgucgccgucgccgccgaccucaaguccacccaggaggccaucaacaagaucaccaagaaccucaacucccucuccgagcucgaggucaagaaccuccagcgccucuccggcgccauggacgagcuccacaacgagauccucgagcucgacgagaaggucgacgaccuccgcgccgacaccaucuccucccagaucgagcucgccguccuccucuccaacgagggcaucaucaacuccgaggacgagcaccuccucgcccucgagcgcaagcucaagaagaugcucggccccuccgccgucgacaucggcaacggcugcuucgagaccaagcacaagugcaaccagaccugccucgaccgcaucgccgccggcaccuucaacgccggcgaguucucccuccccaccuucgacucccucaacaucaccgccgccucccucaacgacgacggccucgacaaccacaccauccuccucuacuacuccaccgccgccuccucccucgccgucacccucaugcucgccaucuucgucgucuacauggucucccgcgacaacgucuccugcuccaucugccucuga

SEQ ID NO: 124037 - RNA, 1755 nt, Artificial Sequence; identical to SEQ ID NO: 122856
  derived and/or modified CDS sequence (opt2) from hemagglutinin__InfluenzaB__AHL92838

SEQ ID NO: 124038 - RNA, 1755 nt, Artificial Sequence; identical to SEQ ID NO: 122856
  derived and/or modified CDS sequence (opt2) from hemagglutinin__InfluenzaB__AHL92849

SEQ ID NO: 124039 - RNA, 1755 nt, Artificial Sequence; identical to SEQ ID NO: 122856
  derived and/or modified CDS sequence (opt2) from hemagglutinin__InfluenzaB__AHL92860

SEQ ID NO: 124040 - RNA, 1758 nt, Artificial Sequence; identical to SEQ ID NO: 122674
  derived and/or modified CDS sequence (opt2) from hemagglutinin__InfluenzaB__AHL92871

SEQ ID NO: 124041 - RNA, 1755 nt, Artificial Sequence; identical to SEQ ID NO: 122462
  derived and/or modified CDS sequence (opt2) from hemagglutinin__InfluenzaB__AHL92882

SEQ ID NO: 124042 - RNA, 1758 nt, Artificial Sequence
  derived and/or modified CDS sequence (opt2) from hemagglutinin__InfluenzaB__AHL92893
augaaggccaucaucguccuccucauggucgucaccuccaacgccgaccgcaucugcaccggcaucaccuccuccaacuccccccacgucgucaagaccgccacccagggcgaggucaacgucaccggcgucaucccccucaccaccacccccaccaagucccacuucgccaaccucaagggcaccaagacccgcggcaagcucugccccaagugccucaacugcaccgaccucgacgucgcccucggccgccccaagugcaccggcaacauccccuccgccgaggucuccauccuccacgagguccgccccgucaccuccggcugcuuccccaucaugcacgaccgcaccaagauccgccagcuccccaaccuccuccgcggcuacgagcacauccgccucuccacccacaacgucaucaacgccgagaaggcccccggcggccccuacaagaucggcaccuccggcuccugccccaacgucaccaacggcaacggcuucuucgccaccauggccugggccguccccaagaacgacaacaacaagaccgccaccaacucccucaccaucgagguccccuacaucugcaccgagggcgaggaccagaucaccaucuggggcuuccacuccgacaaggagacccagauggccaagcucuacggcgacuccaagccccagaaguucaccuccuccgccaacggcgucaccacccacuacgucucccagaucggcggcuuccccaaccagaccgaggacggcggccucccccaguccggccgcaucgucgucgacuacaugguccagaaguccggcaagaccggcaccaucaccuaccagcgcggcauccuccucccccagaaggucuggugcgccuccggccgcuccaaggucaucaagggcucccucccccucaucggcgaggccgacugccuccacgagaaguacggcggccucaacaaguccaagcccuacuacaccggcgagcacgccaaggccaucggcaacugccccaucugggucaagaccccccucaagcucgccaacggcaccaaguaccgcccccccgccaagcuccucaaggagcgcggcuucuucggcgccaucgccggcuuccucgagggcggcugggagggcaugaucgccggcuggcacggcuacaccucccacggcgcccacggcgucgccgucgccgccgaccucaaguccacccaggaggccaucaacaagaucaccaagaaccucaacucccucuccgagcucgaggucaagaaccuccagcgccucuccggcgccauggacgagcuccacaacgagauccucgagcucgacgagaaggucgacgaccuccgcgccgacaccaucuccucccagaucgagcucgccguccuccucuccaacgagggcaucaucaacuccgaggacgagcaccuccucgcccucgagcgcaagcucaagaagaugcucggccccuccgccgucgagaucggcaacggcugcuucgagaccaagcacaagugcaaccagaccugccucgaccgcaucgccgccggcaccuucgacgccggcgaguucucccuccccaccuucgacucccucaacaucaccgccgccucccucaacgacgacggccucgacaaccacaccauccuccucuacuacuccaccgccgccuccucccucgccgucacccucaugaucgccaucuucaucgucuacauggucucccgcgacaacgucuccugcuccaucugccucuga

SEQ ID NO: 124043 - RNA, 1755 nt, Artificial Sequence; identical to SEQ ID NO: 123059
  derived and/or modified CDS sequence (opt2) from hemagglutinin__InfluenzaB__AHL92904

SEQ ID NO: 124044 - RNA, 1758 nt, Artificial Sequence
  derived and/or modified CDS sequence (opt2) from hemagglutinin__InfluenzaB__AHL92915
augaaggccaucaucguccuccucauggucgucaccuccaacgccgaccgcaucugcaccggcaucaccuccuccaacuccccccacgucgucaagaccgccacccagggcgaggucaacgucaccggcgucaucccccucaccaccacccccaccaagucccacuucgccaaccucaagggcaccaagacccgcggcaagcucugccccaagugccucaacugcaccgaccucgacgucgcccucggccgccccaagugcaccggcaacauccccuccgccgaggucuccauccuccacgagguccgccccgucaccuccggcugcuuccccaucaugcacgaccgcaccaagauccgccagcuccccaaccuccuccgcggcuacgagcacauccgccucuccacccacaacgucaucaacgccgagaaggcccccggcggccccuacaagaucggcaccuccggcuccugccccaacgucaccaacggcaacggcuucuucgccaccauggccugggccguccccaagaacgacaacaacaagaccgccaccaacucccucaccaucgagguccccuacaucugcaccgagggcgaggaccagaucaccaucuggggcuuccacuccgacaacgagacccagauggccaagcucuacggcgacuccaagccccagaaguucaccuccuccgccaacggcgucaccacccacuacgucucccagaucggcggcuuccccaaccagaccgaggacggcggccucccccaguccggccgcaucgucgucgacuacaugguccagaaguccggcaagaccggcaccaucaccuaccagcgcggcauccuccucccccagaaggucuggugcgccuccggccgcuccaaggucaucaagggcucccucccccucaucggcgaggccgacugccuccacgagaaguacggcggccucaacaaguccaagcccuacuacaccggcgagcacgccaaggccaucggcaacugccccaucugggucaagaccccccucaagcucgccaacggcaccaaguaccgcccccccgccaagcuccucaaggagcgcggcuucuucggcgccaucgccggcuuccucgagggcggcugggagggcaugaucgccggcuggcacggcuacaccucccacggcgcccacggcgucgccgucgccgccgaccucaaguccacccaggaggccaucaacaagaucaccaagaaccucaacucccucuccgagcucgaggucaagaaccuccagcgccucuccggcgccauggacgagcuccacaacgagauccucgagcucgacgagaaggucgacgaccuccgcgccgacaccaucuccucccagaucgagcucgccguccuccucuccaacgagggcaucaucaacuccgaggacgagcaccuccucgcccucgagcgcaagcucaagaagaugcucggccccuccgccgucgagaucggcaacggcugcuucgagaccaagcacaagugcaaccagaccugccucgaccgcaucgccgccggcaccuucgacgccggcgaguucucccuccccaccuucgacucccucaacaucaccgccgccucccucaacgacgacggccucgacaaccacaccauccuccucuacuacuccaccgccgccuccucccucgccgucacccucaugaucgccaucuucaucgucuacauggucucccgcgacaacgucuccugcuccaucugccucuga

SEQ ID NO: 124045 - RNA, 1758 nt, Artificial Sequence; identical to SEQ ID NO: 122674
  derived and/or modified CDS sequence (opt2) from hemagglutinin__InfluenzaB__AHL92926

SEQ ID NO: 124046 - RNA, 1755 nt, Artificial Sequence; identical to SEQ ID NO: 123635
  derived and/or modified CDS sequence (opt2) from hemagglutinin__InfluenzaB__AHL92937

SEQ ID NO: 124047 - RNA, 1758 nt, Artificial Sequence; identical to SEQ ID NO: 122550
  derived and/or modified CDS sequence (opt2) from hemagglutinin__InfluenzaB__AHL92948

SEQ ID NO: 124048 - RNA, 1758 nt, Artificial Sequence; identical to SEQ ID NO: 122550
  derived and/or modified CDS sequence (opt2) from hemagglutinin__InfluenzaB__AHL92959

SEQ ID NO: 124049 - RNA, 1758 nt, Artificial Sequence; identical to SEQ ID NO: 122550
  derived and/or modified CDS sequence (opt2) from hemagglutinin__InfluenzaB__AHL92970

SEQ ID NO: 124050 - RNA, 1758 nt, Artificial Sequence; identical to SEQ ID NO: 122550
  derived and/or modified CDS sequence (opt2) from hemagglutinin__InfluenzaB__AHL92981

SEQ ID NO: 124051 - RNA, 1758 nt, Artificial Sequence; identical to SEQ ID NO: 122550
  derived and/or modified CDS sequence (opt2) from hemagglutinin__InfluenzaB__AHL92992

SEQ ID NO: 124052 - RNA, 1758 nt, Artificial Sequence; identical to SEQ ID NO: 123975
  derived and/or modified CDS sequence (opt2) from hemagglutinin__InfluenzaB__AHL93004

SEQ ID NO: 124053 - RNA, 1758 nt, Artificial Sequence; identical to SEQ ID NO: 122550
  derived and/or modified CDS sequence (opt2) from hemagglutinin__InfluenzaB__AHL93015

SEQ ID NO: 124054 - RNA, 1758 nt, Artificial Sequence; identical to SEQ ID NO: 122550
  derived and/or modified CDS sequence (opt2) from hemagglutinin__InfluenzaB__AHL93026

SEQ ID NO: 124055 - RNA, 1755 nt, Artificial Sequence; identical to SEQ ID NO: 123999
  derived and/or modified CDS sequence (opt2) from hemagglutinin__InfluenzaB__AHL93037

SEQ ID NO: 124056 - RNA, 1755 nt, Artificial Sequence; identical to SEQ ID NO: 123999
  derived and/or modified CDS sequence (opt2) from hemagglutinin__InfluenzaB__AHL93048

SEQ ID NO: 124057 - RNA, 1755 nt, Artificial Sequence; identical to SEQ ID NO: 124028
  derived and/or modified CDS sequence (opt2) from hemagglutinin__InfluenzaB__AHL93059

SEQ ID NO: 124058 - RNA, 1755 nt, Artificial Sequence; identical to SEQ ID NO: 122856
  derived and/or modified CDS sequence (opt2) from hemagglutinin__InfluenzaB__AHL93070

SEQ ID NO: 124059 - RNA, 1755 nt, Artificial Sequence
  derived and/or modified CDS sequence (opt2) from hemagglutinin__InfluenzaB__AHL93081
augaaggccaucaucguccuccucauggucgucaccuccaacgccgaccgcaucugcaccggcaucaccuccuccaacuccccccacgucgucaagaccgccacccagggcgaggucaacgucaccggcgucaucccccucaccaccacccccaccaaguccuacuucgccaaccucaagggcacccgcacccgcggcaagcucugccccgacugccucaacugcaccgaccucgacgucgcccucggccgccccaugugcgucggcaccacccccuccgccaaggccuccauccuccacgagguccgccccgucaccuccggcugcuuccccaucaugcacgaccgcaccaagauccgccagcuccccaaccuccuccgcggcuacgagaacauccgccucuccacccagaacgucaucgacgccgagaaggcccccggcggccccuaccgccucggcaccuccggcuccugccccaacgccaccuccaagaucggcuucuucgccaccauggccugggccguccccaaggacaacuacaagaacgccaccaacccccucaccgucgagguccccuacaucugcaccgagggcgaggaccagaucaccgucuggggcuuccacuccgacaacaagacccagaugaagaaccucuacggcgacuccaacccccagaaguucaccuccuccgccaacggcgucaccacccacuacgucucccagaucggcgacuuccccgaccagaccgaggacggcggccucccccaguccggccgcaucgucgucgacuacaugaugcagaagcccggcaagaccggcaccaucgucuaccagcgcggcguccuccucccccagaaggucuggugcgccuccggccgcuccaaggucaucaagggcucccucccccucaucggcgaggccgacugccuccacgagaaguacggcggccucaacaaguccaagcccuacuacaccggcgagcacgccaaggccaucggcaacugccccaucugggucaagaccccccucaagcucgccaacggcaccaaguaccgcccccccgccaagcuccucaaggagcgcggcuucuucggcgccaucgccggcuuccucgagggcggcugggagggcaugaucgccggcuggcacggcuacaccucccacggcgcccacggcgucgccgucgccgccgaccucaaguccacccaggaggccaucaacaagaucaccaagaaccucaacucccucuccgagcucgaggucaagaaccuccagcgccucuccggcgccauggacgagcuccacaacgagauccucgagcucgacggcaaggucgacgaccuccgcgccgacaccaucuccucccagaucgagcucgccguccuccucuccaacgagggcaucaucaacuccgaggacgagcaccuccucgcccucgagcgcaagcucaagaagaugcucggccccuccgccgucgacaucggcaacggcugcuucgagaccaagcacaagugcaaccagaccugccucgaccgcaucgccgccggcaccuucaacgccggcgaguucucccuccccaccuucgacucccucaacaucaccgccgccucccucaacgacgacggccucgacaaccacaccauccuccucuacuacuccaccgccgccuccucccucgccgucacccucaugcucgccaucuucaucgucuacauggucucccgcgacaacgucuccugcuccaucugccucuga

SEQ ID NO: 124060 - RNA, 1755 nt, Artificial Sequence; identical to SEQ ID NO: 122856
  derived and/or modified CDS sequence (opt2) from hemagglutinin__InfluenzaB__AHL93092

SEQ ID NO: 124061 - RNA, 1755 nt, Artificial Sequence; identical to SEQ ID NO: 122856
  derived and/or modified CDS sequence (opt2) from hemagglutinin__InfluenzaB__AHL93103

SEQ ID NO: 124062 - RNA, 1755 nt, Artificial Sequence; identical to SEQ ID NO: 122856
  derived and/or modified CDS sequence (opt2) from hemagglutinin__InfluenzaB__AHL93114

SEQ ID NO: 124063 - RNA, 1755 nt, Artificial Sequence; identical to SEQ ID NO: 122603
  derived and/or modified CDS sequence (opt2) from hemagglutinin__InfluenzaB__AHL93125

SEQ ID NO: 124064 - RNA, 1755 nt, Artificial Sequence
  derived and/or modified CDS sequence (opt2) from hemagglutinin__InfluenzaB__AHL93136
augaaggccaucaucguccuccucauggucgucaccuccaacgccgaccgcaucugcaccggcaucaccuccuccaacuccccccacgucgucaagaccgccacccagggcgaggucaacgucaccggcgucaucccccucaccaccacccccaccaaguccuacuucgccaaccucaagggcacccgcacccgcggcaagcucugccccgacugccucaacugcaccgaccucgacgucgcccucggccgccccaugugcgucggcaccacccccuccgccaaggccuccauccuccacgagguccgccccgucaccuccggcugcuuccccaucaugcacgaccgcaccaagauccgccagcuccccaaccuccuccgcggcuacgagaacauccgccucuccacccagaacgucaucgacgccgagaaggcccccggcggccccuaccgccucggcaccuccggcuccugccccaacgccaccuccaagaucggcuucuucgccaccauggccugggccguccccaaggacaacuacaagaacgccaccaacccccucaccgucgagguccccuacaucugcaccgagggcgaggaccagaucaccgucuggggcuuccacuccgacaacaagacccagaugaagaaccucuacggcgacuccaacccccagaaguucaccuccuccgccaacggcgucaccacccacuacgucucccagaucggcgacuuccccgaccagaccgaggacggcggccucccccaguccggccgcaucgucgucgacuacaugaugcagaagcccggcaagaccggcaccaucgucuaccagcgcggcguccuccucccccagcgcgucuggugcgccuccggccgcuccaaggucaucaagggcucccucccccucaucggcgaggccgacugccuccacgagaaguacggcggccucaacaaguccaagcccuacuacaccggcgagcacgccaaggccaucggcaacugccccaucugggucaagaccccccucaagcucgccaacggcaccaaguaccgcccccccgccaagcuccucaaggagcgcggcuucuucggcgccaucgccggcuuccucgagggcggcugggagggcaugaucgccggcuggcacggcuacaccucccacggcgcccacggcgucgccgucgccgccgaccucaaguccacccaggaggccaucaacaagaucaccaagaaccucaacucccucuccgagcucgaggucaagaaccuccagcgccucuccggcgccauggacgagcuccacaacgagauccucgagcucgacgagaaggucgacgaccuccgcgccgacaccaucuccucccagaucgagcucgccguccuccucuccaacgagggcaucaucaacuccgaggacgagcaccuccucgcccucgagcgcaagcucaagaagaugcucggccccuccgccgucgacaucggcaacggcugcuucgagaccaagcacaagugcaaccagaccugccucgaccgcaucgccgccggcaccuucaacgccggcgaguucucccuccccaccuucgacucccucaacaucaccgccgccucccucaacgacgacggccucgacaaccacaccauccuccucuacuacuccaccgccgccuccucccucgccgucacccucaugcucgccaucuucaucgucuacauggucucccgcgacaacgucuccugcuccaucugccucuga

SEQ ID NO: 124065 - RNA, 1755 nt, Artificial Sequence; identical to SEQ ID NO: 122603
  derived and/or modified CDS sequence (opt2) from hemagglutinin__InfluenzaB__AHL93147

SEQ ID NO: 124066 - RNA, 1755 nt, Artificial Sequence; identical to SEQ ID NO: 122856
  derived and/or modified CDS sequence (opt2) from hemagglutinin__InfluenzaB__AHL93158

SEQ ID NO: 124067 - RNA, 1755 nt, Artificial Sequence
  derived and/or modified CDS sequence (opt2) from hemagglutinin__InfluenzaB__AHL93169
augaaggccaucaucguccuccucauggucgucaccuccaacgccgaccgcaucugcaccggcaucaccuccuccaacuccccccacgucgucaagaccgccacccagggcgaggucaacgucaccggcgucaucccccucaccaccacccccaccaaguccuacuucgccaaccucaagggcacccgcacccgcggcaagcucugccccgacugcuucaacugcaccgaccucgacgucgcccucggccgccccaugugcgucggcaccacccccuccgccaaggccuccauccuccacgagguccgccccgucaccuccggcugcuuccccaucaugcacgaccgcaccaagauccgccagcuccccaaccuccuccgcggcuacgagaacauccgccucuccacccagaacgucaucgacgccgagaaggcccccggcggccccuaccgccucggcaccuccggcuccugccccaacgccaccuccaagaucggcuucuucgccaccauggccugggccguccccaaggacaacuacaagaacgccaccaacccccucaccgucgagguccccuacaucugcaccgagggcgaggaccagaucaccgucuggggcuuccacuccgacaacaagacccagaugaagaaccucuacggcgacuccaacccccagaaguucaccuccuccgccaacggcgucaccacccacuacgucucccagaucggcgacuuccccgaccagaccgaggacggcggccucccccaguccggccgcaucgucgucgacuacaugaugcagaagcccggcaagaccggcaccaucgucuaccagcgcggcguccuccucccccagaaggucuggugcgccuccggccgcuccaaggucaucaagggcucccucccccucaucggcgaggccgacugccuccacgagaaguacggcggccucaacaaguccaagcccuacuacaccggcgagcacgccaaggccaucggcaacugccccaucugggucaagaccccccucaagcucgccaacggcaccaaguaccgcccccccgccaagcuccucaaggagcgcggcuucuucggcgccaucgccggcuuccucgagggcggcugggagggcaugaucgccggcuggcacggcuacaccucccacggcgcccacggcgucgccgucgccgccgaccucaaguccacccaggaggccaucaacaagaucaccaagaaccucaacucccucuccgagcucgaggucaagaaccuccagcgccucuccggcgccauggacgagcuccacaacgagauccucgagcucgacgagaaggucgacgaccuccgcgccgacaccaucuccucccagaucgagcucgccguccuccucuccaacgagggcaucaucaacuccgaggacgagcaccuccucgcccucgagcgcaagcucaagaagaugcucggccccuccgccgucgacaucggcaacggcugcuucgagaccaagcacaagugcaaccagaccugccucgaccgcaucgccgccggcaccuucaacgccggcgaguucucccuccccaccuucgacucccucaacaucaccgccgccucccucaacgacgacggccucgacaaccacaccauccuccucuacuacuccaccgccgccuccucccucgccgucacccucaugcucgccaucuucaucgucuacauggucucccgcgacaacgucuccugcuccaucugccucuga

SEQ ID NO: 124068 - RNA, 1755 nt, Artificial Sequence
  derived and/or modified CDS sequence (opt2) from hemagglutinin__InfluenzaB__AHL93180
augaaggccaucaucguccuccucauggucgucaccuccaacgccgaccgcaucugcaccggcaucaccuccuccaacuccccccacgucgucaagaccgccacccagggcgaggucaacgucaccggcgucaucccccucaccaccacccccaccaaguccuacuucgccaaccucaagggcacccgcacccgcggcaagcucugccccgacugccucaacugcaccgaccucgacgucgcccucggccgccccaugugcgucggcaccacccccuccgccaaggccuccauccuccacgagguccgccccgucaccuccggcugcuuccccaucauccacgaccgcaccaagauccgccagcuccccaaccuccuccgcggcuacgagaacauccgccucuccacccagaacgucaucgacgccgagaaggcccccggcggccccuaccgccucggcaccuccggcuccugccccaacgccaccuccaaguccggcuucuucgccaccauggccugggccguccccaaggacaacaacaagaacgccaccaacccccucaccgucgagguccccuacaucugcaccgagggcgaggaccagaucaccgucuggggcuuccacuccgacaacaagacccagaugaagaaccucuacggcgacuccaacccccagaaguucaccuccuccgccaacggcgucaccacccacuacgucucccagaucggcuccuuccccgaccagaccgaggacggcggccucccccaguccggccgcaucgucgucgacuacaugaugcagaagcccggcaagaccggcaccaucgucuaccagcgcggcguccuccucccccagcgcgucuggugcgccuccggccgcuccaaggucaucaagggcucccucccccucaucggcgaggccgacugccuccacgagaaguacggcggccucaacaaguccaagcccuacuacaccggcgagcacgccaaggccaucggcaacugccccaucugggucaagaccccccucaagcucgccaacggcaccaaguaccgcccccccgccaagcuccucaaggagcgcggcuucuucggcgccaucgccggcuuccucgagggcggcugggagggcaugaucgccggcuggcacggcuacaccucccacggcgcccacggcgucgccgucgccgccgaccucaaguccacccaggaggccaucaacaagaucaccaagaaccucaacucccucuccgagcucgaggucaagaaccuccagcgccucuccggcgccauggacgagcuccacaacgagauccucgagcucgacgagaaggucgacgaccuccgcgccgacaccaucuccucccagaucgagcucgccguccuccucuccaacgagggcaucaucaacuccgaggacgagcaccuccucgcccucgagcgcaagcucaagaagaugcucggccccuccgccgucgagaucggcaacggcugcuucgagaccaagcacaagugcaaccagaccugccucgaccgcaucgccgccggcaccuucaacgccggcgaguucucccuccccaccuucgacucccucaacaucaccgccgccucccucaacgacgacggccucgacaaccacaccauccuccucuacuacuccaccgccgccuccucccucgccgucacccucaugcucgccaucuucaucgucuacauggucucccgcgacaacgucuccugcuccaucugccucuga

SEQ ID NO: 124069 - RNA, 1755 nt, Artificial Sequence
  derived and/or modified CDS sequence (opt2) from hemagglutinin__InfluenzaB__AHL93191
augaaggccaucaucguccuccucauggucgucaccuccaacgccgaccgcaucugcaccggcaucaccuccuccaacuccccccacgucgucaagaccgccacccagggcgaggucaacgucaccggcgucaucccccucaccaccacccccaccaaguccuacuucgccaaccucaagggcacccgcacccgcggcaagcucugccccgacugccucaacugcaccgaccucgacgucgcccucggccgccccaugugcgucggcaccacccccuccgccaaggccuccauccuccacgagguccgccccgucaccuccggcugcuuccccaucaugcacgaccgcaccaagauccgccagcuccccaaccuccuccgcggcuacgagaacauccgccucuccacccagaacgucaucgacgccgagaaggcccccggcggccccuaccgccucggcaccuccggcuccugccccaacgacaccuccaagaucggcuucuucgccaccauggccugggccguccccaaggacaacuacaagaacgccaccaacccccucaccgucgagguccccuacaucugcaccgagggcgaggaccagaucaccgucuggggcuuccacuccgacaacaagacccagaugaagaaccucuacggcgacuccaacccccagaaguucaccuccuccgccaacggcgucaccacccacuacgucucccagaucggcgacuuccccgaccagaccgaggacggcggccucccccaguccggccgcaucgucgucgacuacaugaugcagaagcccggcaagaccggcaccaucgucuaccagcgcggcguccuccucccccagaaggucuggugcgccuccggccgcuccaaggucaucaagggcucccucccccucaucggcgaggccgacugccuccacgagaaguacggcggccucaacaaguccaagcccuacuacaccggcgagcacgccaaggccaucggcaacugccccaucugggucaagaccccccucaagcucgccaacggcaccaaguaccgcccccccgccaagcuccucaaggagcgcggcuucuucggcgccaucgccggcuuccucgagggcggcugggagggcaugaucgccggcuggcacggcuacaccucccacggcgcccacggcgucgccgucgccgccgaccucaaguccacccaggaggccaucaacaagaucaccaagaaccucaacucccucuccgagcucgaggucaagaaccuccagcgccucuccggcgccauggacgagcuccacaacgagauccucgagcucgacgagaaggucgacgaccuccgcgccgacaccaucuccucccagaucgagcucgccguccuccucuccaacgagggcaucaucaacuccgaggacgagcaccuccucgcccucgagcgcaagcucaagaagaugcucggccccuccgccgucgacaucggcaacggcugcuucgagaccaagcacaagugcaaccagaccugccucgaccgcaucgccgccggcaccuucaacgccggcgaguucucccuccccaccuucgacucccucaacaucaccgccgccucccucaacgacgacggccucgacaaccacaccauccuccucuacuacuccaccgccgccuccucccucgccgucacccucaugcucgccaucuucaucgucuacauggucucccgcgacaacgucuccugcuccaucugccucuga

SEQ ID NO: 124070 - RNA, 1755 nt, Artificial Sequence
  derived and/or modified CDS sequence (opt2) from hemagglutinin__InfluenzaB__AHL93202
augaaggccaucaucguccuccucauggucgucaccuccaacgccgaccgcaucugcaccggcaucaccuccuccaacuccccccacgucgucaagaccgccacccagggcgaggucaacgucaccggcgucaucccccucaccaccacccccaccaaguccuacuucgccaaccucaagggcacccgcacccgcggcaagcucugccccgacugccucaacugcaccgaccucgacgucgcccucggccgccccaugugcgucggcaccacccccuccgccaaggccuccauccuccacgagguccgccccgucaccuccggcugcuuccccaucaugcacgaccgcaccaagauccgccagcuccccaaccuccuccgcggcuacgagaacauccgccucuccacccagaacgucaucgacgccgagaaggcccccggcggccccuaccgccucggcaccuccggcuccugccccaacgccaccuccaagaucggcuucuucgccaccauggccugggccguccccaaggacaacuacaagaacgccaccaacccccucaccgucgagguccccuacaucugcaccgagggcgaggaccagaucaccgucuggggcuuccacuccgacaacaagacccagaugaagaaccucuacggcgacuccaacccccagaaguucaccuccuccgccaacggcgucaccacccacuacgucucccagaucggcgacuuccccgaccagaccgaggacggcggccucccccaguccggccgcaucgucgucgacuacaugaugcagaagcccggcaagaccggcaccaucgucuaccagcgcggcguccuccucccccagaaggucuggugcgccuccggccgcuccaaggucaucaagggcucccucccccucaucggcgaggccgacugccuccacgagaaguacggcggccucaacaaguccaagcccuacuacaccggcgagcacgccaaggccaucggcaacugccccaucugggucaagaccccccucaagcucgccaacggcaccaaguaccgcccccccgccaagcuccucaaggagcgcggcuucuucggcgccaucgccggcuuccucgagggcggcugggagggcaugaucgccggcuggcacggcuacaccucccacggcgcccacggcgucgccgucgccgccgaccucaaguccacccaggaggccaucaacaagaucaccaagaaccucaacucccucuccgagcucgaggucaagaaccuccagcgccucuccggcgccauggacgaguuccacaacgagauccucgagcucgacgagaaggucgacgaccuccgcgccgacaccaucuccucccagaucgagcucgccguccuccucuccaacgagggcaucaucaacuccgaggacgagcaccuccucgcccucgagcgcaagcucaagaagaugcucggccccuccgccgucgacaucggcaacggcugcuucgagaccaagcacaagugcaaccagaccugccucgaccgcaucgccgccggcaccuucaacgccggcgaguucucccuccccaccuucgacucccucaacaucaccgccgccucccucaacgacgacggccucgacaaccacaccauccuccucuacuacuccaccgccgccuccucccucgccgucacccucaugcucgccaucuucaucgucuacauggucucccgcgacaacgucuccugcuccaucugccucuga

SEQ ID NO: 124071 - RNA, 1758 nt, Artificial Sequence; identical to SEQ ID NO: 123025
  derived and/or modified CDS sequence (opt2) from hemagglutinin__InfluenzaB__AHL93213

SEQ ID NO: 124072 - RNA, 1758 nt, Artificial Sequence; identical to SEQ ID NO: 123025
  derived and/or modified CDS sequence (opt2) from hemagglutinin__InfluenzaB__AHL93224

SEQ ID NO: 124073 - RNA, 1758 nt, Artificial Sequence
  derived and/or modified CDS sequence (opt2) from hemagglutinin__InfluenzaB__AHL93235
augaaggccaucaucguccuccucauggucgucaccuccaacgccgaccgcaucugcaccggcaucaccuccuccaacuccccccacgucgucaagaccgccacccagggcgaggucaacgucaccggcgucaucccccucaccaccacccccaccaagucccacuucgccaaccucaagggcaccgagacccgcggcaagcucugccccaagugccccaacugcaccgaccucgacgucgcccucggccgccccaagugcaccggcaagauccccuccgcccgcgucuccauccuccacgagguccgccccgucaccuccggcugcuuccccaucaugcacgaccgcaccaagauccgccagcuccccaaccuccuccgcggcuacgagcacauccgccucuccacccacaacgucaucaacgccgagaacgcccccggcggccccuacaagaucggcaccuccggcuccugccccaacgucaccaacggcaacggcuucuucgccaccauggccugggccguccccaagaacgacaagaacaagaccgccaccaacccccucaccaucgagguccccuacaucugcaccgagggcgaggaccagaucaccgucuggggcuuccacuccgacaacgagacccagauggccaagcucuacggcgacuccaagccccagaaguucaccuccuccgccaacggcgucaccacccacuacgucucccagaucggcggcuuccccaaccagaccgaggacggcggccucccccaguccggccgcaucgucgucgacuacaugguccagaaguccggcaagaccggcaccaucaccuaccagcgcggcauccuccucccccagaaggucuggugcgccuccggccgcuccaaggucaucaagggcucccucccccucaucggcgaggccgacugccuccacgagaaguacggcggccucaacaaguccaagcccuacuacaccggcgagcacgccaaggccaucggcaacugccccaucugggucaagaccccccucaagcucgccaacggcaccaaguaccgcccccccgccaagcuccucaaggagcgcggcuucuucggcgccaucgccggcuuccucgagggcggcugggagggcaugaucgccggcuggcacggcuacaccucccacggcgcccacggcgucgccgucgccgccgaccucaaguccacccaggaggccaucaacaagaucaccaagaaccucaacucccucuccgagcucgaggucaagaaccuccagcgccucuccggcgccauggacgagcuccacaacgagauccucgagcucgacgagaaggucgacgaccuccgcgccgacaccaucuccucccagaucgagcucgccguccuccucuccaacgagggcaucaucaacuccgaggacgagcaccuccucgcccucgagcgcaagcucaagaagaugcucggccccuccgccgucgagaucggcaacggcugcuucgagaccaagcacaagugcaaccagaccugccucgaccgcaucgccgccggcaccuucgacgccggcgaguucucccuccccaccuucgacucccucaacaucaccgccgccucccucaacaacgacggccucgacaaccacaccauccuccucuacuacuccaccgccgccuccucccucgccgucacccucaugaucgccaucuucgucgucuacauggucucccgcgacaacgucuccugcuccaucugccucuga

SEQ ID NO: 124074 - RNA, 1758 nt, Artificial Sequence
  derived and/or modified CDS sequence (opt2) from hemagglutinin__InfluenzaB__AHL93246
augaaggccaucaucguccuccucauggucgucaccuccaacgccgaccgcaucugcaccggcaucaccuccuccaacuccccccacgucgucaagaccgccacccagggcgaggucaacgucaccggcgucaucccccucaccaccacccccaccaagucccacuucgccaaccucaagggcaccgagacccgcggcaagcucugccccaagugccucaacugcaccgaccucgacgucgcccucggccgccccaagugcaccggcaacauccccuccgcccgcgucuccauccuccacgagguccgccccgucaccuccggcugcuuccccaucaugcacgaccgcaccaagauccgccagcuccccaaccuccuccgcggcuacgagcacauccgccucuccacccacaacgucaucaacgccgagaacgcccccggcggccccuacaagaucggcaccuccggcuccugccccaacgucaccaacggcaacggcuucuucgccaccauggccugggccguccccaagaacgacaagaacaagaccgccaccaacucccucaccaucgagguccccuacaucugcaccgagggcgaggaccagaucaccaucuggggcuuccacuccgacaacgagacccagauggccaagcucuacggcgacuccaagccccagaaguucaccuccuccgccaacggcgucaccacccacuacgucucccagaucggcggcuuccccaaccagaccgaggacggcggccucccccaguccggccgcaucgucgucgacuacaugguccagaaguccggcaagaccggcaccaucaccuaccagcgcggcauccuccucccccagaaggucuggugcgccuccggccgcuccaaggucaucaagggcucccucccccucaucggcgaggccgacugccuccacgagaaguacggcggccucaacaaguccaagcccuacuacaccggcgagcacgccaaggccaucggcaacugccccaucugggucaagaccccccucaagcucgccaacggcaccaaguaccgcccccccgccaagcuccucaaggagcgcggcuucuucggcgccaucgccggcuuccucgagggcggcugggagggcaugaucgccggcuggcacggcuacaccucccacggcgcccacggcgucgccgucgccgccgaccucaaguccacccaggaggccaucaacaagaucaccaagaaccucaacucccucggcgagcucgaggucaagaaccuccagcgccucuccggcgccauggacgagcuccacaacgagauccucgagcucgacgagaaggucgacgaccuccgcgccgacaccaucuccucccagaucgagcucgccguccuccucuccaacgagggcaucaucaacuccgaggacgagcaccuccucgcccucgagcgcaagcucaagaagaugcucggccccuccgccgucgagaucggcaacggcugcuucgagaccaagcacaagugcaaccagaccugccucgaccgcaucgccgccggcaccuucgacgccggcgaguucucccuccccaccuucgacucccucaacaucaccgccgccucccucaacgacgacggccucgacaaccacaccauccuccucuacuacuccaccgccgccuccucccucgccgucacccucaugaucgccaucuucgucgucuacauggucucccgcgacaacgucuccugcuccaucugccucuga

SEQ ID NO: 124075 - RNA, 1758 nt, Artificial Sequence; identical to SEQ ID NO: 123025
  derived and/or modified CDS sequence (opt2) from hemagglutinin__InfluenzaB__AHL93257

SEQ ID NO: 124076 - RNA, 1758 nt, Artificial Sequence; identical to SEQ ID NO: 123358
  derived and/or modified CDS sequence (opt2) from hemagglutinin__InfluenzaB__AHL93268

SEQ ID NO: 124077 - RNA, 1758 nt, Artificial Sequence
  derived and/or modified CDS sequence (opt2) from hemagglutinin__InfluenzaB__AHL93279
augaaggccaucaucguccuccucauggucgucaccuccaacgccgaccgcaucugcaccggcaucaccuccuccaacuccccccacgucgucaagaccgccacccagggcgaggucaacgucaccggcgucaucccccucaccaccacccccaccaagucccacuucgccaaccucaagggcaccgagacccgcggcaagcucugccccaagugccucaacugcaccgaccucgacgucgcccucggccgccccaagugcaccggcaagauccccuccgcccgcgucuccauccuccacgagguccgccccgucaccuccggcugcuuccccaucaugcacgaccgcaccaagauccgccagcuccccaaccuccuccgcggcuacgagcacauccgccucuccacccacaacgucaucaacgccgagaacgcccccggcggccccuacaagaucggcaccuccggcuccugccccaacaucaccaacggcaacggcuucuucgccaccauggccugggccguccccaagaacgacaagaacaagaccgccaccaacccccucaccaucgagguccccuacaucugcaccgagggcgaggaccagaucaccgucuggggcuuccacuccgacaacgagacccagauggccaagcucuacggcgacuccaagccccagaaguucaccuccuccgccaacggcgucaccacccacuacgucucccagaucggcggcuuccccaaccagaccgaggacggcggccucccccaguccggccgcaucgucgucgacuacaugguccagaaguccggcaagaccggcaccaucaccuaccagcgcggcauccuccucccccagaaggucuggugcgccuccggcaaguccaaggucaucaagggcucccucccccucaucggcgaggccgacugccuccacgagaaguacggcggccucaacaaguccaagcccuacuacaccggcgagcacgccaaggccaucggcaacugccccaucugggucaagaccccccucaagcucgccaacggcaccaaguaccgcccccccgccaagcuccucaaggagcgcggcuucuucggcgccaucgccggcuuccucgagggcggcugggagggcaugaucgccggcuggcacggcuacaccucccacggcgcccacggcgucgccgucgccgccgaccucaaguccacccaggaggccaucaacaagaucaccaagaaccucaacucccucuccgagcucgaggucaagaaccuccagcgccucuccggcgccauggacgagcuccacaacgagauccucgagcucgacgagaaggucgacgaccuccgcgccgacaccaucuccucccagaucgagcucgccguccuccucuccaacgagggcaucaucaacuccgaggacgagcaccuccucgcccucgagcgcaagcucaagaagaugcucggccccuccgccgucgagaucggcaacggcugcuucgagaccaagcacaagugcaaccagaccugccucgaccgcaucgccgccggcaccuucgacgccggcgaguucucccuccccaccuucgacucccucaacaucaccgccgccucccucaacgacgacggccucgacaaccacaccauccuccucuacuacuccaccgccgccuccucccucgccgucacccucaugaucgccaucuucgucgucuacauggucucccgcgacaacgucuccugcuccaucugccucuga

SEQ ID NO: 124078 - RNA, 1758 nt, Artificial Sequence; identical to SEQ ID NO: 123025
  derived and/or modified CDS sequence (opt2) from hemagglutinin__InfluenzaB__AHL93290

SEQ ID NO: 124079 - RNA, 1758 nt, Artificial Sequence
  derived and/or modified CDS sequence (opt2) from hemagglutinin__InfluenzaB__AHL93301
augaaggccaucaucguccuccucauggucgucaccuccaacgccgaccgcaucugcaccggcaucaccuccuccaacuccccccacgucgucaagaccgccacccagggcgaggucaacgucaccggcgucaucccccucaccaccacccccaccaagucccacuucgccaaccucaagggcaccgagacccgcggcaagcucugccccaagugccucaacugcaccgaccucgacgucgcccucggccgccccaagugcaccggcaagauccccuccgcccgcgucuccauccuccacgagguccgccccgucaccuccggcugcuuccccaucaugcacgaccgcaccaagauccgccagcuccccaaccuccuccgcggcuacgagcacauccgccucuccacccacaacgucaucaacgccgagaacgcccccggcggccccuacaagaucggcaccuccggcuccugccccaacaucaccaacggcaacggcuucuucgccaccauggccugggccguccccaagaacgacaagaacaagaccgccaccaacccccucaccaucgagguccccuacaucugcaccgagggcgaggaccagaucaccgucuggggcuuccacuccgacaacgagacccagauggccaagcucuacggcgacuccaagccccagaaguucaccuccuccgccaacggcgucaccacccacuacgucucccagaucggcggcuuccccaaccagaccgaggacggcggccucccccaguccggccgcaucgucgucgacuacaugguccagaaguccggcaagaccggcaccaucaccuaccagcgcggcauccuccucccccagaaggucuggugcgccuccggccgcuccaaggucaucaagggcucccucccccucaucggcgaggccgacugccuccacgagaaguacggcggccucaacaaguccaagcccuacuacaccggcgagcacgccaaggccaucggcaacugccccaucugggucaagaccccccucaagcucgccaacggcaccaaguaccgcccccccgccaagcuccucaaggagcgcggcuucuucggcgccaucgccggcuuccucgagggcggcugggagggcaugaucgccggcuggcacggcuacaccucccacggcgcccacggcgucgccgucgccgccgaccucaaguccacccaggaggccaucaacaagaucaccaagaaccucaacucccucuccgagcucgaggucaagaaccuccagcgccucuccggcgccauggacgagcuccacaacgagauccucgagcucgacgagaaggucgacgaccuccgcgccgacaccaucuccucccagaucgagcucgccguccuccucuccaacgagggcaucaucaacuccgaggacgagcaccuccucgcccucgagcgcaagcucaagaagaugcucggccccuccgccgucgagaucggcaacggcugcuucgagaccaagcacaagugcaaccagaccugccucgaccgcaucgccgccggcaccuucaacgccggcgaguucucccuccccaccuucgacucccucaacaucaccgccgccucccucaacgacgacggccucgacaaccacaccauccuccucuacuacuccaccgccgccuccucccucgccgucacccucaugaucgccaucuucgucgucuacauggucucccgcgacaacgucuccugcuccaucugccucuga

SEQ ID NO: 124080 - RNA, 1758 nt, Artificial Sequence
  derived and/or modified CDS sequence (opt2) from hemagglutinin__InfluenzaB__AHL93312
augaaggccaucaucguccuccucauggucgucaccuccaacgccgaccgcaucugcaccggcaucaccuccuccaacuccccccacgucgucaagaccgccacccagggcgaggucaacgucaccggcgucaucccccucaccaccacccccaccaagucccacuucgccaaccucaagggcaccgagacccgcggcaagcucugccccaagugccucaacugcaccgaccucgacgucgcccucggccgccccaagugcaccggcaagauccccuccgcccgcgucuccauccuccacgagguccgccccgucaccuccggcugcuuccccaucaugcacgaccgcaccaagauccgccagcuccccaaccuccuccgcggcuacgagcacauccgccucuccacccacaacgucaucaacgccgagaacgcccccggcggccccuacaagaucggcaccuccggcuccugccccaacaucaccaacggcaacggcuucuacgccaccauggccugggccguccccaagaacgacaagaacaagaccgccaccaacccccucaccaucgagguccccuacaucugcaccgagggcgaggaccagaucaccgucuggggcuuccacuccgacaacgagacccagauggccaagcucuacggcgacuccaagccccagaaguucaccuccuccgccaacggcgucaccacccacuacgucucccagaucggcggcuuccccaaccagaccgaggacggcggccucccccaguccggccgcaucgucgucgacuacaugguccagaaguccggcaagaccggcaccaucaccuaccagcgcggcauccuccucccccagaaggucuggugcgccuccggccgcuccaaggucaucaagggcucccucccccucaucggcgaggccgacugccuccacgagaaguacggcggccucaacaaguccaagcccuacuacaccggcgagcacgccaaggccaucggcaacugccccaucugggucaagaccccccucaagcucgccaacggcaccaaguaccgcccccccgccaagcuccucaaggagcgcggcuucuucggcgccaucgccggcuuccucgagggcggcugggagggcaugaucgccggcuggcacggcuacaccucccacggcgcccacggcgucgccgucgccgccgaccucaaguccacccaggaggccaucaacaagaucaccaagaaccucaacucccucuccgagcucgaggucaagaaccuccagcgccucuccggcgccauggacgagcuccacaacgagauccucgagcucgacgagaaggucgacgaccuccgcgccgacaccaucuccucccagaucgagcucgccguccuccucuccaacgagggcaucaucaacuccgaggacgagcaccuccucgcccucgagcgcaagcucaagaagaugcucggccccuccgccgucgagaucggcaacggcugcuucgagaccaagcacaagugcaaccagaccugccucgaccgcaucgccgccggcaccuucgacgccggcgaguucucccuccccaccuucgacucccucaacaucaccgccgccucccucaacgacgacggccucgacaaccacaccauccuccucuacuacuccaccgccgccuccucccucgccgucacccucaugaucgccaucuucgucgucuacauggucucccgcgacaacgucuccugcuccaucugccucuga

SEQ ID NO: 124081 - RNA, 1758 nt, Artificial Sequence
  derived and/or modified CDS sequence (opt2) from hemagglutinin__InfluenzaB__AHL93323
augaaggccaucaucguccuccucauggucgucaccuccaacgccgaccgcaucugcaccggcaucaccuccuccaacuccccccacgucgucaagaccgccacccagggcgaggucaacgucaccggcgucaucccccucaccaccacccccaccaagucccacuucgccaaccucaagggcaccgagacccgcggcaagcucugccccaagugccucaacugcaccgaccucgacgucgcccucggccgccccaagugcaccggcaagauccccuccgcccgcgucuccauccuccacgagguccgccccgucaccuccggcugcuuccccaucaugcacgaccgcaccaagauccgccagcuccccaaccuccuccgcggcuacgagcacauccgccucuccacccacaacgucaucaacgccgagaacgcccccggcggccccuacaagaucggcaccuccggcuccugccccaacaucaccaacggcaacggcuucuucgccaccauggccugggccguccccaagaacgacaagaacaagaccgccaccaacccccucaccaucgagguccccuacaucugcaccgagggcgaggaccagaucaccgucuggggcuuccacuccgacaacgagacccagauggccaagcucuacggcgacuccaagccccagaaguucaccuccuccgccaacggcgucaccacccacuacgucucccagaucggcggcuuccccaaccagaccgaggacggcggccucccccaguccggccgcaucgucgucgacuacaugguccagaaguccggcaagaccggcaccaucaccuaccagcgcggcauccuccucccccagaaggucuggugcaccuccggccgcuccaaggucaucaagggcucccucccccucaucggcgaggccgacugccuccacgagaaguacggcggccucaacaaguccaagcccuacuacaccggcgagcacgccaaggccaucggcaacugccccaucugggucaagaccccccucaagcucgccaacggcaccaaguaccgcccccccgccaagcuccucaaggagcgcggcuucuucggcgccaucgccggcuuccucgagggcggcugggagggcaugaucgccggcuggcacggcuacaccucccacggcgcccacggcgucgccgucgccgccgaccucaaguccacccaggaggccaucaacaagaucaccaagaaccucaacucccucuccgagcucgaggucaagaaccuccagcgccucuccggcgccauggacgagcuccacaacgagauccucgagcucgacgagaaggucgacgaccuccgcgccgacaccaucuccucccagaucgagcucgccguccuccucuccaacgagggcaucaucaacuccgaggacgagcaccuccucgcccucgagcgcaagcucaagaagaugcucggccccuccgccgucgagaucggcaacggcugcuucgagaccaagcacaagugcaaccagaccugccucgaccgcaucgccgccggcaccuucgacgccggcgaguucucccuccccaccuucgacucccucaacaucaccgccgccucccucaacgacgacggccucgacaaccacaccauccuccucuacuacuccaccgccgccuccucccucgccgucacccucaugaucgccaucuucgucgucuacauggucucccgcgacaacgucuccugcuccaucugccucuga

SEQ ID NO: 124082 - RNA, 1758 nt, Artificial Sequence
  derived and/or modified CDS sequence (opt2) from hemagglutinin__InfluenzaB__AHL93334
augaaggccaucaucguccuccucauggucgucaccuccaacgccgaccgcaucugcaccggcaucaccuccuccaacuccccccacgucgucaagaccgccacccagggcgaggucaacgucaccggcgucaucccccucaccaccacccccaccaagucccacuucgccaaccucaagggcaccgagacccgcggcaagcucugccccaagugccccaacugcaccgaccucgacgucgcccucggccgccccaagugcaccggcaagauccccuccgcccgcgucuccauccuccacgagguccgccccgucaccuccggcugcuuccccaucaugcacgaccgcaccaagauccgccagcuccccaaccuccuccgcggcuacgagcacauccgccucuccacccacaacgucaucaacgccgagaacgcccccggcggccccuacaagaucggcaccuccggcuccugccccaacaucaccaacggcaacggcuucuucgccaccauggccugggccguccccaagaacgacaagaacaagaccgccaccaacccccucaccaucgagguccccuacaucugcaccgagggcgaggaccagaucaccgucuggggcuuccacuccgacaacgagacccagauggccaagcucuacggcgacuccaagccccagaaguucaccuccuccgccaacggcgucaccacccacuacgucucccagaucggcggcuuccccaaccagaccgaggacggcggccucccccaguccggccgcaucgucgucgacuacaugguccagaaguccggcaagaccggcaccaucaccuaccagcgcggcauccuccucccccagaaggucuggugcaccuccggccgcuccaaggucaucaagggcucccucccccucaucggcgaggccgacugccuccacgagaaguacggcggccucaacaaguccaagcccuacuacaccggcgagcacgccaaggccaucggcaacugccccaucugggucaagaccccccucaagcucgccaacggcaccaaguaccgcccccccgccaagcuccucaaggagcgcggcuucuucggcgccaucgccggcuuccucgagggcggcugggagggcaugaucgccggcuggcacggcuacaccucccacggcgcccacggcgucgccgucgccgccgaccucaaguccacccaggaggccaucaacaagaucaccaagaaccucaacucccucuccgagcucgaggucaagaaccuccagcgccucuccggcgccauggacgagcuccacaacgagauccucgagcucgacgagaaggucgacgaccuccgcgccgacaccaucuccucccagaucgagcucgccguccuccucuccaacgagggcaucaucaacuccgaggacgagcaccuccucgcccucgagcgcaagcucaagaagaugcucggccccuccgccgucgagaucggcaacggcugcuucgagaccaagcacaagugcaaccagaccugccucgaccgcaucgccgccggcaccuucgacgccggcgaguucucccuccccaccuucgacucccucaacaucaccgccgccucccucaacgacgacggccucgacaaccacaccauccuccucuacuacuccaccgccgccuccucccucgccgucacccucaugaucgccaucuucgucgucuacauggucucccgcgacaacgucuccugcuccaucugccucuga

SEQ ID NO: 124083 - RNA, 1758 nt, Artificial Sequence; identical to SEQ ID NO: 123025
  derived and/or modified CDS sequence (opt2) from hemagglutinin__InfluenzaB__AHL93345

SEQ ID NO: 124084 - RNA, 1758 nt, Artificial Sequence; identical to SEQ ID NO: 123025
  derived and/or modified CDS sequence (opt2) from hemagglutinin__InfluenzaB__AHL93356

SEQ ID NO: 124085 - RNA, 1758 nt, Artificial Sequence
  derived and/or modified CDS sequence (opt2) from hemagglutinin__InfluenzaB__AHL93367
augaaggccaucaucguccuccucauggucgucaccuccaacgccgaccgcaucugcaccggcaucaccuccuccaacuccccccacgucgucaagaccgccacccagggcgaggucaacgucaccggcgucaucccccucaccaccacccccaccaagucccacuucgccaaccucaagggcaccgagacccgcggcaagcucugccccaagugccucaacugcaccgaccucgacgucgcccucggccgccccaagugcaccggcaagauccccuccgcccgcgucuccauccuccacgagguccgccccgucaccuccggcugcuuccccaucaugcacgaccgcaccaagauccgccagcuccccaaccuccuccgcggcuacgaguacauccgccucuccacccacaacgucaucaacgccgagaacgcccccggcggccccuacaagaucggcaccuccggcuccugccccaacaucaccaacggcaacggcuucuucgccaccauggccugggccguccccaagaacgacaagaacaagaccgccaccaacccccucaccaucgagguccccuacaucugcaccgagggcgaggaccagaucaccgucuggggcuuccacuccgacaacgagacccagauggccaagcucuacggcgacuccaagccccagaaguucaccuccuccgccaacggcgucaccacccacuacgucucccagaucggcggcuuccccaaccagaccgaggacggcggccucccccaguccggccgcaucgucgucgacuacaugguccagaaguccggcaagaccggcaccaucaccuaccagcgcggcauccuccucccccagaaggucuggugcgccuccggccgcuccaaggucaucaagggcucccucccccucaucggcgaggccgacugccuccacgagaaguacggcggccucaacaaguccaagcccuacuacaccggcgagcacgccaaggccaucggcaacugccccaucugggucaagaccccccucaagcucgccaacggcaccaaguaccgcccccccgccaagcuccucaaggagcgcggcuucuucggcgccaucgccggcuuccucgagggcggcugggagggcaugaucgccggcuggcacggcuacaccucccacggcgcccacggcgucgccgucgccgccgaccucaaguccacccaggaggccaucaacaagaucaccaagaaccucaacucccucuccgagcucgaggucaagaaccuccagcgccucuccggcgccauggacgagcuccacaacgagauccucgagcucgacgagaaggucgacgaccuccgcgccgacaccaucuccucccagaucgagcucgccguccuccucuccaacgagggcaucaucaacuccgaggacgagcaccuccucgcccucgagcgcaagcucaagaagaugcucggccccuccgccgucgagaucggcaacggcugcuucgagaccaagcacaagugcaaccagaccugccucgaccgcaucgccgccggcaccuucgacgccggcgaguucucccuccccaccuucgacucccucaacaucaccgccgccucccucaacgacgacggccucgacaaccacaccauccuccucuacuacuccaccgccgccuccucccucgccgucacccucaugaucgccaucuucgucgucuacauggucucccgcgacaacgucuccugcuccaucugccucuga

SEQ ID NO: 124086 - RNA, 1758 nt, Artificial Sequence; identical to SEQ ID NO: 123025
  derived and/or modified CDS sequence (opt2) from hemagglutinin__InfluenzaB__AHL93378

SEQ ID NO: 124087 - RNA, 1758 nt, Artificial Sequence
  derived and/or modified CDS sequence (opt2) from hemagglutinin__InfluenzaB__AHL93389
augaaggccaucaucguccuccucauggucgucaccuccaacgccgaccgcaucugcaccggcaucaccuccuccaacuccccccacgucgucaagaccgccacccagggcgaggucaacgucaccggcgucaucccccucaccaccacccccaccaaguccuacuucgccaaccucaagggcaccgagacccgcggcaagcucugccccaagugccucaacugcaccgaccucgacgucgcccucggccgccccaagugcaccggcaagauccccuccgcccgcgucuccauccuccacgagguccgccccgucaccuccggcugcuuccccaucaugcacgaccgcaccaagauccgccagcuccccaaccuccuccgcggcuacgagcacauccgccucuccacccacaacgucaucaacgccgagaacgcccccggcggccccuacaagaucggcaccuccggcuccugccccaacaucaccaacggcaacggcuucuucgccaccauggccugggccguccccaagaacgacaagaacaagaccgccaccaacccccucaccaucgagguccccuacaucugcaccgagggcgaggaccagaucaccgucuggggcuuccacuccgacaacgagacccagauggccaagcucuacggcgacuccaagccccagaaguucaccuccuccgccaacggcgucaccacccacuacgucucccagaucggcggcuuccccaaccagaccgaggacggcggccucccccaguccggccgcaucgucgucgacuacaugguccagaaguccggcaagaccggcaccaucaccuaccagcgcggcauccuccucccccagaaggucuggugcgccuccggccgcuccaaggucaucaagggcucccucccccucaucggcgaggccgacugccuccacgagaaguacggcggccucaacaaguccaagcccuacuacaccggcgagcacgccaaggccaucggcaacugccccaucugggucaagaccccccucaagcucgccaacggcaccaaguaccgcccccccgccaagcuccucaaggagcgcggcuucuucggcgccaucgccggcuuccucgagggcggcugggagggcaugaucgccggcuggcacggcuacaccucccacggcgcccacggcgucgccgucgccgccgaccucaaguccacccaggaggccaucaacaagaucaccaagaaccucaacucccucuccgagcucgaggucaagaaccuccagcgccucuccggcgccauggacgagcuccacaacgagauccucgagcucgacgagaaggucgacgaccuccgcgccgacaccaucuccucccagaucgagcucgccguccuccucuccaacgagggcaucaucaacuccgaggacgagcaccuccucgcccucgagcgcaagcucaagaagaugcucggccccuccgccgucgagaucggcaacggcugcuucgagaccaagcacaagugcaaccagaccugccucgaccgcaucgccgccggcaccuucgacgccggcgaguucucccuccccaccuucgacucccucaacaucaccgccgccucccucaacgacgacggccucgacaaccacaccauccuccucuacuacuccaccgccgccuccucccucgccgucacccucaugaucgccaucuucgucgucuacauggucucccgcgacaacgucuccugcuccaucugccucuga

SEQ ID NO: 124088 - RNA, 1758 nt, Artificial Sequence; identical to SEQ ID NO: 123025
  derived and/or modified CDS sequence (opt2) from hemagglutinin__InfluenzaB__AHL93400

SEQ ID NO: 124089 - RNA, 1758 nt, Artificial Sequence; identical to SEQ ID NO: 123358
  derived and/or modified CDS sequence (opt2) from hemagglutinin__InfluenzaB__AHL93411

SEQ ID NO: 124090 - RNA, 1758 nt, Artificial Sequence; identical to SEQ ID NO: 123358
  derived and/or modified CDS sequence (opt2) from hemagglutinin__InfluenzaB__AHL93422

SEQ ID NO: 124091 - RNA, 1758 nt, Artificial Sequence; identical to SEQ ID NO: 123358
  derived and/or modified CDS sequence (opt2) from hemagglutinin__InfluenzaB__AHL93433

SEQ ID NO: 124092 - RNA, 1758 nt, Artificial Sequence; identical to SEQ ID NO: 123025
  derived and/or modified CDS sequence (opt2) from hemagglutinin__InfluenzaB__AHL93444

SEQ ID NO: 124093 - RNA, 1758 nt, Artificial Sequence
  derived and/or modified CDS sequence (opt2) from hemagglutinin__InfluenzaB__AHL93455
augaaggccaucaucguccuccucauggucgucaccuccaacgccgaccgcaucugcaccggcaucaccuccuccaacuccccccacgucgucaagaccgccacccagggcgaggucaacgucaccggcgucaucccccucaccaccacccccaccaagucccacuucgccaaccucaagggcaccgagacccgcggcaagcucugccccaagugccucaacugcaccgaccucgacgucgcccucggccgccccaagugcaccggcaagauccccuccgcccgcgucuccauccuccacgagguccgccccgucaccuccggcugcuuccccaucaugcacgaccgcaccaagauccgccagcuccccaaccuccuccgcggcuacgagcacauccgccucuccacccacaacgucaucaacgccgagaacgcccccggcggccccuacaagaucggcaccuccggcuccugccccaacaucaccaacggcaacggcuucuucgccaccauggccugggccguccccaagaacgacaagaacaagaccgccaccaacccccucaccaucgagguccccuacaucugcaccgagggcgaggaccagaucaccgucuggggcuuccacuccgacaacgagacccagauggccaagcucuacggcgacuccaagccccagaaguucaccuccuccgccaacggcgucaccacccacuacgucucccagaucggcggcuuccccaaccagaccgaggacggcggccucccccaguccggccgcaucgucgucgacuacaugguccagaaguccggcaagaccggcaccaucaccuaccagcgcggcauccuccucccccagaaggucuggugcgccuccggccgcuccaaggucaucaagggcucccucccccucaucggcgaggccgacugccuccacgagaaguacggcggccucaacaaguccaagcccuacuacaccggcgagcacgccaaggccaucggcaacugccccaucugggucaagaccccccucaagcucgccaacggcaccaaguaccgcccccccgccaagcuccucaaggagcgcggcuucuucggcgccaucgccggcuuccucgagggcggcugggagggcaugaucgccggcuggcacggcuacaccucccacggcgcccacggcgucgccgucgccgccgaccucaaguccacccaggaggccaucaacaagaucaccaagaaccucaacucccucuccgagcucgaggucaagaaccuccagcgccucuccggcgccaugaacgagcuccacaacgagauccucgagcucgacgagaaggucgacgaccuccgcgccgacaccaucuccucccagaucgagcucgccguccuccucuccaacgagggcaucaucaacuccgaggacgagcaccuccucgcccucgagcgcaagcucaagaagaugcucggccccuccgccgucgagaucggcaacggcugcuucgagaccaagcacaagugcaaccagaccugccucgaccgcaucgccgccggcaccuucgacgccggcgaguucucccuccccaccuucgacucccucaacaucaccgccgccucccucaacgacgacggccucgacaaccacaccauccuccucuacuacuccaccgccgccuccucccucgccgucacccucaugaucgccaucuucgucgucuacauggucucccgcgacaacgucuccugcuccaucugccucuga

SEQ ID NO: 124094 - RNA, 1758 nt, Artificial Sequence; identical to SEQ ID NO: 123025
  derived and/or modified CDS sequence (opt2) from hemagglutinin__InfluenzaB__AHL93466

SEQ ID NO: 124095 - RNA, 1758 nt, Artificial Sequence; identical to SEQ ID NO: 122644
  derived and/or modified CDS sequence (opt2) from hemagglutinin__InfluenzaB__AHL93477

SEQ ID NO: 124096 - RNA, 1758 nt, Artificial Sequence; identical to SEQ ID NO: 122719
  derived and/or modified CDS sequence (opt2) from hemagglutinin__InfluenzaB__AHL93488

SEQ ID NO: 124097 - RNA, 1755 nt, Artificial Sequence
  derived and/or modified CDS sequence (opt2) from hemagglutinin__InfluenzaB__AHL93499
augaaggccaucaucguccuccucauggucgucaccuccaacgccgaccgcaucugcaccggcaucaccuccuccaacuccccccacgucgucaagaccgccacccagggcgaggucaacgucaccggcgucaucccccucaccaccacccccaccaaguccuacuucgccaaccucaagggcacccgcacccgcggcaagcucugccccgacugccucaacugcaccgaccucgacgucgcccucggccgccccaugugcgucggcaccacccccuccgccaaggccuccauccuccacgagauccgccccgucaccuccggcugcuuccccaucaugcacgaccgcaccaagauccgccagcuccccaaccuccuccgcggcuacgagaacauccgccucuccacccagaacgucaucgacgccgagaaggcccccggcggccccuaccgccucggcaccuccggcuccugccccaacgccaccuccaagaucggcuucuucgccaccauggccugggccguccccaaggacaacuacaagaacgccaccaacccccucaccgucgagguccccuacaucugcaccgagggcgaggaccagaucaccgucuggggcuuccacuccgacaacaagacccagaugaagaaccucuacggcgacuccaacccccagaaguucaccuccuccgccaacggcgucaccgcccacuacgucucccagaucggcgacuuccccgaccagaccgaggacggcggccucccccaguccggccgcaucgucgucgacuacaugaugcagaagcccggcaagaccggcaccaucgucuaccagcgcggcguccuccucccccagaaggucuggugcgccuccggccgcuccaaggucaucaagggcucccucccccucaucggcgaggccgacugccuccacgagaaguacggcggccucaacaaguccaagcccuacuacaccggcgagcacgccaaggccaucggcaacugccccaucugggucaagaccccccucaagcucgccaacggcaccaaguaccgcccccccgccaagcuccucaaggagcgcggcuucuucggcgccaucgccggcuuccucgagggcggcugggagggcaugaucgccggcuggcacggcuacaccucccacggcgcccacggcgucgccgucgccgccgaccucaaguccacccaggaggccaucaacaagaucaccaagaaccucaacucccucuccgagcucgaggucaagaaccuccagcgccucuccggcgccauggacgagcuccacaacgagauccucgagcucgacgagaaggucgacgaccuccgcgccgacaccaucuccucccagaucgagcucgccguccuccucuccaacgagggcaucaucaacuccgaggacgagcaccuccucgcccucgagcgcaagcucaagaagaugcucggccccuccgccgucgacaucggcaacggcugcuucgagaccaagcacaagugcaaccagaccugccucgaccgcaucgccgccggcaccuucaacgccggcgaguucucccuccccaccuucgacucccucaacaucaccgccgccucccucaacgacgacggccucgacaaccacaccauccuccucuacuacuccaccgccgccuccucccucgccgucacccucaugcucgccaucuucaucgucuacauggucucccgcgacaacgucuccugcuccaucugccucuga

SEQ ID NO: 124098 - RNA, 1758 nt, Artificial Sequence; identical to SEQ ID NO: 122644
  derived and/or modified CDS sequence (opt2) from hemagglutinin__InfluenzaB__AHL93510

SEQ ID NO: 124099 - RNA, 1755 nt, Artificial Sequence
  derived and/or modified CDS sequence (opt2) from hemagglutinin__InfluenzaB__AHL93521
augaaggccaucaucgcccuccucauggucgucaccuccaacgccgaccgcaucugcaccggcaucaccuccuccaacuccccccacgucgucaagaccgccacccagggcgaggucaacgucaccggcgucaucccccucaccaccacccccaccaaguccuacuucgccaaccucaagggcacccgcacccgcggcaagcucugccccgacugccucaacugcaccgaccucgacgucgcccucggccgccccaugugcgucggcaccacccccuccgccaaggccuccauccuccacgagguccgccccgucaccuccggcugcuuccccaucaugcacgaccgcaccaagauccgccagcuccccaaccuccuccgcggcuacgagaacauccgccucuccacccagaacgucaucgacgccgagaaggcccccggcggccccuaccgccucggcaccuccggcuccugccccaacgccaccuccaagaucggcuucuucgccaccauggccugggccguccccaaggacaacuacaagaacgccaccaacccccucaccgucgagguccccuacaucugcaccgagggcgaggaccagaucaccgucuggggcuuccacuccgacaacaagacccagaugaagaaccucuacggcgacuccaacccccagcgcuucaccuccuccgccaacggcgucaccacccacuacgucucccagaucggcgacuuccccgaccagaccgaggacggcggccucccccaguccggccgcaucgucgucgacuacaugguccagaagcccggcaagaccggcaccaucgucuaccagcgcggcguccuccucccccagaaggucuggugcgccuccggccgcuccaaggucaucaagggcucccucccccucaucggcgaggccgacugccuccacgagaaguacggcggccucaacaaguccaagcccuacuacaccggcgagcacgccaaggccaucggcaacugccccaucugggucaagaccccccucaagcucgccaacggcaccaaguaccgcccccccgccaagcuccucaaggagcgcggcuucuucggcgccaucgccggcuuccucgagggcggcugggagggcaugaucgccggcuggcacggcuacaccucccacggcgcccacggcgucgccgucgccgccgaccucaaguccacccaggaggccaucaacaagaucaccaagaaccucaacucccucuccgagcucgaggucaagaaccuccagcgccucuccggcgccauggacgagcuccacaacgagauccucgagcucgacgagaaggucgacgaccuccgcgccgacaccaucuccucccagaucgagcucgccguccuccucuccaacgagggcaucaucaacuccgaggacgagcaccuccucgcccucgagcgcaagcucaagaagaugcucggccccuccgccgucgacaucggcaacggcugcuucgagaccaagcacaagugcaaccagaccugccucgaccgcaucgccgccggcaccuucaacgccggcgaguucucccuccccaccuucgacucccucaacaucaccgccgccucccucaacgacgacggccucgacaaccacaccauccuccucuacuacuccaccgccgccuccucccucgccgucacccucaugcucgccaucuucaucgucuacauggucucccgcgacaacgucuccugcuccaucugccucuga

SEQ ID NO: 124100 - RNA, 1758 nt, Artificial Sequence; identical to SEQ ID NO: 122719
  derived and/or modified CDS sequence (opt2) from hemagglutinin__InfluenzaB__AHL93532

SEQ ID NO: 124101 - RNA, 1758 nt, Artificial Sequence; identical to SEQ ID NO: 122681
  derived and/or modified CDS sequence (opt2) from hemagglutinin__InfluenzaB__AHL93543

SEQ ID NO: 124102 - RNA, 1758 nt, Artificial Sequence; identical to SEQ ID NO: 122681
  derived and/or modified CDS sequence (opt2) from hemagglutinin__InfluenzaB__AHL93554

SEQ ID NO: 124103 - RNA, 1758 nt, Artificial Sequence; identical to SEQ ID NO: 122681
  derived and/or modified CDS sequence (opt2) from hemagglutinin__InfluenzaB__AHL93565

SEQ ID NO: 124104 - RNA, 1758 nt, Artificial Sequence; identical to SEQ ID NO: 122719
  derived and/or modified CDS sequence (opt2) from hemagglutinin__InfluenzaB__AHL93576

SEQ ID NO: 124105 - RNA, 1758 nt, Artificial Sequence; identical to SEQ ID NO: 122719
  derived and/or modified CDS sequence (opt2) from hemagglutinin__InfluenzaB__AHL93587

SEQ ID NO: 124106 - RNA, 1758 nt, Artificial Sequence
  derived and/or modified CDS sequence (opt2) from hemagglutinin__InfluenzaB__AHL93609
augaaggccaucaucguccuccucauggucgucaccuccaacgccgaccgcaucugcaccggcaucaccuccuccaacuccccccacgucgucaagaccgccacccagggcgaggucaacgucaccggcgucaucccccucaccaccacccccaccaagucccacuucgccaaccucaagggcaccgagacccgcggcaagcucugccccaagugccccaacugcaccgaccucgacgucgcccucggccgccccaagugcaccggcaagauccccuccgcccgcgucuccauccuccacgagguccgccccgucaccuccggcugcuuccccaucaugcacgaccgcaccaagauccgccagcuccccaaccuccuccgcggcuacgagcacauccgccucuccacccacaacgucaucaacgccgagaacgcccccggcggccccuacaagaucggcaccuccggcuccugccccaacgucaccaacggcaacggcuucuucgccaccauggccugggccguccccaagaacgacaagaacaagaccgccaccaacccccucaccaucgagguccccuacaucugcaccgagggcgaggaccagaucaccgucuggggcuuccacuccgacaacgagacccagauggccaagcucuacggcgacuccaagccccagaaguucaccuccuccgccaacggcgucaccacccacuacgucucccagaucggcggcuuccccaaccagaccgaggacggcggccucccccaguccggccgcaucgucgucgacuacaugguccagaaguccggcaagaccggcaccaucaccuaccagcgcggcauccuccucccccagaaggucuggugcgccuccggccgcuccaaggucaucaagggcucccucccccucaucggcgaggccgacugccuccacgagaaguacggcggccucaacaaguccaagcccuacuacaccggcgagcacgccaaggccaucggcaacugccccaucugggucaagaccccccucaagcucgccaacggcaccaaguaccgcccccccgccaagcuccucaccgagcgcggcuucuucggcgccaucgccggcuuccucgagggcggcugggagggcaugaucgccggcuggcacggcuacaccucccacggcgcccacggcgucgccgucgccgccgaccucaaguccacccaggaggccaucaacaagaucaccaagaaccucaacucccucuccgagcucgaggucaagaaccuccagcgccucuccggcgccauggacgagcuccacaacgagauccucgagcucgacgagaaggucgacgaccuccgcgccgacaccaucuccucccagaucgagcucgccguccuccucuccaacgagggcaucaucaacuccgaggacgagcaccuccucgcccucgagcgcaagcucaagaagaugcucggccccuccgccgucgagaucggcaacggcugcuucgagaccaagcacaagugcaaccagaccugccucgaccgcaucgccgccggcaccuucgacgccggcgaguucucccuccccaccuucgacucccucaacaucaccgccgccucccucaacgacgacggccucgacaaccacaccauccuccucuacuacuccaccgccgccuccucccucgccgucacccucaugaucgccaucuucgucgucuacauggucucccgcgacaacgucuccugcuccaucugccucuga

SEQ ID NO: 124107 - RNA, 1758 nt, Artificial Sequence; identical to SEQ ID NO: 122719
  derived and/or modified CDS sequence (opt2) from hemagglutinin__InfluenzaB__AHL93620

SEQ ID NO: 124108 - RNA, 1758 nt, Artificial Sequence; identical to SEQ ID NO: 124106
  derived and/or modified CDS sequence (opt2) from hemagglutinin__InfluenzaB__AHL93631

SEQ ID NO: 124109 - RNA, 1758 nt, Artificial Sequence; identical to SEQ ID NO: 124106
  derived and/or modified CDS sequence (opt2) from hemagglutinin__InfluenzaB__AHL93642

SEQ ID NO: 124110 - RNA, 1755 nt, Artificial Sequence
  derived and/or modified CDS sequence (opt2) from hemagglutinin__InfluenzaB__AHL93653
augaaggccaucaucguccuccucauggucgucaccuccaacgccgaccgcaucugcaccggcaucaccuccuccaacuccccccacgucgucaagaccgccacccagggcgaggucaacgucaccggcgucaucccccucaccaccacccccaccaaguccuacuucgccaaccucaagggcacccgcacccgcggcaagcucugccccgacugccucaacugcaccgaccucgacgucgcccucggccgccccaugugcgucggcaccacccccuccgccaaggccuccauccuccacgagguccgccccgucaccuccggcugcuuccccaucaugcacgaccgcaccaagauccgccagcuccccaaccuccuccgcggcuacgagaacauccgccucuccacccagaacgucaucgacgccgagaaggcccccggcggccccuaccgccucggcaccuccggcuccugccccaacgccaccuccaagaucggcuucuucgccaccauggccugggccguccccaaggacaacuacaagaacgccaccaacccccucaccgucgagguccccuacaucugcaccgagggcgaggaccagaucaccgucuggggcuuccacuccgacaacaagacccagaugaagaaccucuacggcgacuccaacccccagaaguucaccuccuccgccaacggcgucaccacccacuacgucucccagaucggcgacuuccccgaccagaccgaggacggcggccucccccaguccggccgcaucgucgucgacuacaugguccagaagcccggcaagaccggcaccaucgucuaccagcgcggcguccuccucccccagaaggucuggugcgccuccggccgcuccaaggucaucaagggcucccucccccucaucggcgaggccgacugccuccacgagaaguacggcggccucaacaaguccaagcccuacuacaccggcgagcacgccaaggccaucggcgacugccccaucugggucaagaccccccucaagcucgccaacggcaccaaguaccgcccccccgccaagcuccucaaggagcgcggcuucuucggcgccaucgccggcuuccucgagggcggcugggagggcaugaucgccggcuggcacggcuacaccucccacggcgcccacggcgucgccgucgccgccgaccucaaguccacccaggaggccaucaacaagaucaccaagaaccucaacucccucuccgagcucgaggucaagaaccuccagcgccucuccggcgccauggacgagcuccacaacgagauccucgagcucgacgagaaggucgacgaccuccgcgccgacaccaucuccucccagaucgagcucgccguccuccucuccaacgagggcaucaucaacuccgaggacgagcaccuccucgcccucgagcgcaagcucaagaagaugcucggccccuccgccgucgacaucggcaacggcugcuucgagaccaagcacaagugcaaccagaccugccucgaccgcaucgccgccggcaccuucaacgccggcgaguucucccuccccaccuucgacucccucaacaucaccgccgccucccucaacgacgacggccucgacaaccacaccauccuccucuacuacuccaccgccgccuccucccucgccgucacccucaugcucgccaucuucaucgucuacauggucucccgcgacaacgucuccugcuccaucugccucuga

SEQ ID NO: 124111 - RNA, 1758 nt, Artificial Sequence; identical to SEQ ID NO: 122719
  derived and/or modified CDS sequence (opt2) from hemagglutinin__InfluenzaB__AHL93664

SEQ ID NO: 124112 - RNA, 1758 nt, Artificial Sequence; identical to SEQ ID NO: 122644
  derived and/or modified CDS sequence (opt2) from hemagglutinin__InfluenzaB__AHL93675

SEQ ID NO: 124113 - RNA, 1758 nt, Artificial Sequence; identical to SEQ ID NO: 124106
  derived and/or modified CDS sequence (opt2) from hemagglutinin__InfluenzaB__AHL93686

SEQ ID NO: 124114 - RNA, 1758 nt, Artificial Sequence; identical to SEQ ID NO: 124106
  derived and/or modified CDS sequence (opt2) from hemagglutinin__InfluenzaB__AHL93697

SEQ ID NO: 124115 - RNA, 1758 nt, Artificial Sequence
  derived and/or modified CDS sequence (opt2) from hemagglutinin__InfluenzaB__AHL93708
augaaggccaucaucguccuccucauggucgucaccuccaacgccgaccgcaucugcaccggcaucaccuccuccaacuccccccacgucgucaagaccgccacccagggcgaggucaacgucaccggcgucaucccccucaccaccacccccaccaagucccacuucgccaaccucaagggcaccgagacccgcggcaagcucugccccaagugccccaacugcaccgaccucgacgucgcccucggccgccccaagugcaccggcaagauccccuccgcccgcgucuccauccuccacgagguccgccccgucaccuccggcugcuuccccaucaugcacgaccgcaccaagauccgccagcuccccaaccuccuccgcggcuacgagcacauccgccucuccacccacaacgucaucaacgccgagaacgcccccggcggccccuacaagaucggcaccuccggcuccugccccaacgucaccaacggcaacggcuucuucgccaccauggccugggccguccccaagaacgacaagaacaagaccgccaccaacccccucaccaucgagguccccuacaucugcaccgagggcgaggaccagaucaccgucuggggcuuccacuccgacaacgagacccagauggccaagcucuacggcgacuccaagccccagaaguucaccuccuccgccaacggcgucaccacccacuacgucucccagaucggcggcuuccccaaccagaccgaggacggcggccucccccaguccggccgcaucgucgucgacuacaugguccagaaguccggcaagaccggcaccaucaccuaccagcgcggcauccuccucccccagaaggucuggugcgccuccggccgcuccaaggucaucaagggcucccucccccucaucggcgaggccgacugccuccacgagaaguacggcggccucaacaaguccaagcccuacuacaccggcaagcacgccaaggccaucggcaacugccccaucugggucaagaccccccucaagcucgccaacggcaccaaguaccgcccccccgccaagcuccucaccgagcgcggcuucuucggcgccaucgccggcuuccucgagggcggcugggagggcaugaucgccggcuggcacggcuacaccucccacggcgcccacggcgucgccgucgccgccgaccucaaguccacccaggaggccaucaacaagaucaccaagaaccucaacucccucuccgagcucgaggucaagaaccuccagcgccucuccggcgccauggacgagcuccacaacgagauccucgagcucgacgagaaggucgacgaccuccgcgccgacaccaucuccucccagaucgagcucgccguccuccucuccaacgagggcaucaucaacuccgaggacgagcaccuccucgcccucgagcgcaagcucaagaagaugcucggccccuccgccgucgagaucggcaacggcugcuucgagaccaagcacaagugcaaccagaccugccucgaccgcaucgccgccggcaccuucgacgccggcgaguucucccuccccaccuucgacucccucaacaucaccgccgccucccucaacgacgacggccucgacaaccacaccauccuccucuacuacuccaccgccgccuccucccucgccgucacccucaugaucgccaucuucgucgucuacauggucucccgcgacaacgucuccugcuccaucugccucuga

SEQ ID NO: 124116 - RNA, 1758 nt, Artificial Sequence
  derived and/or modified CDS sequence (opt2) from hemagglutinin__InfluenzaB__AHL93719
augaaggccaucaucguccuccucauggucgucaccuccaacgccgaccgcaucugcaccggcaucaccuccuccaacuccccccacaucgucaagaccgccacccagggcgaggucaacgucaccggcgucaucccccucaccaccacccccaccaagucccacuucgccaaccucaagggcaccgagacccgcggcaagcucugccccaagugccucaacugcaccgaccucgacgucgcccucggccgccccaagugcaccggcaagauccccuccgcccgcgucuccauccuccacgaggucauccccgucaccuccggcugcuuccccaucaugcacgaccgcaccaagauccgccagcuccccaaccuccuccgcggcuacgagcacauccgccucuccacccacaacgucaucaacgccgagaacgcccccggcggccccuacaagaucggcaccuccggcuccugccccaacaucaccaacggcaacggcuucuucgccaccauggccugggccguccccaagaacgacaagaacaagaccgccaccaacccccucaccaucgagguccccuacaucugcaccgagggcgaggaccagaucaccgucuggggcuuccacuccgacaacgagacccagauggccaagcucuacggcgacuccaagccccagaaguucaccuccuccgccaacggcgucaccacccacuacgucucccagaucggcggcuuccccaaccagaccgaggacggcggccucccccaguccggccgcaucgucgucgacuacaugguccagaaguccggcaagaccggcaccaucaccuaccagcgcggcauccuccucccccagaaggucuggugcgccuccggccgcuccaaggucaucaagggcucccucccccucaucggcgaggccgacugccuccacgagaaguacggcggccucaacaaguccaagcccuacuacaccggcgagcacgccaaggccaucggcaacugccccaucugggucaagaccccccucaagcucgccaacggcaccaaguaccgcccccccgccaagcuccucaaggagcgcggcuucuucggcgccaucgccggcuuccucgagggcggcugggagggcaugaucgccggcuggcacggcuacaccucccacggcgcccacggcgucgccgucgccgccgaccucaaguccacccaggaggccaucaacaagaucaccaagaaccucaacucccucuccgagcucgaggucaagaaccuccagcgccucuccggcgccauggacgagcuccacaacgagauccucgagcucgacgagaaggucgacgaccuccgcgccgacaccaucuccucccagaucgagcucgccguccuccucuccaacgagggcaucaucaacuccgaggacgagcaccuccucgcccucgagcgcaagcucaagaagaugcucggccccuccgccgucgagaucggcaacggcugcuucgagaccaagcacaagugcaaccagaccugccucgaccgcaucgccgccggcaccuucgacgccggcgaguucucccuccccaccuucgacucccucaacaucaccgccgccucccucaacgacgacggccucgacaaccacaccauccuccucuacuacuccaccgccgccuccucccucgccgucacccucaugaucgccaucuucgucgucuacauggucucccgcgacaacgucuccugcuccaucugccucuga

SEQ ID NO: 124117 - RNA, 1758 nt, Artificial Sequence; identical to SEQ ID NO: 122719
  derived and/or modified CDS sequence (opt2) from hemagglutinin__InfluenzaB__AHL93730

SEQ ID NO: 124118 - RNA, 1758 nt, Artificial Sequence; identical to SEQ ID NO: 122719
  derived and/or modified CDS sequence (opt2) from hemagglutinin__InfluenzaB__AHL93741

SEQ ID NO: 124119 - RNA, 1758 nt, Artificial Sequence; identical to SEQ ID NO: 122681
  derived and/or modified CDS sequence (opt2) from hemagglutinin__InfluenzaB__AHL93752

SEQ ID NO: 124120 - RNA, 1758 nt, Artificial Sequence; identical to SEQ ID NO: 124106
  derived and/or modified CDS sequence (opt2) from hemagglutinin__InfluenzaB__AHL93763

SEQ ID NO: 124121 - RNA, 1758 nt, Artificial Sequence; identical to SEQ ID NO: 122644
  derived and/or modified CDS sequence (opt2) from hemagglutinin__InfluenzaB__AHL93774

SEQ ID NO: 124122 - RNA, 1758 nt, Artificial Sequence; identical to SEQ ID NO: 124106
  derived and/or modified CDS sequence (opt2) from hemagglutinin__InfluenzaB__AHL93785

SEQ ID NO: 124123 - RNA, 1758 nt, Artificial Sequence; identical to SEQ ID NO: 122719
  derived and/or modified CDS sequence (opt2) from hemagglutinin__InfluenzaB__AHL93796

SEQ ID NO: 124124 - RNA, 1758 nt, Artificial Sequence; identical to SEQ ID NO: 122644
  derived and/or modified CDS sequence (opt2) from hemagglutinin__InfluenzaB__AHL93818

SEQ ID NO: 124125 - RNA, 1758 nt, Artificial Sequence
  derived and/or modified CDS sequence (opt2) from hemagglutinin__InfluenzaB__AHL93829
augaaggccaucaucguccuccucauggucgucaccuccaacgccgaccgcaucugcaccggcaucaccuccuccaacuccccccacaucgucaagaccgccacccagggcgaggucaacgucaccggcgucaucccccucaccaccacccccaccaagucccacuucgccaaccucaagggcaccgagacccgcggcaagcucugccccaagugccucaacugcaccgaccucgacgucgcccucggccgccccaagugcaccggcaagauccccuccgcccgcgucuccauccuccacgagguccgccccgucaccuccggcugcuuccccaucaugcacgaccgcaccaagauccgccagcuccccaaccuccuccgcggcuacgagcacauccgccucuccacccacaacgucaucaacaccgagaacgcccccggcggccccuacaagaucggcaccuccggcuccugccccaacaucaccaacggcaacggcuucuucgccaccauggccugggccguccccaagaacgacaagaacaagaccgccaccaacccccucaccaucgagguccccuacaucugcaccgagggcgaggaccagaucaccgucuggggcuuccacuccgacaacgagacccagauggccaagcucuacggcgacuccaagccccagaaguucaccuccuccgccaacggcgucaccacccacuacgucucccagaucggcggcuuccccaaccagaccgaggacggcggccucccccaguccggccgcaucgucgucgacuacaugguccagaaguccggcaagaccggcaccaucaccuaccagcgcggcauccuccucccccagaaggucuggugcgccuccggccgcuccaaggucaucaagggcucccucccccucaucggcgaggccgacugccuccacgagaaguacggcggccucaacaaguccaagcccuacuacaccggcgagcacgccaaggccaucggcaacugccccaucugggucaagaccccccucaagcucgccaacggcaccaaguaccgcccccccgccaagcuccucaaggagcgcggcuucuucggcgccaucgccggcuuccucgagggcggcugggagggcaugaucgccggcuggcacggcuacaccucccacggcgcccacggcgucgccgucgccgccgaccucaaguccacccaggaggccaucaacaagaucaccaagaaccucaacucccucuccgagcucgaggucaagaaccuccagcgccucuccggcgccauggacgagcuccacaacgagauccucgagcucgacgagaaggucgacgaccuccgcgccgacaccaucuccucccagaucgagcucgccguccuccucuccaacgagggcaucaucaacuccgaggacgagcaccuccucgcccucgagcgcaagcucaagaagaugcucggccccuccgccgucgagaucggcaacggcugcuucgagaccaagcacaagugcaaccagaccugccucgaccgcaucgccgccggcaccuucgacgccggcgaguucucccuccccaccuucgacucccucaacaucaccgccgccucccucaacgacgacggccucgacaaccacaccauccuccucuacuacuccaccgccgccuccucccucgccgucacccucaugaucgccaucuucgucgucuacauggucucccgcgacaacgucuccugcuccaucugccucuga

SEQ ID NO: 124126 - RNA, 1758 nt, Artificial Sequence; identical to SEQ ID NO: 123025
  derived and/or modified CDS sequence (opt2) from hemagglutinin__InfluenzaB__AHL93840

SEQ ID NO: 124127 - RNA, 1758 nt, Artificial Sequence; identical to SEQ ID NO: 122719
  derived and/or modified CDS sequence (opt2) from hemagglutinin__InfluenzaB__AHL93851

SEQ ID NO: 124128 - RNA, 1758 nt, Artificial Sequence; identical to SEQ ID NO: 122719
  derived and/or modified CDS sequence (opt2) from hemagglutinin__InfluenzaB__AHL93862

SEQ ID NO: 124129 - RNA, 1758 nt, Artificial Sequence
  derived and/or modified CDS sequence (opt2) from hemagglutinin__InfluenzaB__AHL93873
augaaggccaucaucguccuccucauggucgucaccuccaacgccgaccgcaucugcaccggcaucaccuccuccaacuccccccacaucgucaagaccgccacccagggcgaggucaacgucaccggcgucaucccccucaccaccacccccaccaagucccacuucgccaaccucaagggcaccgagacccgcggcgagcucugccccaagugccucaacugcaccgaccucgacgucgcccucggccgccccaagugcaccggcaagauccccuccgcccgcgucuccauccuccacgagguccgccccgucaccuccggcugcuuccccaucaugcacgaccgcaccaagauccgccagcuccccaaccuccuccgcggcuacgagcacauccgccucuccacccacaacgucaucaacgccgagaacgcccccggcggccccuacaagaucggcaccuccggcuccugccccaacaucaccaacggcaacggcuucuucgccaccauggccugggccguccccaagaacgacaagaacaagaccgccaccaacccccucaccaucgagguccccuacaucugcaccgagggcgaggaccagaucaccgucuggggcuuccacuccgacaacgagacccagauggccaagcucuacggcgacuccaagccccagaaguucaccuccuccgccaacggcgucaccacccacuacgucucccagaucggcggcuuccccaaccagaccgaggacggcggccucccccaguccggccgcaucgucgucgacuacaugguccagaaguccggcaagaccggcaccaucaccuaccagcgcggcauccuccucccccagaaggucuggugcgccuccggccgcuccaaggucaucaagggcucccucccccucaucggcgaggccgacugccuccacgagaaguacggcggccucaacaaguccaagcccuacuacaccggcgagcacgccaaggccaucggcaacugccccaucugggucaagaccccccucaagcucgccaacggcaccaaguaccgcccccccgccaagcuccucaaggagcgcggcuucuucggcgccaucgccggcuuccucgagggcggcugggagggcaugaucgccggcuggcacggcuacaccucccacggcgcccacggcgucgccgucgccgccgaccucaaguccacccaggaggccaucaacaagaucaccaagaaccucaacucccucuccgagcucgaggucaagaaccuccagcgccucuccggcgccauggacgagcuccacaacgagauccucgagcucgacgagaaggucgacgaccuccgcgccgacaccaucuccucccagaucgagcucgccguccuccucuccaacgagggcaucaucaacuccgaggacgagcaccuccucgcccucgagcgcaagcucaagaagaugcucggccccuccgccgucgagaucggcaacggcugcuucgagaccaagcacaagugcaaccagaccugccucgaccgcaucgccgccggcaccuucgacgccggcgaguucucccuccccaccuucgacucccucaacaucaccgccgccucccucaacgacgacggccucgacaaccacaccauccuccucuacuacuccaccgccgccuccucccucgccgucacccucaugaucgccaucuucgucgucuacauggucucccgcgacaacgucuccugcuccaucugccucuga

SEQ ID NO: 124130 - RNA, 1758 nt, Artificial Sequence; identical to SEQ ID NO: 122719
  derived and/or modified CDS sequence (opt2) from hemagglutinin__InfluenzaB__AHL93884

SEQ ID NO: 124131 - RNA, 1758 nt, Artificial Sequence; identical to SEQ ID NO: 122719
  derived and/or modified CDS sequence (opt2) from hemagglutinin__InfluenzaB__AHL93895

SEQ ID NO: 124132 - RNA, 1758 nt, Artificial Sequence; identical to SEQ ID NO: 122719
  derived and/or modified CDS sequence (opt2) from hemagglutinin__InfluenzaB__AHL93906

SEQ ID NO: 124133 - RNA, 1758 nt, Artificial Sequence; identical to SEQ ID NO: 122719
  derived and/or modified CDS sequence (opt2) from hemagglutinin__InfluenzaB__AHL93917

SEQ ID NO: 124134 - RNA, 1758 nt, Artificial Sequence; identical to SEQ ID NO: 122644
  derived and/or modified CDS sequence (opt2) from hemagglutinin__InfluenzaB__AHL93928

SEQ ID NO: 124135 - RNA, 1758 nt, Artificial Sequence; identical to SEQ ID NO: 122681
  derived and/or modified CDS sequence (opt2) from hemagglutinin__InfluenzaB__AHL93939

SEQ ID NO: 124136 - RNA, 1758 nt, Artificial Sequence; identical to SEQ ID NO: 122719
  derived and/or modified CDS sequence (opt2) from hemagglutinin__InfluenzaB__AHL93950

SEQ ID NO: 124137 - RNA, 1758 nt, Artificial Sequence; identical to SEQ ID NO: 122681
  derived and/or modified CDS sequence (opt2) from hemagglutinin__InfluenzaB__AHL93961

SEQ ID NO: 124138 - RNA, 1758 nt, Artificial Sequence
  derived and/or modified CDS sequence (opt2) from hemagglutinin__InfluenzaB__AHL93972
augaaggccaucaucguccuccucauggucgucaccuccaccgccgaccgcaucugcaccggcaucaccuccuccaacuccccccacgucgucaagaccgccacccagggcgaggucaacgucaccggcgucaucccccucaccaccacccccaccaagucccacuucgccaaccucaagggcaccgagacccgcggcaagcucugccccaagugccucaacugcaccgaccucgacgucgcccucggccgccccaagugcaccggcaagauccccuccgcccgcgucuccauccuccacgagguccgccccgucaccuccggcugcuuccccaucaugcacgaccgcaccaagauccgccagcuccccaaccuccuccgcggcuacgagcacauccgccucuccacccacaacgucaucaacgccgagaacgcccccggcggccccuacaagaucggcaccuccggcuccugccccaacgucaccaacggcaacggcuucuucgccaccauggccugggccguccccaagaacgacaagaacaagaccgccaccaacccccucaccaucgagguccccuacaucugcaccgagggcgaggaccagaucaccgucuggggcuuccacuccgacaacgagacccagauggccaagcucuacggcgacuccaagccccagaaguucaccuccuccgccaacggcgucaccacccacuacgucucccagaucggcggcuuccccaaccagaccgaggacggcggccucccccaguccggccgcaucgucgucgacuacaugguccagaaguccggcaagaccggcaccaucaccuaccagcgcggcauccuccucccccagaaggucuggugcgccuccggccgcuccaaggucaucaagggcucccucccccucaucggcgaggccgacugccuccacgagaaguacggcggccucaacaaguccaagcccuacuacaccggcgagcacgccaaggccgucggcaacugccccaucugggucaagaccccccucaagcucgccaacggcaccaaguaccgcccccccgccaagcuccucaaggagcgcggcuucuucggcgccaucgccggcuuccucgagggcggcugggagggcaugaucgccggcuggcacggcuacaccucccacggcgcccacggcgucgccgucgccgccgaccucaaguccacccaggaggccaucaacaagaucaccaagaaccucaacucccucuccgagcucgaggucaagaaccuccagcgccucuccggcgccauggacgagcuccacaacgagauccucgagcucgacgagaaggucgacgaccuccgcgccgacaccaucuccucccagaucgagcucgccguccuccucuccaacgagggcaucaucaacuccgaggacgagcaccuccucgcccucgagcgcaagcucaagaagaugcucggccccuccgccgucgagaucggcaacggcugcuucgagaccaagcacaagugcaaccagaccugccucgaccgcaucgccgccggcaccuucgacgccggcgaguucucccuccccaccuucgacucccucaacaucaccgccgccucccucaacgacgacggccucgacaaccacaccauccuccucuacuacuccaccgccgccuccucccucgccgucacccucaugaucgccaucuucgucgucuacauggucucccgcgacaacgucuccugcuccaucugccucuga

SEQ ID NO: 124139 - RNA, 1758 nt, Artificial Sequence; identical to SEQ ID NO: 122644
  derived and/or modified CDS sequence (opt2) from hemagglutinin__InfluenzaB__AHL93983

SEQ ID NO: 124140 - RNA, 1755 nt, Artificial Sequence
  derived and/or modified CDS sequence (opt2) from hemagglutinin__InfluenzaB__AHL93994
augaaggccaucaucguccuccucauggucgucaccuccaacgccgaccgcaucugcaccggcaucaccuccuccaacuccccccacgucgucaagaccgccacccagggcgaggucaacgucaccggcgucaucccccucaccaccacccccaagaaguccuacuucgccaaccucaagggcaccaagacccgcggcaagcucugccccgacugccucaacugcaccgaccucgacgucgcccucggccgccccaugugcgucggcaccacccccuccgccaaggccuccauccuccacgagguccgccccgucaccuccggcugcuuccccaucaugcacgaccgcaccaagauccgccagcucgccaaccuccuccgcggcuacgagaacauccgccucuccacccagaacgucaucgacgccgagaaggcccccggcggccccuaccgccucggcaccuccggcuccugccccaacgccaccuccaaguccggcuucuucgccaccauggccugggccguccccaaggacaacaacaagaacgccaccaacccccucaccgucgagguccccuacaucugcgccgagggcgaggaccagaucaccgucuggggcuuccacuccgacaacaagacccagaugaagaaccucuacggcgacuccaacccccagaaguucaccuccuccgccaacggcgucaccacccacuacgucucccagaucggcggcuuccccgaccagaccgaggacggcggccucccccaguccggccgcaucgucgucgacuacaugaugcagaagcccggcaagaccggcaccaucgucuaccagcgcggcguccuccucccccagaaggucuggugcgccuccggccgcuccaaggucaucaagggcucccucccccucaucggcgaggccgacugccuccacgagaaguacggcggccucaacaaguccaagcccuacuacaccggcgagcacgccaaggccaucggcaacugccccaucugggucaagaccccccucaagcucgccaacggcaccaaguaccgcccccccgccaagcuccucaaggagcgcggcuucuucggcgccaucgccggcuuccucgagggcggcugggagggcaugaucgccggcuggcacggcuacaccucccacggcgcccacggcgucgccgucgccgccgaccucaaguccacccaggaggccaucaacaagaucaccaagaaccucaacucccucuccgagcucgaggucaagaaccuccagcgccucuccggcgccauggacgagcuccacaacgagauccucgagcucgacgagaaggucgacgaccuccgcgccgacaccaucuccucccagaucgagcucgccguccuccucuccaacgagggcaucaucaacuccgaggacgagcaccuccucgcccucgagcgcaagcucaagaagaugcucggccccuccgccgucgacaucggcaacggcugcuucgagaccaagcacaagugcaaccagaccugccucgaccgcaucgccgccggcaccuucaacgccggcgaguucucccuccccaccuucgacucccucaacaucaccgccgccucccucaacgacgacggccucgacaaccacaccauccuccucuacuacuccaccgccgccuccucccucgccgucacccucaugcucgccaucuucaucgucuacaugaucucccgcgacaacgucuccugcuccaucugccucuga

SEQ ID NO: 124141 - RNA, 1758 nt, Artificial Sequence; identical to SEQ ID NO: 122719
  derived and/or modified CDS sequence (opt2) from hemagglutinin__InfluenzaB__AHL94005

SEQ ID NO: 124142 - RNA, 1758 nt, Artificial Sequence; identical to SEQ ID NO: 122719
  derived and/or modified CDS sequence (opt2) from hemagglutinin__InfluenzaB__AHL94016

SEQ ID NO: 124143 - RNA, 1758 nt, Artificial Sequence
  derived and/or modified CDS sequence (opt2) from hemagglutinin__InfluenzaB__AHL94027
augaaggccaucaucguccuccucauggucgucaccuccaacgccgaccgcaucugcaccggcaucaccuccuccaacuccccccacaucgucaagaccgccacccagggcgaggucaacgucaccggcgucaucccccucaccaccacccccaccaagucccacuucgccaaccucaagggcaccgagacccgcggcaagcucugccccaagugccucaacugcaccgaccucgacgucgcccucggccgccccaagugcaccggcaagauccccuccgcccgcgucuccauccuccacgagguccgccccgucaccuccggcugcuuccccaucaugcacgaccgcaccaagauccgccagcuccccaaccuccuccgcggcuacgagcacauccgccucuccacccacaacgucaucaacgccgagaacgcccccggcggccccuacaagaucggcaccuccggcuccugccccaacaucaccaacggcaacggcuucuucgccaccauggccugggccguccccaagaacgacaagaacaagaccgccaccaacccccucaccaucgagguccccuacaucugcaccgagggcgaggaccagaucaccgucuggggcuuccacuccgacaacgagacccagauggccaagcucuacggcgacuccaagccccagaaguucaccuccuccgccaacggcgucaccacccacuacgucucccagaucggcggcuuccccaaccagaccgaggacggcggccucccccaguccggccgcaucgucgucgacuacaugguccagaaguccggcaagaccggcaccaucaccuaccagaugggcguccuccucccccagaaggucuggugcgccuccggccgcuccaaggucaucaagggcucccucccccucaucggcgaggccgacugccuccacgagaaguacggcggccucaacaaguccaagcccuacuacaccggcgagcacgccaaggccaucggcaacugccccaucugggucaagaccccccucaagcucgccaacggcaccaaguaccgcccccccgccaagcuccucaaggagcgcggcuucuucggcgccaucgccggcuuccucgagggcggcugggagggcaugaucgccggcuggcacggcuacaccucccacggcgcccacggcgucgccgucgccgccgaccucaaguccacccaggaggccaucaacaagaucaccaagaaccucaacucccucuccgagcucgaggucaagaaccuccagcgccucuccggcgccauggacgagcuccacaacgagauccucgagcucgacgagaaggucgacgaccuccgcgccgacaccaucuccucccagaucgagcucgccguccuccucuccaacgagggcaucaucaacuccgaggacgagcaccuccucgcccucgagcgcaagcucaagaagaugcucggccccuccgccgucgagaucggcaacggcugcuucgagaccaagcacaagugcaaccagaccugccucgaccgcaucgccgccggcaccuucgacgccggcgaguucucccuccccaccuucgacucccucaacaucaccgccgccucccucaacgacgacggccucgacaaccacaccauccuccucuacuacuccaccgccgccuccucccucgccgucacccucaugaucgccaucuucgucgucuacauggucucccgcgacaacgucuccugcuccaucugccucuga

SEQ ID NO: 124144 - RNA, 1758 nt, Artificial Sequence; identical to SEQ ID NO: 122681
  derived and/or modified CDS sequence (opt2) from hemagglutinin__InfluenzaB__AHL94038

SEQ ID NO: 124145 - RNA, 1758 nt, Artificial Sequence; identical to SEQ ID NO: 122644
  derived and/or modified CDS sequence (opt2) from hemagglutinin__InfluenzaB__AHL94049

SEQ ID NO: 124146 - RNA, 1758 nt, Artificial Sequence; identical to SEQ ID NO: 122719
  derived and/or modified CDS sequence (opt2) from hemagglutinin__InfluenzaB__AHL94060

SEQ ID NO: 124147 - RNA, 1758 nt, Artificial Sequence
  derived and/or modified CDS sequence (opt2) from hemagglutinin__InfluenzaB__AHL94071
augaaggccaucaucguccuccucauggucgucaccuccaacgccgaccgcaucugcaccggcaucaccuccuccaacuccccccacaucgucaagaccgccacccagggcgaggucaacgucaccggcgucaucccccucaccaccacccccaccaagucccacuucgccaaccucaagggcaccgagacccgcggcaagcucugccccaagugccucaacugcaccgaccucgacgucgcccucggccgccccaagugcaccggcaagauccccuccgcccgcgucuccauccuccacgagguccgccccgucaccuccggcugcuuccccaucaugcacgaccgcaccaagauccgccagcuccccaaccuccuccgcggcuacgagcacauccgccucuccacccacaacgucaucaacgccgagaacgcccccggcggccccuacaagaucggcaccuccggcuccugccccaacaucaccaacggcaacggcuucuucgccaccauggccugggccguccccaagaacgacaagaacaagaccgccaccaacccccucaccaucgagguccccuacaucugcaccgagggcgaggaccagaucaccgucuggggcuuccacuccgacaacgagacccagauggccaagcucuacggcgacuccaagccccagaaguucaccuccuccgccaacggcgucaccacccacuacgucucccagaucggcggcuuccccaaccagaccgaggacggcggccucccccaguccggccgcaucgucgucgacuacaugaugcagaaguccggcaagaccggcaccaucaccuaccagcgcggcauccuccucccccagaaggucuggugcgccuccggccgcuccaaggucaucaagggcucccucccccucaucggcgaggccgacugccuccacgagaaguacggcggccucaacaaguccaagcccuacuacaccggcgagcacgccaaggccaucggcaacugccccaucugggucaagaccccccucaagcucgccaacggcaccaaguaccgcccccccgccaagcuccucaaggagcgcggcuucuucggcgccaucgccggcuuccucgagggcggcugggagggcaugaucgccggcuggcacggcuacaccucccacggcgcccacggcgucgccgucgccgccgaccucaaguccacccaggaggccaucuccaagaucaccaagaaccucaacucccucuccgagcucgaggucaagaaccuccagcgccucuccggcgccauggacgagcuccacaacgagauccucgagcucgacgagaaggucgacgaccuccgcgccgacaccaucuccucccagaucgagcucgccguccuccucuccaacgagggcaucaucaacuccgaggacgagcaccuccucgcccucgagcgcaagcucaagaagaugcucggccccuccgccgucgagaucggcaacggcugcuucgagaccaagcacaagugcaaccagaccugccucgaccgcaucgccgccggcaccuucgacgccggcgaguucucccuccccaccuucgacucccucaacaucaccgccgccucccucaacgacgacggccucgacaaccacaccauccuccucuacuacuccaccgccgccuccucccucgccgucacccucaugaucgccaucuucgucgucuacauggucucccgcgacaacgucuccugcuccaucugccucuga

SEQ ID NO: 124148 - RNA, 1755 nt, Artificial Sequence
  derived and/or modified CDS sequence (opt2) from hemagglutinin__InfluenzaB__AHL94082
augaaggccaucaucguccuccucauggucgucaccuccaacgccgaccgcaucugcaccggcaucaccuccuccaacuccccccacgucgucaagaccgccacccagggcgaggucaacgucaccggcgucaucccccucaccaccacccccaccaaguccuacuucgccaaccucaagggcacccgcacccgcggcaagcucugccccgacugccucaacugcaccgaccucgacgucgcccucggccgccccaugugcgucggcaccacccccuccgccaaggccuccauccuccacgagauccgccccgucaccuccggcugcuuccccaucaugcacgaccgcaccaagauccgccagcuccccaaccuccuccgcggcuacgagaacauccgccucuccacccagaacgucaucgacgccgagaaggcccccggcggccccuaccgccucggcaccuccggcuccugccccaacgccaccuccaagaucggcuucuucgccaccauggccugggccguccccaaggacaacuacaagaacgccaccaacccccucaccgucgagguccccuacaucugcaccgagggcgaggaccagaucaccgucuggggcuuccacuccgacaacaagacccagaugaagaaccucuacggcgacuccaacccccagaaguucaccuccuccgccaacggcgucaccacccacuacgucucccagaucggcgacuuccccgaccagaccgaggacggcggccucccccaguccggccgcaucgucgucgacuacaugaugcagaagcccggcaagaccggcaccaucgucuaccagcgcggcguccuccucccccagaaggucuggugcgccuccggccgcuccaaggucaucaagggcucccucccccucaucggcgaggccgacugccuccacgagaaguacggcggccucaacaaguccaagcccuacuacaccggcgagcacgccaaggccaucggcaacugccccaucugggucaagaccccccucaagcucgccaacggcaccaaguaccgcccccccgccaagcuccucaaggagcgcggcuucuucggcgccaucgccggcuuccucgagggcggcugggagggcaugaucgccggcuggcacggcuacaccucccacggcgcccacggcgucgccgucgccgccgaccucaaguccacccaggaggccaucaacaagaucaccaagaaccucaacucccucuccgagcucgaggucaagaaccuccagcgccucuccggcgccauggacgagcuccacaacgagauccucgagcucgacgagaaggucgacgaccuccgcgccgacaccaucuccucccagaucgagcucgccguccuccucuccaacgagggcaucaucaacuccgaggacgagcaccuccucgcccucgagcgcaagcucaagaagaugcucggccccuccgccgucgacaucggcaacggcugcuucgagaccaagcacaagugcaaccagaccugccucgaccgcaucgccgccggcaccuucaacgccggcgaguucucccuccccaccuucgacucccucaacaucaccgccgccucccucaacgacgacggccucgacaaccacaccauccuccucuacuacuccaccgccgccuccucccucgccgucacccucaugcucgccaucuucaucgucuacauggucucccgcgacaacgucuccugcuccaucugccucuga

SEQ ID NO: 124149 - RNA, 1758 nt, Artificial Sequence; identical to SEQ ID NO: 122681
  derived and/or modified CDS sequence (opt2) from hemagglutinin__InfluenzaB__AHL94093

SEQ ID NO: 124150 - RNA, 1758 nt, Artificial Sequence; identical to SEQ ID NO: 122719
  derived and/or modified CDS sequence (opt2) from hemagglutinin__InfluenzaB__AHL94102

SEQ ID NO: 124151 - RNA, 1758 nt, Artificial Sequence
  derived and/or modified CDS sequence (opt2) from hemagglutinin__InfluenzaB__AHL94113
augaaggccaucaucguccuccucauggucgucaccuccaacgccgaccgcaucugcaccggcaucaccuccuccaacuccccccacaucgucaagaccgccacccagggcgaggucaacgucaccggcgucaucccccucaccaccacccccaccaagucccacuucgccaaccucaagggcaccgagacccgcggcaagcucugccccaagugccucaacugcaccgaccucgacgucgcccucggccgccccaagugcaccggcaagauccccuccgcccgcgucuccauccuccacgagguccgccccgucaccuccggcugcuuccccaucaugcacgaccgcaccaagauccgccagcuccccaaccuccuccgcggcuacgagcacauccgccucuccacccacaacgucaucaacgccgagaacgcccccggcggccccuacaagaucggcaccuccggcuccugccucaacaucaccaacggcaacggcuucuucgccaccauggccugggccguccccaagaacgacaagaacaagaccgccaccaacccccucaccaucgagguccccuacaucugcaccgagggcgaggaccagaucaccgucuggggcuuccacuccgacaacgagacccagauggccaagcucuacggcgacuccaagccccagaaguucaccuccuccgccaacggcgucaccacccacuacgucucccagaucggcggcuuccccaaccagaccgaggacggcggccucccccaguccggccgcaucgucgucgacuacaugguccagaaguccggcaagaccggcaccaucaccuaccagcgcggcauccuccucccccagaaggucuggugcgccuccggccgcuccaaggucaucaagggcucccucccccucaucggcgaggccgacugccuccacgagaaguacggcggccucaacaaguccaagcccuacuacaccggcgagcacgccaaggccaucggcaacugccccaucugggucaagaccccccucaagcucgccaacggcaccaaguaccgcccccccgccaagcuccucaaggagcgcggcuucuucggcgccaucgccggcuuccucgagggcggcugggagggcaugaucgccggcuggcacggcuacaccucccacggcgcccacggcgucgccgucgccgccgaccucaaguccacccaggaggccaucaacaagaucaccaagaaccucaacucccucuccgagcucgaggucaagaaccuccagcgccucuccggcgccauggacgagcuccacaacgagauccucgagcucgacgagaaggucgacgaccuccgcgccgacaccaucuccucccagaucgagcucgccguccuccucuccaacgagggcaucaucaacuccgaggacgagcaccuccucgcccucgagcgcaagcucaagaagaugcucggccccuccgccgucgagaucggcaacggcugcuucgagaccaagcacaagugcaaccagaccugccucgaccgcaucgccgccggcaccuucgacgccggcgaguucucccuccccaccuucgacucccucaacaucaccgccgccucccucaacgacgacggccucgacaaccacaccauccuccucuacuacuccaccgccgccuccucccucgccgucacccucaugaucgccaucuucgucgucuacauggucucccgcgacaacgucuccugcuccaucugccucuga

SEQ ID NO: 124152 - RNA, 1758 nt, Artificial Sequence
  derived and/or modified CDS sequence (opt2) from hemagglutinin__InfluenzaB__AHL94124
augaaggccaucaucguccuccucauggucgucaccuccaacgccgaccgcaucugcaccggcaucaccuccuccaacuccccccacaucgucaagaccgccacccagggcgaggucaacgucaccggcgucaucccccucaccaccacccccaccaagucccacuucgccaaccucaagggcaccgagacccgcggcaagcucugccccaagugccucaacugcaccgaccucgacgucgcccucggccgccccaagugcaccggcaagauccccuccgcccgcgucuccauccuccacgagauccgccccgucaccuccggcugcuuccccaucaugcacgaccgcaccaagauccgccagcuccccaaccuccuccgcggcuacgagcacauccgccucuccacccacaacgucaucaacgccgagaacgcccccggcggccccuacaagaucggcaccuccggcuccugccccaacaucaccaacggcaacggcuucuucgccaccauggccugggccguccccaagaacgacaagaacaagaccgccaccaacccccucaccaucgagguccccuacaucugcaccgagggcgaggaccagaucaccgucuggggcuuccacuccgacaacgagacccagauggccaagcucuacggcgacuccaagccccagaaguucaccuccuccgccaacggcgucaccacccacuacgucucccagaucggcggcuuccccaaccagaccgaggacggcggccucccccaguccggccgcaucgucgucgacuacaugguccagaaguccggcaagaccggcaccaucaccuaccagcgcggcauccuccucccccagaaggucuggugcgccuccggccgcuccaaggucaucaagggcucccucccccucaucggcgaggccgacugccuccacgagaaguacggcggccucaacaaguccaagcccuacuacaccggcgagcacgccaaggccaucggcaacugccccaucugggucaagaccccccucaagcucgccaacggcaccaaguaccgcccccccgccaagcuccucaaggagcgcggcuucuucggcgccaucgccggcuuccucgagggcggcugggagggcaugaucgccggcuggcacggcuacaccucccacggcgcccacggcgucgccgucgccgccgaccucaaguccacccaggaggccaucaacaagaucaccaagaaccucaacucccucuccgagcucgaggucaagaaccuccagcgccucuccggcgccauggacgagcuccacaacgagauccucgagcucgacgagaaggucgacgaccuccgcgccgacaccaucuccucccagaucgagcucgccguccuccucuccaacgagggcaucaucaacuccgaggacgagcaccuccucgcccucgagcgcaagcucaagaagaugcucggccccuccgccgucgagaucggcaacggcugcuucgagaccaagcacaagugcaaccagaccugccucgaccgcaucgccgccggcaccuucgacgccggcgaguucucccuccccaccuucgacucccucaacaucaccgccgccucccucaacgacgacggccucgacaaccacaccauccuccucuacuacuccaccgccgccuccucccucgccgucacccucaugaucgccaucuucgucgucuacauggucucccgcgacaacgucuccugcuccaucugccucuga

SEQ ID NO: 124153 - RNA, 1758 nt, Artificial Sequence; identical to SEQ ID NO: 122644
  derived and/or modified CDS sequence (opt2) from hemagglutinin__InfluenzaB__AHL94135

SEQ ID NO: 124154 - RNA, 1758 nt, Artificial Sequence; identical to SEQ ID NO: 122644
  derived and/or modified CDS sequence (opt2) from hemagglutinin__InfluenzaB__AHL94146

SEQ ID NO: 124155 - RNA, 1758 nt, Artificial Sequence; identical to SEQ ID NO: 122719
  derived and/or modified CDS sequence (opt2) from hemagglutinin__InfluenzaB__AHL94157

SEQ ID NO: 124156 - RNA, 1758 nt, Artificial Sequence; identical to SEQ ID NO: 122719
  derived and/or modified CDS sequence (opt2) from hemagglutinin__InfluenzaB__AHL94168

SEQ ID NO: 124157 - RNA, 1758 nt, Artificial Sequence; identical to SEQ ID NO: 122644
  derived and/or modified CDS sequence (opt2) from hemagglutinin__InfluenzaB__AHL94179

SEQ ID NO: 124158 - RNA, 1758 nt, Artificial Sequence; identical to SEQ ID NO: 122644
  derived and/or modified CDS sequence (opt2) from hemagglutinin__InfluenzaB__AHL94190

SEQ ID NO: 124159 - RNA, 1758 nt, Artificial Sequence
  derived and/or modified CDS sequence (opt2) from hemagglutinin__InfluenzaB__AHL94201
augaaggccaucaucguccuccucauggucgucaccuccaacgccgaccgcaucugcaccggcaucaccuccuccaacuccccccacaucgucaagaccgccacccagggcgaggucaacgucaccggcgucaucccccucaccaccacccccaccaagucccacuucgccaaccucaagggcaccgagacccgcggcaagcucugccccaagugccucaacugcaccgaccucgacgucgcccucggccgccccaagugcaccggcaagauccccuccgcccgcgucuccauccuccacgagguccgccccgucaccuccggcugcuuccccaucaugcacgaccgcaccaagauccgccagcuccccaaccuccuccgcggcuacgagcacauccgccucuccacccacaacgucaucaacgccgagaacgcccccggcggccccuacaagaucggcaccuccggcuccugccccaacaucaccaacggcaacggcuucuucgagaccauggccugggccguccccaagaacgacaagaacaagaccgccaccaacccccucaccaucgagguccccuacaucugcaccgagggcgaggaccagaucaccgucuggggcuuccacuccgacaacgagacccagauggccaagcucuacggcgacuccaagccccagaaguucaccuccuccgccaacggcgucaccacccacuacgucucccagaucggcggcuuccccaaccagaccgaggacggcggccucccccaguccggccgcaucgucgucgacuacaugguccagaaguccggcaagaccggcaccaucaccuaccagcgcggcauccuccucccccagaaggucuggugcgccuccggccgcuccaaggucaucaagggcucccucccccucaucggcgaggccgacugccuccacgagaaguacggcggccucaacaaguccaagcccuacuacaccggcgagcacgccaaggccaucggcaacugccccaucugggucaagaccccccucaagcucgccaacggcaccaaguaccgcccccccgccaagcuccucaaggagcgcggcuucuucggcgccaucgccggcuuccucgagggcggcugggagggcaugaucgccggcuggcacggcuacaccucccacggcgcccacggcgucgccgucgccgccgaccucaaguccacccaggaggccaucaacaagaucaccaagaaccucaacucccucuccgagcucgaggucaagaaccuccagcgccucuccggcgccauggacgagcuccacaacgagauccucgagcucgacgagaaggucgacgaccuccgcgccgacaccaucuccucccagaucgagcucgccguccuccucuccaacgagggcaucaucaacuccgaggacgagcaccuccucgcccucgagcgcaagcucaagaagaugcucggccccuccgccgucgagaucggcaacggcugcuucgagaccaagcacaagugcaaccagaccugccucgaccgcaucgccgccggcaccuucgacgccggcgaguucucccuccccaccuucgacucccucaacaucaccgccgccucccucaacgacgacggccucgacaaccacaccauccuccucuacuacuccaccgccgccuccucccucgccgucacccucaugaucgccaucuucgucgucuacauggucucccgcaacaacgucuccugcuccaucugccucuga

SEQ ID NO: 124160 - RNA, 1758 nt, Artificial Sequence
  derived and/or modified CDS sequence (opt2) from hemagglutinin__InfluenzaB__AHL94212
augaaggccaucaucguccuccucauggucgucaccuccaacgccgaccgcaucugcaccggcaucaccuccuccaacuccccccacgucgucaagaccgccacccagggcgaggucaacgucaccggcgucaucccccucaccaccacccccaccaagucccacuucgccaaccucaagggcaccgagacccgcggcaagcucugccccaagugccucaacugcaccgaccucgacgucgcccucggccgccccaagugcaccggcaagauccccuccgcccgcgucuccauccuccacgagguccgccccgucaccuccggcugcuuccccaucaugcacgaccgcaccaagauccgccagcuccccaaccuccuccgcggcuacgagcacauccgccucuccacccacaacgucaucaacgccgagaacgcccccggcggccccuacaagaucggcaccuccggcuccugccccaacgucaccaacggcaacggcuucuucgccaccauggccugggccguccccaagaacgacaagaacaagaccgccaccaacccccucaccaucgagguccccuacaucugcaccgagggcgaggaccaggucaccgucuggggcuuccacuccgacaacgagacccagauggccaagcucuacggcgacuccaagccccagaaguucaccuccuccgccaacggcgucaccacccacuacgucucccagaucggcggcuuccccaaccagaccgaggacggcggccucccccaguccggccgcaucgucgucgacuacaugguccagaaguccggcaagaccggcaccaucaccuaccagcgcggcauccuccucccccagaaggucuggugcgccuccggccgcuccaaggucaucaagggcucccucccccucaucggcgaggccgacugccuccacgagaaguacggcggccucaacaaguccaagcccuacuacaccggcgagcacgccaaggccaucggcaacugccccaucugggucaagaccccccucaagcucgccaacggcaccaaguaccgcccccccgccaagcuccucaaggagcgcggcuucuucggcgccaucgccggcuuccucgagggcggcugggagggcaugaucgccggcuggcacggcuacaccucccacggcgcccacggcgucgccgucgccgccgaccucaaguccacccaggaggccaucaacaagaucaccaagaaccucaacucccucuccgagcucgaggucaagaaccuccagcgccucuccggcgccauggacgagcuccacaacgagauccucgagcucgacgagaaggucgacgaccuccgcgccgacaccaucuccucccagaucgagcucgccguccuccucuccaacgagggcaucaucaacuccgaggacgagcaccuccucgcccucgagcgcaagcucaagaagaugcucggccccuccgccgucgagaucggcaacggcugcuucgagaccaagcacaagugcaaccagaccugccucgaccgcaucgccgccggcaccuucgacgccggcgaguucucccuccccaccuucgacucccucaacaucaccgccgccucccucaacgacgacggccucgacaaccacaccauccuccucuacuacuccaccgccgccuccucccucgccgucacccucaugaucgccaucuucgucgucuacauggucucccgcgacaacgucuccugcuccaucugccucuga

SEQ ID NO: 124161 - RNA, 1758 nt, Artificial Sequence; identical to SEQ ID NO: 122719
  derived and/or modified CDS sequence (opt2) from hemagglutinin__InfluenzaB__AHL94220

SEQ ID NO: 124162 - RNA, 1758 nt, Artificial Sequence; identical to SEQ ID NO: 122719
  derived and/or modified CDS sequence (opt2) from hemagglutinin__InfluenzaB__AHL94231

SEQ ID NO: 124163 - RNA, 1758 nt, Artificial Sequence
  derived and/or modified CDS sequence (opt2) from hemagglutinin__InfluenzaB__AHL94242
augaaggccaucaucguccuccucauggucgucaccuccaacgccgaccgcaucugcaccggcaucaccuccuccaacuccccccacgucgucaagaccgccacccagggcgaggucaacgucaccggcgucaucccccucaccaccacccccaccaagucccacuucgccaaccucaagggcaccgagacccgcggcaagcucugccccaagugccucaacugcaccgaccucgacgucgcccucggccgccccaagugcaccggcaagauccccuccgcccgcgucuccauccuccacgagguccgccccgucaccuccggcugcuuccccaucaugcacgaccgcaccaagauccgccagcuccccaaccuccuccgcggcuacgagcacauccgccucuccacccacaacgucaucaacgccgagaacgcccccggcggccccuacaagaucggcaccuccggcuccugccccaacgucaccaacggcaacggcuucuucgccaccauggccugggccguccccaagaacgacaagaacaagaccgccaccaacccccucaccaucgagguccccuacaucugcaccgagggcgaggaccagaucaccgucuggggcuuccacuccgacaacgagacccagauggccaagcucuacggcgacuccaagccccagaaguucaccuccuccgccaacggcgucaccacccacuacgucucccagaucggcggcuuccccaaccagaccgaggacggcggccucccccaguccggccgcaucgucgucgacuacaugguccagaaguccggcaagaccggcaccaucaccuaccagcgcggcauccuccucccccagaaggucuggugcgccaacggccgcuccaaggucaucaagggcucccucccccucaucggcgaggccgacugccuccacgagaaguacggcggccucaacaaguccaagcccuacuacaccggcgagcacgccaaggccaucggcaacugccccaucugggucaagaccccccucaagcucgccaacggcaccaaguaccgcccccccgccaagcuccucaaggagcgcggcuucuucggcgccaucgccggcuuccucgagggcggcugggagggcaugaucgccggcuggcacggcuacaccucccacggcgcccacggcgucgccgucgccgccgaccucaaguccacccaggaggccaucaacaagaucaccaagaaccucaacucccucuccgagcucgaggucaagaaccuccagcgccucuccggcgccauggacgagcuccacaacgagauccucgagcucgacgagaaggucgacgaccuccgcgccgacaccaucuccucccagaucgagcucgccguccuccucuccaacgagggcaucaucaacuccgaggacgagcaccuccucgcccucgagcgcaagcucaagaagaugcucggccccuccgccgucgagaucggcaacggcugcuucgagaccaagcacaagugcaaccagaccugccucgaccgcaucgccgccggcaccuucgacgccggcgaguucucccuccccaccuucgacucccucaacaucaccgccgccucccucaacgacgacggccucgacaaccacaccauccuccucuacuacuccaccgccgccuccucccucgccgucacccucaugaucgccaucuucgucgucuacauggucucccgcgacaacgucuccugcuccaucugccucuga

SEQ ID NO: 124164 - RNA, 1758 nt, Artificial Sequence; identical to SEQ ID NO: 122681
  derived and/or modified CDS sequence (opt2) from hemagglutinin__InfluenzaB__AHL94253

SEQ ID NO: 124165 - RNA, 1755 nt, Artificial Sequence
  derived and/or modified CDS sequence (opt2) from hemagglutinin__InfluenzaB__AHL94274
augaaggccaucaucguccuccucauggucgucaccuccaacgccgaccgcaucugcaccggcaucaccuccuccaacuccccccacgucgucaagaccgccacccagggcgaggucaacgucaccggcgucaucccccucaccaccacccccaccaaguccuacuucgccaaccucaagggcacccgcacccgcggcaagcucugccccgacugccucaacugcaccgaccucgacgucgcccucggccgccccaugugcgucggcaccacccccuccgccaaggccuccauccuccacgagguccgccccgucaccuccggcugcuuccccaucaugcacgaccgcaccaagauccgccagcuccccaaccuccuccgcggcuacgagaagauccgccucuccacccagaacgucaucgacgccgagaaggcccccggcggccccuaccgccucggcaccuccggcuccugccccaacgccaccuccaagaucggcuucuucgccaccauggccugggccguccccaaggacaacuacaagaacgccaccaacccccucaccgucgagguccccuacaucugcaccgagggcgaggaccagaucaccgucuggggcuuccacuccgacaacaagacccagaugaagucccucuacggcgacuccaacccccagaaguucaccuccuccgccaacggcgucaccacccacuacgucucccagaucggcgacuuccccgaccagaccgaggacggcggccucccccaguccggccgcaucgucgucgacuacaugaugcagaagcccggcaagaccggcaccaucgucuaccagcgcggcguccuccucccccagaaggucuggugcgccuccggccgcuccaaggucaucaagggcucccucccccucaucggcgaggccgacugccuccacgaggaguacggcggccucaacaaguccaagcccuacuacaccggcaagcacgccaaggccaucggcaacugccccaucugggucaagaccccccucaagcucgccaacggcaccaaguaccgcccccccgccaagcuccucaaggagcgcggcuucuucggcgccaucgccggcuuccucgagggcggcugggagggcaugaucgccggcuggcacggcuacaccucccacggcgcccacggcgucgccgucgccgccgaccucaaguccacccaggaggccaucaacaagaucaccaagaaccucaacucccucuccgagcucgaggucaagaaccuccagcgccucuccggcgccauggacgagcuccacaacgagauccucgagcucgacgagaaggucgacgaccuccgcgccgacaccaucuccucccagaucgagcucgccguccuccucuccaacgagggcaucaucaacuccgaggacgagcaccuccucgcccucgagcgcaagcucaagaagaugcucggccccuccgccgucgacaucggcaacggcugcuucgagaccaagcacaagugcaaccagaccugccucgaccgcaucgccgccggcaccuucaacgccggcgaguucucccuccccaccuucgacucccucaacaucaccgccgccucccucaacgacgacggccucgacaaccacaccauccuccucuacuacuccaccgccgccuccucccucgccgucacccucaugcucgccaucuucaucgucuacauggucucccgcgacaacgucuccugcuccaucugccucuga

SEQ ID NO: 124166 - RNA, 1755 nt, Artificial Sequence; identical to SEQ ID NO: 124165
  derived and/or modified CDS sequence (opt2) from hemagglutinin__InfluenzaB__AHL94295

SEQ ID NO: 124167 - RNA, 1755 nt, Artificial Sequence
  derived and/or modified CDS sequence (opt2) from hemagglutinin__InfluenzaB__AHL94306
augaaggccaucaucguccuccucauggucgucaccuccaacgccgaccgcaucugcaccggcaucaccuccuccaacuccccccacgucgucaagaccgccacccagggcgaggucaacgucaccggcgccaucccccucaccaccacccccaccaaguccuacuucgccaaccucaagggcacccgcacccgcggcaagcucugccccgacugccucaacugcaccgaccucgacgucgcccucggccgccccaugugcgucggcaccacccccuccgccaaggccuccauccuccacgagguccgccccgucaccuccggcugcuuccccaucaugcacgaccgcaccaagauccgccagcuccccaaccuccuccgcggcuacgagaacauccgccucuccacccagaacgucaucgacgccgagaaggcccccggcggccccuaccgccucggcaccuccggcuccugccccaacgccaccuccaagaucggcuucuucgccaccauggccugggccguccccaaggacaacuacaagaacgccaccaacccccagaccgucgagguccccuacaucugcaccgagggcgaggaccagaucaccgucuggggcuuccacuccgacaacaagacccagaugaagaaccucuacggcgacuccaacccccagaaguucaccuccuccgccaacggcgucaccacccacuacgucucccagaucggcgacuuccccgaccagaccgaggacggcggccucccccaguccggccgcaucgucgucgacuacaugguccagaagcccggcaagaccggcaccaucgucuaccagcgcggcguccuccucccccagaaggucuggugcgccuccggccgcuccaaggucaucaagggcucccucccccucaucggcgaggccgacugccuccacgagaaguacggcggccucaacaaguccaagcccuacuacaccggcgagcacgccaaggccaucggcaacugccccaucugggucaagaccccccucaagcucgccaacggcaccaaguaccgcccccccgccaagcuccucaaggagcgcggcuucuucggcgccaucgccggcuuccucgagggcggcugggagggcaugaucgccggcuggcacggcuacaccucccacggcgcccacggcgucgccgucgccgccgaccucaaguccacccaggaggccaucaacaagaucaccaagaaccucaacucccucuccgagcucgaggucaagaaccuccagcgccucuccggcgccauggacgagcuccacaacgagauccucgagcucgacgagaaggucgacgaccuccgcgccgacaccaucuccucccagaucgagcucgccguccuccucuccaacgagggcaucaucaacuccgaggacgagcaccuccucgcccucgagcgcaagcucaagaagaugcucggccccuccgccgucgacaucggcaacggcugcuucgagaccaagcacaagugcaaccagaccugccucgaccgcaucgccgccggcaccuucaacgccggcgaguucucccuccccaccuucgacucccucaacaucaccgccgccucccucaacgacgacggccucgacaaccacaccauccuccucuacuacuccaccgccgccuccucccucgccgucacccucaugcucgccaucuucaucgucuacauggucucccgcgacaacgucuccugcuccaucugccucuga

SEQ ID NO: 124168 - RNA, 1755 nt, Artificial Sequence
  derived and/or modified CDS sequence (opt2) from hemagglutinin__InfluenzaB__AHL94317
augaaggccaucaucguccuccucauggucgucaccuccaacgccgaccgcaucugcaccggcaucaccuccuccaacuccccccacgucgucaagaccgccacccagggcgaggucaacgucaccggcgccaucccccucaccaccacccccaccaaguccuacuucgccaaccucaagggcauccgcacccgcggcaagcucugccccgacugccucaacugcaccgaccucgacgucgcccucggccgccccaugugcgucggcaccacccccuccgccaaggccuccauccuccacgagguccgccccgucaccuccggcugcuuccccaucaugcacgaccgcaccaagauccgccagcuccccaaccuccuccgcggcuacgagaacauccgccucuccacccagaacgucaucgacgccgagaaggcccccggcggccccuaccgccucggcaccuccggcuccugccccaacgccaccuccaagaucggcuucuucgccaccauggccugggccgucccccgcgacaacuacaagaacgccaccaacccccagaccgucgagguccccuacaucugcaccgagggcgaggaccagaucaccgucuggggcuuccacuccgacaacaagacccagaugaagaaccucuacggcgacuccaacccccagaaguucaccuccuccgccaacggcgucaccacccacuacgucucccagaucggcgacuuccccgaccagaccgaggacggcggccucccccaguccggccgcaucgucgucgacuacaugguccagaagcccggcaagaccggcaccaucgucuaccagcgcggcguccuccucccccagaaggucuggugcgccuccggccgcuccaaggucaucaagggcucccucccccucaucggcgaggccgacugccuccacgagaaguacggcggccucaacaaguccaagcccuacuacaccggcgagcacgccaaggccaucggcaacugccccaucugggucaagaccccccucaagcucgccaacggcaccaaguaccgcccccccgccaagcuccucaaggagcgcggcuucuucggcgccaucgccggcuuccucgagggcggcugggagggcaugaucgccggcuggcacggcuacaccucccacggcgcccacggcgucgccgucgccgccgaccucaaguccacccaggaggccaucaacaagaucaccaagaaccucaacucccucuccgagcucgaggucaagaaccuccagcgccucuccggcgccauggacgagcuccacaacgagauccucgagcucgacgagaaggucgacgaccuccgcgccgacaccaucuccucccagaucgagcucgccguccuccucuccaacgagggcaucaucaacuccgaggacgagcaccuccucgcccucgagcgcaagcucaagaagaugcucggccccuccgccgucgacaucggcaacggcugcuucgagaccaagcacaagugcaaccagaccugccucgaccgcaucgccgccggcaccuucaacgccggcgaguucucccuccccaccuucgacucccucaacaucaccgccgccucccucaacgacgacggccucgacaaccacaccauccuccucuacuacuccaccgccgccuccucccucgccgucacccucaugcucgccaucuucaucgucuacauggucucccgcgacaacgucuccugcuccaucugccucuga

SEQ ID NO: 124169 - RNA, 1755 nt, Artificial Sequence; identical to SEQ ID NO: 124167
  derived and/or modified CDS sequence (opt2) from hemagglutinin__InfluenzaB__AHL94328

SEQ ID NO: 124170 - RNA, 1755 nt, Artificial Sequence; identical to SEQ ID NO: 124165
  derived and/or modified CDS sequence (opt2) from hemagglutinin__InfluenzaB__AHL94339

SEQ ID NO: 124171 - RNA, 1758 nt, Artificial Sequence
  derived and/or modified CDS sequence (opt2) from hemagglutinin__InfluenzaB__AHL94350
augaaggccaucaucguccuccucauggucgucaccuccaacgccgaccgcaucugcaccggcaucaccuccuccaacuccccccacgucgucaagaccgccacccagggcgaggucaacgucaccggcgucaucccccucaccaccacccccaccaagucccacuucgccaaccucaagggcaccgagacccgcggcaagcucugccccaagugccucaacugcaccgaccucgacgucgcccucggccgccccaagugcaccggcaagauccccuccgcccgcgucuccauccuccacgagguccgccccgucaccuccggcugcuuccccaucaugcacgaccgcaccaagauccgccagcuccccaaccuccuccgcggcuacgagcacauccgccucuccacccacaacgucaucaacgccgagaacgcccccggcggccccuacaagaucggcaccuccggcuccugccccaacgucaccaacggcaacggcuucuucgccaccauggccugggccguccccaagaacgacaagaacaagaccgccaccaacccccucaccaucgagguccccuacaucugcaccgagggcgaggaccagaucaccgucuggggcuuccacuccgacaacgagacccagauggccaagcucuacggcgacuccaacccccagaaguucaccuccuccgccaacggcgucaccacccacuacgucucccagaucggcggcuuccccaaccagaccgaggacggcggccucccccaguccggccgcaucgucgucgacuacaugguccagaaguccggcaagaccggcaccaucaccuaccagcgcggcauccuccucccccagaaggucuggugcgccuccggccgcuccaaggucaucaagggcucccucccccucaucggcgaggccgacugccuccacgagaaguacggcggccucaacaaguccaagcccuacuacaccggcgagcacgccaaggccaucggcaacugccccaucugggucaagaccccccucaagcucgccaacggcaccaaguaccgcccccccgccaagcuccucaaggagcgcggcuucuucggcgccaucgccggcuuccucgagggcggcugggagggcaugaucgccggcuggcacggcuacaccucccacggcgcccacggcgucgccgucgccgccgaccucaaguccacccaggaggccaucaacaagaucaccaagaaccucaacucccucuccgagcucgaggucaagaaccuccagcgccucuccggcgccauggacgagcuccacaacgagauccucgagcucgacgagaaggucgacgaccuccgcgccgacaccaucuccucccagaucgagcucgccguccuccucuccaacgagggcaucaucaacuccgaggacgagcaccuccucgcccucgagcgcaagcucaagaagaugcucggccccuccgccgucgagaucggcaacggcugcuucgagaccaagcacaagugcaaccagaccugccucgaccgcaucgccgccggcaccuucgacgccggcgaguucucccuccccaccuucgacucccucaacaucaccgccgccucccucaacgacgacggccucgacaaccacaccauccuccucuacuacuccaccgccgccuccucccucgccgucacccucaugaucgccaucuucgucgucuacauggucuccaaggacaacgucuccugcuccaucugccucuga

SEQ ID NO: 124172 - RNA, 1758 nt, Artificial Sequence
  derived and/or modified CDS sequence (opt2) from hemagglutinin__InfluenzaB__AHL94361
augaaggccaucaucguccuccucauggucgucaccuccaacgccgaccgcaucugcaccggcaucaccuccuccaacuccccccacgucgucaagaccgccacccagggcgaggucaacgucaccggcgucaucccccucaccaccacccccaccaagucccacuucgccaaccucaagggcaccgagacccgcggcaagcucugccccaagugccucaacugcaccgaccucgacgucgcccucggccgccccaagugcaccggcaagauccccuccgcccgcgucuccauccuccacgagguccgccccgucaccuccggcugcuuccccaucaugcacgaccgcaccaagauccgccagcuccccaaccuccuccgcggcuacgagcacauccgccucuccacccacaacgucaucaacgccgagaacgcccccggcggccccuacaagaucggcaccuccggcuccugccccaacgucaccaacggcaacggcuucuucgccaccauggccugggccguccccaagaacgacaagaacaagaccgccaccaacccccucaccaucgagguccccuacaucugcaccgagggcgaggaccagaucaccgucuggggcuuccacuccgacaacgagacccagauggccaagcucuacggcgacuccaacccccagaaguucaccuccuccgccaacggcgucaccacccacuacgucucccagaucggcggcuuccccaaccagaccgaggacggcggccucccccaguccggccgcaucgucgucgacuacaugguccagaaguccggcaagaccggcaccaucgccuaccagcgcggcauccuccucccccagaaggucuggugcgccuccggccgcuccaaggucaucaagggcucccucccccucaucggcgaggccgacugccuccacgagaaguacggcggccucaacaaguccaagcccuacuacaccggcgagcacgccaaggccaucggcaacugccccaucugggucaagaccccccucaagcucgccaacggcaccaaguaccgcccccccgccaagcuccucaaggagcgcggcuucuucggcgccaucgccggcuuccucgagggcggcugggagggcaugaucgccggcuggcacggcuacaccucccacggcgcccacggcgucgccgucgccgccgaccucaaguccacccaggaggccaucaacaagaucaccaagaaccucaacucccucuccgagcucgaggucaagaaccuccagcgccucuccggcgccauggacgagcuccacaacgagauccucgagcucgacgagaaggucgacgaccuccgcgccgacaccaucuccucccagaucgagcucgccguccuccucuccaacgagggcaucaucaacuccgaggacgagcaccuccucgcccucgagcgcaagcucaagaagaugcucggccccuccgccgucgagaucggcaacggcugcuucgagaccaagcacaagugcaaccagaccugccucgaccgcaucgccgccggcaccuucgacgccggcgaguucucccuccccaccuucgacucccucaacaucaccgccgccucccucaacgacgacggccucgacaaccacaccauccuccucuacuacuccaccgccgccuccucccucgccgucacccucaugaucgccaucuucgucgucuacauggucucccgcgacuccgucuccugcuccaucugccucuga

SEQ ID NO: 124173 - RNA, 1758 nt, Artificial Sequence
  derived and/or modified CDS sequence (opt2) from hemagglutinin__InfluenzaB__AHL94383
augaaggccaucaucguccuccucauggucgucaccuccaacgccgaccgcaucugcaccggcaucaccuccuccaacuccccccacgucgucaagaccgccacccagggcgaggucaacgucaccggcgucaucccccucaccaccacccccaccaagucccacuucgccaaccucaagggcaccgagacccgcggcaagcucugccccaagugccucaacugcaccgaccucgacgucgcccucggccgccccaagugcaccggcaagauccccuccgcccgcgucuccauccuccacgagguccgccccgucaccuccggcugcuuccccaucaugcacgaccgcaccaagauccgccagcuccccaaccuccuccgcggcuacgagcacauccgccucuccacccacaacgucaucaacgccgagaacgcccccggcggccccuacaagaucggcaccuccggcuccugccccaacgucaccaacggcaacggcuucuucgccaccauggccugggccguccccaagaacgacaagaacaagaccgccaccaacccccucaccaucgagguccccuacaucugcaccgagggcgaggaccagaucaccgucuggggcuuccacuccgacaacgagacccagauggagaagcucuacggcgacuccaagccccagaaguucaccuccuccgccaacggcgucaccacccacuacgucucccagaucggcggcuuccccaaccagaccgaggacggcggccucccccaguccggccgcaucgucgucgacuacaugguccagaaguccggcaagaccggcaccaucaccuaccagcgcggcauccuccucccccagaaggucuggugcgccuccggccgcuccaaggucaucaagggcucccucccccucaucggcgaggccgacugccuccacgagaaguacggcggccucaacaaguccaagcccuacuacaccggcgagcacgccaaggccaucggcaacugccccaucugggucaagaccccccucaagcucgccaacggcaccaaguaccgcccccccgccaagcuccucaaggagcgcggcuucuucggcgccaucgccggcuuccucgagggcggcugggagggcaugaucgccggcuggcacggcuacaccucccacggcgcccacggcgucgccgucgccgccgaccucaaguccacccaggaggccaucaacaagaucaccaagaaccucaacucccucuccgagcucgaggucaagaaccuccagcgccucuccggcgccauggacgagcuccacaacgagauccucgagcucgacgagaaggucgacgaccuccgcgccgacaccaucuccucccagaucgagcucgccguccuccucuccaacgagggcaucaucaacuccgaggacgagcaccuccucgcccucgagcgcaagcucaagaagaugcucggccccuccgccgucgagaucggcaacggcugcuucgagaccaagcacaagugcaaccagaccugccucgaccgcaucgccgccggcaccuucgacgccggcgaguucucccuccccaccuucgacucccucaacaucaccgccgccucccucaacgacgacggccucgacaaccacaccauccuccucuacuacuccaccgccgccuccucccucgccgucacccucaugaucgccaucuucgucgucuacauggucucccgcgacaacgucuccugcuccaucugccucuga

SEQ ID NO: 124174 - RNA, 1758 nt, Artificial Sequence; identical to SEQ ID NO: 122681
  derived and/or modified CDS sequence (opt2) from hemagglutinin__InfluenzaB__AHL94394

SEQ ID NO: 124175 - RNA, 1758 nt, Artificial Sequence
  derived and/or modified CDS sequence (opt2) from hemagglutinin__InfluenzaB__AHL94405
augaaggccaucaucguccuccucauggucgucaccuccaacgccgaccgcaucugcaccggcaucaccuccuccaacuccccccacgucgucaagaccgccacccagggcgaggucaacgucaccggcgucaucccccucaccaccacccccaccaagucccacuucgccaaccucaagggcaccgagacccgcggcaagcucugccccaagugccucaacugcaccgaccucgacgucgcccucggccgccccaagugcaccggcaagauccccuccgcccgcgucuccauccuccacgagguccgccccgucaccuccggcugcuuccccaucaugcacgaccgcaccaagauccgccagcuccccaaccuccuccgcggcuacgagcacauccgccucuccacccacaacgucaucaacgccgagaacgcccccggcggccccuacaagaucggcaccuccggcuccugccccaacgucaccaacggcaacggcuucuucgccaccauggccugggccguccccaagaacgacaagaacaagaccgccaccaacccccucaccaucgagguccccuacaucugcaccgagggcgaggaccagaucaccgucuggggcuuccacuccgacaacgagacccagauggccaagcucuacggcgacuccaagccccagaaguucaccuccuccgccaacggcgucaccacccacuacgucucccagaucggcggcuuccccaaccagaccgaggacggcggccucccccaguccggccgcaucgucgucgacuacaugguccagaaguccggcaagaccggcaccaucaccuaccagcgcggcauccuccucccccagaaggucuggugcgccuccggccgcuccaaggucaucaagggcucccucccccucaucggcgaggccgacugccuccacgagaaguacggcggccucaacaaguccaagcccuacuacaccggcgagcacgccaaggccaucggcaacugccccaucugggucaagaccccccucaagcucgccaacggcaccaaguaccgcccccccgccaagcuccucaaggagcgcggcuucuucggcgccaucgccggcuuccucgagggcggcugggagggcaugaucgccggcuggcacggcuacaccucccacggcgcccacggcgucgccgucgccgccgaccucaaguccacccaggaggccaucaacaagaucaccaagaaccucaacucccucuccgagcucgaggucaagaaccuccagcgccucuccggcgccauggacgagcuccacaacgagauccucgagcucgacgagaaggucgacgaccuccgcgccgacaccaucuccucccagaucgagcucgccguccuccucuccaacgagggcaucaucaacuccgaggacgagcaccuccucgcccucgagcgcaagcucaagaagaugcucggccccuccgccgucgagaucggcaacggcugcuucgagaccaagcacaagugcaaccagaccugccucgaccgcaucgccgccggcaccuucaacgccggcgaguucucccuccccaccuucgacucccucaacaucaccgccgccucccucaacgacgacggccucgacaaccacaccauccuccucuacuacuccaccgccgccuccucccucgccgucacccucaugaucgccaucuucgucgucuacauggucucccgcgacaacgucuccugcuccaucugccucuga

SEQ ID NO: 124176 - RNA, 1758 nt, Artificial Sequence; identical to SEQ ID NO: 122681
  derived and/or modified CDS sequence (opt2) from hemagglutinin__InfluenzaB__AHL94416

SEQ ID NO: 124177 - RNA, 1755 nt, Artificial Sequence; identical to SEQ ID NO: 122890
  derived and/or modified CDS sequence (opt2) from hemagglutinin__InfluenzaB__AHL94427

SEQ ID NO: 124178 - RNA, 1755 nt, Artificial Sequence
  derived and/or modified CDS sequence (opt2) from hemagglutinin__InfluenzaB__AHL94438
augaaggccaucaucguccuccucauggucgucaccuccaacgccgaccgcaucugcaccggcaucaccuccuccaacuccccccacgucgucaagaccgccacccagggcgaggucaacgucaccggcgccaucccccucaccaccacccccaccaaguccuacuucgccaaccucaagggcacccgcacccgcggcaagcucugccccgacugccucaacugcaccgaccucgacgucgcccucggccgccccaugugcgucggcaccacccccuccgccaaggccuccauccuccacgagguccgccccgucaccuccggcugcuuccccaucaugcacgaccgcaccaagauccgccagcuccccaaccuccuccgcggcuacgagaacauccgccucuccacccagaacgucaucgacgccgagaaggcccccggcggccccuaccgccucggcaccuccggcuccugccccaacgccaccuccaagaucggcuucuucgagaccauggccugggccguccccaaggacaacuacaagaacgccaccaacccccagaccgucgagguccccuacaucugcaccgagggcgaggaccagaucaccgucuggggcuuccacuccgacaacaagacccagaugaagaaccucuacggcgacuccaacccccagaaguucaccuccuccgccaacggcgucaccacccacuacgucucccagaucggcgacuuccccgaccagaccgaggacggcggccucccccaguccggccgcaucgucgucgacuacaugguccagaagcccggcaagaccggcaccaucgucuaccagcgcggcguccuccucccccagaaggucuggugcgccuccggccgcuccaaggucaucaagggcucccucccccucaucggcgaggccgacugccuccacgagaaguacggcggccucaacaaguccaagcccuacuacaccggcgagcacgccaaggccaucggcaacugccccaucugggucaagaccccccucaagcucgccaacggcaccaaguaccgcccccccgccaagcuccucaaggagcgcggcuucuucggcgccaucgccggcuuccucgagggcggcugggagggcaugaucgccggcuggcacggcuacaccucccacggcgcccacggcgucgccgucgccgccgaccucaaguccacccaggaggccaucaacaagaucaccaagaaccucaacucccucuccgagcucgaggucaagaaccuccagcgccucuccggcgccauggacgagcuccacaacgagauccucgagcucgacgagaaggucgacgaccuccgcgccgacaccaucuccucccagaucgagcucgccguccuccucuccaacgagggcaucaucaacuccgaggacgagcaccuccucgcccucgagcgcaagcucaagaagaugcucggccccuccgccgucgacaucggcaacggcugcuucgagaccaagcacaagugcaaccagaccugccucgaccgcaucgccgccggcaccuucaacgccggcgaguucucccuccccaccuucgacucccucaacaucaccgccgccucccucaacgacgacggccucgacaaccacaccauccuccucuacuacuccaccgccgccuccucccucgccgucacccucaugcucgccaucuucaucgucuacauggucucccgcgacaacgucuccugcuccaucugccucuga

SEQ ID NO: 124179 - RNA, 1755 nt, Artificial Sequence
  derived and/or modified CDS sequence (opt2) from hemagglutinin__InfluenzaB__AHL94460
augaaggccaucaucguccuccucauggucgucaccuccaacgccgaccgcaucugcaccggcaucaccuccuccaacuccccccacgucgucaagaccgccacccagggcgaggucaacgucaccggcgccaucccccucaccaccacccccaccaaguccuacuucgccaaccucaagggcacccgcacccgcggcaagcucugccccgacugccucaacugcaccgaccucgacgucgcccucggccgccccaugugcgucggcaccacccccuccgccaaggccuccauccuccacgagguccgccccgucaccuccggcugcuuccccaucaugcacgaccgcaccaagauccgccagcuccccaaccuccuccgcggcuacgagaacauccgccucuccacccagaacgucaucgacgccgagaaggcccccggcggccccuaccgccucggcaccuccggcuccugccccaacgccaccuccaagaucggcuucuucgccaccauggccugggccguccccaaggacaacuacaagaacgccaccaacccccagaccgucgagguccccuacaucugcaccgaggaggaggaccagaucaccgucuggggcuuccacuccgacaacaagacccagaugaagaaccucuacggcgacuccaacccccagaaguucaccuccuccgccaacggcgucaccacccacuacgucucccagaucggcgacuuccccgaccagaccgaggacggcggccucccccaguccggccgcaucgucgucgacuacaugguccagaagcccggcaagaccggcaccaucgucuaccagcgcggcguccuccucccccagaaggucuggugcgccuccggccgcuccaaggucaucaagggcucccucccccucaucggcgaggccgacugccuccacgagaaguacggcggccucaacaaguccaagcccuacuacaccggcgagcacgccaaggccaucggcaacugccccaucugggucaagaccccccucaagcucgccaacggcaccaaguaccgcccccccgccaagcuccucaaggagcgcggcuucuucggcgccaucgccggcuuccucgagggcggcugggagggcaugaucgccggcuggcacggcuacaccucccacggcgcccacggcgucgccgucgccgccgaccucaaguccacccaggaggccaucaacaagaucaccaagaaccucaacucccucuccgagcucgaggucaagaaccuccagcgccucuccggcgccauggacgagcuccacaacgagauccucgagcucgacgagaaggucgacgaccuccgcgccgacaccaucuccucccagaucgagcucgccguccuccucuccaacgagggcaucaucaacuccgaggacgagcaccuccucgcccucgagcgcaagcucaagaagaugcucggccccuccgccgucgacaucggcaacggcugcuucgagaccaagcacaagugcaaccagaccugccucgaccgcaucgccgccggcaccuucaacgccggcgaguucucccuccccaccuucgacucccucaacaucaccgccgccucccucaacgacgacggccucgacaaccacaccauccuccucuacuacuccaccgccgccuccucccucgccgucacccucaugcucgccaucuucaucgucuacauggucucccgcgacaacgucuccugcuccaucugccucuga

SEQ ID NO: 124180 - RNA, 1755 nt, Artificial Sequence
  derived and/or modified CDS sequence (opt2) from hemagglutinin__InfluenzaB__AHL94471
augaaggccaucaucguccuccucauggucgucaccuccaacgccgaccgcaucugcaccggcaucaccuccuccaacuccccccacgucgucaagaccgccacccagggcgaggucaacgucaccggcgucaucccccucaccaccacccccaccaaguccuacuucgccaaccucaagggcacccgcacccgcggcaagcucugccccgacugccucaacugcaccgaccucgacgucgcccucggccgccccaugugcgucggcaccacccccuccgccaaggccuccauccuccacgagguccgccccgucaccuccggcugcuuccccaucaugcacgaccgcaccaagauccgccagcuccccaaccuccuccgcggcuacgagaagauccgccucuccacccagaacgucaucgacgccgagaaggcccccggcggccccuaccgccucggcaccuccggcuccugccccaacgccaccuccaagaucggcuucuucgccaccauggccugggccguccccaaggacaacuacaagaacgccaccaacccccucaccgucgagguccccuacaucugcaccgagggcgaggaccagaucaccgucuggggcuuccacuccgacaacaagacccagaugaagucccucuacggcgacuccaacccccagaaguucaccuccuccgccaacggcgucaccacccacuacgucucccagaucggcgacuuccccgaccagaccgaggacggcggccucccccaguccggccgcaucgucgucgacuacaugaugcagaagcccggcaagaccggcaccaucgucuaccagcgcggcguccuccucccccagaaggucuggugcgccuccggccgcuccaaggucaucaagggcucccucccccucaucggcgaggccgacugccuccacgaggaguacggcggccucaacaaguccaagcccuacuacaccggcaagcacgccaaggccaucggcaacugccccaucugggucaagaccccccucaagcucgccaacggcaccaaguaccgcccccccgccaagcuccucaaggagcgcggcuucuucggcgccaucgccggcuuccucgagggcggcugggagggcaugaucgccggcuggcacggcuacaccucccacggcgcccacggcgucgccgucgccgccgaccucaaguccacccaggaggccaucaacaagaucaccaagaaccucaacucccucuccgagcucgaggucaagaaccuccagcgccucuccggcgccauggacgagcuccacaacgagauccucgagcucgacgagaaggucgacgaccuccgcgccgacaccaucuccucccagaucgagcucgccguccuccucuccaacgagggcaucaucaacuccgaggacgagcaccuccucgcccucgagcgcaagcucaagaagaugcucggccccuccgccgucgacaucggcaacggcugcuucgagaccaagcacaagugcaaccagaccugccucgaccgcaucgccgccggcaccuucaacgccggcgaguucucccuccccaccuucgacucccucaacaucaccgccgccucccucaacgacgacggccucgacaaccacaccauccuccucuacuacuccaccgccgccuccucccucgccgucacccucaugcucgccaucuucaucgucuacauggucucccgcgacaacaucuccugcuccaucugccucuga

SEQ ID NO: 124181 - RNA, 1758 nt, Artificial Sequence
  derived and/or modified CDS sequence (opt2) from hemagglutinin__InfluenzaB__AHL94482
augaaggccaucaucguccuccucauggucgucaccuccaacgccgaccgcaucugcaccggcaucaccuccuccaacuccccccacgucgucaagaccgccacccagggcgaggucaacgucaccggcgucaucccccucaccaccacccccaccaagucccacuucgccaaccucaagggcaccgagacccgcggcaagcucugccccaagugccucaacugcaccgaccucgacgucgcccucggccgccccaagugcaccggcaagauccccuccgcccgcgucuccauccuccacgagguccgccccgucaccuccggcugcuuccccaucaugcacgaccgcaccaagauccgccagcuccccaaccuccuccgcggcuacgagcacauccgccucuccacccacaacgucaucaacgccgagaacgcccccggcggccccuacaagaucggcaccuccggcuccugccccaacgucaccaacggcaacggcuucuucaccaccauggccugggccguccccaagaacgacaagaacaagaccgccaccaacccccucaccaucgagguccccuacaucugcaccgagggcgaggaccagaucaccgucuggggcuuccacuccgacaacgagacccagauggccaagcucuacggcgacuccaagccccagaaguucaccuccuccgccaacggcgucaccacccacuacgucucccagaucggcggcuuccccaaccagaccgaggacggcggccucccccaguccggccgcaucgucgucgacuacaugguccagaaguccggcaagaccggcaccaucaccuaccagcgcggcauccuccucccccagaaggucuggugcgccuccggccgcuccaaggucaucaagggcucccucccccucaucggcgaggccgacugccuccacgagaaguacggcggccucaacaaguccaagcccuacuacaccggcgagcacgccaaggccaucggcaacugccccaucugggucaagaccccccucaagcucgccaacggcaccaaguaccgcccccccgccaagcuccucaaggagcgcggcuucuucggcgccaucgccggcuuccucgagggcggcugggagggcaugaucgccggcuggcacggcuacaccucccacggcgcccacggcgucgccgucgccgccgaccucaaguccacccaggaggccaucaacaagaucaccaagaaccucaacucccucuccgagcucgaggucaagaaccuccagcgccucuccggcgccauggacgagcuccacaacgagauccucgagcucgacgagaaggucgacgaccuccgcgccgacaccaucuccucccagaucgagcucgccguccuccucuccaacgagggcaucaucaacuccgaggacgagcaccuccucgcccucgagcgcaagcucaagaagaugcucggccccuccgccgucgagaucggcaacggcugcuucgagaccaagcacaagugcaaccagaccugccucgaccgcaucgccgccggcaccuucgacgccggcgaguucucccuccccaccuucgacucccucaacaucaccgccgccucccucaacgacgacggccucgacaaccacaccauccuccucuacuacuccaccgccgccuccucccucgccgucacccucaugaucgccaucuucgucgucuacauggucucccgcgacaacgucuccugcuccaucugccucuga

SEQ ID NO: 124182 - RNA, 1755 nt, Artificial Sequence; identical to SEQ ID NO: 124165
  derived and/or modified CDS sequence (opt2) from hemagglutinin__InfluenzaB__AHL94493

SEQ ID NO: 124183 - RNA, 1755 nt, Artificial Sequence; identical to SEQ ID NO: 124167
  derived and/or modified CDS sequence (opt2) from hemagglutinin__InfluenzaB__AHL94504

SEQ ID NO: 124184 - RNA, 1758 nt, Artificial Sequence
  derived and/or modified CDS sequence (opt2) from hemagglutinin__InfluenzaB__AHL94515
augaaggccaucaucguccuccucauggucgucaccuccaacgccgaccgcaucugcaccggcaucaccuccuccaacuccccccacgucgucaagaccgccacccagggcgaggucaacgucaccggcgucaucccccucaccaccacccccaccaagucccacuucgccaaccucaagggcaccgagacccgcggcaagcucugccccaagugccucaacugcaccgaccucgacgucgcccucggccgccccaagugcaccggcaagauccccuccgcccgcgucuccauccuccacgagguccgccccgucaccuccggcugcuuccccaucaugcacgaccgcaccaagauccgccagcuccccaaccuccuccgcggcuacgagcacauccgccucuccaccuacaacgucaucaacgccgaggacgcccccggcggccccuacaagaucggcaccuccggcuccugccccaacgucaccaacggcaacggcuucuucgccaccauggccugggccguccccaagaacgacaagaacaagaccgccaccaacccccucaccaucgagguccccuacaucugcaccgagggcgaggaccagaucaccgucuggggcuuccacuccgacaacgagacccagauggagaagcucuacggcgacuccaagccccagaaguucaccuccuccgccaacggcgucaccacccacuacgucucccagaucggcggcuuccccaaccagaccgaggacggcggccucccccaguccggccgcaucgucgucgacuacaugguccagaaguccggcaagaccggcaccaucaccuaccagcgcggcauccuccucccccagaaggucuggugcgccuccggccgcuccaaggucaucaagggcucccucccccucaucggcgaggccgacugccuccacgagaaguacggcggccucaacaaguccaagcccuacuacaccggcgagcacgccaaggccaucggcaacugccccaucugggucaagaccccccucaagcucgccaacggcaccaaguaccgcccccccgccaagcuccucaaggagcgcggcuucuucggcgccaucgccggcuuccucgagggcggcugggagggcaugaucgccggcuggcacggcuacaccucccacggcgcccacggcgucgccgucgccgccgaccucaaguccacccaggaggccaucaacaagaucaccaagaaccucaacucccucuccgagcucgaggucaagaaccuccagcgccucuccggcgccauggacgagcuccacaacgagauccucgagcucgacgagaaggucgacgaccuccgcgccgacaccaucuccucccagaucgagcucgccguccuccucuccaacgagggcaucaucaacuccgaggacgagcaccuccucgcccucgagcgcaagcucaagaagaugcucggccccuccgccgucgagaucggcaacggcugcuucgagaccaagcacaagugcaaccagaccugccucgaccgcaucgccgccggcaccuucgacgccggcgaguucucccuccccaccuucgacucccucaacaucaccgccgccucccucaacgacgacggccucgacaaccacaccauccuccucuacuacuccaccgccgccuccucccucgccgucacccucaugaucgccaucuucgucgucuacauggucucccgcgacaacgucuccugcuccaucugccucuga

SEQ ID NO: 124185 - RNA, 1755 nt, Artificial Sequence; identical to SEQ ID NO: 124167
  derived and/or modified CDS sequence (opt2) from hemagglutinin__InfluenzaB__AHL94526

SEQ ID NO: 124186 - RNA, 1758 nt, Artificial Sequence
  derived and/or modified CDS sequence (opt2) from hemagglutinin__InfluenzaB__AHL94537
augaaggccaucaucguccuccucauggucgucaccuccaacgccgaccgcaucugcaccggcaucaccuccuccaacuccccccacgucgucaagaccgccacccagggcgaggucaacgucaccggcgucaucccccucaccaccacccccaccaagucccacuucgccaaccucaagggcaccgagacccgcggcaagcucugccccaagugccucaacugcaccgaccucgacgucgcccucggccgccccaagugcaccggcaagauccccuccgcccgcgucuccauccuccacgagguccgccccgucaccuccggcugcuuccccaucaugcacgaccgcaccaagauccgccagcuccccaaccuccuccgcggcuacgagcacauccgccucuccacccacaacgucaucaacgccgagaacgcccccggcggccccuacaagaucggcaccuccggcuccugccccaacgucaccaacggcaacggcuucuucgccaccauggccugggccguccccaagaacgacaagaacaagaccgccaccaacccccucaccaucgagguccccuacaucugcaccgagggcgaggaccagaucaccgucuggggcuuccacuccgacaacgagacccagauggccaagcucuacggcgacuccaacccccagaaguucaccuccuccgccaacggcgucaccacccacuacaucucccagaucggcggcuuccccaaccagaccgaggacggcggccucccccaguccggccgcaucgucgucgacuacaugguccagaaguccggcaagaccggcaccaucaccuaccagcgcggcauccuccucccccagaaggucuggugcgccuccggccgcuccaaggucaucaagggcucccucccccucaucggcgaggccgacugccuccacgagaaguacggcggccucaacaaguccaagcccuacuacaccggcgagcacgccaaggccaucggcaacugccccaucugggucaagaccccccucaagcucgccaacggcaccaaguaccgcccccccgccaagcuccucaaggagcgcggcuucuucggcgccaucgccggcuuccucgagggcggcugggagggcaugaucgccggcuggcacggcuacaccucccacggcgcccacggcgucgccgucgccgccgaccucaaguccacccaggaggccaucaacaagaucaccaagaaccucaacucccucuccgagcucgaggucaagaaccuccagcgccucuccggcgccauggacgagcuccacaacgagauccucgagcucgacgagaaggucgacgaccuccgcgccgacaccaucuccucccagaucgagcucgccguccuccucuccaacgagggcaucaucaacuccgaggacgagcaccuccucgcccucgagcgcaagcucaagaagaugcucggccccuccgccgucgagaucggcaacggcugcuucgagaccaagcacaagugcaaccagaccugccucgaccgcaucgccgccggcaccuucgacgccggcgaguucucccuccccaccuucgacucccucaacaucaccgccgccucccucaacgacgacggccucgacaaccacaccauccuccucuacuacuccaccgccgccuccucccucgccgucacccucaugaucgccaucuucgucgucuacauggucucccgcgacaacgucuccugcuccaucugccucuga

SEQ ID NO: 124187 - RNA, 1755 nt, Artificial Sequence
  derived and/or modified CDS sequence (opt2) from hemagglutinin__InfluenzaB__AHL94548
augaaggccaucaucguccuccucauggucgucaccuccaacgccgaccgcaucugcaccggcaucaccuccuccaacuccccccacgucgucaagaccgccacccagggcgaggucaacgucaccggcgucaucccccucaccaccacccccaucaaguccuacuucgccaaccucaagggcaccaagacccgcggcaagcucugccccgacugccucaacugcaccgaccucgacgucgcccucggccgccccaugugcgucggcaccacccccuccgccaaggccuccauccuccacgagguccgccccgucaccuccggcugcuuccccaucaugcacgaccgcaccaagauccgccagcucgccaaccuccuccgcggcuacgagaacauccgccucuccacccagaacgucaucgacgccgagcgcgcccccggcggccccuaccgccucggcaccuccggcuccugccccaacgccaccuccaaguccggcuucuucgccaccauggccugggccguccccaaggacaacaacaagaacgccaccaacccccucaccgucgagguccccuacaucugcgccgagggcgaggaccagaucaccgucuggggcuuccacuccgacaacaagacccagaugaagaaccucuacggcgacuccaacccccagaaguucaccuccuccgccaacggcgucaccacccacuacgucucccagaucggcggcuuccccgaccagaccgaggacggcggccucccccaguccggccgcaucgucgucgacuacaugaugcagaagcccggcaagaccggcaccaucgucuaccagcgcggcguccuccucccccagaaggucuggugcgccuccggccgcuccaaggucaucaagggcucccucccccucaucggcgaggccgacugccuccacgagaaguacggcggccucaacaaguccaagcccuacuacaccggcgagcacgccaaggccaucggcaacugccccaucugggucaagaccccccucaagcucgccaacggcaccaaguaccgcccccccgccaagcuccucaaggagcgcggcuucuucggcgccaucgccggcuuccucgagggcggcugggagggcaugaucgccggcuggcacggcuacaccucccacggcgcccacggcgucgccgucgccgccgaccucaaguccacccaggaggccaucaacaagaucaccaagaaccucaacucccucuccgagcucgaggucaagaaccuccagcgccucuccggcgccauggacgagcuccacaacgagauccucgagcucgacgagaaggucgacgaccuccgcgccgacaccaucuccucccagaucgagcucgccguccuccucuccaacgagggcaucaucaacuccgaggacgagcaccuccucgcccucgagcgcaagcucaagaagaugcucggccccuccgccgucgacaucggcaacggcugcuucgagaccaagcacaagugcaaccagaccugccucgaccgcaucgccgccggcaccuucaacgccggcgaguucucccuccccaccuucgacucccucaacaucaccgccgccucccucaacgacgacggccucgacaaccacaccauccuccucuacuacuccaccgccgccuccucccucgccgucacccucaugcucgccaucuucaucgucuacauggucucccgcgacaacgucuccugcuccaucugccucuga

SEQ ID NO: 124188 - RNA, 1755 nt, Artificial Sequence; identical to SEQ ID NO: 124165
  derived and/or modified CDS sequence (opt2) from hemagglutinin__InfluenzaB__AHL94559

SEQ ID NO: 124189 - RNA, 1755 nt, Artificial Sequence; identical to SEQ ID NO: 122890
  derived and/or modified CDS sequence (opt2) from hemagglutinin__InfluenzaB__AHL94570

SEQ ID NO: 124190 - RNA, 1755 nt, Artificial Sequence; identical to SEQ ID NO: 122890
  derived and/or modified CDS sequence (opt2) from hemagglutinin__InfluenzaB__AHL94581

SEQ ID NO: 124191 - RNA, 1755 nt, Artificial Sequence; identical to SEQ ID NO: 122890
  derived and/or modified CDS sequence (opt2) from hemagglutinin__InfluenzaB__AHL94592

SEQ ID NO: 124192 - RNA, 1758 nt, Artificial Sequence
  derived and/or modified CDS sequence (opt2) from hemagglutinin__InfluenzaB__AHL94603
augaaggccaucaucguccuccucauggucgucaccuccaacgccgaccgcaucugcaccggcaucaccuccuccaacuccccccacgucgucaagaccgccacccagggcgaggucaacgucaccggcgucaucccccucaccaccacccccaccaagucccacuucgccaaccucaagggcaccgagacccgcggcaagcucugccccaagugccucaacugcaccgaccucgacgucgcccucggccgccccaagugcaccggcaagauccccuccgcccgcgucuccauccuccacgagguccgccccgucaccuccggcugcuuccccaucaugcacgaccgcaccaagauccgccagcuccccaaccuccuccgcggcuacgagaacauccgccucuccacccacaacgucaucaacgccgagaacgcccccggcggccccuacaagaucggcaccuccggcuccugccccaacgucaccaacggcaacggcuucuucgccaccauggccugggccguccccaagaacgacaagaacaagaccgccaccaacccccucaccaucgagguccccuacaucugcaccgagggcgaggaccagaucaccgucuggggcuuccacuccgacaacgagacccagauggccaagcucuacggcgacuccaagccccagaaguucaccuccuccgccaacggcgucaccacccacuacgucucccagaucggcggcuuccccaaccagaccgaggacggcggccucccccaguccggccgcaucgucgucgacuacaugguccagaaguccggcaagaccggcaccaucaccuaccagcgcggcauccuccucccccagaaggucuggugcgccuccggccgcuccaaggucaucaagggcucccucccccucaucggcgaggccgacugccuccacgagaaguacggcggccucaacaaguccaagcccuacuacaccggcgagcacgccaaggccaucggcaacugccccaucugggucaagaccccccucaagcucgccaacggcaccaaguaccgcccccccgccaagcuccucaaggagcgcggcuucuucggcgccaucgccggcuuccucgagggcggcugggagggcaugaucgccggcuggcacggcuacaccucccacggcgcccacggcgucgccgucgccgccgaccucaaguccacccaggaggccaucaacaagaucaccaagaaccucaacucccucuccgagcucgaggucaagaaccuccagcgccucuccggcgccauggacgagcuccacaacgagauccucgagcucgacgagaaggucgacgaccuccgcgccgacaccaucuccucccagaucgagcucgccguccuccucuccaacgagggcaucaucaacuccgaggacgagcaccuccucgcccucgagcgcaagcucaagaagaugcucggccccuccgccgucgagaucggcaacggcugcuucgagaccaagcacaagugcaaccagaccugccucgaccgcaucgccgccggcaccuucgacgccggcgaguucucccuccccaccuucgacucccucaacaucaccgccgccucccucaacgacgacggccucgacaaccacaccauccuccucuacuacuccaccgccgccuccucccucgccgucacccucaugaucgccaucuucgucgucuacauggucucccgcgacaacgucuccugcuccaucugccucuga

SEQ ID NO: 124193 - RNA, 1758 nt, Artificial Sequence
  derived and/or modified CDS sequence (opt2) from hemagglutinin__InfluenzaB__AHL94614
augaaggccaucaucguccuccucauggucgucaccuccaacgccgaccgcaucugcaccggcaucaccuccuccaacuccccccacgucgucaagaccgccacccagggcgaggucaacgucaccggcgucaucccccucaccaccacccccaccaagucccacuucgccaaccucaagggcaccgagacccgcggcaagcucugccccaagugccucaacugcaccgaccucgacgucgcccucggccgccccaagugcaccggcaagauccccuccgcccgcgucuccauccuccacgagguccgccccgucaccuccggcugcuuccccaucaugcacgaccgcaccaagauccgccagcuccccaaccuccuccgcggcuacgagcacauccgccucuccacccacaacgucaucaacgccgagaacgcccccggcggccccuacaagaucggcaccuccggcuccugccccaacgucaccaacggcaacggcuucuucgccaccauggccugggccguccccaagaacgacaagaacaagaccgccaccaacccccucaccaucgagguccccuacaucugcaccgagggcgaggaccagaucaccgucuggggcuuccacuccgacaacgagacccagauggccaagcucuacggcgacuccaagccccagaaguucaccuccuccgccaacggcgucaccacccacuacgucucccagaucggcggcuuccccaaccagaccgaggacggcggccucccccaguccggccgcaucgucgucgacuacaugguccagaaguccggcaagaccggcaccaucaccuaccagcgcggcauccuccucccccagaaggucuggugcgccuccggccgcuccaaggucaucaagggcucccucccccucaucggcgaggccgacugccuccacgagaaguacggcggccucaacaaguccaagcccuacuacaccggcgagcacgccaaggccaucggcaacugccccaucugggucaagaccccccucaagcucgccaacggcaccaaguaccgcccccccgccaagcuccucaaggagcgcggcuucuucggcgccaucgccggcuuccucgagggcggcugggagggcaugaucgccggcuggcacggcuacaucucccacggcgcccacggcgucgccgucgccgccgaccucaaguccacccaggaggccaucaacaagaucaccaagaaccucaacucccucuccgagcucgaggucaagaaccuccagcgccucuccggcgccauggacgagcuccacaacgagauccucgagcucgacgagaaggucgacgaccuccgcgccgacaccaucuccucccagaucgagcucgccguccuccucuccaacgagggcaucaucaacuccgaggacgagcaccuccucgcccucgagcgcaagcucaagaagaugcucggccccuccgccgucgagaucggcaacggcugcuucgagaccaagcacaagugcaaccagaccugccucgaccgcaucgccgccggcaccuucgacgccggcgaguucucccuccccaccuucgacucccucaacaucaccgccgccucccucaacgacgacggccucgacaaccacaccauccuccucuacuacuccaccgccgccuccucccucgccgucacccucaugaucgccaucuucgucgucuacauggucucccgcgacaacgucuccugcuccaucugccucuga

SEQ ID NO: 124194 - RNA, 1755 nt, Artificial Sequence; identical to SEQ ID NO: 124167
  derived and/or modified CDS sequence (opt2) from hemagglutinin__InfluenzaB__AHL94624

SEQ ID NO: 124195 - RNA, 1758 nt, Artificial Sequence
  derived and/or modified CDS sequence (opt2) from hemagglutinin__InfluenzaB__AHL94646
augaaggccaucaucguccuccucauggucgucaccuccaacgccgaccgcaucugcaccggcaucaccuccuccaacuccccccacgucgucaagaccgccacccagggcgaggucaacgucaccggcgucaucccccucaccaccacccccaccaagucccacuucgccaaccucaagggcaccgagacccgcggcaagcucugccccaagugccucaacugcaccgaccucgacgucgcccucggccgccccaagugcaccggcaagauccccuccgcccgcgucuccauccuccacgagguccgccccgucaccuccggcugcuuccccaucaugcacgaccgcaccaagauccgccagcuccccaaccuccuccgcggcuacgagcacauccgccucuccacccacaacgucaucaacgccgagaacgcccccggcggccccuacaagaucggcaccuccggcuccugccucaacgucaccaacggcaacggcuucuucgccaccauggccugggccguccccaagaacgacaagaacaagaccgccaccaacccccucaccaucgagguccccuacaucugcaccgagggcgaggaccagaucaccgucuggggcuuccacuccgacaacgagacccagauggccaagcucuacggcgacuccaagccccagaaguucaccuccuccgccaacggcgucaccacccacuacgucucccagaucggcggcuuccccaaccagaccgaggacggcggccucccccaguccggccgcaucgucgucgacuacaugguccagaaguccggcaagaccggcaccaucaccuaccagcgcggcauccuccucccccagaaggucuggugcgccuccggccgcuccaaggucaucaagggcucccucccccucaucggcgaggccgacugccuccacgagaaguacggcggccucaacaaguccaagcccuacuacaccggcgagcacgccaaggccaucggcaacugccccaucugggucaagaccccccucaagcucgccaacggcaccaaguaccgcccccccgccaagcuccucaaggagcgcggcuucuucggcgccaucgccggcuuccucgagggcggcugggagggcaugaucgccggcuggcacggcuacaccucccacggcgcccacggcgucgccgucgccgccgaccucaaguccacccaggaggccaucaacaagaucaccaagaaccucaacucccucuccgagcucgaggucaagaaccuccagcgccucuccggcgccauggacgagcuccacaacgagauccucgagcucgacgagaaggucgacgaccuccgcgccgacaccaucuccucccagaucgagcucgccguccuccucuccaacgagggcaucaucaacuccgaggacgagcaccuccucgcccucgagcgcaagcucaagaagaugcucggccccuccgccgucgagaucggcaacggcugcuucgagaccaagcacaagugcaaccagaccugccucgaccgcaucgccgccggcaccuucgacgccggcgaguucucccuccccaccuucgacucccucaacaucaccgccgccucccucaacgacgacggccucgacaaccacaccauccuccucuacuacuccaccgccgccuccucccucgccgucacccucaugaucgccaucuucgucgucuacauggucucccgcgacaacgucuccugcuccaucugccucuga

SEQ ID NO: 124196 - RNA, 1758 nt, Artificial Sequence
  derived and/or modified CDS sequence (opt2) from hemagglutinin__InfluenzaB__AHL94657
augaaggccaucaucguccuccucauggucgucaccuccaacgccgaccgcaucugcaccggcaucaccuccuccaacuccccccacgucgucaagaccgccacccagggcgaggucaacgucaccggcgucaucccccucaccaccacccccaccaagucccacuucgccaaccucaagggcaccgagacccgcggcaagcucugccccaagugccccaacugcaccgaccucgacgucgcccucggccgccccaagugcaccggcaagauccccuccgcccgcgucuccauccuccacgagguccgccccgucaccuccggcugcuuccccaucaugcacgaccgcaccaagauccgccagcuccccaaccuccuccgcggcuacgagcacauccgccucuccacccacaacgucaucaacgccgaguccgcccccggcggccccuacaagaucggcaccuccggcuccugccccaacgucaccaacggcaacggcuucuucgccaccauggccugggccguccccaagaacgacaagaacaagaccgccaccgacccccucaccaucgagguccccuacaucugcaccgagggcgaggaccagaucaccgucuggggcuuccacuccgacaacgagacccagauggccaagcucuacggcgacuccaagccccagaaguucaccuccuccgccaacggcgucaccacccacuacgucucccagaucggcggcuuccccaaccagaccgaggacggcggccucccccaguccggccgcaucgucgucgacuacaugguccagaaguccggcaagaccggcaccaucaccuaccagcgcggcauccuccucccccagaaggucuggugcgccuccggccgcuccaaggucaucaagggcucccucccccucaucggcgaggccgacugccuccacgagaaguacggcggccucaacaaguccaagcccuacuacaccggcgagcacgccaaggccaucggcaacugccccaucugggucaagaccccccucaagcucgccaacggcaccaaguaccgcccccccgccaagcuccucaaggagcgcggcuucuucggcgccaucgccggcuuccucgagggcggcugggagggcaugaucgccggcuggcacggcuacaccucccacggcgcccacggcgucgccgucgccgccgaccucaaguccacccaggaggccaucaacaagaucaccaagaaccucaacucccucuccgagcucgaggucaagaaccuccagcgccucuccggcgccauggacgagcuccacaacgagauccucgagcucgacgagaaggucgacgaccuccgcgccgacaccaucuccucccagaucgagcucgccguccuccucuccaacgagggcaucaucaacuccgaggacgagcaccuccucgcccucgagcgcaagcucaagaagaugcucggccccuccgccgucgagaucggcaacggcugcuucgagaccaagcacaagugcaaccagaccugccucgaccgcaucgccgccggcaccuucgacgccggcgaguucucccuccccaccuucgacucccucaacaucaccgccgccucccucaacgacgacggccucgacaaccacaccauccuccucuacuacuccaccgccgccuccucccucgccgucacccucaugaucgccaucuucgucgucuacauggucucccgcgacaacgucuccugcuccaucugccucuga

SEQ ID NO: 124197 - RNA, 1755 nt, Artificial Sequence; identical to SEQ ID NO: 124167
  derived and/or modified CDS sequence (opt2) from hemagglutinin__InfluenzaB__AHL94668

SEQ ID NO: 124198 - RNA, 1755 nt, Artificial Sequence; identical to SEQ ID NO: 124167
  derived and/or modified CDS sequence (opt2) from hemagglutinin__InfluenzaB__AHL94679

SEQ ID NO: 124199 - RNA, 1758 nt, Artificial Sequence; identical to SEQ ID NO: 124192
  derived and/or modified CDS sequence (opt2) from hemagglutinin__InfluenzaB__AHL94690

SEQ ID NO: 124200 - RNA, 1758 nt, Artificial Sequence
  derived and/or modified CDS sequence (opt2) from hemagglutinin__InfluenzaB__AHL94701
augaaggccaucaucguccuccucauggucgucaccuccaacgccgaccgcaucugcaccggcaucaccuccuccaacuccccccacgucgucaagaccgccacccagggcgaggucaacgucaccggcgucaucccccucaccaccacccucaccaagucccacuucgccaaccucaagggcaccgagacccgcggcaagcucugccccaagugccucaacugcaccgaccucgacgucgcccucggccgccccaagugcaccggcaagauccccuccgcccgcgucuccauccuccacgagguccgccccgucaccuccggcugcuuccccaucaugcacgaccgcaccaagauccgccagcuccccaaccuccuccgcggcuacgagcacauccgccucuccacccacaacgucaucaacgccgagaacgcccccggcggccccuacaagaucggcaccuccggcuccugccucaacgucaccaacggcaacggcuucuucgccaccauggccugggccguccccaagaacgacaagaacaagaccgccaccaacccccucaccaucgagguccccuacaucugcaccgagggcgaggaccagaucaccgucuggggcuuccacuccgacaacgagacccagauggccaagcucuacggcgacuccaagccccagaaguucaccuccuccgccaacggcgucaccacccacuacgucucccagaucggcggcuuccccaaccagaccgaggacggcggccucccccaguccggccgcaucgucgucgacuacaugguccagaaguccggcaagaccggcaccaucaccuaccagcgcggcauccuccucccccagaaggucuggugcgccuccggccgcuccaaggucaucaagggcucccucccccucaucggcgaggccgacugccuccacgagaaguacggcggccucaacaaguccaagcccuacuacaccggcgagcacgccaaggccaucggcaacugccccaucugggucaagaccccccucaagcucgccaacggcaccaaguaccgcccccccgccaagcuccucaaggagcgcggcuucuucggcgccaucgccggcuuccucgagggcggcugggagggcaugaucgccggcuggcacggcuacaccucccacggcgcccacggcgucgccgucgccgccgaccucaaguccacccaggaggccaucaacaagaucaccaagaaccucaacucccucuccgagcucgaggucaagaaccuccagcgccucuccggcgccauggacgagcuccacaacgagauccucgagcucgacgagaaggucgacgaccuccgcgccgacaccaucuccucccagaucgagcucgccguccuccucuccaacgagggcaucaucaacuccgaggacgagcaccuccucgcccucgagcgcaagcucaagaagaugcucggccccuccgccgucgagaucggcaacggcugcuucgagaccaagcacaagugcaaccagaccugccucgaccgcaucgccgccggcaccuucgacgccggcgaguucucccuccccaccuucgacucccucaacaucaccgccgccucccucaacgacgacggccucgacaaccacaccauccuccucuacuacuccaccgccgccuccucccucgccgucacccucaugaucgccaucuucgucgucuacauggucucccgcgacaacgucuccugcuccaucugccucuga

SEQ ID NO: 124201 - RNA, 1755 nt, Artificial Sequence; identical to SEQ ID NO: 124165
  derived and/or modified CDS sequence (opt2) from hemagglutinin__InfluenzaB__AHL94712

SEQ ID NO: 124202 - RNA, 1758 nt, Artificial Sequence; identical to SEQ ID NO: 124196
  derived and/or modified CDS sequence (opt2) from hemagglutinin__InfluenzaB__AHL94723

SEQ ID NO: 124203 - RNA, 1755 nt, Artificial Sequence; identical to SEQ ID NO: 124165
  derived and/or modified CDS sequence (opt2) from hemagglutinin__InfluenzaB__AHL94734

SEQ ID NO: 124204 - RNA, 1758 nt, Artificial Sequence
  derived and/or modified CDS sequence (opt2) from hemagglutinin__InfluenzaB__AHL94745
augaaggccaucaucguccuccucauggucgucaccuccaacgccgaccgcaucugcaccggcaucaccuccuccaacuccccccacgucgucaagaccgccacccagggcgaggucaacgucaccggcgucaucccccucaccaccacccccaccaagucccacuucgccaaccucaagggcaccgagacccgcggcaagcucugccccaagugccucaacugcaccgaccucgacgucgcccucggccgccccaagugcaccggcaagauccccuccgcccgcgucuccauccuccacgagguccgccccgucaccuccggcugcuuccccaucaugcacgaccgcaccaagauccgccagcuccccaaccuccuccgcggcuacgagcacauccgccucuccacccacaacgucaucaacgccgagaacgcccccggcggccccuacaagaucggcaccuccggcuccugccucaacgucaccaacggcaacggcuucuucgccaccauggccugggccguccccaagaacgacaagaacaagaccgccaccaacccccucaccaucgagguccccuacaucugcaccgagggcgaggaccagaucaccgucuggggcuuccacuccgacaacgagacccagauggccaagcucuacggcgacuccaagccccagaaguucaccuccuccgccaacggcgucaccacccacuacgucucccagaucggcggcuuccccaaccagaccgaggacggcggccucccccaguccggccgcaucgucgucgacuacaugguccagaaguccggcaagaccggcaccaucaccuaccagcgcggcauccuccucccccagaaggucuggugcgccuccggccgcuccaaggucaucaagggcucccucccccucaucggcgaggccgacugccuccacgagaaguacggcggccucaacaaguccaagcccuacuacaccggcgagcacgccaaggccaucggcaacugccccaucugggucaagaccccccucaagcucgccaacggcaccaaguaccgcccccccgccaagcuccucaaggagcgcggcuucuucggcgccaucgccggcuuccucgagggcggcugggagggcaugaucgccggcuggcacggcuacaccucccacggcgcccacggcgucgccgucgccgccgaccucaaguccacccaggaggccaucaacaagaucaccaagaaccucaacucccucuccgagcucgaggucaagaaccuccagcgccucuccggcgccauggacgagcuccacaacgagauccucgagcucgacgagaaggucgacgaccuccgcgccgacaccaucuccucccagaucgagcucgccguccuccucuccaacgagggcaucaucaacuccgaggacgagcaccuccucgcccucgagcgcaagcucaagaagaugcucggccccuccgccgucgagaucggcaacggcugcuucgagaccaagcacaagugcaaccagaccugccucgaccgcaucgccgccggcaccuucgacgccggcgaguucucccuccccaccuucgacucccucaacaucaccgccgccucccucaacggcgacggccucgacaaccacaccauccuccucuacuacuccaccgccgccuccucccucgccgucacccucaugaucgccaucuucgucgucuacauggucucccgcgacaacgucuccugcuccaucugccucuga

SEQ ID NO: 124205 - RNA, 1755 nt, Artificial Sequence; identical to SEQ ID NO: 122890
  derived and/or modified CDS sequence (opt2) from hemagglutinin__InfluenzaB__AHL94756

SEQ ID NO: 124206 - RNA, 1758 nt, Artificial Sequence; identical to SEQ ID NO: 124195
  derived and/or modified CDS sequence (opt2) from hemagglutinin__InfluenzaB__AHL94766

SEQ ID NO: 124207 - RNA, 1755 nt, Artificial Sequence
  derived and/or modified CDS sequence (opt2) from hemagglutinin__InfluenzaB__AHL94777
augaaggccaucaucguccuccucauggucgucaccuccaacgccgaccgcaucugcaccggcaucaccuccuccaacuccccccacgucgucaagaccgccacccagggcgaggucaacgucaccggcgccaucccccucaccaccacccccaccaaguccuacuucgccaaccucaagggcacccgcacccgcggcaagcucugccccgacugcuucaacugcaccgaccucgacgucgcccucggccgccccaugugcgucggcaccacccccuccgccaaggccuccauccuccacgagguccgccccgucaccuccggcugcuuccccaucaugcacgaccgcaccaagauccgccagcuccccaaccuccuccgcggcuacgagaacauccgccucuccacccagaacgccaucgacgccgagaaggcccccggcggccccuaccgccucggcaccuccggcuccugccccaacgccaccuccaagaucggcuucuucgccaccauggccugggccguccccaaggacaacuacaagaacgccaccaacccccagaccgucgagguccccuacaucugcaccgagggcgaggaccagaucaccgucuggggcuuccacuccgacaacaagacccagaugaagaaccucuacggcgacuccaacccccagaaguucaccuccuccgccaacggcgucaccacccacuacgucucccagaucggcgacuuccccgaccagaccgaggacggcggccucccccaguccggccgcaucgucgucgacuacaugguccagaagcccggcaagaccggcaccaucgucuaccagcgcggcguccuccucccccagaaggucuggugcgccuccggccgcuccaaggucaucaagggcucccucccccucaucggcgaggccgacugccuccacgagaaguacggcggccucaacaaguccaagcccuacuacaccggcgagcacgccaaggccaucggcaacugccccaucugggucaagaccccccucaagcucgccaacggcaccaaguaccgcccccccgccaagcuccucaaggagcgcggcuucuucggcgccaucgccggcuuccucgagggcggcugggagggcaugaucgccggcuggcacggcuacaccucccacggcgcccacggcgucgccgucgccgccgaccucaaguccacccaggaggccaucaacaagaucaccaagaaccucaacucccucuccgagcucgaggucaagaaccuccagcgccucuccggcgccauggacgagcuccacaacgagauccucgagcucgacgagaaggucgacgaccuccgcgccgacaccaucuccucccagaucgagcucgccguccuccucuccaacgagggcaucaucaacuccgaggacgagcaccuccucgcccucgagcgcaagcucaagaagaugcucggccccuccgccgucgacaucggcaacggcugcuucgagaccaagcacaagugcaaccagaccugccucgaccgcaucgccgccggcaccuucaacgccggcgaguucucccuccccaccuucgacucccucaacaucaccgccgccucccucaacgacgacggccucgacaaccacaccauccuccucuacuacuccaccgccgccuccucccucgccgucacccucaugcucgccaucuucaucgucuacauggucucccgcgacaacgucuccugcuccaucugccucuga

SEQ ID NO: 124208 - RNA, 1758 nt, Artificial Sequence; identical to SEQ ID NO: 124192
  derived and/or modified CDS sequence (opt2) from hemagglutinin__InfluenzaB__AHL94797

SEQ ID NO: 124209 - RNA, 1755 nt, Artificial Sequence
  derived and/or modified CDS sequence (opt2) from hemagglutinin__InfluenzaB__AHL94808
augaaggccaucaucguccuccucauggucgucaccuccaacgccgaccgcaucugcaccggcaucaccuccuccaacuccccccacgucgucaagaccgccacccagggcgaggucaacgucaccggcgccaucccccucaccaccacccccaccaaguccuacuucgccaaccucaagggcauccgcacccgcggcaagcucugccccgacugccucaacugcaccgaccucgacgucgcccucggccgccccaugugcgucggcaccacccccuccgccaaggccuccauccuccacgagguccgccccgucaccuccggcugcuuccccaucaugcacgaccgcaccaagauccgccagcuccccaaccuccuccgcggcuacgagaacauccgccucuccacccagaacgucaucgacgccgagaaggcccccggcggccccuaccgccucggcaccuccggcuccugccccaacgccaccuccaagaucggcuucuucgccaccauggccugggccguccccaaggacaacuacaagaacgccaccaacccccagaccgucgagguccccuacaucugcaccgagggcgaggaccagaucaccgucuggggcuuccacuccgacaacaagacccagaugaagaaccucuacggcgacuccaacccccagaaguucaccuccuccgccaacggcgucaccacccacuacgucucccagaucggcgacuuccccgaccagaccgaggacggcggccucccccaguccggccgcaucgucgucgacuacaugguccagaagcccggcaagaccggcaccaucgucuaccagcgcggcguccuccucccccagaaggucuggugcgccuccggccgcuccaaggucaucaagggcucccucccccucaucggcgaggccgacugccuccacgagaaguacggcggccucaacaaguccaagcccuacuacaccggcgagcacgccaaggccaucggcaacugccccaucugggucaagaccccccucaagcucgccaacggcaccaaguaccgcccccccgccaagcuccucaaggagcgcggcuucuucggcgccaucgccggcuuccucgagggcggcugggagggcaugaucgccggcuggcacggcuacaccucccacggcgcccacggcgucgccgucgccgccgaccucaaguccacccaggaggccaucaacaagaucaccaagaaccucaacucccucuccgagcucgaggucaagaaccuccagcgccucuccggcgccauggacgagcuccacaacgagauccucgagcucgacgagaaggucgacgaccuccgcgccgacaccaucuccucccagaucgagcucgccguccuccucuccaacgagggcaucaucaacuccgaggacgagcaccuccucgcccucgagcgcaagcucaagaagaugcucggccccuccgccgucgacaucggcaacggcugcuucgagaccaagcacaagugcaaccagaccugccucgaccgcaucgccgccggcaccuucaacgccggcgaguucucccuccccaccuucgacucccucaacaucaccgccgccucccucaacgacgacggccucgacaaccacaccauccuccucuacuacuccaccgccgccuccucccucgccgucacccucaugcucgccaucuucaucgucuacauggucucccgcgacaacgucuccugcuccaucugccucuga

SEQ ID NO: 124210 - RNA, 1755 nt, Artificial Sequence
  derived and/or modified CDS sequence (opt2) from hemagglutinin__InfluenzaB__AHL94817
augaaggccaucaucguccuccucauggucgucaccuccaacgccgaccgcaucugcaccggcaucaccuccuccaacuccccccacgucgucaagaccgccacccagggcgaggucaacgucaccggcgccaucccccucaccaccacccccaccaaguccuacuucgccaaccucaagggcacccgcacccgcggcaagcucugccccgacugccucaacugcaccgaccucgacgucgcccucggccgccccaugugcgucggcaccacccccuccgccaaggccuccauccuccacgagguccgccccgucaccuccggcugcuuccccaucaugcacgaccgcaccaagauccgccagcuccccaaccuccuccgcggcuacgagaacauccgccucuccacccagaacgucaucgacgccgagaaggcccccggcggccccuaccgccucggcaccuccggcuccugccccaacgccaccuccaagaucggcuucuucgccaccauggccugggccguccccaaggacaacuacaagaacgccaccaacccccagaccgucgagguccccuacaucugcaccgagggcgaggaccagaucaccgucuggggcuuccacuccgacaacaagacccagaugaagaaccucuacggcgacuccaacccccagaaguucaccuccuccgccaacggcgucaccacccacuacgucucccagaucggcgacuuccccgaccagaccgaggacggcggccucccccaguccggccgcaucgucgucgacuacaugguccagaagcccggcaagaccggcaccaucgucuaccagcgcggcguccuccucccccagaaggucuggugcgccuccggccgcuccaaggucaucaagggcucccucccccucaucggcgaggccgacugccuccacgagaaguacggcggccucaacaaguccaagcccuacuacaccggcgagcacgccaaggccaucggcaacugccccaucugggucaagaccccccucaagcucgccaacggcaccaaguaccgcccccccgccaagcuccucaaggagcgcggcuucuucggcgccaucgccggcuuccucgagggcggcugggagggcaugaucgccggcuggcacggcuacaccucccacggcgcccacggcgucgccgucgccgccgaccucaaguccacccaggaggccaucaacaagaucaccaagaaccucaacucccucuccgagcucgaggucaagaaccuccagcgccucuccggcgccauggacgagcuccacaacgagaucaucgagcucgacgagaaggucgacgaccuccgcgccgacaccaucuccucccagaucgagcucgccguccuccucuccaacgagggcaucaucaacuccgaggacgagcaccuccucgcccucgagcgcaagcucaagaagaugcucggccccuccgccgucgacaucggcaacggcugcuucgagaccaagcacaagugcaaccagaccugccucgaccgcaucgccgccggcaccuucaacgccggcgaguucucccuccccaccuucgacucccucaacaucaccgccgccucccucaacgacgacggccucgacaaccacaccauccuccucuacuacuccaccgccgccuccucccucgccgucacccucaugcucgccaucuucaucgucuacauggucucccgcgacaacgucuccugcuccaucugccucuga

SEQ ID NO: 124211 - RNA, 1758 nt, Artificial Sequence; identical to SEQ ID NO: 123901
  derived and/or modified CDS sequence (opt2) from hemagglutinin__InfluenzaB__AHL94827

SEQ ID NO: 124212 - RNA, 1755 nt, Artificial Sequence
  derived and/or modified CDS sequence (opt2) from hemagglutinin__InfluenzaB__AHL94837
augaaggccaucaucguccuccucauggucgucaccuccaacgccgaccgcaucugcaccggcaucaccuccuccaacuccccccacgucgucaagaccgccacccagggcgaggucaacgucaccggcgucaucccccucaccaccacccccgccaaguccuacuucgccaaccucaagggcacccgcacccgcggcaagcucugccccgacugccucaacugcaccgaccucgacgucgcccucggccgccccaugugcgucggcaccacccccuccgccaaggccuccauccuccacgagguccgccccgucaccuccggcugcuuccccaucaugcacgaccgcaccaagauccgccagcuccccaaccuccuccgcggcuacgagaacauccgccucuccacccagaacgucaucgacgccgagaaggcccccggcggccccuacaagcucggcaccuccggcuccugccccaacgccaccuccaagaucggcuucuucgccaccauggccugggccguccccaaggacaacuacaagaacgccaccaacccccucaccgucgagguccccuacaucugcaaggagggcgaggaccagaucaccgucuggggcuuccacuccgacaacaagacccagaugaagaaccucuacggcgacuccaacccccagaaguucaccuccuccgccaacggcgucaccacccacuacgucucccagaucggcgacuuccccgaccagaccgaggacggcggccucccccaguccggccgcaucgucgucgacuacaugaugcagaagcccggcaagaccggcaccaucgucuaccagcgcggcguccuccucccccagaaggucuggugcgccuccggccgcuccaaggucaucaagggcucccucccccucaucggcgaggccgacugccuccacgaggaguacggcggccucaacaaguccaagcccuacuacaccggcaagcacgccaaggccaucggcaacugccccaucugggucaagaccccccucaagcucgccaacggcaccaaguaccgcccccccgccaagcuccucaaggagcgcggcuucuucggcgccaucgccggcuuccucgagggcggcugggagggcaugaucgccggcuggcacggcuacaccucccacggcgcccacggcgucgccgucgccgccgaccucaaguccacccaggaggccaucaacaagaucaccaagaaccucaacucccucuccgagcucgaggucaagaaccuccagcgccucuccggcgccauggacgagcuccacaacgagauccucgagcucgacgagaaggucgacgaccuccgcgccgacaccaucuccucccagaucgagcucgccguccuccucuccaacgagggcaucaucaacuccgaggacgagcaccuccucgcccucgagcgcaagcucaagaagaugcucggccccuccgccgucgacaucggcaacggcugcuucgagaccaagcacaagugcaaccagaccugccucgaccgcaucgccgccggcaccuucaacgccggcgaguucucccuccccaccuucgacucccucaacaucaccgccgccucccucaacgacgacggccucgacaaccacaccauccuccucuacuacuccaccgccgccuccucccucgccgucacccucaugcucgccaucuucaucgucuacauggucucccgcgacaacgucuccugcuccaucugccucuga

SEQ ID NO: 124213 - RNA, 1755 nt, Artificial Sequence; identical to SEQ ID NO: 122890
  derived and/or modified CDS sequence (opt2) from hemagglutinin__InfluenzaB__AHL94847

SEQ ID NO: 124214 - RNA, 1758 nt, Artificial Sequence
  derived and/or modified CDS sequence (opt2) from hemagglutinin__InfluenzaB__AHL94858
augaaggccaucaucguccuccucauggucgucaccuccaacgccgaccgcaucugcaccggcaucaccuccuccaacuccccccacgucgucaagaccgccacccagggcgaggucaacgucaccggcgucaucccccucaccaccacccccaccaagucccacuucgccaaccucaagggcaccgagacccgcggcaagcucugccccaagugccucaacugcaccgaccucgacgucgcccucggccgccccaagugcaccggcaacauccccuccgcccgcgucuccauccuccacgagguccgccccgucaccuccggcugcuuccccaucaugcacgaccgcaccaagauccgccagcuccccaaccuccuccgcggcuacgagcacauccgccucuccacccacaacgucaucaacgccgagaacgcccccggcggccccuacaagaucggcaccuccggcuccugccccaacgucaccaacggcaacggcuucuucgccaccauggccugggccguccccaagaacgacaacaacaagaccgccaccaacucccucaccaucgagguccccuacaucugcaccgagggcgaggaccagaucaccgucuggggcuuccacuccgacaacgagacccagauggccaagcucuacggcgacuccaagccccagaaguucaccuccuccgccaacggcgucaccacccacuacgucucccagaucggcggcuuccccaaccagaccgaggacggcggccucccccaguccggccgcaucgucgucgacuacaugguccagaaguccggcaaggccggcaccaucaccuaccagcgcggcauccuccucccccagaaggucuggugcgccuccggccgcuccaaggucaucaagggcucccucccccucaucggcgaggccgacugccuccacgagaaguacggcggccucaacaaguccaagcccuacuacaccggcgagcacgccaaggccaucggcaacugccccaucugggucaagaccccccucaagcucgccaacggcaccaaguaccgcccccccgccaagcuccucaaggagcgcggcuucuucggcgccaucgccggcuuccucgagggcggcugggagggcaugaucgccggcuggcacggcuacaccucccacggcgcccacggcgucgccgucgccgccgaccucaaguccacccaggaggccaucaacaagaucaccaagaaccucaacucccucuccgagcucgaggucaagaaccuccagcgccucuccggcgccauggacgagcuccacaacgagauccucgagcucgacgagaaggucgacgaccuccgcgccgacaccaucuccucccagaucgagcucgccguccuccucuccaacgagggcaucaucaacuccgaggacgagcaccuccucgcccucgagcgcaagcucaagaagaugcucggccccuccgccgucgagaucggcaacggcugcuucgagaccaagcacaagugcaaccagaccugccucgaccgcaucgccgccggcaccuucgacgccggcgaguucucccuccccaccuucgacucccucaacaucaccgccgccucccucaacgacgacggccucgacaaccacaccauccuccucuacuacuccaccgccgccuccucccucgccgucacccucaugaucgccaucuucgucgucuacauggucucccgcgacaacgucuccugcuccaucugccucuga

SEQ ID NO: 124215 - RNA, 1755 nt, Artificial Sequence; identical to SEQ ID NO: 122856
  derived and/or modified CDS sequence (opt2) from hemagglutinin__InfluenzaB__AHL94869

SEQ ID NO: 124216 - RNA, 1758 nt, Artificial Sequence; identical to SEQ ID NO: 123025
  derived and/or modified CDS sequence (opt2) from hemagglutinin__InfluenzaB__AHL94880

SEQ ID NO: 124217 - RNA, 1758 nt, Artificial Sequence; identical to SEQ ID NO: 123358
  derived and/or modified CDS sequence (opt2) from hemagglutinin__InfluenzaB__AHL94889

SEQ ID NO: 124218 - RNA, 1758 nt, Artificial Sequence; identical to SEQ ID NO: 123025
  derived and/or modified CDS sequence (opt2) from hemagglutinin__InfluenzaB__AHL94900

SEQ ID NO: 124219 - RNA, 1758 nt, Artificial Sequence
  derived and/or modified CDS sequence (opt2) from hemagglutinin__InfluenzaB__AHL94911
augaaggccaucaucguccuccucauggucgucaccuccaacgccgaccgcaucugcaccggcaucaccuccuccaacuccccccacgucgucaagaccgccacccagggcgaggucaacgucaccggcgucaucccccucaccaccacccccaccaagucccacuucgccaaccucaagggcaccgagacccgcggcaagcucugccccaagugccccaacugcaccgaccucgacgucgcccucggccgccccaagugcaccggcaagauccccuccgcccgcgucuccauccuccacgagguccgccccgucaccuccggcugcuuccccaucaugcacgaccgcaccaagauccgccagcuccccaaccuccuccgcggcuacgagcacauccgccucuccacccacaacgucaucaacgccgagaacgcccccggcggccccuacaagaucggcaccuccggcuccugccccaacgucaccaacggcaacggcuucuucgccaccauggccugggccguccccaagaacgacaagaacaagaccgccaccaacccccucaccaucgagguccccuacaucugcaccgagggcgaggaccagaucaccgucuggggcuuccacuccgacaacgagacccagauggccaagcucuacggcgacuccaagccccagaaguucaccuccuccgccaacggcgucaccacccacuacgucucccagaucggcggcuuccccaaccagaccgaggacggcggccucccccaguccggccgcaucgucgucgacuacaugguccagaaguccggccgcaccggcaccaucaccuaccagcgcggcauccuccucccccagaaggucuggugcgccuccggccgcuccaaggucaucaagggcucccucccccucaucggcgaggccgacugccuccacgagaaguacggcggccucaacaaguccaagcccuacuacaccggcgagcacgccaaggccaucggcaacugccccaucugggucaagaccccccucaagcucgccaacggcaccaaguaccgcccccccgccaagcuccucaaggagcgcggcuucuucggcgccaucgccggcuuccucgagggcggcugggagggcaugaucgccggcuggcacggcuacaccucccacggcgcccacggcgucgccgucgccgccgaccucaaguccacccaggaggccaucaacaagaucaccaagaaccucaacucccucuccgagcucgaggucaagaaccuccagcgccucuccggcgccauggacgagcuccacaacgagauccucgagcucgacgagaaggucgacgaccuccgcgccgacaccaucuccucccagaucgagcucgccguccuccucuccaacgagggcaucaucaacuccgaggacgagcaccuccucgcccucgagcgcaagcucaagaagaugcucggccccuccgccgucgagaucggcaacggcugcuucgagaccaagcacaagugcaaccagaccugccucgaccgcaucgccgccggcaccuucgacgccggcgaguucucccuccccaccuucgacucccucaacaucaccgccgccucccucaacgacgacggccucgacaaccacaccauccuccucuacuacuccaccgccgccuccucccucgccgucacccucaugaucgccaucuucgucgucuacauggucucccgcgacaacgucuccugcuccaucugccucuga

SEQ ID NO: 124220 - RNA, 1758 nt, Artificial Sequence; identical to SEQ ID NO: 123025
  derived and/or modified CDS sequence (opt2) from hemagglutinin__InfluenzaB__AHL94922

SEQ ID NO: 124221 - RNA, 1758 nt, Artificial Sequence
  derived and/or modified CDS sequence (opt2) from hemagglutinin__InfluenzaB__AHL94933
augaaggccaucaucguccuccucauggucgucaccuccaacgccgaccgcaucugcaccggcaucaccuccuccaacuccccccacgucgucaagaccgccacccagggcgaggucaacgucaccggcgucaucccccucaccaccacccccaccaagucccacuucgccaaccucaagggcaccgagacccgcggcaagcucugccccaagugccucaacugcaccgaccucgacgucgcccucggccgccccaagugcaccggcaagauccccuccgcccgcgucuccauccuccacgagguccgccccgucaccuccggcugcuuccccaucaugcacgaccgcaccaagauccgccagcuccccaaccuccuccgcggcuacgagcacauccgccucuccacccacaacgucaucaacgccgagaacgcccccggcggccccuacaagaucggcaccuccggcuccugccccaacaucaccaacggcaacggcuucuucgccaccauggccugggccguccccaagaacgacaagaacaagaccgccaccaacccccucaccaucgagguccccuacaucugcaccgagggcgaggaccagaucaccgucuggggcuuccacuccgacaacgagacccagauggccaagcucuacggcgacuccaagccccagaaguucaccuccuccgccaacggcgucaccacccacuacgucucccagaucggcggcuuccccaaccagaccgaggacggcggccucccccaguccggccgcaucgucgucgacuacaugguccagaaguccggcaaggccggcaccaucaccuaccagcgcggcauccuccucccccagaaggucuggugcgccuccggccgcuccaaggucaucaagggcucccucccccucaucggcgaggccgacugccuccacgagaaguacggcggccucaacaaguccaagcccuacuacaccggcgagcacgccaaggccaucggcaacugccccaucugggucaagaccccccucaagcucgccaacggcaccaaguaccgcccccccgccaagcuccucaaggagcgcggcuucuucggcgccaucgccggcuuccucgagggcggcugggagggcaugaucgccggcuggcacggcuacaccucccacggcgcccacggcgucgccgucgccgccgaccucaaguccacccaggaggccaucaacaagaucaccaagaaccucaacucccucuccgagcucgaggucaagaaccuccagcgccucuccggcgccauggacgagcuccacaacgagauccucgagcucgacgagaaggucgacgaccuccgcgccgacaccaucuccucccagaucgagcucgccguccuccucuccaacgagggcaucaucaacuccgaggacgagcaccuccucgcccucgagcgcaagcucaagaagaugcucggccccuccgccgucgagaucggcaacggcugcuucgagaccaagcacaagugcaaccagaccugccucgaccgcaucgccgccggcaccuucgacgccggcgaguucucccuccccaccuucgacucccucaacaucaccgccgccucccucaacgacgacggccucgacaaccacaccauccuccucuacuacuccaccgccgccuccucccucgccgucacccucaugaucgccaucuucgucgucuacauggucucccgcgacaacgucuccugcuccaucugccucuga

SEQ ID NO: 124222 - RNA, 1758 nt, Artificial Sequence; identical to SEQ ID NO: 124106
  derived and/or modified CDS sequence (opt2) from hemagglutinin__InfluenzaB__AHL94944

SEQ ID NO: 124223 - RNA, 1758 nt, Artificial Sequence; identical to SEQ ID NO: 122719
  derived and/or modified CDS sequence (opt2) from hemagglutinin__InfluenzaB__AHL94955

SEQ ID NO: 124224 - RNA, 1758 nt, Artificial Sequence; identical to SEQ ID NO: 122719
  derived and/or modified CDS sequence (opt2) from hemagglutinin__InfluenzaB__AHL94965

SEQ ID NO: 124225 - RNA, 1758 nt, Artificial Sequence; identical to SEQ ID NO: 122719
  derived and/or modified CDS sequence (opt2) from hemagglutinin__InfluenzaB__AHL94975

SEQ ID NO: 124226 - RNA, 1755 nt, Artificial Sequence; identical to SEQ ID NO: 122890
  derived and/or modified CDS sequence (opt2) from hemagglutinin__InfluenzaB__AHM00986

SEQ ID NO: 124227 - RNA, 1758 nt, Artificial Sequence; identical to SEQ ID NO: 122923
  derived and/or modified CDS sequence (opt2) from hemagglutinin__InfluenzaB__AHM00997

SEQ ID NO: 124228 - RNA, 1758 nt, Artificial Sequence
  derived and/or modified CDS sequence (opt2) from hemagglutinin__InfluenzaB__AHM01008
augaaggccaucaucguccuccucauggucgucaccuccaacgccgaccgcaucugcaccggcaucaccuccuccaacuccccccacgucgucaagaccgccacccagggcgaggucaacgucaccggcgucaucccccucaccaccacccccaccaagucccacuucgccaaccucaagggcaccgagacccgcggcaagcucugccccaagugccucaacugcaccgaccucgacgucgcccucggccgccccaagugcaccggcaagauccccuccgcccgcgucuccauccuccacgagguccgccccgucaccuccggcugcuuccccaucaugcacgaccgcaccaagauccgccagcuccccaaccuccuccgcggcuacgagcacauccgccucuccacccacaacgucaucaacgccgaggacgcccccggcggccccuacaagaucggcaccuccggcuccugccccaacgucaccaacggcaacggcuucuucgccaccauggccuggaccguccccaagaacgacaagaacaagaccgccaccaacccccucaccaucgagguccccuacaucugcaccgagggcgaggaccagaucaccgucuggggcuuccacuccgacaacgagacccagauggccaagcucuacggcgacuccaagccccagaaguucaccuccuccgccaacggcgucaccacccacuacgucucccagaucggcggcuuccccaaccagaccgaggacggcggccucccccaguccggccgcaucgucgucgacuacaugguccagaaguccggcaagaccggcaccaucaccuaccagcgcggcauccuccucccccagaaggucuggugcgccuccggccgcuccaaggucaucaagggcucccucccccucaucggcgaggccgacugccuccacgagaaguacggcggccucaacaaguccaagcccuacuacaccggcgagcacgccaaggccaucggcaacugccccaucugggucaagaccccccucaagcucgccaacggcaccaaguaccgcccccccgccaagcuccucaaggagcgcggcuucuucggcgccaucgccggcuuccucgagggcggcugggagggcaugaucgccggcuggcacggcuacaccucccacggcgcccacggcgucgccgucgccgccgaccucaaguccacccaggaggccaucaacaagaucaccaagaaccucaacucccucuccgagcucgaggucaagaaccuccagcgccucuccggcgccauggacgagcuccacaacgagauccucgagcucgacgagaaggucgacgaccuccgcgccgacaccaucuccucccagaucgagcucgccguccuccucuccaacgagggcaucaucaacuccgaggacgagcaccuccucgcccucgagcgcaagcucaagaagaugcucggccccuccgccgucgagaucggcaacggcugcuucgagaccaagcacaagugcaaccagaccugccucgaccgcaucgccgccggcaccuucgacgccggcgaguucucccuccccaccuucgacucccucaacaucaccgccgccucccucaacgacgacggccucgacaaccacaccauccuccucuacuacuccaccgccgccuccucccucgccgucacccucaugaucgccaucuucgucgucuacauggucucccgcgacaacgucuccugcuccaucugccucuga

SEQ ID NO: 124229 - RNA, 1758 nt, Artificial Sequence; identical to SEQ ID NO: 122923
  derived and/or modified CDS sequence (opt2) from hemagglutinin__InfluenzaB__AHM01019

SEQ ID NO: 124230 - RNA, 1758 nt, Artificial Sequence; identical to SEQ ID NO: 122923
  derived and/or modified CDS sequence (opt2) from hemagglutinin__InfluenzaB__AHM01030

SEQ ID NO: 124231 - RNA, 1758 nt, Artificial Sequence
  derived and/or modified CDS sequence (opt2) from hemagglutinin__InfluenzaB__AHM01041
augaaggccaucaucguccuccucauggucgucaccuccaacgccgaccgcaucugcaccggcaucaccuccuccaacuccccccacgucgucaagaccgccacccagggcgaggucaacgucaccggcgucaucccccucaccaccacccccaccaagucccacuucgccaaccucaagggcaccgagacccgcggcaagcucugccccaagugccucaacugcaccgaccucgacgucgcccucggccgccccaagugcaccggcaagauccccuccgcccgcgucuccauccuccacgagguccgccccgucaccuccggcugcuuccccaucaugcacgaccgcaccaagauccgccagcuccccaaccuccuccgcggcuacgagcacauccgccucuccacccacaacgucaucaacgccgaggacgcccccggcggccccuacaagaucggcaccuccggcuccugccccaacgucaccaacggcaacggcuucuucgccaccauggccugggccguccccaagaacgacaagaacaagaccgccaccaacccccucaccaucgagguccccuacaucugcaccgagggcgaggaccagaucaccgucuggggcuuccacuccgacaacgagacccagauggccaagcucuacggcgacuccaagccccagaaguucaccuccuccgccaacggcgucaccacccacuacgucucccagaucggcggcuuccccaaccagaccgaggacggcggccucccccaguccggccgcaucgucgucgacuacaugguccagaaguccgagaagaccggcaccaucaccuaccagcgcggcauccuccucccccagaaggucuggugcgccuccggccgcuccaaggucaucaagggcucccucccccucaucggcgaggccgacugccuccacgagaaguacggcggccucaacaaguccaagcccuacuacaccggcgagcacgccaaggccaucggcaacugccccaucugggucaagaccccccucaagcucgccaacggcaccaaguaccgcccccccgccaagcuccucaaggagcgcggcuucuucggcgccaucgccggcuuccucgagggcggcugggagggcaugaucgccggcuggcacggcuacaccucccacggcgcccacggcgucgccgucgccgccgaccucaaguccacccaggaggccaucaacaagaucaccaagaaccucaacucccucuccgagcucgaggucaagaaccuccagcgccucuccggcgccauggacgagcuccacaacgagauccucgagcucgacgagaaggucgacgaccuccgcgccgacaccaucuccucccagaucgagcucgccguccuccucuccaacgagggcaucaucaacuccgaggacgagcaccuccucgcccucgagcgcaagcucaagaagaugcucggccccuccgccgucgagaucggcaacggcugcuucgagaccaagcacaagugcaaccagaccugccucgaccgcaucgccgccggcaccuucgacgccggcgaguucucccuccccaccuucgacucccucaacaucaccgccgccucccucaacgacgacggccucgacaaccacaccauccuccucuacuacuccaccgccgccuccucccucgccgucacccucaugaucgccaucuucgucgucuacauggucucccgcgacaacgucuccugcuccaucugccucuga

SEQ ID NO: 124232 - RNA, 1758 nt, Artificial Sequence
  derived and/or modified CDS sequence (opt2) from hemagglutinin__InfluenzaB__AHM01052
augaaggccaucaucguccuccucauggucgucaccuccaacgccgaccgcaucugcaccggcaucaccuccuccaacuccccccacgucgucaagaccgccacccagggcgaggucaacgucaccggcgucaucccccucaccaccacccccaccaagucccacuucgccaaccucaagggcaccgagacccgcggcaagcucugccccaagugccucaacugcaccgaccucgacgucgcccucggccgccccaagugcaccggcaagauccccuccgcccgcgucuccauccuccacgagguccgccccgucaccuccggcugcuuccccaucaugcacgaccgcaccaagauccgccagcuccccaaccuccuccgcggcuacgagcacauccgccucuccacccacaacgucaucaacgccgagaacgcccccggcggccccuacaagaucggcaccuccggcuccugccccaacgucaccaacggcaacggcuucuucgccaccauggccugggccguccccaagaacgacaagaacaagaccgccaccaacccccucaccaucgagguccccuacaucugcaccgagggcgaggaccagaucaccgucuggggcuuccacuccgacaacgagacccagauggccaagcucuacggcgacuccaagccccagaaguucaccuccuccgccaacggcgucaccacccacuacgucucccagaucggcggcuuccccaaccagaccgaggacggcggccucccccaguccggccgcaucgucgucgacuacaugguccagaaguccggcaagaccggcaccaucaccuaccagcgcggcauccuccucccccagaaggucuggugcgccuccggccgcuccaaggucaucaagggcucccucccccucaucggcgaggccgacugccuccacgagaaguacggcggccucaacaaguccaagcccuacuacaccggcgagcacgccaaggccaucggcaacugccccaucugggucaagaccccccucaagcucgccaacggcaccaaguaccgcccccccgccaagcuccucaaggagcgcggcuucuucggcgccaucgccggcuuccucgagggcggcugggagggcaugaucgccggcuggcacggcuacaccucccacggcgcccacggcgucgccgucgccgccgaccucaaguccacccaggaggccaucaacaagaucaccaagaaccucaacucccucuccgagcucgaggucaagaaccuccagcgccucuccggcgccauggacgagcuccacaacgagauccucgagcucgacgagaaggucgacgaccuccgcgccgacaccaucuccucccagaucgagcucgccguccuccucuccaacgagggcaucaucaacuccgaggacgagcaccuccucgcccucgagcgcaagcucaagaagaugcucggccccuccgccgucgagaucggcaacggcugcuucgagaccaagcacaagugcaaccagaccugccucgaccgcaucgccgccggcaccuucgacgccggcgaguucucccuccccaccuucgacucccucaacaucaccgccgccucccucaacgacgacggccucgacaaccacaccaucaugcucuacuacuccaccgccgccuccucccucgccgucacccucaugaucgccaucuucgucgucuacauggucucccgcgacaacgucuccugcuccaucugccucuga

SEQ ID NO: 124233 - RNA, 1758 nt, Artificial Sequence; identical to SEQ ID NO: 122923
  derived and/or modified CDS sequence (opt2) from hemagglutinin__InfluenzaB__AHM01063

SEQ ID NO: 124234 - RNA, 1755 nt, Artificial Sequence; identical to SEQ ID NO: 122890
  derived and/or modified CDS sequence (opt2) from hemagglutinin__InfluenzaB__AHM01074

SEQ ID NO: 124235 - RNA, 1755 nt, Artificial Sequence
  derived and/or modified CDS sequence (opt2) from hemagglutinin__InfluenzaB__AHM01096
augaaggccaucaucguccuccucauggucgucaccuccaacgccgaccgcaucugcaccggcaucaccuccuccaacuccccccacgucgucaagaccgccacccagggcgaggucaacgucaccggcgucaucccccucaccaccacccccaccaaguccuacuucgccaaccucaagggcaccaagacccgcggcaagcucugccccgacugccucaacugcaccgaccucgacgucgcccucggccgccccaugugcgucggcaccacccccuccgccaaggccuccauccuccacgagguccgccccgucaccuccggcugcuuccccaucaugcacgaccgcaccaagauccgccagcucgccaaccuccuccgcggcuacgagaacauccgccucuccacccagaacgucaucgacgccgagaaggcccccggcggccccuaccgccucggcaccuccggcuccugccccaacgccaccuccaaguccggcuucuucgccaccauggccugggccguccccaaggacaacaacaagaacgccaccaacccccucaccgucgagguccccuacaucugcgccgagggcgaggaccagaucaccgucuggggcuuccacuccgacaacaagacccagaugaagaaccucuacggcgacuccaacccccagaaguucaccuccuccgccaacggcgucaccacccacuacgucucccagaucggcggcuuccccgaccagaccgaggacggcggccucccccaguccggccgcaucgucgucgacuacaugaugcagaagcccggcaagaccggcaccaucgucuaccagcgcggcauccuccucccccagaaggucuggugcgccuccggccgcuccaaggucaucaagggcucccucccccucaucggcgaggccgacugccuccacgagaaguacggcggccucaacaaguccaagcccuacuacaccggcgagcacgccaaggccaucggcaacugccccaucugggucaagaccccccucaagcucgccaacggcaccaaguaccgcccccccgccaagcuccucaaggagcgcggcuucuucggcgccaucgccggcuuccucgagggcggcugggagggcaugaucgccggcuggcacggcuacaccucccacggcgcccacggcgucgccgucgccgccgaccucaaguccacccaggaggccaucaacaagaucaccaagaaccucaacucccucuccgagcucgaggucaagaaccuccagcgccucuccggcgccauggacgagcuccacaacgagauccucgagcucgacgagaaggucgacgaccuccgcgccgacaccaucuccucccagaucgagcucgccguccuccucuccaacgagggcaucaucaacuccgaggacgagcaccuccucgcccucgagcgcaagcucaagaagaugcucggccccuccgccgucgacaucggcaacggcugcuucgagaccaagcacaagugcaaccagaccugccucgaccgcaucgccgccggcaccuucaacgccggcgaguucucccuccccaccuucgacucccucaacaucaccgccgccucccucaacgacgacggccucgacaaccacaccauccuccucuacuacuccaccgccgccuccucccucgccgucacccucaugcucgccaucuucaucgucuacauggucucccgcgacaacgucuccugcuccaucugccucuga

SEQ ID NO: 124236 - RNA, 1758 nt, Artificial Sequence; identical to SEQ ID NO: 122923
  derived and/or modified CDS sequence (opt2) from hemagglutinin__InfluenzaB__AHM01107

SEQ ID NO: 124237 - RNA, 1758 nt, Artificial Sequence
  derived and/or modified CDS sequence (opt2) from hemagglutinin__InfluenzaB__AHM01118
augaaggccaucaucguccuccucauggucgucaccuccaacgccgaccgcaucugcaccggcaucaccuccuccaacuccccccacgucgucaagaccgccacccagggcgaggucaacgucaccggcgucaucccccucaccaccacccccaccaagucccacuucgccaaccucaagggcaccgagacccgcggcaagcucugccccaagugccucaacugcaccgaccucgacgucgcccucggccgccccaagugcaccggcaagauccccuccgcccgcgucuccauccuccacgagguccgccccgucaccuccggcugcuuccccaucaugcacgaccgcaccaagauccgccagcuccccaaccuccuccgcggcuacgagcacauccgccucuccacccacaacgucaucaacgccgaggacgcccccggcggccccuacaagaucggcaccuccggcuccugccccaacgucaccaacggcaacggcuucuucgccaccauggccugggccguccccaagaacgacaagaacaagaccgccaccaacccccucaccaucgagguccccuacaucugcaccgagggcgaggaccagaucaccgucuggggcuuccacuccgacaacgagacccagauggccaagcucuacggcgacuccaagccccagaaguucaccuccuccgccaacggcgucaccacccacuacgucucccagaucggcggcuuccccaaccagaccgaggacggcggccucccccaguccggccgcaucgucgucgacuacaugguccagaaguccggcaagaccggcaccaucaccuaccagcgcggcauccuccucccccagaaggucuggugcgccuccggccgcuccaaggucaucaagggcucccucccccucaucggcgaggccgacugccuccacgagaaguacggcggccucaacaaguccaagcccuacuacaccggcgagcacgccaaggccaucggcaacugccccaucugggucaagaccccccucaagcucgccaacggcaccaaguaccgcccccccgccaagcuccucaaggagcgcggcuucuucggcgccaucgccggcuuccucgagggcggcugggagggcaugaucgccggcuggcacggcuacaccucccacggcgcccacggcgucgccgucgccgccgaccucaaguccacccaggaggccaucaacaagaucaccaagaaccucaacucccucuccgagcucgaggucaagaaccuccagcgccucuccggcgccauggacgagcuccacaacgagauccucgagcucgacgagaaggucgacgaccuccgcgccgacaccaucuccucccagaucgagcucgccguccuccucuccaacgagggcaucaucaacuccgaggacgagcaccuccucgcccucgagcgcaagcucaagaagaugcucggccccuccgccgucgagaucggcaacggcugcuucgagaccaagcacaagugcaaccagaccugccucgaccgcaucgccgccggcaccuucgacgccggcgaguucucccuccccaccuucgacucccucaacaucaccgccgucucccucaacgacgacggccucgacaaccacaccauccuccucuacuacuccaccgccgccuccucccucgccgucacccucaugaucgccaucuucgucgucuacauggucucccgcgacaacgucuccugcuccaucugccucuga

SEQ ID NO: 124238 - RNA, 1758 nt, Artificial Sequence; identical to SEQ ID NO: 122923
  derived and/or modified CDS sequence (opt2) from hemagglutinin__InfluenzaB__AHM01129

SEQ ID NO: 124239 - RNA, 1758 nt, Artificial Sequence
  derived and/or modified CDS sequence (opt2) from hemagglutinin__InfluenzaB__AHM01140
augaaggccaucaucguccuccucauggucgucaccuccaacgccgaccgcaucugcaccggcaucaccuccuccaacuccccccacgucgucaagaccgccacccagggcgaggucaacgucaccggcgucaucccccucaccaccacccccaccaagucccacuucgccaaccucaagggcaccgagacccgcggcaagcucugccccaagugccucaacugcaccgaccucgacgucgcccucggccgccccaagugcaccggcaagauccccuccgcccgcgucuccauccuccacgagguccgccccgucaccuccggcugcuuccccaucaugcacgaccgcaccaagauccgccagcuccccaaccuccuccgcggcuacgagcacauccgccucuccgcccacaacgucaucaacgccgagaacgcccccggcggccccuacaagaucggcaccuccggcuccugccccaacgucaccaacggcaacggcuucuucgccaccauggccugggccguccccaagaacgacaagaacaagaccgccaccaacccccucaccaucgagguccccuacaucugcaccgagggcgaggaccagaucaccgucuggggcuuccacuccgacaacgagacccagauggccaagcucuacggcgacuccaagccccagaaguucaccuccuccgccaacggcgucaccacccacuacgucucccagaucggcggcuuccccaaccagaccgaggacggcggccucccccaguccggccgcaucgucgucgacuacaugguccagaaguccggcaagaccggcaccaucaccuaccagcgcggcauccuccucccccagaaggucuggugcgccuccggccgcuccaaggucaucaagggcucccucccccucaucggcgaggccgacugccuccacgagaaguacggcggccucaacaaguccaagcccuacuacaccggcgagcacgccaaggccaucggcaacugccccaucugggucaagaccccccucaagcucgccaacggcaccaaguaccgcccccccgccaagcuccucaaggagcgcggcuucuucggcgccaucgccggcuuccucgagggcggcugggagggcaugaucgccggcuggcacggcuacaccucccacggcgcccacggcgucgccgucgccgccgaccucaaguccacccaggaggccaucaacaagaucaccaagaaccucaacucccucuccgagcucgaggucaagaaccuccagcgccucuccggcgccauggacgagcuccacaacgagauccucgagcucgacgagaaggucgacgaccuccgcgccgacaccaucuccucccagaucgagcucgccguccuccucuccaacgagggcaucaucaacuccgaggacgagcaccuccucgcccucgagcgcaagcucaagaagaugcucggccccuccgccgucgagaucggcaacggcugcuucgagaccaagcacaagugcaaccagaccugccucgaccgcaucgccgccggcaccuucgacgccggcgaguucucccuccccaccuucgacucccucaacaucaccgccgccucccucaacgacgacggccucgacaaccacaccauccuccucuacuacuccaccgccgccuccucccucgccgucacccucaugaucgccaucuucgucgucuacauggucucccgcgacaacgucuccugcuccaucugccucuga

SEQ ID NO: 124240 - RNA, 1758 nt, Artificial Sequence; identical to SEQ ID NO: 122908
  derived and/or modified CDS sequence (opt2) from hemagglutinin__InfluenzaB__AHM01151

SEQ ID NO: 124241 - RNA, 1758 nt, Artificial Sequence
  derived and/or modified CDS sequence (opt2) from hemagglutinin__InfluenzaB__AHM01162
augaaggccaucaucguccuccucauggucgucaccuccaacgccgaccgcaucugcaccggcaucaccuccuccaacuccccccacgucgucaagaccgccacccagggcgaggucaacgucaccggcgucaucccccucaccaccacccccaccaagucccacuucgccaaccucaagggcaccgagacccgcggcaagcucugccccaagugccucaacugcaccgaccucgacgucgcccucggccgccccaagugcaccggcaagauccccuccgcccgcgucuccauccuccacgagguccgccccgucaccuccggcugcuuccccaucaugcacgaccgcaccaagauccgccagcuccccaaccuccuccgcggcuacgagcacauccgccucuccacccacaacgucaucaacgccaaggacgcccccggcggccccuacaagaucggcaccuccggcuccugccccaacgucaccaacggcaacggcuucuucgccaccauggccugggccguccccaagaacgacaagaacaagaccgccaccaacccccucaccaucgagguccccuacaucugcaccgagggcgaggaccagaucaccgucuggggcuuccacuccgacaacgagacccagauggccaagcucuacggcgacuccaagccccagaaguucaccuccuccgccaacggcgucaccacccacuacgucucccagaucggcggcuuccccaaccagaccgaggacggcggccucccccaguccggccgcaucgucgucgacuacaugguccagaaguccggcaagaccggcaccaucaccuaccagcgcggcauccuccucccccagaaggucuggugcgccuccggccgcuccaaggucaucaagggcucccucccccucaucggcgaggccgacugccuccacgagaaguacggcggccucaacaaguccaagcccuacuacaccggcgagcacgccaaggccaucggcaacugccccaucugggucaagaccccccucaagcucgccaacggcaccaaguaccgcccccccgccaagcuccucaaggagcgcggcuucuucggcgccaucgccggcuuccucgagggcggcugggagggcaugaucgccggcuggcacggcuacaccucccacggcgcccacggcgucgccgucgccgccgaccucaaguccacccaggaggccaucaacaagaucaccaagaaccucaacucccucuccgagcucgaggucaagaaccuccagcgccucuccggcgccauggacgagcuccacaacgagauccucgagcucgacgagaaggucgacgaccuccgcgccgacaccaucuccucccagaucgagcucgccguccuccucuccaacgagggcaucaucaacuccgaggacgagcaccuccucgcccucgagcgcaagcucaagaagaugcucggccccuccgccgucgagaucggcaacggcugcuucgagaccaagcacaagugcaaccagaccugccucgaccgcaucgccgccggcaccuucgacgccggcgaguucucccuccccaccuucgacucccucaacaucaccgccgccucccucaacgacgacggccucgacaaccacaccauccuccucuacuacuccaccgccgccuccucccucgccgucacccucaugaucgccaucuucgucgucuacauggucucccgcgacaacgucuccugcuccaucugccucuga

SEQ ID NO: 124242 - RNA, 1755 nt, Artificial Sequence; identical to SEQ ID NO: 122890
  derived and/or modified CDS sequence (opt2) from hemagglutinin__InfluenzaB__AHM01173

SEQ ID NO: 124243 - RNA, 1758 nt, Artificial Sequence
  derived and/or modified CDS sequence (opt2) from hemagglutinin__InfluenzaB__AHM01184
augaaggccaucaucguccuccucauggucgucaccuccaacgccgaccgcaucugcaccggcaucaccuccuccaacuccccccacgucgucaagaccgccacccagggcgaggucaacgucaccggcgucaucacccucaccaccacccccaccaagucccacuucgccaaccucaagggcaccgagacccgcggcaagcucugccccaagugccucaacugcaccgaccucgacgucgcccucggccgccccaagugcaccggcaagauccccuccgcccgcgucuccauccuccacgagguccgccccgucaccuccggcugcuuccccaucaugcacgaccgcaccaagauccgccagcuccccaaccuccuccgcggcuacgagcacauccgccucuccacccacaacgucaucaacgccgaggacgcccccggcggccccuacaagaucggcaccuccggcuccugccccaacgucaccaacggcaacggcuucuucgccaccauggccugggccguccccaagaacgacaagaacaagaccgccaccaacccccucaccaucgagguccccuacaucugcaccgagggcgaggaccagaucaccgucuggggcuuccacuccgacaacgagacccagauggccaagcucuacggcgacuccaagccccagaaguucaccuccuccgccaacggcgucaccacccacuacgucucccagaucggcggcuuccccaaccagaccgaggacggcggccucccccaguccggccgcaucgucgucgacuacaugguccagaaguccggcaagaccggcaccaucaccuaccagcgcggcauccuccucccccagaaggucuggugcgccuccggccgcuccaaggucaucaagggcucccucccccucaucggcgaggccgacugccuccacgagaaguacggcggccucaacaaguccaagcccuacuacaccggcgagcacgccaaggccaucggcaacugccccaucugggucaagaccccccucaagcucgccaacggcaccaaguaccgcccccccgccaagcuccucaaggagcgcggcuucuucggcgccaucgccggcuuccucgagggcggcugggagggcaugaucgccggcuggcacggcuacaccucccacggcgcccacggcgucgccgucgccgccgaccucaaguccacccaggaggccaucaacaagaucaccaagaaccucaacucccucuccgagcucgaggucaagaaccuccagcgccucuccggcgccauggacgagcuccacaacgagauccucgagcucgacgagaaggucgacgaccuccgcgccgacaccaucuccucccagaucgagcucgccguccuccucuccaacgagggcaucaucaacuccgaggacgagcaccuccucgcccucgagcgcaagcucaagaagaugcucggccccuccgccgucgagaucggcaacggcugcuucgagaccaagcacaagugcaaccagaccugccucgaccgcaucgccgccggcaccuucgacgccggcgaguucucccuccccaccuucgacucccucaacaucaccgccgccucccucaacgacgacggccucgacaaccacaccauccuccucuacuacuccaccgccgccuccucccucgccgucacccucaugaucgccaucuucgucgucuacauggucucccgcgacaacgucuccugcuccaucugccucuga

SEQ ID NO: 124244 - RNA, 1758 nt, Artificial Sequence; identical to SEQ ID NO: 124239
  derived and/or modified CDS sequence (opt2) from hemagglutinin__InfluenzaB__AHM01195

SEQ ID NO: 124245 - RNA, 1758 nt, Artificial Sequence
  derived and/or modified CDS sequence (opt2) from hemagglutinin__InfluenzaB__AHM01206
augaaggccaucaucguccuccucauggucgucaccuccaacgccgaccgcaucugcaccggcaucaccuccuccaacuccccccacgucgucaagaccgccacccagggcgaggucaacgucaccggcgucaucccccucaccaccacccccaccaagucccacuucgccaaccucaagggcaccgagacccgcggcaagcucugccccaagugccucaacugcaccgaccucgacgucgcccucggccgccccaagugcaccggcaagauccccuccgcccgcgucuccauccuccacgagguccgccccgucaccuccggcugcuuccccaucaugcacgaccgcaccaagauccgccagcuccccaaccuccuccgcggcuacgagcacauccgccucuccacccacaacgucaucaacgccgaggacgcccccggcggccccuacaagaucggcaccuccggcuccugccccaacgucaccaacggcaacggcuucuucgccaccauggccugggccguccccaagaacgacaagaacaagaccgccaccaacccccucaccaucgagguccccuacaucugcaccgagggcgaggaccagaucaccgucuggggcuuccacuccgacaacgagacccagauggccaagcucuacggcgacuccaagccccagaaguucaccuccuccgccaacggcgucaccacccacuacgucucccagaucggcggcuuccccaaccagaccgaggacggcggccucccccaguccggccgcaucgucgucgacuacaugguccagaaguccgagaagaccggcaccaucaccuaccagcgcggcauccuccucccccagaaggucuggugcgccuccggccgcuccaaggucaucaagggcucccucccccucaucggcgaggccgacugccuccacgagaaguacggcggccucaacaaguccaagcccuacuacaccggcgagcacgccaaggccaucggcaacugccccaucugggucaagaccccccucaagcucgccaacggcaccaaguaccgcccccccgccaagcuccucaaggagcgcggcuucuucggcgccaucgccggcuuccucgagggcggcugggagggcaugaucgccggcuggcacggcuacaccucccacggcgcccacggcgucgccgucgccgccgaccucaaguccacccaggaggccaucaacaagaucaccaagaaccucaacucccucuccgagcucgaggucaagaaccuccagcgccucuccggcgccauggacgagcuccacaacgagauccucgagcucgacgagaaggucgacgaccuccgcgccgacaccaucuccucccagaucgagcucgccguccuccucuccaacgagggcaucaucaacuccgaggacgagcaccuccucgcccucgagcgcaagcucaagaagaugcucggccccuccgccgucgagaucggcaacggcugcuucgagaccaagcacaagugcaaccagaccugccucgaccgcaucgccgccggcaccuucgacgccggcgaguucucccuccccaccuucgacucccucaacaucaccgccgccucccucaacgacgacggccucggcaaccacaccauccuccucuacuacuccaccgccgccuccucccucgccgucacccucaugaucgccaucuucgucgucuacauggucucccgcgacaacgucuccugcuccaucugccucuga

SEQ ID NO: 124246 - RNA, 1758 nt, Artificial Sequence; identical to SEQ ID NO: 122908
  derived and/or modified CDS sequence (opt2) from hemagglutinin__InfluenzaB__AHM01217

SEQ ID NO: 124247 - RNA, 1755 nt, Artificial Sequence; identical to SEQ ID NO: 122890
  derived and/or modified CDS sequence (opt2) from hemagglutinin__InfluenzaB__AHM01228

SEQ ID NO: 124248 - RNA, 1758 nt, Artificial Sequence; identical to SEQ ID NO: 122923
  derived and/or modified CDS sequence (opt2) from hemagglutinin__InfluenzaB__AHM01239

SEQ ID NO: 124249 - RNA, 1758 nt, Artificial Sequence; identical to SEQ ID NO: 122923
  derived and/or modified CDS sequence (opt2) from hemagglutinin__InfluenzaB__AHM01250

SEQ ID NO: 124250 - RNA, 1758 nt, Artificial Sequence
  derived and/or modified CDS sequence (opt2) from hemagglutinin__InfluenzaB__AHM01261
augaaggccaucaucguccuccucauggucgucaccuccaacgccgaccgcaucugcaccggcaucaccuccuccaacuccccccacgucgucaagaccgccacccagggcgaggucaacgucaccggcgucaucccccucaccaccacccccaccaagucccacuucgccaaccucaagggcaccgagacccgcggcaagcucugccccaagugccucaacugcaccgaccucgacgucgcccucggccgccccaagugcaccggcaagauccccuccgcccgcgucuccauccuccacgagguccgccccgucaccuccggcugcuuccccaucaugcacgaccgcaccaagauccgccagcuccccaaccuccuccgcggcuacgagcacauccgccucuccacccacaacgucaucaacgccgagaacgcccccggcggccccuacaagaucggcaccuccggcuccugccccaacgucaccaacggcaacggcuucuucgccaccauggccugggccguccccaagaacgacaagaacaagaccgccaccaacccccucaccaucgagguccccuacaucugcaccgagggcgaggaccagaucaccaucuggggcuuccacuccgacaacgagacccagauggccaagcucuacggcgacuccaacccccagaaguucaccuccuccgccaacggcgucaccacccacuacgucucccagaucggcggcuuccccaaccagaccgaggacggcggccucccccaguccggccgcaucgucgucgacuacaugguccagaaguccggcaagaccggcaccaucaccuaccagcgcggcauccuccucccccagaaggucuggugcgccggcggccgcuccaaggucaucaagggcucccucccccucaucggcgaggccgacugccuccacgagaaguacggcggccucaacaaguccaagcccuacuacaccggcgagcacgccaaggccaucggcaacugccccaucugggucaagaccccccucaagcucgccaacggcaccaaguaccgcccccccgccaagcuccucaaggagcgcggcuucuucggcgccaucgccggcuuccucgagggcggcugggagggcaugaucgccggcuggcacggcuacaccucccacggcgcccacggcgucgccgucgccgccgaccucaaguccacccaggaggccaucaacaagaucaccaagaaccucaacucccucuccgagcucgaggucaagaaccuccagcgccucuccggcgccauggacgagcuccacaacgagauccucgagcucgacgagaaggucgacgaccuccgcgccgacaccaucuccucccagaucgagcucgccguccuccucuccaacgagggcaucaucaacuccgaggacgagcaccuccucgcccucgagcgcaagcucaagaagaugcucggccccuccgccgucgagaucggcaacggcugcuucgagaccaagcacaagugcaaccagaccugccucgaccgcaucgccgccggcaccuucgacgccggcgaguucucccuccccaccuucgacucccucaacaucaccgccgccucccucaacgacgacggccucgacaaccacaccauccuccucuacuacuccaccgccgccuccucccucgccgucacccucaugaucgccaucuucgucgucuacauggucucccgcgacaacgucuccugcuccaucugccucuga

SEQ ID NO: 124251 - RNA, 1755 nt, Artificial Sequence; identical to SEQ ID NO: 122890
  derived and/or modified CDS sequence (opt2) from hemagglutinin__InfluenzaB__AHM01272

SEQ ID NO: 124252 - RNA, 1758 nt, Artificial Sequence; identical to SEQ ID NO: 124239
  derived and/or modified CDS sequence (opt2) from hemagglutinin__InfluenzaB__AHM01283

SEQ ID NO: 124253 - RNA, 1758 nt, Artificial Sequence; identical to SEQ ID NO: 124239
  derived and/or modified CDS sequence (opt2) from hemagglutinin__InfluenzaB__AHM01294

SEQ ID NO: 124254 - RNA, 1755 nt, Artificial Sequence; identical to SEQ ID NO: 122890
  derived and/or modified CDS sequence (opt2) from hemagglutinin__InfluenzaB__AHM01305

SEQ ID NO: 124255 - RNA, 1758 nt, Artificial Sequence; identical to SEQ ID NO: 122923
  derived and/or modified CDS sequence (opt2) from hemagglutinin__InfluenzaB__AHM01316

SEQ ID NO: 124256 - RNA, 1758 nt, Artificial Sequence; identical to SEQ ID NO: 124239
  derived and/or modified CDS sequence (opt2) from hemagglutinin__InfluenzaB__AHM01327

SEQ ID NO: 124257 - RNA, 1758 nt, Artificial Sequence; identical to SEQ ID NO: 122923
  derived and/or modified CDS sequence (opt2) from hemagglutinin__InfluenzaB__AHM01338

SEQ ID NO: 124258 - RNA, 1758 nt, Artificial Sequence; identical to SEQ ID NO: 122923
  derived and/or modified CDS sequence (opt2) from hemagglutinin__InfluenzaB__AHM01349

SEQ ID NO: 124259 - RNA, 1758 nt, Artificial Sequence
  derived and/or modified CDS sequence (opt2) from hemagglutinin__InfluenzaB__AHM01360
augaaggccaucaucguccuccucauggucgucaccuccaacgccgaccgcaucugcaccggcaucaccuccuccaacuccccccacgucgucaagaccgccacccagggcgaggucaacgucaccggcgucaucccccucaccaccacccccaccaagucccacuucgccaaccucaagggcaccgagacccgcggcaagcucugccccaagugccucaacugcaccgaccucgacgucgcccucggccgccccaagugcaccggcaagauccccuccgcccgcgucuccauccuccacgagguccgccccgucaccuccggcugcuuccccaucaugcacgaccgcaccaagauccgccagcuccccaaccuccuccgcggcuacgagcacauccgccucuccacccacaacgucaucaacgccgagaacgcccccggcggccccuacaagaucggcaccuccggcuccugccccaacgucaccaacggcaacggcuucuucgccaccauggccugggccguccccaagaacgacaagaacaagaccgccaccaacccccucaccaucgagguccccuacaucugcaccaagggcgaggaccagaucaccgucuggggcuuccacuccgacaacgagacccagauggccaagcucuacggcgacuccaacccccagaaguucaccuccuccgccaacggcgucaccacccacuacgucucccagaucggcggcuuccccaaccagaccgaggacggcggccucccccaguccggccgcaucgucgucgacuacaugguccagaaguccggcaagaccggcaccaucaccuaccagcgcggcauccuccucccccagaaggucuggugcgccuccggccgcuccaaggucaucaagggcucccucccccucaucggcgaggccgacugccuccacgagaaguacggcggccucaacaaguccaagcccuacuacaccggcgagcacgccaaggccaucggcaacugccccaucugggucaagaccccccucaagcucgccaacggcaccaaguaccgcccccccgccaagcuccucaaggagcgcggcuucuucggcgccaucgccggcuuccucgagggcggcugggagggcaugaucgccggcuggcacggcuacaccucccacggcgcccacggcgucgccgucgccgccgaccucaaguccacccaggaggccaucaacaagaucaccaagaaccucaacucccucuccgagcucgaggucaagaaccuccagcgccucuccggcgccauggacgagcuccacaacgagauccucgagcucgacgagaaggucgacgaccuccgcgccgacaccaucuccucccagaucgagcucgccguccuccucuccaacgagggcaucaucaacuccgaggacgagcaccuccucgcccucgagcgcaagcucaagaagaugcucggccccuccgccgucgagaucggcaacggcugcuucgagaccaagcacaagugcaaccagaccugccucgaccgcaucgccgccggcaccuucgacgccggcgaguucucccuccccaccuucgacucccucaacaucaccgccgccucccucaacgacgacggccucgacaaccacaccauccuccucuacuacuccaccgccgccuccucccucgccgucacccucaugaucgccaucuucgucgucuacauggucucccgcgacaacgucuccugcuccaucugccucuga

SEQ ID NO: 124260 - RNA, 1755 nt, Artificial Sequence
  derived and/or modified CDS sequence (opt2) from hemagglutinin__InfluenzaB__AHM01371
augaaggccaucaucguccuccucauggucgucaccuccaacgccgaccgcaucugcaccggcaucaccuccuccaacuccccccacgucgucaagaccgccacccagggcgaggucaacgucaccggcgucaucccccucaccaccacccccaccaaguccuacuucgccaaccucaagggcaccaagacccgcggcaagcucugccccgacugccucaacugcaccgaccucgacgucgcccucggccgccccaugugcgucggcaccacccccuccgccaaggccuccauccuccacgagguccgccccgucaccuccggcugcuuccccaucaugcacgaccgcaccaagauccgccagcucgccaaccuccuccgcggcuacgagaacauccgccucuccacccagaacgucaucgacgccgagaaggcccccggcggccccuaccgccucggcaccuccggcuccugccccaacgccaccuccaagaacggcuucuucgccaccauggccugggccguccccaaggacaacaacaagaacgccaccaacccccucaccgucgagguccccuacaucugcgccgagggcgaggaccagaucgccgucuggggcuuccacuccgacaacaagacccagaugaagaaccucuacggcgacuccaacccccagaaguucaccuccuccgccaacggcgucaccacccacuacgucucccagaucggcggcuuccccgaccagaccgaggacggcggccucccccaguccggccgcaucgucgucgacuacaugaugcagaagcccggcaagaccggcaccaucgucuaccagcgcggcguccuccucccccagaaggucuggugcgccuccggccgcuccaaggucaucaagggcucccucccccucaucggcgaggccgacugccuccacgagaaguacggcggccucaacaaguccaagcccuacuacaccggcgagcacgccaaggccaucggcaacugccccaucugggucaagaccccccucaagcucgccaacggcaccaaguaccgcccccccgccaagcuccucaaggagcgcggcuucuucggcgccaucgccggcuuccucgagggcggcugggagggcaugaucgccggcuggcacggcuacaccucccacggcgcccacggcgucgccgucgccgccgaccucaaguccacccaggaggccaucaacaagaucaccaagaaccucaacucccucuccgagcucgaggucaagaaccuccagcgccucuccggcgccauggacgagcuccacaacgagauccucgagcucgacgagaaggucgacgaccuccgcgccgacaccaucuccucccagaucgagcucgccguccuccucuccaacgagggcaucaucaacuccgaggacgagcaccuccucgcccucgagcgcaagcucaagaagaugcucggccccuccgccgucgacaucggcaacggcugcuucgagaccaagcacaagugcaaccagaccugccucgaccgcaucgccgccggcaccuucaacgccggcgaguucucccuccccaccuucgacucccucaacaucaccgccgccucccucaacgacgacggccucgacaaccacaccauccuccucuacuacuccaccgccgccuccucccucgccgucacccucaugcucgccaucuucaucgucuacauggucucccgcgacaacgucuccugcuccaucugccucuga

SEQ ID NO: 124261 - RNA, 1755 nt, Artificial Sequence; identical to SEQ ID NO: 122890
  derived and/or modified CDS sequence (opt2) from hemagglutinin__InfluenzaB__AHM01382

SEQ ID NO: 124262 - RNA, 1758 nt, Artificial Sequence
  derived and/or modified CDS sequence (opt2) from hemagglutinin__InfluenzaB__AHM01393
augaaggccaucaucguccuccucauggucgucaccuccaacgccgaccgcaucugcaccggcaucaccuccuccaacuccccccacaucgucaagaccgccacccagggcgaggucaacgucaccggcgucaucccccucaccaccacccccaccaagucccacuucgccaaccucaagggcaccgagacccgcggcaagcucugccccaagugccucaacugcaccgaccucgacgucgcccucggccgccccaagugcaccggcaagauccccuccgcccgcgucuccauccuccacgagguccgccccgucaccuccggcugcuuccccaucaugcacgaccgcaccaagauccgccagcuccccaaccuccuccgcggcuacgagcacauccgccucuccacccacaacgucaucaacgccgagaacgcccccggcggccccuacaagaucggcaccuccggcuccugccccaacgucaccaacggcaacggcuucuucgccaccauggccugggccguccccaagaacgacaagaacaagaccgccaccaacccccucaccaucgagguccccuacaucugcaccgagggcgaggaccagaucaccgucuggggcuuccacuccgacaacgagacccagauggccaagcucuacggcgacuccaagccccagaaguucaccuccuccgccaacggcgucaccacccacuacgucucccagaucggcggcuuccccaaccagaccgaggacggcggccucccccaguccggccgcaucgucgucgacuacaugguccagaaguccggcaagaccggcaccaucaccuaccagcgcggcauccuccucccccagaaggucuggugcgccuccggccgcuccaaggucaucaagggcucccucccccucaucggcgaggccgacugccuccacgagaaguacggcggccucaacaaguccaagcccuacuacaccggcgagcacgccaaggccaucggcaacugccccaucugggucaagaccccccucaagcucgccaacggcaccaaguaccgcccccccgccaagcuccucaaggagcgcggcuucuucggcgccaucgccggcuuccucgagggcggcugggagggcaugaucgccggcuggcacggcuacaccucccacggcgcccacggcgucgccgucgccgccgaccucaaguccacccaggaggccaucaacaagaucaccaagaaccucaacucccucuccgagcucgaggucaagaaccuccagcgccucuccggcgccauggacgagcuccacaacgagauccucgagcucgacgagaaggucgacgaccuccgcgccgacaccaucuccucccagaucgagcucgccguccuccucuccaacgagggcaucaucaacuccgaggacgagcaccuccucgcccucgagcgcaagcucaagaagaugcucggccccuccgccgucgagaucggcaacggcugcuucgagaccaagcacaagugcaaccagaccugccucgaccgcaucgccgccggcaccuucgacgccggcgaguucucccuccccaccuucgacucccucaacaucaccgccgccucccucaacgacgacggccucgacaaccacaccauccuccucuacuacuccaccgccgccuccucccucgccgucacccucaugaucgccaucuucgucgucuacauggucucccgcgacaacgucuccugcuccaucugccucuga

SEQ ID NO: 124263 - RNA, 1758 nt, Artificial Sequence; identical to SEQ ID NO: 122923
  derived and/or modified CDS sequence (opt2) from hemagglutinin__InfluenzaB__AHM01404

SEQ ID NO: 124264 - RNA, 1758 nt, Artificial Sequence
  derived and/or modified CDS sequence (opt2) from hemagglutinin__InfluenzaB__AHM01415
augaaggccaucaucguccuccucauggucgucaccuccaacgccgaccgcaucugcaccggcaucaccuccuccaacuccccccacgucgucaagaccgccacccagggcgaggucaacgucaccggcgucaucccccucaccaccacccccaccaagucccacuucgccaaccucaagggcaccgagacccgcggcaagcucugccccaagugccucaacugcaccgaccucgacgucgcccucggccgccccaagugcaccggcaagauccccuccgcccgcgucuccauccuccacgagguccgccccgucaccuccggcugcuuccccaucaugcacgaccgcaccaagauccgccagcuccccaaccuccuccgcggcuacgagcacauccgccucuccacccacaacgucaucaacgccgaggacgcccccggcggccccuacaagaucggcaccuccggcuccugccccaacgucaccaacggcaacggcuucuucgccaccauggccugggccguccccaagaacgacaagaacaagaccgccaccaacccccucaccaucgagguccccuacaucugcaccgagggcgaggaccagaucaccgucuggggcuuccacuccgacaacgagacccagauggccaagcucuacggcgacuccaagccccagaaguucaccuccuccgccaacggcgucaccacccacuacgucucccagaucggcggcuuccccaaccagaccgaggacggcggccucccccaguccggccgcaucgucaucgacuacaugguccagaaguccggcaagaccggcaccaucaccuaccagcgcggcauccuccucccccagaaggucuggugcgccuccggccgcuccaaggucaucaagggcucccucccccucaucggcgaggccgacugccuccacgagaaguacggcggccucaacaaguccaagcccuacuacaccggcgagcacgccaaggccaucggcaacugccccaucugggucaagaccccccucaagcucgccaacggcaccaaguaccgcccccccgccaagcuccucaaggagcgcggcuucuucggcgccaucgccggcuuccucgagggcggcugggagggcaugaucgccggcuggcacggcuacaccucccacggcgcccacggcgucgccgucgccgccgaccucaaguccacccaggaggccaucaacaagaucaccaagaaccucaacucccucuccgagcucgaggucaagaaccuccagcgccucuccggcgccauggacgagcuccacaacgagauccucgagcucgacgagaaggucgacgaccuccgcgccgacaccaucuccucccagaucgagcucgccguccuccucuccaacgagggcaucaucaacuccgaggacgagcaccuccucgcccucgagcgcaagcucaagaagaugcucggccccuccgccgucgagaucggcaacggcugcuucgagaccaagcacaagugcaaccagaccugccucgaccgcaucgccgccggcaccuucgacgccggcgaguucucccuccccaccuucgacucccucaacaucaccgccgccucccucaacgacgacggccucgacaaccacaccauccuccucuacuacuccaccgccgccuccucccucgccgucacccucaugaucgccaucuucgucgucuacauggucucccgcgacaacgucuccugcuccaucugccucuga

SEQ ID NO: 124265 - RNA, 1758 nt, Artificial Sequence
  derived and/or modified CDS sequence (opt2) from hemagglutinin__InfluenzaB__AHM01426
augaaggccaucaucguccuccucauggucgucaccuccaacgccgaccgcaucugcaccggcaucaccuccuccaacuccccccacgucgucaagaccgccacccagggcgaggucaacgucaccggcgucaucccccucaccaccacccccaccaagucccacuucgccaaccucaagggcaccgagacccgcggcaagcucugccccaagugccucaacugcaccgaccucgacgucgcccucggccgccccaagugcaccggcaagauccccuccgcccgcgucuccauccuccacgagguccgccccgucaccuccggcugcuuccccaucaugcacgaccgcaccaagauccgccagcuccccaaccuccuccgcggcuacgagcacauccgccucuccacccacaacgucaucaacgccgagaacgcccccggcggccccuacaagaucggcaccuccggcuccugccccaacgucaccaacggcaacggcuucuucgccaccauggccugggccguccccaagaacgacaagaacaagaccgccaccaacccccucaccaucgagguccccuacaucugcaccgagggcgaggaccagaucaccaucuggggcuuccacuccgacaacgagacccagauggccaagcucuacggcgacuccaacccccagaaguucaccuccuccgccaacggcgucaccacccacuacgucucccagaucggcggcuuccccaaccagaccgaggacggcggccucccccaguccggccgcaucgucgucgacuacaugguccagaaguccggcaagaccggcaccaucaccuaccagcgcggcauccuccucccccagaaggucuggugcgccuccggccgcuccaaggucaucaagggcucccucccccucaucggcgaggccgacugccuccacgagaaguacggcggccucaacaaguccaagcccuacuacaccggcgagcacgccaaggccaucggcaacugccccaucugggucaagaccccccucaagcucgccaacggcaccaaguaccgcccccccgccaagcuccucaaggagcgcggcuucuucggcgccaucgccggcuuccucgagggcggcugggagggcaugaucgccggcuggcacggcuacaccucccacggcgcccacggcgucgccgucgccgccgaccucaaguccacccaggaggccaucaacaagaucaccaagaaccucaacucccucuccgagcucgaggucaagaaccuccagcgccucuccggcgccauggacgagcuccacaacgagauccucgagcucgacgagaaggucgacgaccuccgcgccgacaccaucuccucccagaucgagcucgccguccuccucuccaacgagggcaucaucaacuccgaggacgagcaccuccucgcccucgagcgcaagcucaagaagaugcucggccccuccgccgucgagaucggcaacggcugcuucgagaccaagcacaagugcaaccagaccugccucgaccgcaucgccgccggcaccuucgacgccggcgaguucucccuccccaccuucgacucccucaacaucaccgccgccucccucaacgacgacggccucgacaaccacaccauccuccucuacuacuccaccgccgccuccucccucgccgucacccucaugaucgccaucuucgucgucuacauggucucccgcgacaacgucuccugcuccaucugccucuga

SEQ ID NO: 124266 - RNA, 1755 nt, Artificial Sequence
  derived and/or modified CDS sequence (opt2) from hemagglutinin__InfluenzaB__AHM01437
augaaggccgucaucguccuccucauggucgucaccuccaacgccgaccgcaucugcaccggcaucaccuccuccaacuccccccacgucgucaagaccgccacccagggcgaggucaacgucaccggcgucaucccccucaccaccacccccaccaaguccuacuucgccaaccucaagggcaccaagacccgcggcaagcucugccccgacugccucaacugcaccgaccucgacgucgcccucggccgccccaugugcgucggcaccacccccuccgccaaggccuccauccuccacgagguccgccccgucaccuccggcugcuuccccaucaugcacgaccgcaccaagauccgccagcucgccaaccuccuccgcggcuacgagaacauccgccucuccacccagaacgucaucgacgccgagaaggcccccggcggccccuaccgccucggcaccuccggcuccugccccaacgccaccuccaaguccggcuucuucgccaccauggccugggccguccccaaggacaacaacaagaacgccaccaacccccucaccgucgagguccccuacaucugcgccgaggaggaggaccagaucaccgucuggggcuuccacuccgacaacaagacccagaugaagaaccucuacggcgacuccaacccccagaaguucaccuccuccgccaacggcgucaccacccacuacgucucccagaucggcggcuuccccgaccagaccgaggacggcggccucccccaguccggccgcaucgucgucgacuacaugaugcagaagcccggcaagaccggcaccaucgucuaccagcgcggcguccuccucccccagaaggucuggugcgccuccggccgcuccaaggucaucaagggcucccucccccucaucggcgaggccgacugccuccacgagaaguacggcggccucaacaaguccaagcccuacuacaccggcgagcacgccaaggccaucggcaacugccccaucugggucaagaccccccucaagcucgccaacggcaccaaguaccgcccccccgccaagcuccucaaggagcgcggcuucuucggcgccaucgccggcuuccucgagggcggcugggagggcaugaucgccggcuggcacggcuacaccucccacggcgcccacggcgucgccgucgccgccgaccucaaguccacccaggaggccaucaacaagaucaccaagaaccucaacucccucuccgagcucgaggucaagaaccuccagcgccucuccggcgccauggacgagcuccacaacgagauccucgagcucgacgagaaggucgacgaccuccgcgccgacaccaucuccucccagaucgagcucgccguccuccucuccaacgagggcaucaucaacuccgaggacgagcaccuccucgcccucgagcgcaagcucaagaagaugcucggccccuccgccgucgacaucggcaacggcugcuucgagaccaagcacaagugcaaccagaccugccucgaccgcaucgccgccggcaccuucaacgccggcgaguucucccuccccaccuucgacucccucaacaucaccgccgccucccucaacgacgacggccucgacaaccacaccauccuccucuacuacuccaccgccgccuccucccucgccgucacccucaugcucgccaucuucaucgucuacauggucucccgcgacaacgucuccugcuccaucugccucuga

SEQ ID NO: 124267 - RNA, 1755 nt, Artificial Sequence
  derived and/or modified CDS sequence (opt2) from hemagglutinin__InfluenzaB__AHM01448
augaaggccaucaucguccuccucauggucgucaccuccaacgccgaccgcaucugcaccggcaucaccuccuccaacuccccccacgucgucaagaccgccacccagggcgaggucaacgucaccggcgucaucccccucaccaccacccccaccaaguccuacuucgccaaccucaagggcaccaagacccgcggcaagcucugccccgacugccucaacugcaccgaccucgacgucgcccucggccgccccaugugcgucggcaccacccccuccgccaaggccuccauccuccacgagguccgccccgucaccuccggcugcuuccccaucaugcacgaccgcaccaagauccgccagcucgccaaccuccuccgcggcuacgagaacauccgccucuccacccagaacgucaucgacgccgagaaggcccccggcggccccuaccgccucggcaccuccggcuccugccccaacgccaccuccaaguccggcuucuucgccaccauggccugggccguccccaaggacaacaacaagaacgccaccaacccccucaccgccgagguccccuacaucugcgccgagggcgaggaccagaucaccgucuggggcuuccacuccgacaacaagacccagaugaagaaccucuacggcgacuccaacccccagaaguucaccuccuccgccaacggcgucaccacccacuacgucucccagaucggcggcuuccccgaccagaccgaggacggcggccucccccaguccggccgcaucgucgucgacuacaugaugcagaagcccggcaagaccggcaccaucgucuaccagcgcggcguccuccucccccagaaggucuggugcgccuccggccgcuccaaggucaucaagggcucccucccccucaucggcgaggccgacugccuccacgagaaguacggcggccucaacaaguccaagcccuacuacaccggcgagcacgccaaggccaucggcaacugccccaucugggucaagaccccccucaagcucgccaacggcaccaaguaccgcccccccgccaagcuccucaaggagcgcggcuucuucggcgccaucgccggcuuccucgagggcggcugggagggcaugaucgccggcuggcacggcuacaccucccacggcgcccacggcgucgccgucgccgccgaccucaaguccacccaggaggccaucaacaagaucaccaagaaccucaacucccucuccgagcucgaggucaagaaccuccagcgccucuccggcgccauggacgagcuccacaacgagauccucgagcucgacgagaaggucgacgaccuccgcgccgacaccaucuccucccagaucgagcucgccguccuccucuccaacgagggcaucaucaacuccgaggacgagcaccuccucgcccucgagcgcaagcucaagaagaugcucggccccuccgccgucgacaucggcaacggcugcuucgagaccaagcacaagugcaaccagaccugccucgaccgcaucgccgccggcaccuucaacgccggcgaguucucccuccccaccuucgacucccucaacaucaccgccgccucccucaacgacgacggccucgacaaccacaccauccuccucuacuacuccaccgccgccuccucccucgccgucacccucaugcucgccaucuucaucgucuacauggucucccgcgacaacgucuccugcuccaucugccucuga

SEQ ID NO: 124268 - RNA, 1758 nt, Artificial Sequence; identical to SEQ ID NO: 122681
  derived and/or modified CDS sequence (opt2) from hemagglutinin__InfluenzaB__AHM01459

SEQ ID NO: 124269 - RNA, 1755 nt, Artificial Sequence
  derived and/or modified CDS sequence (opt2) from hemagglutinin__InfluenzaB__AHM01470
augaaggccaucaucguccuccucauggucgucaccuccaacgccgaccgcaucugcaccggcaucaccuccuccaacuccccccacgucgucaagaccgccacccagggcgaggucaacgucaccggcgucaucccccucaccaccacccccaccaaguccuacuucgccaaccucaagggcaccaagacccgcggcaagcucugccccgacugccucaacugcaccgaccucgacgucgcccucggccgccccaugugcgucggcaccacccccuccgccaaggccuccauccuccacgagguccgccccgucaccuccggcugcuuccccaucaugcacgaccgcaccaagauccgccagcucgccaaccuccuccgcggcuacgagaacauccgccucuccacccagaacgucaucgacgccgagaaggcccccggcggccccuaccgccucggcaccuccggcuccugccccaacgccaccuccaaguccggcuucuucgccaccauggccugggccguccccaaggacaacaacaagaacgccaccaacccccucaccgucgagguccccuacaucugcaccgagggcgaggaccagaucgccgucuggggcuuccacuccgacaacaagacccagaugaagaaccucuacggcgacuccaacccccagaaguucaccuccuccgccaacggcgucaccacccacuacgucucccagaucggcggcuuccccgaccagaccgaggacggcggccucccccaguccggccgcaucgucgucgacuacaugaugcagaagcccggcaagaccggcaccaucgucuaccagcgcggcguccuccucccccagaaggucuggugcgccuccggccgcuccaaggucaucaagggcucccucccccucaucggcgaggccgacugccuccacgagaaguacggcggccucaacaaguccaagcccuacuacaccggcgagcacgccaaggccaucggcaacugccccaucugggucaagaccccccucaagcucgccaacggcaccaaguaccgcccccccgccaagcuccucaaggagcgcggcuucuucggcgccaucgccggcuuccucgagggcggcugggagggcaugaucgccggcuggcacggcuacaccucccacggcgcccacggcgucgccgucgccgccgaccucaaguccacccaggaggccgucaacaagaucaccaagaaccucaacucccucuccgagcucgaggucaagaaccuccagcgccucuccggcgccauggacgagcuccacaacgagauccucgagcucgacgagaaggucgacgaccuccgcgccgacaccaucuccucccagaucgagcucgccguccuccucuccaacgagggcaucaucaacuccgaggacgagcaccuccucgcccucgagcgcaagcucaagaagaugcucggccccuccgccgucgacaucggcaacggcugcuucgagaccaagcacaagugcaaccagaccugccucgaccgcaucgccgccggcaccuucaacgccggcgaguucucccuccccaccuucgacucccucaacaucaccgccgccucccucaacgacgacggccucgacaaccacaccauccuccucuacuacuccaccgccgccuccucccucgccgucacccucaugcucgccaucuucaucgucuacauggucucccgcgacaacgucuccugcuccaucugccucuga

SEQ ID NO: 124270 - RNA, 1755 nt, Artificial Sequence
  derived and/or modified CDS sequence (opt2) from hemagglutinin__InfluenzaB__AHM01481
augaaggccaucaucguccuccucauggucgucaccuccaacgccgaccgcaucugcaccggcaucaccuccuccaacuccccccacgucgucaagaccgccacccagggcgaggucaacgucaccggcgucaucccccucaccaccacccccaccaaguccuacuucgccaaccucaagggcaccaagacccgcggcaagcucugccccgacugccucaacugcaccgaccucgacgucgcccucggccgccccaugugcgucggcaccacccccuccgccaaggccuccauccuccacgagguccgccccgucaccuccggcugcuuccccaucaugcacgaccgcaccaagauccgccagcucgccaaccuccuccgcggcuacgagaacauccgccucuccacccagaacgucaucgacgccgagaaggcccccggcggccccuaccgccucggcaccuccggcuccugccccaacgccaccuccaaguccggcuucuucgccaccauggccugggccguccccaaggacaacaacaagaacgccaccaacccccucaccgucgagguccccuacaucugcgccgagggcgaggaccagaucaccgucuggggcuuccacuccgacaacaagacccagaugaagaaccucuacggcgacuccaacccccagaaguucaccuccuccgccaacggcgucaccacccacuacgucucccagaucggcggcuuccccgaccagaccgaggacggcggccucccccaguccggccgcaucgucgucgacuacaugaugcagaagcccggcaagaccggcaccaucgucuaccagcgcggcguccuccucccccagcgcgucuggugcgccuccggccgcuccaaggucaucaagggcucccucccccucaucggcgaggccgacugccuccacgagaaguacggcggccucaacaaguccaagcccuacuacaccggcgagcacgccaaggccaucggcaacugccccaucugggucaagaccccccucaagcucgccaacggcaccaaguaccgcccccccgccaagcuccucaaggagcgcggcuucuucggcgccaucgccggcuuccucgagggcggcugggagggcaugaucgccggcuggcacggcuacaccucccacggcgcccacggcgucgccgucgccgccgaccucaaguccacccaggaggccaucaacaagaucaccaagaaccucaacucccucuccgagcucgaggucaagaaccuccagcgccucuccggcgccauggacgagcuccacaacgagauccucgagcucgacgagaaggucgacgaccuccgcgccgacaccaucuccucccagaucgagcucgccguccuccucuccaacgagggcaucaucaacuccgaggacgagcaccuccucgcccucgagcgcaagcucaagaagaugcucggccccuccgccgucgacaucggcaacggcugcuucgagaccaagcacaagugcaaccagaccugccucgaccgcaucgccgccggcaccuucaacgccggcgaguucucccuccccaccuucgacucccucaacaucaccgccgccucccucaacgacgacggccucgacaaccacaccauccuccucuacuacuccaccgccgccuccucccucgccgucacccucaugcucgccaucuucaucgucuacauggucucccgcgacaacgucuccugcuccaucugccucuga

SEQ ID NO: 124271 - RNA, 1755 nt, Artificial Sequence; identical to SEQ ID NO: 122935
  derived and/or modified CDS sequence (opt2) from hemagglutinin__InfluenzaB__AHM01492

SEQ ID NO: 124272 - RNA, 1755 nt, Artificial Sequence; identical to SEQ ID NO: 122890
  derived and/or modified CDS sequence (opt2) from hemagglutinin__InfluenzaB__AHM01503

SEQ ID NO: 124273 - RNA, 1755 nt, Artificial Sequence; identical to SEQ ID NO: 122890
  derived and/or modified CDS sequence (opt2) from hemagglutinin__InfluenzaB__AHM01514

SEQ ID NO: 124274 - RNA, 1755 nt, Artificial Sequence
  derived and/or modified CDS sequence (opt2) from hemagglutinin__InfluenzaB__AHM01525
augaaggccaucaucguccuccucauggucgucaccuccaacgccgaccgcaucugcaccggcaucaccuccuccaacuccccccacgucgucaagaccgccacccagggcgaggucaacgucaccggcgucaucccccucaccaccacccccaccaaguccuacuucgccaaccucaagggcaccaagacccgcggcaagcucugccccgacugccucaacugcaccgaccucgacgucgcccucggccgccccaugugcgucggcaccacccccuccgccaaggccuccauccuccacgagguccgccccgucaccuccggcugcuuccccaucaugcacgaccgcaccaagauccgccagcucgccaaccuccuccgcggcuacgagaacauccgccucuccacccagaacgucaucgacgccgagaaggcccccggcggccccuaccgccucggcaccuccggcuccugccccaacgccaccuccaaguccggcuucuucgccaccauggccugggccguccccaaggacaacaacaagaacgccaccaacccccucaccgucgagguccccuacaucugcgccgagggcgaggaccagaucaccgucuggggcuuccacuccgacaacaagacccagaugaagaaccucuacggcgacuccaacccccagaaguucaccuccuccgccaacggcgucaccacccacuacgucucccagaucggcggcuuccccgaccagaccgaggacggcggccucccccaguccggccgcaucgucgucgacuacaugauccagaagcccggcaagaccggcaccaucgucuaccagcgcggcguccuccucccccagaaggucuggugcgccuccggccgcuccaaggucaucaagggcucccucccccucaucggcgaggccgacugccuccacgagaaguacggcggccucaacaaguccaagcccuacuacaccggcgagcacgccaaggccaucggcaacugccccaucugggucaagaccccccucaagcucgccaacggcaccaaguaccgcccccccgccaagcuccucaaggagcgcggcuucuucggcgccaucgccggcuuccucgagggcggcugggagggcaugaucgccggcuggcacggcuacaccucccacggcgcccacggcgucgccgucgccgccgaccucaaguccacccaggaggccaucaacaagaucaccaagaaccucaacucccucuccgagcucgaggucaagaaccuccagcgccucuccggcgccauggacgagcuccacaacgagauccucgagcucgacgagaaggucgacgaccuccgcgccgacaccaucuccucccagaucgagcucgccguccuccucuccaacgagggcaucaucaacuccgaggacgagcaccuccucgcccucgagcgcaagcucaagaagaugcucggccccuccgccgucgacaucggcaacggcugcuucgagaccaagcacaagugcaaccagaccugccucgaccgcaucgccgccggcaccuucaacgccggcgaguucucccuccccaccuucgacucccucaacaucaccgccgccucccucaacgacgacggccucgacaaccacaccauccuccucuacuacuccaccgccgccuccucccucgccgucacccucaugcucgccaucuucaucgucuacauggucucccgcgacaacgucuccugcuccaucugccucuga

SEQ ID NO: 124275 - RNA, 1755 nt, Artificial Sequence
  derived and/or modified CDS sequence (opt2) from hemagglutinin__InfluenzaB__AHM01536
augaaggccaucaucguccuccucauggucgucaccuccaacgccgaccgcaucugcaccggcaucaccuccuccaacuccccccacgucgucaagaccgccacccagggcgaggucaacgucaccggcgucaucccccucaccaccacccccaccaaguccuacuucgccaaccucaagggcaccaagacccgcggcaagcucugccccgacugccucaacugcaccgaccucgacgucgcccucggccgccccaugugcgucggcaccacccccuccgccaaggccuccauccuccacgagguccgccccgucaccuccggcugcuuccccaucaugcacgaccgcaccaagauccgccagcucgccaaccuccuccgcggcuacgagaacauccgccucuccacccagaacgucaucgacgccgagaaggcccccggcggccccuaccgccucggcaccuccggcuccugccccaacgccaccuccaaguccggcuucuucgccaccauggccugggccguccccaaggacaacaacaagaacgccaccaacccccucaccgucgagguccccuacaucugcgccgagggcgaggaccagaucaccgucuggggcuuccacuccgacaacaagacccagaugaagaaccucuacggcgacuccaacccccagaaguucaccuccuccgccaacggcgucaccacccacuacgucucccagaucggcggcuuccccgaccagaccgaggacggcggccucccccaguccggccgcaucgucgucgacuacaugaugcagaagcccggcaagaccggcaccaucgucuaccagcgcggcguccuccucccccagaaggucuggugcgccuccggccgcuccaaggucaucaagggcucccucccccucaucggcgaggccgacugccuccacgagaaguacggcggccucaacaaguccaagcccuacuacaccggcgagcacgccaaggccaucggcaacugccccaucugggucaagaccccccucaagcucgccaacggcaccaaguaccgcccccccgccaagcuccucaaggagcgcggcuucuucggcgccaucgccggcuuccucgagggcggcugggagggcaugaucgccggcuggcacggcuacaccucccacggcguccacggcgucgccgucgccgccgaccucaaguccacccaggaggccaucaacaagaucaccaagaaccucaacucccucuccgagcucgaggucaagaaccuccagcgccucuccggcgccauggacgagcuccacaacgagauccucgagcucgacgagaaggucgacgaccuccgcgccgacaccaucuccucccagaucgagcucgccguccuccucuccaacgagggcaucaucaacuccgaggacgagcaccuccucgcccucgagcgcaagcucaagaagaugcucggccccuccgccgucgacaucggcaacggcugcuucgagaccaagcacaagugcaaccagaccugccucgaccgcaucgccgccggcaccuucaacgccggcgaguucucccuccccaccuucgacucccucaacaucaccgccgccucccucaacgacgacggccucgacaaccacaccauccuccucuacuacuccaccgccgccuccucccucgccgucacccucaugcucgccaucuucaucgucuacauggucucccgcgacaacgucuccugcuccaucugccucuga

SEQ ID NO: 124276 - RNA, 1755 nt, Artificial Sequence; identical to SEQ ID NO: 122890
  derived and/or modified CDS sequence (opt2) from hemagglutinin__InfluenzaB__AHM01547

SEQ ID NO: 124277 - RNA, 1755 nt, Artificial Sequence; identical to SEQ ID NO: 122935
  derived and/or modified CDS sequence (opt2) from hemagglutinin__InfluenzaB__AHM01558

SEQ ID NO: 124278 - RNA, 1758 nt, Artificial Sequence; identical to SEQ ID NO: 122776
  derived and/or modified CDS sequence (opt2) from hemagglutinin__InfluenzaB__AHV83951

SEQ ID NO: 124279 - RNA, 1755 nt, Artificial Sequence; identical to SEQ ID NO: 124165
  derived and/or modified CDS sequence (opt2) from hemagglutinin__InfluenzaB__AHV83952

SEQ ID NO: 124280 - RNA, 1758 nt, Artificial Sequence; identical to SEQ ID NO: 122719
  derived and/or modified CDS sequence (opt2) from hemagglutinin__InfluenzaB__AHZ36697

SEQ ID NO: 124281 - RNA, 1758 nt, Artificial Sequence
  derived and/or modified CDS sequence (opt2) from hemagglutinin__InfluenzaB__AHZ36708
augaaggccaucaucguccuccucauggucgucaccuccaacgccgaccgcaucugcaccggcaucaccuccuccaacuccccccacgucgucaagaccgccacccagggcgaggucaacgucaccggcgucaucccccucaccaccacccccaccaagucccacuucgccaaccucaagggcaccgagacccgcggcaagcucugccccaagugccucaacugcaccgaccucgacgucgcccucggccgccccaagugcaccggcaagauccccuccgcccgcgucuccauccuccacgagguccgccccgucaccuccggcugcuuccccaucaugcacgaccgcaccaagauccgccagcuccccaaccuccuccgcggcuacgagcacauccgccucuccacccacaacgucaucaacgccgagaacgcccccggcggccccuacaagaucggcaccuccggcuccugccucaacgucaccaacggcaacggcuucuucgccaccauggccugggccguccccaagaacgacaagaacaagaccgccaccaacccccucaccaucgagguccccuacaucugcaccgagggcgaggaccagaucaccgucuggggcuuccacuccgacaacgagacccagauggccaagcucuacggcgacuccaagccccagaaguucaccuccuccgccaacggcgucaccacccacuacgucucccagaucggcggcuuccccaaccagaccgaggacggcggccucccccaguccggccgcaucgucgucgacuacaugguccagaaguccggcaagaccggcaccaucaccuaccagcgcggcauccuccucccccagaaggucuggugcaccuccggccgcuccaaggucaucaagggcucccucccccucaucggcgaggccgacugccuccacgagaaguacggcggccucaacaaguccaagcccuacuacaccggcgagcacgccaaggccaucggcaacugccccaucugggucaagaccccccucaagcucgccaacggcaccaaguaccgcccccccgccaagcuccucaaggagcgcggcuucuucggcgccaucgccggcuuccucgagggcggcugggagggcaugaucgccggcuggcacggcuacaccucccacggcgcccacggcgucgccgucgccgccgaccucaaguccacccaggaggccaucaacaagaucaccaagaaccucaacucccucuccgagcucgaggucaagaaccuccagcgccucuccggcgccauggacgagcuccacaacgagauccucgagcucgacgagaaggucgacgaccuccgcgccgacaccaucuccucccagaucgagcucgccguccuccucuccaacgagggcaucaucaacuccgaggacgagcaccuccucgcccucgagcgcaagcucaagaagaugcucggccccuccgccgucgagaucggcaacggcugcuucgagaccaagcacaagugcaaccagaccugccucgaccgcaucgccgccggcaccuucgacgccggcgaguucucccuccccaccuucgacucccucaacaucaccgccgccucccucaacgacgacggccucgacaaccacaccauccuccucuacuacuccaccgccgccuccucccucgccgucacccucaugaucgccaucuucgucgucuacauggucucccgcgacaacgucuccugcuccaucugccucuga

SEQ ID NO: 124282 - RNA, 1758 nt, Artificial Sequence
  derived and/or modified CDS sequence (opt2) from hemagglutinin__InfluenzaB__AHZ36719
augaaggccaucaucguccuccucauggucgucaccuccaacgccgaccgcaucugcaccggcaucaccuccuccaacuccccccacgucgucaagaccgccacccagggcgaggucaacgucaccggcgucaucccccucaccaccacccccaccaagucccacuucgccaaccucaagggcaccgagacccgcggcaagcucugccccaagugccucaacugcaccgaccucgacgucgcccucggccgccccaagugcaccggcaagauccccuccgcccgcgucuccauccuccacgagguccgccccgucaccuccggcugcuuccccaucaugcacgaccgcaccaagauccgccagcuccccaaccuccuccgcggcuacgagcacauccgccucuccacccacaacgucaucaacgccgagaacgcccccggcggccccuacaagaucggcaccuccggcuccugccccaacgucaccaacggcaacggcuucuucgccaccauggccugggccguccccaagaacgacaagaacaagaccgccaccaacccccucaccaucgagguccccuacgucugcaccgagggcgaggaccagaucaccgucuggggcuuccacuccgacaacgagacccagauggccaagcucuacggcgacuccaagccccagaaguucaccuccuccgccaacggcgucaccacccacuacgucucccagaucggcggcuuccccaaccagaccgaggacggcggccucccccaguccggccgcaucgucgucgacuacaugguccagaaguccggcaagaccggcaccaucaccuaccagcgcggcauccuccucccccagaaggucuggugcgccuccggccgcuccaaggucaucaagggcucccucccccucaucggcgaggccgacugccuccacgagaaguacggcggccucaacaaguccaagcccuacuacaccggcgagcacgccaaggccaucggcaacugccccaucugggucaagaccccccucaagcucgccaacggcaccaaguaccgcccccccgccaagcuccucaaggagcgcggcuucuucggcgccaucgccggcuuccucgagggcggcugggagggcaugaucgccggcuggcacggcuacaccucccacggcgcccacggcgucgccgucgccgccgaccucaaguccacccaggaggccaucaacaagaucaccaagaaccucaacucccucuccgagcucgaggucaagaaccuccagcgccucuccggcgccauggacgagcuccacaacgagauccucgagcucgacgagaaggucgacgaccuccgcgccgacaccaucuccucccagaucgagcucgccguccuccucuccaacgagggcaucaucaacuccgaggacgagcaccuccucgcccucgagcgcaagcucaagaagaugcucggccccuccgccgucgagaucggcaacggcugcuucgagaccaagcacaagugcaaccagaccugccucgaccgcaucgccgccggcaccuucgacgccggcgaguucucccuccccaccuucgacucccucaacaucaccgccgccucccucaacgacgacggccucgacaaccacaccauccuccucuacuacuccaccgccgccuccucccucgccgucacccucaugaucgccaucuucgucgucuacauggucucccgcgacaacgucuccugcuccaucugccucuga

SEQ ID NO: 124283 - RNA, 1758 nt, Artificial Sequence; identical to SEQ ID NO: 122719
  derived and/or modified CDS sequence (opt2) from hemagglutinin__InfluenzaB__AHZ36730

SEQ ID NO: 124284 - RNA, 1758 nt, Artificial Sequence; identical to SEQ ID NO: 122719
  derived and/or modified CDS sequence (opt2) from hemagglutinin__InfluenzaB__AHZ36752

SEQ ID NO: 124285 - RNA, 1758 nt, Artificial Sequence; identical to SEQ ID NO: 122681
  derived and/or modified CDS sequence (opt2) from hemagglutinin__InfluenzaB__AHZ36763

SEQ ID NO: 124286 - RNA, 1758 nt, Artificial Sequence
  derived and/or modified CDS sequence (opt2) from hemagglutinin__InfluenzaB__AHZ36774
augaaggccaucaucguccuccucauggucgucaccuccaacgccgaccgcaucugcaccggcaucaccuccuccaacuccccccacgucgucaagaccgccacccagggcgaggucaacgucaccggcgucaucccccucaccaccacccccaccaagucccacuucgccaaccucaagggcaccgagacccgcggcaagcucugccccaagugccccaacugcaccgaccucgacgucgcccucggccgccccaagugcaccggcaagauccccuccgcccgcgucuccauccuccacgagguccgccccgucaccuccggcugcuuccccaucaugcacgaccgcaccaagauccgccagcuccccaaccuccuccgcggcuacgagcacauccgccucuccacccacaacgucaucaacgccgaguccgcccccggcggccccuacaagaucggcaccuccggcuccugccccaacgucaccaacggcaacggcuucuucgccaccauggccugggccguccccaagaacgacaagaacaagaccgccaccgacccccucaccaucgagguccccuacaucugcaccgaggaggaggaccagaucaccgucuggggcuuccacuccgacaacgagacccagauggccaagcucuacggcgacuccaagccccagaaguucaccuccuccgccaacggcgucaccacccacuacgucucccagaucggcggcuuccccaaccagaccgaggacggcggccucccccaguccggccgcaucgucgucgacuacaugguccagaaguccggcaagaccggcaccaucaccuaccagcgcggcauccuccucccccagaaggucuggugcgccuccggccgcuccaaggucaucaagggcucccucccccucaucggcgaggccgacugccuccacgagaaguacggcggccucaacaaguccaagcccuacuacaccggcgagcacgccaaggccaucggcaacugccccaucugggucaagaccccccucaagcucgccaacggcaccaaguaccgcccccccgccaagcuccucaaggagcgcggcuucuucggcgccaucgccggcuuccucgagggcggcugggagggcaugaucgccggcuggcacggcuacaccucccacggcgcccacggcgucgccgucgccgccgaccucaaguccacccaggaggccaucaacaaggucaccaagaaccucaacucccucuccgagcucgaggucaagaaccuccagcgccucuccggcgccauggacgagcuccacaacgagauccucgagcucgacgagaaggucgacgaccuccgcgccgacaccaucuccucccagaucgagcucgccguccuccucuccaacgagggcaucaucaacuccgaggacgagcaccuccucgcccucgagcgcaagcucaagaagaugcucggccccuccgccgucgagaucggcaacggcugcuucgagaccaagcacaagugcaaccagaccugccucgaccgcaucgccgccggcaccuucgacgccggcgaguucucccuccccaccuucgacucccucaacaucaccgccgccucccucaacgacgacggccucgacaaccacaccauccuccucuacuacuccaccgccgccuccucccucgccgucacccucaugaucgccaucuucgucgucuacauggucucccgcgacaacgucuccugcuccaucugccucuga

SEQ ID NO: 124287 - RNA, 1758 nt, Artificial Sequence; identical to SEQ ID NO: 124195
  derived and/or modified CDS sequence (opt2) from hemagglutinin__InfluenzaB__AHZ36785

SEQ ID NO: 124288 - RNA, 1758 nt, Artificial Sequence; identical to SEQ ID NO: 124195
  derived and/or modified CDS sequence (opt2) from hemagglutinin__InfluenzaB__AHZ36796

SEQ ID NO: 124289 - RNA, 1755 nt, Artificial Sequence
  derived and/or modified CDS sequence (opt2) from hemagglutinin__InfluenzaB__AHZ36807
augaaggccaucaucguccuccucauggucgucaccuccaacgccgaccgcaucugcaccggcaucaccuccuccaacuccccccacgucgucaagaccgccacccagggcgaggucaacgucaccggcgucaucccccucaccaccacccccaccaaguccuacuucgccaaccucaagggcaccaagacccgcggcaagcucugccccgacugccucaacugcaccgaccucgacgucgcccucggccgccccaugugcgucggcaccacccccuccgccaaggccuccauccuccacgagguccgccccgucaccuccggcugcuuccccaucaugcacgaccgcaccaagauccgccagcucgccaaccuccuccgcggcuacgagaacauccgccucuccacccagaacgucaucgacgccgagaaggcccccggcggccccuaccgccucggcaccuccggcuccugccccaacgccaccuccaaguccggcuucuucgccaccauggccugggccguccccaaggacaacaacaagaacgccaccaacccccucaccgucgagguccccuacaucugcgccgagggcgaggaccagaucaccgucuggggcuuccacuccgacaacaagacccagaugaagaaccucuacggcgacuccaacccccagaaguucaccuccuccgccaacggcgucaccacccacuacgucucccagaucggcggcuuccccgaccagaccgaggacggcggccucccccaguccggccgcaucgucgucgacuacaugaugcagaagcccgagaagaccggcaccaucgucuaccagcgcggcguccuccucccccagaaggucuggugcgccuccggccgcuccaaggucaucaagggcucccucccccucaucggcgaggccgacugccuccacgagaaguacggcggccucaacaaguccaagcccuacuacaccggcgagcacgccaaggccaucggcaacugccccaucugggucaagaccccccucaagcucgccaacggcaccaaguaccgcccccccgccaagcuccucaaggagcgcggcuucuucggcgccaucgccggcuuccucgagggcggcugggagggcaugaucgccggcuggcacggcuacaccucccacggcgcccacggcgucgccgucgccgccgaccucaaguccacccaggaggccaucaacaagaucaccaagaaccucaacucccucuccgagcucgaggucaagaaccuccagcgccucuccggcgccauggacgagcuccacaacgagauccucgagcucgacgagaaggucgacgaccuccgcgccgacaccaucuccucccagaucgagcucgccguccuccucuccaacgagggcaucaucaacuccgaggacgagcaccuccucgcccucgagcgcaagcucaagaagaugcucggccccuccgccgucgacaucggcaacggcugcuucgagaccaagcacaagugcaaccagaccugccucgaccgcaucgccgccggcaccuucaacgccggcgaguucucccuccccaccuucgacucccucaacaucaccgccgccucccucaacgacgacggccucgacaaccacaccauccuccucuacuacuccaccgccgccuccucccucgccgucacccucaugcucgccaucuucaucgucuacauggucucccgcgacaacgucuccugcuccaucugccucuga

SEQ ID NO: 124290 - RNA, 1758 nt, Artificial Sequence; identical to SEQ ID NO: 122719
  derived and/or modified CDS sequence (opt2) from hemagglutinin__InfluenzaB__AHZ36818

SEQ ID NO: 124291 - RNA, 1758 nt, Artificial Sequence; identical to SEQ ID NO: 122681
  derived and/or modified CDS sequence (opt2) from hemagglutinin__InfluenzaB__AHZ36829

SEQ ID NO: 124292 - RNA, 1758 nt, Artificial Sequence; identical to SEQ ID NO: 122681
  derived and/or modified CDS sequence (opt2) from hemagglutinin__InfluenzaB__AHZ36840

SEQ ID NO: 124293 - RNA, 1758 nt, Artificial Sequence; identical to SEQ ID NO: 124195
  derived and/or modified CDS sequence (opt2) from hemagglutinin__InfluenzaB__AHZ36851

SEQ ID NO: 124294 - RNA, 1758 nt, Artificial Sequence; identical to SEQ ID NO: 122719
  derived and/or modified CDS sequence (opt2) from hemagglutinin__InfluenzaB__AHZ36862

SEQ ID NO: 124295 - RNA, 1758 nt, Artificial Sequence; identical to SEQ ID NO: 122681
  derived and/or modified CDS sequence (opt2) from hemagglutinin__InfluenzaB__AHZ36873

SEQ ID NO: 124296 - RNA, 1758 nt, Artificial Sequence
  derived and/or modified CDS sequence (opt2) from hemagglutinin__InfluenzaB__AHZ36884
augaaggccaucaucguccuccucauggucgucaccuccaacgccgaccgcaucugcaccggcaucaccuccuccaacuccccccacaucgucaagaccgccacccagggcgaggucaacgucaccggcgucaucccccucaccaccacccccaccaagucccacuucgccaaccucaagggcaccgagacccgcggcaagcucugccccaagugccucaacugcaccgaccucgacgucgcccucggccgccccaagugcaccggcaagauccccuccgcccgcgucuccauccuccacgagguccgccccgucaccuccggcugcuuccccaucaugcacgaccgcaccaagauccgccagcuccccaaccuccuccgcggcuacgagcacauccgccucuccacccacaacgucaucaacgccgagaacgcccccggcggccccuacaagaucggcaccuccggcuccugccccaacaucaccaacggcaacggcuucuucgagaccauggccugggccguccccaagaacgacaagaacaagaccgccaccaacccccucaccaucgagguccccuacaucugcaccgagggcgaggaccagaucaccgucuggggcuuccacuccgacaacgagacccagauggccaagcucuacggcgacuccaagccccagaaguucaccuccuccgccaacggcgucaccacccacuacgucucccagaucggcggcuuccccaaccagaccgaggacggcggccucccccaguccggccgcaucgucgucgacuacaugguccagaaguccggcaagaccggcaccaucaccuaccagcgcggcauccuccucccccagaaggucuggugcgccuccggccgcuccaaggucaucaagggcucccucccccucaucggcgaggccgacugccuccacgagaaguacggcggccucaacaaguccaagcccuacuacaccggcgagcacgccaaggccaucggcaacugccccaucugggucaagaccccccucaagcucgccaacggcaccaaguaccgcccccccgccaagcuccucaaggagcgcggcuucuucggcgccaucgccggcuuccucgagggcggcugggagggcaugaucgccggcuggcacggcuacaccucccacggcgcccacggcgucgccgucgccgccgaccucaaguccacccaggaggccaucaacaagaucaccaagaaccucaacucccucuccgagcucgaggucaagaaccuccagcgccucuccggcgccauggacgagcuccacaacgagauccucgagcucgacgagaaggucgacgaccuccgcgccgacaccaucuccucccagaucgagcucgccguccuccucuccaacgagggcaucaucaacuccgaggacgagcaccuccucgcccucgagcgcaagcucaagaagaugcucggccccuccgccgucgagaucggcaacggcugcuucgagaccaagcacaagugcaaccagaccugccucgaccgcaucgccgccggcaccuucgacgccggcgaguucucccuccccaccuucgacucccucaacaucaccgccgccucccucaacgacgacggccucgacaaccacaccauccuccucuacuacuccaccgccgccuccucccucgccgucacccucaugaucgccaucuucgucgucuacauggucucccgcgacaacgucuccugcuccaucugccucuga

SEQ ID NO: 124297 - RNA, 1758 nt, Artificial Sequence; identical to SEQ ID NO: 122719
  derived and/or modified CDS sequence (opt2) from hemagglutinin__InfluenzaB__AHZ36895

SEQ ID NO: 124298 - RNA, 1758 nt, Artificial Sequence; identical to SEQ ID NO: 122719
  derived and/or modified CDS sequence (opt2) from hemagglutinin__InfluenzaB__AHZ36906

SEQ ID NO: 124299 - RNA, 1758 nt, Artificial Sequence
  derived and/or modified CDS sequence (opt2) from hemagglutinin__InfluenzaB__AHZ36928
augaaggccaucaucguccuccucauggucgucaccuccaacgccgaccgcaucugcaccggcaucaccuccuccaacuccccccacgucgucaagaccgccacccagggcgaggucaacgucaccggcgucaucccccucaccaccacccccaccaagucccacuucgccaaccucaagggcaccaagacccgcggcaagcucugccccaagugccucaacugcaccgaccucgacgucgcccucggccgccccaagugcaccggcaagauccccuccgcccgcgucuccauccuccacgagguccgccccgucaccuccggcugcuuccccaucaugcacgaccgcaccaagauccgccagcuccccaaccuccuccgcggcuacgagcacauccgccucuccacccacaacgucaucaacgccgagaacgcccccggcggccccuacaagaucggcaccuccggcuccugccucaacgucaccaacggcaacggcuucuucgccaccauggccugggccguccccaagaacgacaagaacaagaccgccaccaacccccucaccaucgagguccccuacaucugcaccgagggcgaggaccagaucaccgucuggggcuuccacuccgacaacgagacccagauggccaagcucuacggcgacuccaagccccagaaguucaccuccuccgccaacggcgucaccacccacuacgucucccagaucggcggcuuccccaaccagaccgaggacggcggccucccccaguccggccgcaucgucgucgacuacaugguccagaaguccggcaagaccggcaccaucaccuaccagcgcggcauccuccucccccagaaggucuggugcgccuccggccgcuccaaggucaucaagggcucccucccccucaucggcgaggccgacugccuccacgagaaguacggcggccucaacaaguccaagcccuacuacaccggcgagcacgccaaggccaucggcaacugccccaucugggucaagaccccccucaagcucgccaacggcaccaaguaccgcccccccgccaagcuccucaaggagcgcggcuucuucggcgccaucgccggcuuccucgagggcggcugggagggcaugaucgccggcuggcacggcuacaccucccacggcgcccacggcgucgccgucgccgccgaccucaaguccacccaggaggccaucaacaagaucaccaagaaccucaacucccucuccgagcucgaggucaagaaccuccagcgccucuccggcgccauggacgagcuccacaacgagauccucgagcucgacgagaaggucgacgaccuccgcgccgacaccaucuccucccagaucgagcucgccguccuccucuccaacgagggcaucaucaacuccgaggacgagcaccuccucgcccucgagcgcaagcucaagaagaugcucggccccuccgccgucgagaucggcaacggcugcuucgagaccaagcacaagugcaaccagaccugccucgaccgcaucgccgccggcaccuucgacgccggcgaguucucccuccccaccuucgacucccucaacaucaccgccgccucccucaacgacgacggccucgacaaccacaccauccuccucuacuacuccaccgccgccuccucccucgccgucacccucaugaucgccaucuucgucgucuacauggucucccgcgacaacgucuccugcuccaucugccucuga

SEQ ID NO: 124300 - RNA, 1758 nt, Artificial Sequence; identical to SEQ ID NO: 124195
  derived and/or modified CDS sequence (opt2) from hemagglutinin__InfluenzaB__AHZ36939

SEQ ID NO: 124301 - RNA, 1758 nt, Artificial Sequence
  derived and/or modified CDS sequence (opt2) from hemagglutinin__InfluenzaB__AHZ36950
augaaggccaucaucguccuccucauggucgucaccuccaacgccgaccgcaucugcaccggcaucaccuccuccaacuccccccacaucgucaagaccgccacccagggcgaggucaacgucaccggcgucaucccccucaccaccacccccaccaagucccacuucgccaaccucaagggcaccgagacccgcggcaagcucugccccaagugccucaacugcaccgaccucgacgucgcccucggccgccccaagugcaccggcaagauccccuccgcccgcgucuccauccuccacgagguccgccccaucaccuccggcugcuuccccaucaugcacgaccgcaccaagauccgccagcuccccaaccuccuccgcggcuacgagcacauccgccucuccacccacaacgucaucaacgccgagaacgcccccggcggccccuacaagaucggcaccuccggcuccugccccaacaucaccaacggcaacggcuucuucgccaccauggccugggccguccccaagaacgacaagaacaagaccgccaccaacccccucaccaucgagguccccuacaucugcaccgagggcgaggaccagaucaccgucuggggcuuccacuccgacaacgagacccagauggccaagcucuacggcgacuccaagccccagaaguucaccuccuccgccaacggcgucaccacccacuacgucucccagaucggcggcuuccccaaccagaccgaggacggcggccucccccaguccggccgcaucgucgucgacuacaugguccagaaguccggcaagaccggcaccaucaccuaccagcgcggcauccuccucccccagaaggucuggugcgccuccggccgcuccaaggucaucaagggcucccucccccucaucggcgaggccgacugccuccacgagaaguacggcggccucaacaaguccaagcccuacuacaccggcgagcacgccaaggccaucggcaacugccccaucugggucaagaccccccucaagcucgccaacggcaccaaguaccgcccccccgccaagcuccucaaggagcgcggcuucuucggcgccaucgccggcuuccucgagggcggcugggagggcaugaucgccggcuggcacggcuacaccucccacggcgcccacggcgucgccgucgccgccgaccucaaguccacccaggaggccaucaacaagaucaccaagaaccucaacucccucuccgagcucgaggucaagaaccuccagcgccucuccggcgccauggacgagcuccacaacgagauccucgagcucgacgagaaggucgacgaccuccgcgccgacaccaucuccucccagaucgagcucgccguccuccucuccaacgagggcaucaucaacuccgaggacgagcaccuccucgcccucgagcgcaagcucaagaagaugcucggccccuccgccgucgagaucggcaacggcugcuucgagaccaagcacaagugcaaccagaccugccucgaccgcaucgccgccggcaccuucgacgccggcgaguucucccuccccaccuucgacucccucaacaucaccgccgccucccucaacgacgacggccucgacaaccacaccauccuccucuacuacuccaccgccgccuccucccucgccgucacccucaugaucgccaucuucgucgucuacauggucucccgcgacaacgucuccugcuccaucugccucuga

SEQ ID NO: 124302 - RNA, 1758 nt, Artificial Sequence
  derived and/or modified CDS sequence (opt2) from hemagglutinin__InfluenzaB__AHZ36961
augaaggccaucaucguccuccucauggucgucaccuccaacgccgaccgcaucugcaccggcaucaccuccuccaacuccccccacgucgucaagaccgccacccagggcgaggucaacgucaccggcgucaucccccucaccaccacccccaccaagucccacuucgccaaccucaagggcaccgagacccgcggcaagcucugccccaagugccucaacugcaccgaccucgacgucgcccucggccgccccaagugcaccggcaagauccccuccgcccgcgucuccauccuccacgagguccgccccgucaccuccggcugcuuccccaucaugcacgaccgcaccaagauccgccagcuccccaaccuccuccgcggcuacgagcacauccgccucuccacccacaacgucaucaacgccgagaacgcccccggcggccccuacaagaucggcaccuccggcuccugccccaacgucaccaacggcaacggcuucuucgccaccauggccugggccguccccaagaacgacaagaacaagaccgccaccaacccccucaccaucgagguccccuacaucugcaccgagggcgaggaccagaucaccgucuggggcuuccacuccgacaacgagacccagauggccaagcucuacggcgacuccaagccccagaaguucaccuccuccgccaacggcgucaccacccacuacgucucccagaucggcggcuuccccaaccagaccgaggacggcggccucccccaguccggccgcaucgucgucgacuacaugguccagaaguccggcaagaccggcaccaucaccuaccagcgcggcauccuccucccccagaaggucuggugcgccuccggcggcuccaaggucaucaagggcucccucccccucaucggcgaggccgacugccuccacgagaaguacggcggccucaacaaguccaagcccuacuacaccggcgagcacgccaaggccaucggcaacugccccaucugggucaagaccccccucaagcucgccaacggcaccaaguaccgcccccccgccaagcuccucaaggagcgcggcuucuucggcgccaucgccggcuuccucgagggcggcugggagggcaugaucgccggcuggcacggcuacaccucccacggcgcccacggcgucgccgucgccgccgaccucaaguccacccaggaggccaucaacaagaucaccaagaaccucaacucccucuccgagcucgaggucaagaaccuccagcgccucuccggcgccauggacgagcuccacaacgagauccucgagcucgacgagaaggucgacgaccuccgcgccgacaccaucuccucccagaucgagcucgccguccuccucuccaacgagggcaucaucaacuccgaggacgagcaccuccucgcccucgagcgcaagcucaagaagaugcucggccccuccgccgucgagaucggcaacggcugcuucgagaccaagcacaagugcaaccagaccugccucgaccgcaucgccgccggcaccuucgacgccggcgaguucucccuccccaccuucgacucccucaacaucaccgccgccucccucaacgacgacggccucgacaaccacaccauccuccucuacuacuccaccgccgccuccucccucgccgucacccucaugaucgccaucuucgucgucuacauggucucccgcgacaacgucuccugcuccaucugccucuga

SEQ ID NO: 124303 - RNA, 1758 nt, Artificial Sequence; identical to SEQ ID NO: 122719
  derived and/or modified CDS sequence (opt2) from hemagglutinin__InfluenzaB__AHZ36972

SEQ ID NO: 124304 - RNA, 1758 nt, Artificial Sequence
  derived and/or modified CDS sequence (opt2) from hemagglutinin__InfluenzaB__AHZ36983
augaaggccaucaucguccuccucauggucgucaccuccaacgccgaccgcaucugcaccggcaucaccuccuccaacuccccccacaucgucaagaccgccacccagggcgaggucaacgucaccggcgucaucccccucaccaccacccccaccaagucccacuucgccaaccucaagggcaccgagacccgcggcaagcucugccccaagugccucaacugcaccgaccucgacgucgcccucggccgccccaagugcaccggcaagauccccuccgcccgcgucuccauccuccacgagguccgccccgucaccuccggcugcuuccccaucaugcacgaccgcaccaagauccgccagcuccccaaccuccuccgcggcuacgagcacauccgccucuccacccacaacgucaucaacgccgagaacgcccccggcggccccuacaagaucggcaccuccggcuccugccccaacaucaccaacggcaacggcuucuucgccaccauggccugggccguccccaagaacgacaagaacaagaccgccaccaacccccucaccaucgagguccccuacaucugcaccgagggcgaggaccagaucaccgucuggggcuuccacuccgacaacgagacccagauggccaagcucuacggcgacuccaagccccagaaguucaccuccuccgccaacggcgucaccgcccacuacgucucccagaucggcggcuuccccaaccagaccgaggacggcggccucccccaguccggccgcaucgucgucgacuacaugguccagaaguccggcaagaccggcaccaucaccuaccagcgcggcauccuccucccccagaaggucuggugcgccuccggccgcuccaaggucaucaagggcucccucccccucaucggcgaggccgacugccuccacgagaaguacggcggccucaacaaguccaagcccuacuacaccggcgagcacgccaaggccaucggcaacugccccaucugggucaagaccccccucaagcucgccaacggcaccaaguaccgcccccccgccaagcuccucaaggagcgcggcuucuucggcgccaucgccggcuuccucgagggcggcugggagggcaugaucgccggcuggcacggcuacaccucccacggcgcccacggcgucgccgucgccgccgaccucaaguccacccaggaggccaucaacaagaucaccaagaaccucaacucccucuccgagcucgaggucaagaaccuccagcgccucuccggcgccauggacgagcuccacaacgagauccucgagcucgacgagaaggucgacgaccuccgcgccgacaccaucuccucccagaucgagcucgccguccuccucuccaacgagggcaucaucaacuccgaggacgagcaccuccucgcccucgagcgcaagcucaagaagaugcucggccccuccgccgucgagaucggcaacggcugcuucgagaccaagcacaagugcaaccagaccugccucgaccgcaucgccgccggcaccuucgacgccggcgaguucucccuccccaccuucgacucccucaacaucaccgccgccucccucaacgacgacggccucgacaaccacaccauccuccucuacuacuccaccgccgccuccucccucgccgucacccucaugaucgccaucuucgucgucuacauggucucccgcgacaacgucuccugcuccaucugccucuga

SEQ ID NO: 124305 - RNA, 1758 nt, Artificial Sequence
  derived and/or modified CDS sequence (opt2) from hemagglutinin__InfluenzaB__AHZ37005
augaaggccaucaucguccuccucauggucgucaccuccaacgccgaccgcaucugcaccggcaucaccuccuccaacuccccccacgucgucaagaccgccacccagggcgaggucaacgucaccggcgucaucccccucaccaccacccccaccaagucccacuucgccaaccucaagggcaccgagacccgcggcaagcucugccccaagugccccaacugcaccgaccucgacgucgcccucggccgccccaagugcaccggcaagauccccuccgcccgcgucuccauccuccacgagguccgccccgucaccuccggcugcuuccccaucaugcacgaccgcaccaagauccgccagcuccccaaccuccuccgcggcuacgagcacauccgccucuccacccacaacgucaucaacgccgaguccgcccccggcggccccuacaagaucggcaccuccggcuccugccccaacgucaccaacggcaacggcuucuucgccaccauggccugggccguccccaagaacgacaagaacaagaccgccaccgacccccucaccaucgagguccccuacaucugcaccgaggaggaggaccagaucaccgucuggggcuuccacuccgacaacgagacccagauggccaagcucuacggcgacuccaagccccagaaguucaccuccuccgccaacggcgucaccacccacuacgucucccagaucggcggcuuccccaaccagaccgaggacggcggccucccccaguccggccgcaucgucgucgacuacaugguccagaaguccggcaagaccggcaccaucaccuaccagcgcggcauccuccucccccagaaggucuggugcgccuccggccgcuccaaggucaucaagggcucccucccccucaucggcgaggccgacugccuccacgagaaguacggcggccucaacaaguccaagcccuacuacaccggcgagcacgccaaggccaucggcaacugccccaucugggucaagaccccccucaagcucgccaacggcaccaaguaccgcccccccgccaagcuccucaaggagcgcggcuucuucggcgccaucgccggcuuccucgagggcggcugggagggcaugaucgccggcuggcacggcuacaccucccacggcgcccacggcgucgccgucgccgccgaccucaaguccacccaggaggccaucaacaagaucaccaagaaccucaacucccucuccgagcucgaggucaagaaccuccagcgccucuccggcgccauggacgagcuccacaacgagauccucgagcucgacgagaaggucgacgaccuccgcgccgacaccaucuccucccagaucgagcucgccguccuccucuccaacgagggcaucaucaacuccgaggacgagcaccuccucgcccucgagcgcaagcucaagaagaugcucggccccuccgccgucgagaucggcaacggcugcuucgagaccaagcacaagugcaaccagaccugccucgaccgcaucgccgccggcaccuucgacgccggcgaguucucccuccccaccuucgacucccucaacaucaccgccgccucccucaacgacgacggccucgacaaccacaccauccuccucuacuacuccaccgccgccuccucccucgccgucacccucaugaucgccaucuucgucgucuacauggucucccgcgacaacgucuccugcuccaucugccucuga

SEQ ID NO: 124306 - RNA, 1758 nt, Artificial Sequence; identical to SEQ ID NO: 122681
  derived and/or modified CDS sequence (opt2) from hemagglutinin__InfluenzaB__AHZ37016

SEQ ID NO: 124307 - RNA, 1758 nt, Artificial Sequence
  derived and/or modified CDS sequence (opt2) from hemagglutinin__InfluenzaB__AHZ37027
augaaggccaucaucguccuccucauggucgucaccuccaacgccgaccgcaucugcaccggcaucaccuccuccaacuccccccacgucgucaagaccgccacccagggcgaggucaacgucaccggcgucaucccccucaccaccacccccaccaagucccacuucgccaaccucaagggcaccgagacccgcggcaagcucugccccaagugccucaacugcaccgaccucgacgucgcccucggccgccccaagugcaccggcaagauccccuccgcccgcgucuccaucauccacgagguccgccccgucaccuccggcugcuuccccaucaugcacgaccgcaccaagauccgccagcuccccaaccuccuccgcggcuacgagcacauccgccucuccacccacaacgucaucaacgccgagaacgcccccggcggccccuacaagaucggcaccuccggcuccugccucaacgucaccaacggcaacggcuucuucgccaccauggccugggccguccccaagaacgacaagaacaagaccgccaccaacccccucaccaucgagguccccuacaucugcaccgagggcgaggaccagaucaccgucuggggcuuccacuccgacaacgagacccagauggccaagcucuacggcgacuccaagccccagaaguucaccuccuccgccaacggcgucaccacccacuacgucucccagaucggcggcuuccccaaccagaccgaggacggcggccucccccaguccggccgcaucgucgucgacuacaugguccagaaguccggcaagaccggcaccaucaccuaccagcgcggcauccuccucccccagaaggucuggugcgccuccggccgcuccaaggucaucaagggcucccucccccucaucggcgaggccgacugccuccacgagaaguacggcggccucaacaaguccaagcccuacuacaccggcgagcacgccaaggccaucggcaacugccccaucugggucaagaccccccucaagcucgccaacggcaccaaguaccgcccccccgccaagcuccucaaggagcgcggcuucuucggcgccaucgccggcuuccucgagggcggcugggagggcaugaucgccggcuggcacggcuacaccucccacggcgcccacggcgucgccgucgccgccgaccucaaguccacccaggaggccaucaacaagaucaccaagaaccucaacucccucuccgagcucgaggucaagaaccuccagcgccucuccggcgccauggacgagcuccacaacgagauccucgagcucgacgagaaggucgacgaccuccgcgccgacaccaucuccucccagaucgagcucgccguccuccucuccaacgagggcaucaucaacuccgaggacgagcaccuccucgcccucgagcgcaagcucaagaagaugcucggccccuccgccgucgagaucggcaacggcugcuucgagaccaagcacaagugcaaccagaccugccucgaccgcaucgccgccggcaccuucgacgccggcgaguucucccuccccaccuucgacucccucaacaucaccgccgccucccucaacgacgacggccucgacaaccacaccauccuccucuacuacuccaccgccgccuccucccucgccgucacccucaugaucgccaucuucgucgucuacauggucucccgcgacaacgucuccugcuccaucugccucuga

SEQ ID NO: 124308 - RNA, 1758 nt, Artificial Sequence; identical to SEQ ID NO: 122681
  derived and/or modified CDS sequence (opt2) from hemagglutinin__InfluenzaB__AHZ37038

SEQ ID NO: 124309 - RNA, 1758 nt, Artificial Sequence; identical to SEQ ID NO: 124195
  derived and/or modified CDS sequence (opt2) from hemagglutinin__InfluenzaB__AHZ37049

SEQ ID NO: 124310 - RNA, 1758 nt, Artificial Sequence; identical to SEQ ID NO: 124195
  derived and/or modified CDS sequence (opt2) from hemagglutinin__InfluenzaB__AHZ37060

SEQ ID NO: 124311 - RNA, 1758 nt, Artificial Sequence; identical to SEQ ID NO: 122681
  derived and/or modified CDS sequence (opt2) from hemagglutinin__InfluenzaB__AHZ37071

SEQ ID NO: 124312 - RNA, 1758 nt, Artificial Sequence; identical to SEQ ID NO: 122681
  derived and/or modified CDS sequence (opt2) from hemagglutinin__InfluenzaB__AHZ37082

SEQ ID NO: 124313 - RNA, 1758 nt, Artificial Sequence; identical to SEQ ID NO: 124195
  derived and/or modified CDS sequence (opt2) from hemagglutinin__InfluenzaB__AHZ37093

SEQ ID NO: 124314 - RNA, 1758 nt, Artificial Sequence
  derived and/or modified CDS sequence (opt2) from hemagglutinin__InfluenzaB__AHZ37104
augaaggccaucaucguccuccucauggucgucaccuccaacgccgaccgcaucugcaccggcaucaccuccuccaacuccccccacgucgucaagaccgccacccagggcgaggucaacgucaccggcgucaucccccucaccaccacccccaccaagucccacuucgccaaccucaagggcaccgagacccgcggcaagcucugccccaagugccucaacugcaccgaccucgacgucgcccucggccgccccaagugcaccggcaagauccccuccgcccgcgucuccauccuccacgagguccgccccgucaccuccggcugcuuccccaucaugcacgaccgcaccaagauccgccagcuccccaaccuccuccgcggcuacgagcacauccgccucuccacccacaacgucaucaacgccgagaacgcccccggcggccccuacaagaucggcaccuccggcuccugccccaacgucaccaacggcaacggcuucuucgccaccauggccugggccguccccaagaacgacaagaacaagaccgccaccaacccccucaccaucgagguccccuacaucugcaccgagggcgaggaccagaucaccgucuggggcuuccacuccgacaacgagacccagauggccaagcucuacggcgacuccaagccccagaaguucaccuccuccgccaacggcgucaccacccacuacgucucccagaucggcggcuuccccaaccagaccgaggacggcggccucccccaguccggccgcaucgucgucgaccacaugguccagaaguccggcaagaccggcaccaucaccuaccagcgcggcauccuccucccccagaaggucuggugcgccuccggccgcuccaaggucaucaagggcucccucccccucaucggcgaggccgacugccuccacgagaaguacggcggccucaacaaguccaagcccuacuacaccggcgagcacgccaaggccaucggcaacugccccaucugggucaagaccccccucaagcucgccaacggcaccaaguaccgcccccccgccaagcuccucaaggagcgcggcuucuucggcgccaucgccggcuuccucgagggcggcugggagggcaugaucgccggcuggcacggcuacaccucccacggcgcccacggcgucgccgucgccgccgaccucaaguccacccaggaggccaucaacaagaucaccaagaaccucaacucccucuccgagcucgaggucaagaaccuccagcgccucuccggcgccauggacgagcuccacaacgagauccucgagcucgacgagaaggucgacgaccuccgcgccgacaccaucuccucccagaucgagcucgccguccuccucuccaacgagggcaucaucaacuccgaggacgagcaccuccucgcccucgagcgcaagcucaagaagaugcucggccccuccgccgucgagaucggcaacggcugcuucgagaccaagcacaagugcaaccagaccugccucgaccgcaucgccgccggcaccuucgacgccggcgaguucucccuccccaccuucgacucccucaacaucaccgccgccucccucaacgacgacggccucgacaaccacaccauccuccucuacuacuccaccgccgccuccucccucgccgucacccucaugaucgccaucuucgucgucuacauggucucccgcgacaacgucuccugcuccaucugccucuga

SEQ ID NO: 124315 - RNA, 1758 nt, Artificial Sequence
  derived and/or modified CDS sequence (opt2) from hemagglutinin__InfluenzaB__AHZ41770
augaaggccaucaucguccuccucauggucgucaccuccaacgccgaccgcaucugcaccggcaucaccuccuccaacuccccccacaucgucaagaccgccacccagggcgaggucaacgucaccggcgucaucccccucaccaccacccccaccaagucccacuucgccaaccucaagggcaccgagacccgcggcaagcucugccccaagugccucaacugcaccgaccucgacgucgcccucggccgccccaagugcaccggcaagauccccuccgcccgcgucuccauccuccacgagguccgccccgucaccuccggcugcuuccccaucaugcacgaccgcaccaagauccgccagcuccccaaccuccuccgcggcuacgagcacauccgccucuccacccacaacgucaucaacgccgagaacgcccccggcggccccuacaagaucggcaccuccggcuccugccccaacaucaccaacggcaacggcuucuucgccaccauggccugggccguccccaagaacgacaagaacaagaccgccaucaacccccucaccaucgagguccccuacaucugcaccgagggcgaggaccagaucaccgucuggggcuuccacuccgacaacgagacccagauggccaagcucuacggcgacuccgagccccagaaguucaccuccuccgccaacggcgucaccacccacuacgucucccagaucggcggcuuccccaaccagaccgaggacggcggccucccccaguccggccgcaucgucgucgacuacaugguccagaaguccggcaagaccggcaccaucaccuaccagcgcggcauccuccucccccagaaggucuggugcgccuccggccgcuccaaggucaucaagggcucccucccccucaucggcgaggccgacugccuccacgagaaguacggcggccucaacaaguccaagcccuacuacaccggcgagcacgccaaggccaucggcaacugccccaucugggucaagaccccccucaagcucgccaacggcaccaaguaccgcccccccgccaagcuccucaaggagcgcggcuucuucggcgccaucgccggcuuccucgagggcggcugggagggcaugaucgccggcuggcacggcuacaccucccacggcgcccacggcgucgccgucgccgccgaccucaaguccacccaggaggccaucaacaagaucaccaagaaccucaacucccucuccgagcucgaggucaagaaccuccagcgccucuccggcgccauggacgagcuccacaacgagauccucgagcucgacgagaaggucgacgaccuccgcgccgacaccaucuccucccagaucgagcucgccguccuccucuccaacgagggcaucaucaacuccgaggacgagcaccuccucgcccucgagcgcaagcucaagaagaugcucggccccuccgccgucgagaucggcaacggcugcuucgagaccaagcacaagugcaaccagaccugccucgaccgcaucgccgccggcaccuucgacgccggcgaguucucccuccccaccuucgacucccucaacaucaccgccgccucccucaacgacgacggccucgacaaccacaccauccuccucuacuacuccaccgccgccuccucccucgccgucacccucaugaucgccaucuucgucgucuacauggucucccgcgacaacgucuccugcuccaucugccucuga

SEQ ID NO: 124316 - RNA, 1758 nt, Artificial Sequence; identical to SEQ ID NO: 122719
  derived and/or modified CDS sequence (opt2) from hemagglutinin__InfluenzaB__AHZ41781

SEQ ID NO: 124317 - RNA, 1758 nt, Artificial Sequence; identical to SEQ ID NO: 122719
  derived and/or modified CDS sequence (opt2) from hemagglutinin__InfluenzaB__AHZ41792

SEQ ID NO: 124318 - RNA, 1758 nt, Artificial Sequence; identical to SEQ ID NO: 122719
  derived and/or modified CDS sequence (opt2) from hemagglutinin__InfluenzaB__AHZ41803

SEQ ID NO: 124319 - RNA, 1758 nt, Artificial Sequence
  derived and/or modified CDS sequence (opt2) from hemagglutinin__InfluenzaB__AHZ41814
augaaggccaucaucguccuccucauggucgucaccuccaacgccgaccgcaucugcaccggcaucaccuccuccaacuccccccacgucgucaagaccgccacccagggcgaggucaacgucaccggcgucaucccccucaccaccacccccaccaagucccacuucgccaaccucaagggcaccgagacccgcggcaagcucugccccaagugccccaacugcaccgaccucgacgucgcccucggccgccccaagugcaccggcaagauccccuccgcccgcgucuccauccuccacgagguccgccccgucaccuccggcugcuuccccaucaugcacgaccgcaccaagauccgccagcuccccaaccuccuccgcggcuacgagcacauccgccucuccacccacaacgucaucaacgccgagaacgcccccggcggccccuacaagaucggcaccuccggcuccugccccaacgucaccaacggcaacggcuucuucgccaccauggccugggccguccccaagaacgacaagaacaagaccgccaccaacccccucaccaucgagguccccuacaucugcaccgagggcgaggaccagaucaccgucuggggcuuccacuccgacaacgagacccagauggccaagcucuacggcgacuccaagccccagaaguucaccuccuccgccaacggcgucaccacccacuacgucucccagaucggcggcuuccccaaccagaccgaggacggcggccucccccaguccggccgcaucgucgucgacuacaugguccagaaguccggcaagaccggcaccgucaccuaccagcgcggcauccuccucccccagaaggucuggugcgccuccggccgcuccaaggucaucaagggcucccucccccucaucggcgaggccgacugccuccacgagaaguacggcggccucaacaaguccaagcccuacuacaccggcgagcacgccaaggccaucggcaacugccccaucugggucaagaccccccucaagcucgccaacggcaccaaguaccgcccccccgccaagcuccucaaggagcgcggcuucuucggcgccaucgccggcuuccucgagggcggcugggagggcaugaucgccggcuggcacggcuacaccucccacggcgcccacggcgucgccgucgccgccgaccucaaguccacccaggaggccaucaacaagaucaccaagaaccucaacucccucuccgagcucgaggucaagaaccuccagcgccucuccggcgccauggacgagcuccacaacgagauccucgagcucgacgagaaggucgacgaccuccgcgccgacaccaucuccucccagaucgagcucgccguccuccucuccaacgagggcaucaucaacuccgaggacgagcaccuccucgcccucgagcgcaagcucaagaagaugcucggccccuccgccgucgagaucggcaacggcugcuucgagaccaagcacaagugcaaccagaccugccucgaccgcaucgccgccggcaccuucgacgccggcgaguucucccuccccaccuucgacucccucaacaucaccgccgccucccucaacgacgacggccucgacaaccacaccauccuccucuacuacuccaccgccgccuccucccucgccgucacccucaugaucgccaucuucgucgucuacauggucucccgcgacaacgucuccugcuccaucugccucuga

SEQ ID NO: 124320 - RNA, 1758 nt, Artificial Sequence; identical to SEQ ID NO: 122719
  derived and/or modified CDS sequence (opt2) from hemagglutinin__InfluenzaB__AHZ41825

SEQ ID NO: 124321 - RNA, 1758 nt, Artificial Sequence; identical to SEQ ID NO: 122719
  derived and/or modified CDS sequence (opt2) from hemagglutinin__InfluenzaB__AHZ41836

SEQ ID NO: 124322 - RNA, 1758 nt, Artificial Sequence; identical to SEQ ID NO: 122719
  derived and/or modified CDS sequence (opt2) from hemagglutinin__InfluenzaB__AHZ41847

SEQ ID NO: 124323 - RNA, 1755 nt, Artificial Sequence; identical to SEQ ID NO: 124167
  derived and/or modified CDS sequence (opt2) from hemagglutinin__InfluenzaB__AHZ41858

SEQ ID NO: 124324 - RNA, 1758 nt, Artificial Sequence; identical to SEQ ID NO: 124192
  derived and/or modified CDS sequence (opt2) from hemagglutinin__InfluenzaB__AHZ41869

SEQ ID NO: 124325 - RNA, 1755 nt, Artificial Sequence
  derived and/or modified CDS sequence (opt2) from hemagglutinin__InfluenzaB__AIC73844
augaaggccaucaucguccuccucauggucgucaccuccaacgccgaccgcaucugcaccggcaucaccuccuccaacuccccccacgucgucaagaccgccacccagggcgaggucaacgucaccggcgucaucccccucaccaccacccccaccaaguccuacuucgccaaccucaagggcacccgcacccgcggcaagcucugccccgacugccucaacugcaccgaccucgacgucgcccucggccgccccaugugcgucggcaccacccccuccgccaaggccuccauccuccacgagguccgccccgucaccuccggcugcuuccccaucaugcacgaccgcaccaagauccgccagcuccccaaccuccuccgcggcuacgagaagauccgccucuccacccagaacgucaucgacgccgagaaggcccccggcggccccuaccgccucggcaccuccggcuccugccccaacgccaccuccaagaucggcuucuucgccaccauggccugggccguccccaaggacaacuacaagaacgccaccaacccccagaccgucgagguccccuacaucugcaccgagggcgaggaccagaucaccgucuggggcuuccacuccgacaacaagacccagaugaagucccucuacggcgacuccaacccccagaaguucaccuccuccgccaacggcgucaccacccacuacgucucccagaucggcgacuuccccgaccagaccgaggacggcggccucccccaguccggccgcaucgucgucgacuacaugaugcagaagcccggcaagaccggcaccaucgucuaccagcgcggcguccuccucccccagaaggucuggugcgccuccggccgcuccaaggucaucaagggcucccucccccucaucggcgaggccgacugccuccacgaggaguacggcggccucaacaaguccaagcccuacuacaccggcaagcacgccaaggccaucggcaacugccccaucugggucaagaccccccucaagcucgccaacggcaccaaguaccgcccccccgccaagcuccucaaggagcgcggcuucuucggcgccaucgccggcuuccucgagggcggcugggagggcaugaucgccggcuggcacggcuacaccucccacggcgcccacggcgucgccgucgccgccgaccucaaguccacccaggaggccaucaacaagaucaccaagaaccucaacucccucuccgagcucgaggucaagaaccuccagcgccucuccggcgccauggacgagcuccacaacgagauccucgagcucgacgagaaggucgacgaccuccgcgccgacaccaucuccucccagaucgagcucgccguccuccucuccaacgagggcaucaucaacuccgaggacgagcaccuccucgcccucgagcgcaagcucaagaagaugcucggccccuccgccgucgacaucggcaacggcugcuucgagaccaagcacaagugcaaccagaccugccucgaccgcaucgccgccggcaccuucaacgccggcgaguucucccuccccaccuucgacucccucaacaucaccgccgccucccucaacgacgacggccucgacaaccacaccauccuccucuacuacuccaccgccgccuccucccucgccgucacccucaugcucgccaucuucaucgucuacauggucucccgcgacaacgucuccugcuccaucugccucuga

SEQ ID NO: 124326 - RNA, 1758 nt, Artificial Sequence; identical to SEQ ID NO: 123901
  derived and/or modified CDS sequence (opt2) from hemagglutinin__InfluenzaB__AIC73845

SEQ ID NO: 124327 - RNA, 1758 nt, Artificial Sequence; identical to SEQ ID NO: 123901
  derived and/or modified CDS sequence (opt2) from hemagglutinin__InfluenzaB__AIC73846

SEQ ID NO: 124328 - RNA, 1758 nt, Artificial Sequence
  derived and/or modified CDS sequence (opt2) from hemagglutinin__InfluenzaB__AIC73847
augaaggccaucaucguccuccucauggucgucaccuccaacgccgaccgcaucugcaccggcaucaccuccuccaacuccccccacgucgucaagaccgccacccagggcgaggucaacgucaccggcgucaucccccucaccaccacccccaccaagucccacuucgccaaccucaagggcaccgagacccgcggcaagcucugccccaagugccucgacugcaccgaccucgacgucgcccucggccgccccaagugcaccggcaagauccccuccgcccgcgucuccauccuccacgagguccgccccgucaccuccggcugcuuccccaucaugcacgaccgcaccaagauccgccagcuccccaaccuccuccgcggcuacgagcacauccgccucuccacccacaacgucaucaacgccgaggacgcccccggcggccccuacaagaucggcaccuccggcuccugccccaacgucaccaacggcaacggcuucuucgccaccauggccugggccguccccaagaacgacaagaacaagaccgccaccaacccccucaccaucgagguccccuacaucugcaccgagggcgaggaccagaucaccgucuggggcuuccacuccgacaacgagacccagauggccaagcucuacggcgacuccaagccccagaaguucaccuccuccgccaacggcgucaccacccacuacgucucccagaucggcggcuuccccaaccagaccgaggacggcggccucccccaguccggccgcaucgucgucgacuacaugguccagaaguccggcaagaccggcaccaucaccuaccagcgcggcauccuccucccccagaaggucuggugcgccuccggccgcuccaaggucaucaagggcucccucccccucaucggcgaggccgacugccuccacgagaaguacggcggccucaacaaguccaagcccuacuacaccggcgagcacgccaaggccaucggcaacugccccaucugggucaagaccccccucaagcucgccaacggcaccaaguaccgcccccccgccaagcuccucaaggagcgcggcuucuucggcgccaucgccggcuuccucgagggcggcugggagggcaugaucgccggcuggcacggcuacaccucccacggcgcccacggcgucgccgucgccgccgaccucaaguccacccaggaggccaucaacaagaucaccaagaaccucaacucccucuccgagcucgaggucaagaaccuccagcgccucuccggcgccauggacgagcuccacaacgagauccucgagcucgacgagaaggucgacgaccuccgcgccgacaccaucuccucccagaucgagcucgccguccuccucuccaacgagggcaucaucaacuccgaggacgagcaccuccucgcccucgagcgcaagcucaagaagaugcucggccccuccgccgucgagaucggcaacggcugcuucgagaccaagcacaagugcaaccagaccugccucgaccgcaucgccgccggcaccuucgacgccggcgaguucucccuccccaccuucgacucccucaacaucaccgccgccucccucaacgacgacggccucgacaaccacaccauccuccucuacuacuccaccgccgccuccucccucgccgucacccucaugaucgccaucuucgucgucuacauggucucccgcgacaacgucuccugcuccaucugccucuga

SEQ ID NO: 124329 - RNA, 1758 nt, Artificial Sequence; identical to SEQ ID NO: 123901
  derived and/or modified CDS sequence (opt2) from hemagglutinin__InfluenzaB__AIC73848

SEQ ID NO: 124330 - RNA, 1755 nt, Artificial Sequence; identical to SEQ ID NO: 124165
  derived and/or modified CDS sequence (opt2) from hemagglutinin__InfluenzaB__AIC73849

SEQ ID NO: 124331 - RNA, 1758 nt, Artificial Sequence
  derived and/or modified CDS sequence (opt2) from hemagglutinin__InfluenzaB__AIC73850
augaaggccaucaucguccuccucauggucgccaccuccaacgccgaccgcaucugcaccggcaucaccuccuccaacuccccccacgucgucaagaccgccacccagggcgaggucaacgucaccggcgucaucccccucaccaccacccccaccaagucccacuucgccaaccucaagggcaccgagacccgcggcaagcucugccccaagugccucaacugcaccgaccucgacgucgcccucggccgccccaagugcaccggcaagauccccuccgcccgcgucuccauccuccacgagguccgccccgucaccuccggcugcuuccccaucaugcacgaccgcaccaagauccgccagcuccccaaccuccuccgcggcuacgagcacauccgccucuccacccacaacgucaucaacgccgaggacgcccccggcggccccuacaagaucggcaccuccggcuccugccccaacgucaccaacggcaacggcuucuucgccaccauggccugggccguccccaagaacgacaagaacaagaccgccaccaacccccucaccaucgagguccccuacaucugcaccgagggcgaggaccagaucaccgucuggggcuuccacuccgacaacgagacccagauggccaagcucuacggcgacuccaagccccagaaguucaccuccuccgccaacggcgucaccacccacuacgucucccagaucggcggcuuccccaaccagaccgaggacggcggccucccccaguccggccgcaucgucgucgacuacaugguccagaaguccggcaagaccggcaccaucaccuaccagcgcggcauccuccucccccagaaggucuggugcgccuccggccgcuccaaggucaucaagggcucccucccccucaucggcgaggccgacugccuccacgagaaguacggcggccucaacaaguccaagcccuacuacaccggcgagcacgccaaggccaucggcaacugccccaucugggucaagaccccccucaagcucgccaacggcaccaaguaccgcccccccgccaagcuccucaaggagcgcggcuucuucggcgccaucgccggcuuccucgagggcggcugggagggcaugaucgccggcuggcacggcuacaccucccacggcgcccacggcgucgccgucgccgccgaccucaaguccacccaggaggccaucaacaagaucaccaagaaccucaacucccucuccgagcucgaggucaagaaccuccagcgccucuccggcgccauggacgagcuccacaacgagauccucgagcucgacgagaaggucgacgaccuccgcgccgacaccaucuccucccagaucgagcucgccguccuccucuccaacgagggcaucaucaacuccgaggacgagcaccuccucgcccucgagcgcaagcucaagaagaugcucggccccuccgccgucgagaucggcaacggcugcuucgagaccaagcacaagugcaaccagaccugccucgaccgcaucgccgccggcaccuucgacgccggcgaguucucccuccccaccuucgacucccucaacaucaccgccgccucccucaacgacgacggccucgacaaccacaccauccuccucuacuacuccaccgccgccuccucccucgccgucacccucaugaucgccaucuucgucgucuacauggucucccgcgacaacgucuccugcuccaucugccucuga

SEQ ID NO: 124332 - RNA, 1758 nt, Artificial Sequence; identical to SEQ ID NO: 122923
  derived and/or modified CDS sequence (opt2) from hemagglutinin__InfluenzaB__AIC73851

SEQ ID NO: 124333 - RNA, 1755 nt, Artificial Sequence; identical to SEQ ID NO: 124325
  derived and/or modified CDS sequence (opt2) from hemagglutinin__InfluenzaB__AIC73852

SEQ ID NO: 124334 - RNA, 1755 nt, Artificial Sequence; identical to SEQ ID NO: 124325
  derived and/or modified CDS sequence (opt2) from hemagglutinin__InfluenzaB__AIC73853

SEQ ID NO: 124335 - RNA, 1758 nt, Artificial Sequence
  derived and/or modified CDS sequence (opt2) from hemagglutinin__InfluenzaB__AIC73855
augaaggccaucaucguccuccucauggucgucaccuccaacgccgaccgcaucugcaccggcaucaccuccuccaacuccccccacgucgucaagaccgccacccagggcgaggucaacgucaccggcgucaucccccucaccaccacccccaccaagucccacuucgccaaccucaagggcaccgagacccgcggcaagcucugccccaagugccucaacugcaccgaccucgacgucgcccucggccgccccaagugcaccggcaagauccccuccgcccgcgucuccauccuccacgagguccgccccgucaccuccggcugcuuccccaucaugcacgaccgcaccaagauccgccagcuccccaaccuccuccgcggcuacgagcacauccgccucuccacccacaacgucaucaacgccgagaacgcccccggcggccccuacaucaucggcaccuccggcuccugccccaacgucaccaacggcaacggcuucuucgccaccauggccugggccguccccaagaacgacaagaacaagaccgccaccaacccccucaccaucgagguccccuacaucugcaccgagggcgaggaccagaucaccgucuggggcuuccacuccgacaacgagacccagauggccaagcucuacggcgacuccaacccccagaaguucaccuccuccgccaacggcgucaccacccacuacgucucccagaucggcggcuuccccaaccagaccgaggacggcggccucccccaguccggccgcaucgucgucgacuacaugguccagaaguccggcaagaccggcaccaucaccuaccagcgcggcauccuccucccccagaaggucuggugcgccuccggccgcuccaaggucaucaagggcucccucccccucaucggcgaggccgacugccuccacgagaaguacggcggccucaacaaguccaagcccuacuacaccggcgagcacgccaaggccaucggcaacugccccaucugggucaagaccccccucaagcucgccaacggcaccaaguaccgcccccccgccaagcuccucaaggagcgcggcuucuucggcgccaucgccggcuuccucgagggcggcugggagggcaugaucgccggcuggcacggcuacaccucccacggcgcccacggcgucgccgucgccgccgaccucaaguccacccaggaggccaucaacaagaucaccaagaaccucaacucccucuccgagcucgaggucaagaaccuccagcgccucuccggcgccauggacgagcuccacaacgagauccucgagcucgacgagaaggucgacgaccuccgcgccgacaccaucuccucccagaucgagcucgccguccuccucuccaacgagggcaucaucaacuccgaggacgagcaccuccucgcccucgagcgcaagcucaagaagaugcucggccccuccgccgucgagaucggcaacggcugcuucgagaccaagcacaagugcaaccagaccugccucgaccgcaucgccgccggcaccuucgacgccggcgaguucucccuccccaccuucgacucccucaacaucaccgccgccucccucaacgacgacggccucgacaaccacaccauccuccucuacuacuccaccgccgccuccucccucgccgucacccucaugaucgccaucuucgucgucuacauggucucccgcgacaacgucuccugcuccaucugccucuga

SEQ ID NO: 124336 - RNA, 1758 nt, Artificial Sequence; identical to SEQ ID NO: 123901
  derived and/or modified CDS sequence (opt2) from hemagglutinin__InfluenzaB__AIC73856

SEQ ID NO: 124337 - RNA, 1758 nt, Artificial Sequence; identical to SEQ ID NO: 123901
  derived and/or modified CDS sequence (opt2) from hemagglutinin__InfluenzaB__AIC73857

SEQ ID NO: 124338 - RNA, 1758 nt, Artificial Sequence; identical to SEQ ID NO: 123901
  derived and/or modified CDS sequence (opt2) from hemagglutinin__InfluenzaB__AIC73859

SEQ ID NO: 124339 - RNA, 1758 nt, Artificial Sequence
  derived and/or modified CDS sequence (opt2) from hemagglutinin__InfluenzaB__AIC73860
augaaggccaucaucguccuccucauggucgucaccuccaacgccgaccgcaucugcaccggcaucaccuccuccaacuccccccacgucgucaagaccgccacccagggcgaggucaacgucaccggcgucaucccccucaccaccacccccaccaagucccacuucgccaaccucaagggcaccgagacccgcggcaagcucugccccaagugccucaacugcaccgaccucgacgucgcccucggccgccccaagugcaccggcaagauccccuccgcccgcgucuccauccuccacgagguccgccccgucaccuccggcugcuuccccaucaugcacgaccgcaccaagauccgccagcuccccaaccuccuccgcggcuacgagcacauccgccucuccacccacaacgucaucaacgccgagaacgcccccggcggccccuacaagaucggcaccuccggcuccugccccaacgucaccaacggcaacggcuucuucgccaccauggccugggccguccccaagaacgacaagaacaagaccgccaccaacccccucaccaucgagguccccuacaucugcaccgagggcgaggaccagaucaccgucuggggcuuccacuccgacaacgagacccagauggccaagcucuacggcgacuccaacccccagaaguucaccuccuccgccaacggcgucaccacccacuacgucucccagaucggcggcuuccccaaccagaccgaggacggcggccucccccaguccggccgcaucgucgucgacuacaugguccagaaguccggcaagaccggcaccaucaccuaccagcgcggcauccuccucccccagaaggucuggugcgccuccggccgcuccaaggucaucaagggcucccucccccucaucggcgaggccgacugccuccacgagaaguacggcggccucaacaaguccaagcccuacuacaccggcgagcacgccaaggccaucggcaacugccccaucugggucaagaccccccucaagcucgccaacggcaccaaguaccgcccccccgccaagcuccucaaggagcgcggcuucuucggcgccaucgccggcuuccucgagggcggcugggagggcaugaucgccggcuggcacggcuacaccucccacggcgcccacggcgucgccgucgccgccgaccucaaguccacccaggaggccaucaacaagaucaccaagaaccucaacucccucuccgagcucgaggucaagaaccuccagcgccucuccggcgccauggacgagcuccacaacgagauccucgagcucgacgagaaggucgacgaccuccgcgccgacaccauguccucccagaucgagcucgccguccuccucuccaacgagggcaucaucaacuccgaggacgagcaccuccucgcccucgagcgcaagcucaagaagaugcucggccccuccgccgucgagaucggcaacggcugcuucgagaccaagcacaagugcaaccagaccugccucgaccgcaucgccgccggcaccuucgacgccggcgaguucucccuccccaccuucgacucccucaacaucaccgccgccucccucaacgacgacggccucgacaaccacaccauccuccucuacuacuccaccgccgccuccucccucgccgucacccucaugaucgccaucuucgucgucuacauggucucccgcgacaacgucuccugcuccaucugccucuga

SEQ ID NO: 124340 - RNA, 1758 nt, Artificial Sequence
  derived and/or modified CDS sequence (opt2) from hemagglutinin__InfluenzaB__AIC73861
augaaggccaucaucguccuccucauggucgucaccuccaacgccgaccgcaucugcaccggcaucaccuccuccaacuccccccacgucgucaagaccgccacccagggcgaggucaacgucaccggcgucaucccccucaccaccacccccaccaagucccacuucgccaaccucaagggcaccgagacccgcggcaagcucugccccaagugccucaacugcaccgaccucgacgucgcccucggccgccccaagugcaccggcaagauccccuccgcccgcgucuccauccuccacgagguccgccccgucaccuccggcugcuuccccaucaugcacgaccgcaccaagauccgccagcuccccaaccuccuccgcggcuacgagcacauccgccucuccacccacaacgucaucaacaccgagaacgcccccggcggccccuacaagaucggcaccuccggcuccugccccaacgucaccaacggcaacggcuucuucgccaccauggccugggccguccccaagaacgacaagaacaagaccgccaccaacccccucaccaucgagguccccuacaucugcaccgagggcgaggaccagaucaccgucuggggcuuccacuccgacaacgagacccagauggccaagcucuacggcgacuccaacccccagaaguucaccuccuccgccaacggcgucaccauccacuacgucucccagaucggcggcuuccccaaccagaccgaggacggcggccucccccaguccggccgcaucgucgucgacuacaugguccagaaguccggcaagaccggcaccaucaccuaccagcgcggcauccuccucccccagaaggucuggugcgccuccggccgcuccaaggucaucaagggcucccucccccucaucggcgaggccgacugccuccacgagaaguacggcggccucaacaaguccaagcccuacuacaccggcgagcacgccaaggccaucggcaacugccccaucugggucaagaccccccucaagcucgccaacggcaccaaguaccgcccccccgccaagcuccucaaggagcgcggcuucuucggcgccaucgccggcuuccucgagggcggcugggagggcaugaucgccggcuggcacggcuacaccucccacggcgcccacggcgucgccgucgccgccgaccucaaguccacccaggaggccaucaacaagaucaccaagaaccucaacucccucuccgagcucgaggucaagaaccuccagcgccucuccggcgccauggacgagcuccacaacgagauccucgagcucgacgagaaggucgacgaccuccgcgccgacaccaucuccucccagaucgagcucgccguccuccucuccaacgagggcaucaucaacuccgaggacgagcaccuccucgcccucgagcgcaagcucaagaagaugcucggccccuccgccgucgagaucggcaacggcugcuucgagaccaagcacaagugcaaccagaccugccucgaccgcaucgccgccggcaccuucgacgccggcgaguucucccuccccaccuucgacucccucaacaucaccgccgccucccucaacgacgacggccucgacaaccacaccauccuccucuacuacuccaccgccgccuccucccucgccgucacccucaugaucgccaucuucgucgucuacauggucucccgcgacaacgucuccugcuccaucugccucuga

SEQ ID NO: 124341 - RNA, 1758 nt, Artificial Sequence; identical to SEQ ID NO: 124339
  derived and/or modified CDS sequence (opt2) from hemagglutinin__InfluenzaB__AIC73862

SEQ ID NO: 124342 - RNA, 1758 nt, Artificial Sequence; identical to SEQ ID NO: 124339
  derived and/or modified CDS sequence (opt2) from hemagglutinin__InfluenzaB__AIC73863

SEQ ID NO: 124343 - RNA, 1758 nt, Artificial Sequence; identical to SEQ ID NO: 124339
  derived and/or modified CDS sequence (opt2) from hemagglutinin__InfluenzaB__AIC73864

SEQ ID NO: 124344 - RNA, 1755 nt, Artificial Sequence
  derived and/or modified CDS sequence (opt2) from hemagglutinin__InfluenzaB__AIC73865
augaaggccaucaucguccuccucauggucgucaccuccaacgccgaccgcaucugcaccggcaucaccuccuccaacuccccccacgucgucaagaccgccacccagggcgaggucaacgucaccggcgucaucccccucaccaccacccccaccaaguccuacuucgccaaccucaagggcaccaagacccgcggcaagcucugccccgacugccucaacugcaccgaccucgacgucgcccucggccgccccaugugcgucggcaccacccccuccgccaaggccuccauccuccacgagguccgccccgucaccuccggcugcuuccccaucaugcacgaccgcaccaagauccgccagcucgccaaccuccuccgcggcuacgagaacauccgccucuccacccagaacgucaucgacgccgagaaggcccccggcggccccuaccgccucggcaccuccggcuccugccccaacgccaccuccaaguccggcuucuucgccaccauggccugggccguccccaaggacaacaacaagaacgccaccaacccccucaccgucgagguccccuacaucugcgccgagggcgaggaccagaucaccgucuggggcuuccacuccgacaacaagacccagaugaagaaccucuacggcgacuccaacccccagaaguucaccuccuccgccaacggcgucaccacccacuacgucucccagaucggcggcuuccccgaccagcgcgaggacggcggccucccccaguccggccgcaucgucgucgacuacaugaugcagaagcccggcaagaccggcaccaucgucuaccagcgcggcguccuccucccccagaaggucuggugcgccuccggccgcuccaaggucaucaagggcucccucccccucaucggcgaggccgacugccuccacgagaaguacggcggccucaacaaguccaagcccuacuacaccggcgagcacgccaaggccaucggcaacugccccaucugggucaagaccccccucaagcucgccaacggcaccaaguaccgcccccccgccaagcuccucaaggagcgcggcuucuucggcgccaucgccggcuuccucgagggcggcugggagggcaugaucgccggcuggcacggcuacaccucccacggcgcccacggcgucgccgucgccgccgaccucaaguccacccaggaggccaucaacaagaucaccaagaaccucaacucccucuccgagcucgaggucaagaaccuccagcgccucuccggcgccauggacgagcuccacaacgagauccucgagcucgacgagaaggucgacgaccuccgcgccgacaccaucuccucccagaucgagcucgccguccuccucuccaacgagggcaucaucaacuccgaggacgagcaccuccucgcccucgagcgcaagcucaagaagaugcucggccccuccgccgucgacaucggcaacggcugcuucgagaccaagcacaagugcaaccagaccugccucgaccgcaucgccgccggcaccuucaacgccggcgaguucucccuccccaccuucgacucccucaacaucaccgccgccucccucaacgacgacggccucgacaaccacaccauccuccucuacuacuccaccgccgccuccucccucgccgucacccucaugcucgccaucuucaucgucuacauggucucccgcgacaacgucuccugcuccaucugccucuga

SEQ ID NO: 124345 - RNA, 1758 nt, Artificial Sequence
  derived and/or modified CDS sequence (opt2) from hemagglutinin__InfluenzaB__AIC73867
augaaggccaucaucguccuccucauggucgucaccuccaacgccgaccgcaucugcaccggcaucaccuccuccaacuccccccacgucgucaagaccgccacccagggcgaggucaacgucaccggcgucaucccccucaccaccacccccaccaagucccacuucgccaaccucaagggcaccgagacccgcggcaagcucugccccaagugccucaacugcaccgaccucgacgucgcccucggccgccccaagugcaccggcaagauccccuccgcccgcgucuccauccuccacgagguccgccccgucaccuccggcugcuuccccaucaugcacgaccgcaccaagauccgccagcuccccaaccuccuccgcggcuacgagcacauccgccucuccacccacaacgucaucgacgccgagaacgcccccggcggccccuacaagaucggcaccuccggcuccugccccaacgucaccaacggcaacggcuucuucgccaccauggccugggccguccccaagaacgacaagaacaagaccgccaccaacccccucaccaucgagguccccuacaucugcaccgagggcgaggaccagaucaccgucuggggcuuccacuccgacaacgagacccagauggccaagcucuacggcgacuccaacccccagaaguucaccuccuccgccaacggcgucaccacccacuacgucucccagaucggcggcuuccccaaccagaccgaggacggcggccucccccaguccggccgcaucgucgucgacuacaugguccagaaguccggcaagaccggcaccaucaccuaccagcgcggcauccuccucccccagaaggucuggugcgccuccggccgcuccaaggucaucaagggcucccucccccucaucggcgaggccgacugccuccacgagaaguacggcggccucaacaaguccaagcccuacuacaccggcgagcacgccaaggccaucggcaacugccccaucugggucaagaccccccucaagcucgccaacggcaccaaguaccgcccccccgccaagcuccucaaggagcgcggcuucuucggcgccaucgccggcuuccucgagggcggcugggagggcaugaucgccggcuggcacggcuacaccucccacggcgcccacggcgucgccgucgccgccgaccucaaguccacccaggaggccaucaacaagaucaccaagaaccucaacucccucuccgagcucgaggucaagaaccuccagcgccucuccggcgccauggacgagcuccacaacgagauccucgagcucgacgagaaggucgacgaccuccgcgccgacaccaucuccucccagaucgagcucgccguccuccucuccaacgagggcaucaucaacuccgaggacgagcaccuccucgcccucgagcgcaagcucaagaagaugcucggccccuccgccgucgagaucggcaacggcugcuucgagaccaagcacaagugcaaccagaccugccucgaccgcaucgccgccggcaccuucgacgccggcgaguucucccuccccaccuucgacucccucaacaucaccgccgccucccucaacgacgacggccucgacaaccacaccauccuccucuacuacuccaccgccgccuccucccucgccgucacccucaugaucgccaucuucgucgucuacauggucucccgcgacaacgucuccugcuccaucugccucuga

SEQ ID NO: 124346 - RNA, 1758 nt, Artificial Sequence; identical to SEQ ID NO: 122923
  derived and/or modified CDS sequence (opt2) from hemagglutinin__InfluenzaB__AIC73868

SEQ ID NO: 124347 - RNA, 1758 nt, Artificial Sequence; identical to SEQ ID NO: 124339
  derived and/or modified CDS sequence (opt2) from hemagglutinin__InfluenzaB__AIC73869

SEQ ID NO: 124348 - RNA, 1758 nt, Artificial Sequence; identical to SEQ ID NO: 124339
  derived and/or modified CDS sequence (opt2) from hemagglutinin__InfluenzaB__AIC73870

SEQ ID NO: 124349 - RNA, 1758 nt, Artificial Sequence; identical to SEQ ID NO: 123901
  derived and/or modified CDS sequence (opt2) from hemagglutinin__InfluenzaB__AIC73871

SEQ ID NO: 124350 - RNA, 1755 nt, Artificial Sequence; identical to SEQ ID NO: 124325
  derived and/or modified CDS sequence (opt2) from hemagglutinin__InfluenzaB__AIC73872

SEQ ID NO: 124351 - RNA, 1755 nt, Artificial Sequence; identical to SEQ ID NO: 124165
  derived and/or modified CDS sequence (opt2) from hemagglutinin__InfluenzaB__AIC73873

SEQ ID NO: 124352 - RNA, 1755 nt, Artificial Sequence; identical to SEQ ID NO: 124325
  derived and/or modified CDS sequence (opt2) from hemagglutinin__InfluenzaB__AIC73874

SEQ ID NO: 124353 - RNA, 1755 nt, Artificial Sequence; identical to SEQ ID NO: 124344
  derived and/or modified CDS sequence (opt2) from hemagglutinin__InfluenzaB__AIC73875

SEQ ID NO: 124354 - RNA, 1755 nt, Artificial Sequence
  derived and/or modified CDS sequence (opt2) from hemagglutinin__InfluenzaB__AIC73876
augaaggccaucaucguccuccucauggucgucaccuccaacgccgaccgcaucugcaccggcaucaccuccuccaacuccccccacgucgucaagaccgccacccagggcgaggucaacgucaccggcgucaucccccucaccaccacccccaccaaguccuacuucgccaaccucaagggcaccaagacccgcggcaagcucugccccgacugccucaacugcaccgaccucgacgucgcccucggccgccccaugugcgucggcaccacccccuccgccaaggccuccauccuccacgagguccgccccgucaccuccggcugcuuccccaucaugcacgaccgcaccaagauccgccagcucgccaaccuccuccgcggcuacgagaacauccgccucuccacccagaacgucaucgacgccgagaaggcccccggcggccccuaccgccucggcaccuccggcuccugccccaacgccaccuccaaguccggcuucuucgccaccauggccugggccguccccaaggacaacaacaagaacgccaccaacccccucaccgucgagguccccuacaucugcgccgagggcgaggaccagaucaccgucuggggcuuccacuccgacaacaagacccagaugaagaaccucuacggcgacuccaacccccagaaguucaccuccuccgccaacggcgucaccacccacuacgucucccagaucggcggcuuccccgaccagcgcgaggacggcggccucccccaguccggccgcaucgucgucgacuacaugaugcagaagcccggcaagaccggcaccaucgucuaccagcgcggcguccuccucccccagaaggucuggugcgccuccggccgcuccaaggucaucaagggcucccucccccucaucggcgaggccgacugccuccacgagaaguacggcggccucaacaaguccaagcccuacuacaccggcgagcacgccaaggccaucggcaacugccccaucugggucaagaccccccucaagcucgccaacggcaccaaguaccgcccccccgccaagcuccucaaggagcgcggcuucuucggcgccaucgccggcuuccucgagggcggcugggagggcaugaucgccggcuggcacggcuacaccucccacggcgcccacggcgucgccgucgccgccgaccucaaguccacccaggaggccaucaacaagaucaccaagaaccucaacucccucuccgagcucgaggucaagaaccuccagcgccucuccggcgccauggacgagcuccacaacgagauccucgagcucgacgagaaggucgacgaccuccgcgccgacaccaucuccucccagaucgagcucgccguccuccucuccaacgagggcaucaucaacuccgaggacgagcaccuccucgcccucgagcgcaagcucaagaagaugcucggccccuccgccgucgacaucggcaacggcugcuucgagaccaagcacaagugcaaccagaccugccucaaccgcaucgccgccggcaccuucaacgccggcgaguucucccuccccaccuucgacucccucaacaucaccgccgccucccucaacgacgacggccucgacaaccacaccauccuccucuacuacuccaccgccgccuccucccucgccgucacccucaugcucgccaucuucaucgucuacauggucucccgcgacaacgucuccugcuccaucugccucuga

SEQ ID NO: 124355 - RNA, 1755 nt, Artificial Sequence; identical to SEQ ID NO: 124344
  derived and/or modified CDS sequence (opt2) from hemagglutinin__InfluenzaB__AIC73877

SEQ ID NO: 124356 - RNA, 1755 nt, Artificial Sequence; identical to SEQ ID NO: 124344
  derived and/or modified CDS sequence (opt2) from hemagglutinin__InfluenzaB__AIC73878

SEQ ID NO: 124357 - RNA, 1755 nt, Artificial Sequence; identical to SEQ ID NO: 124344
  derived and/or modified CDS sequence (opt2) from hemagglutinin__InfluenzaB__AIC73879

SEQ ID NO: 124358 - RNA, 1755 nt, Artificial Sequence; identical to SEQ ID NO: 124344
  derived and/or modified CDS sequence (opt2) from hemagglutinin__InfluenzaB__AIC73880

SEQ ID NO: 124359 - RNA, 1755 nt, Artificial Sequence; identical to SEQ ID NO: 124344
  derived and/or modified CDS sequence (opt2) from hemagglutinin__InfluenzaB__AIC73881

SEQ ID NO: 124360 - RNA, 1755 nt, Artificial Sequence; identical to SEQ ID NO: 124344
  derived and/or modified CDS sequence (opt2) from hemagglutinin__InfluenzaB__AIC73882

SEQ ID NO: 124361 - RNA, 1755 nt, Artificial Sequence; identical to SEQ ID NO: 124165
  derived and/or modified CDS sequence (opt2) from hemagglutinin__InfluenzaB__AIC73883

SEQ ID NO: 124362 - RNA, 1755 nt, Artificial Sequence; identical to SEQ ID NO: 124344
  derived and/or modified CDS sequence (opt2) from hemagglutinin__InfluenzaB__AIC73884

SEQ ID NO: 124363 - RNA, 1758 nt, Artificial Sequence
  derived and/or modified CDS sequence (opt2) from hemagglutinin__InfluenzaB__AIC73885
auggaggccaucaucguccuccucauggucgucaccuccaacgccgaccgcaucugcaccggcaucaccuccuccaacuccccccacgucgucaagaccgccacccagggcgaggucaacgucaccggcgucaucccccucaccaccacccccaccaagucccacuucgccaaccucaagggcaccgagacccgcggcaagcucugccccaagugccucaacugcaccgaccucgacgucgcccucggccgccccaagugcaccggcaagauccccuccgcccgcgucuccauccuccacgagguccgccccgucaccuccggcugcuuccccaucaugcacgaccgcaccaagauccgccagcuccccaaccuccuccgcggcuacgagcacauccgccucuccacccacaacgucaucaacgccgaggacgcccccggcggccccuacaagaucggcaccuccggcuccugccccaacgucaccaacggcaacggcuucuucgccaccauggccugggccguccccaagaacgacaagaacaagaccgccaccaacccccucaccaucgagguccccuacaucugcaccgagggcgaggaccagaucaccgucuggggcuuccacuccgacaacgagacccagauggccaagcucuacggcgacuccaagccccagaaguucaccuccuccgccaacggcgucaccacccacuacgucucccagaucggcggcuuccccaaccagaccgaggacggcggccucccccaguccggccgcaucgucgucgacuacaugguccagaaguccggcaagaccggcaccaucaccuaccagcgcggcauccuccucccccagaaggucuggugcgccuccggccgcuccaaggucaucaagggcucccucccccucaucggcgaggccgacugccuccacgagaaguacggcggccucaacaaguccaagcccuacuacaccggcgagcacgccaaggccaucggcaacugccccaucugggucaagaccccccucaagcucgccaacggcaccaaguaccgcccccccgccaagcuccucaaggagcgcggcuucuucggcgccaucgccggcuuccucgagggcggcugggagggcaugaucgccggcuggcacggcuacaccucccacggcgcccacggcgucgccgucgccgccgaccucaaguccacccaggaggccaucaacaagaucaccaagaaccucaacucccucuccgagcucgaggucaagaaccuccagcgccucuccggcgccauggacgagcuccacaacgagauccucgagcucgacgagaaggucgacgaccuccgcgccgacaccaucuccucccagaucgagcucgccguccuccucuccaacgagggcaucaucaacuccgaggacgagcaccuccucgcccucgagcgcaagcucaagaagaugcucggccccuccgccgucgagaucggcaacggcugcuucgagaccaagcacaagugcaaccagaccugccucgaccgcaucgccgccggcaccuucgacgccggcgaguucucccuccccaccuucgacucccucaacaucaccgccgccucccucaacgacgacggccucgacaaccacaccauccuccucuacuacuccaccgccgccuccucccucgccgucacccucaugaucgccaucuucgucgucuacauggucucccgcgacaacgucuccugcuccaucugccucuga

SEQ ID NO: 124364 - RNA, 1758 nt, Artificial Sequence; identical to SEQ ID NO: 123901
  derived and/or modified CDS sequence (opt2) from hemagglutinin__InfluenzaB__AIC73886

SEQ ID NO: 124365 - RNA, 1758 nt, Artificial Sequence; identical to SEQ ID NO: 124345
  derived and/or modified CDS sequence (opt2) from hemagglutinin__InfluenzaB__AIC73887

SEQ ID NO: 124366 - RNA, 1755 nt, Artificial Sequence; identical to SEQ ID NO: 124165
  derived and/or modified CDS sequence (opt2) from hemagglutinin__InfluenzaB__AIC73888

SEQ ID NO: 124367 - RNA, 1755 nt, Artificial Sequence; identical to SEQ ID NO: 124325
  derived and/or modified CDS sequence (opt2) from hemagglutinin__InfluenzaB__AIC73889

SEQ ID NO: 124368 - RNA, 1755 nt, Artificial Sequence; identical to SEQ ID NO: 124325
  derived and/or modified CDS sequence (opt2) from hemagglutinin__InfluenzaB__AIC73890

SEQ ID NO: 124369 - RNA, 1758 nt, Artificial Sequence
  derived and/or modified CDS sequence (opt2) from hemagglutinin__InfluenzaB__AIC73892
augaaggccaucaucguccuccucauggucgucaccuccaacgccgaccgcaucugcaccggcaucaccuccuccaacuccccccacgucgucaagaccgccacccagggcgaggucaacgucaccggcgucaucccccucaccaccacccccaccaagucccacuucgccaaccucaagggcaccgagacccgcggcaagcucugccccaagugccucaacugcaccgaccucgacgucgcccucggccgccccaagugcaccggcaagauccccuccgcccgcgucuccauccuccacgagguccgccccgucaccuccggcugcuuccccaucaugcacgaccgcaccaagauccgccagcuccccaaccuccuccgcggcuacgagcacauccgccucuccacccacaacgucaucaacgccgaggacgcccccggcggccccuacaagaucggcaccuccggcuccugccccaacgucaccaacggcaacggcuucuucgccaccauggccugggccguccccaagaacgacaagaacaagaccgccaccaacccccucaccaucgagguccccuacaucugcaccgagggcgaggaccagaucaccgucuggggcuuccacuccgacaacgagacccagauggccaagcucuacggcgacuccaagccccagaaguucaccuccuccgccaacggcgucaccacccacuacgucucccagaucggcggcuuccccaaccagaccgaggacggcggccucccccaguccggccgcaucgucgucgacuacaugguccagaaguccggcaagaccggcaccaucaccuaccagcgcggcauccuccucccccagaaggucuggugcgccuccggccgcuccaaggucaucaagggcucccucccccucaucggcgaggccgacugccuccacgagaaguacggcggccucaacaaguccaagcccuacuacaccggcgagcacgccaaggccaucggcaacugccccaucugggucaagaccucccucaagcucgccaacggcaccaaguaccgcccccccgccaagcuccucaaggagcgcggcuucuucggcgccaucgccggcuuccucgagggcggcugggagggcaugaucgccggcuggcacggcuacaccucccacggcgcccacggcgucgccgucgccgccgaccucaaguccacccaggaggccaucaacaagaucaccaagaaccucaacucccucuccgagcucgaggucaagaaccuccagcgccucuccggcgccauggacgagcuccacaacgagauccucgagcucgacgagaaggucgacgaccuccgcgccgacaccaucuccucccagaucgagcucgccguccuccucuccaacgagggcaucaucaacuccgaggacgagcaccuccucgcccucgagcgcaagcucaagaagaugcucggccccuccgccgucgagaucggcaacggcugcuucgagaccaagcacaagugcaaccagaccugccucgaccgcaucgccgccggcaccuucgacgccggcgaguucucccuccccaccuucgacucccucaacaucaccgccgccucccucaacgacgacggccucgacaaccacaccauccuccucuacuacuccaccgccgccuccucccucgccgucacccucaugaucgccaucuucgucgucuacauggucucccgcgacaacgucuccugcuccaucugccucuga

SEQ ID NO: 124370 - RNA, 1755 nt, Artificial Sequence; identical to SEQ ID NO: 124165
  derived and/or modified CDS sequence (opt2) from hemagglutinin__InfluenzaB__AIC73893

SEQ ID NO: 124371 - RNA, 1755 nt, Artificial Sequence; identical to SEQ ID NO: 124325
  derived and/or modified CDS sequence (opt2) from hemagglutinin__InfluenzaB__AIC73894

SEQ ID NO: 124372 - RNA, 1755 nt, Artificial Sequence; identical to SEQ ID NO: 124325
  derived and/or modified CDS sequence (opt2) from hemagglutinin__InfluenzaB__AIC73895

SEQ ID NO: 124373 - RNA, 1755 nt, Artificial Sequence; identical to SEQ ID NO: 124325
  derived and/or modified CDS sequence (opt2) from hemagglutinin__InfluenzaB__AIC73896

SEQ ID NO: 124374 - RNA, 1755 nt, Artificial Sequence; identical to SEQ ID NO: 124325
  derived and/or modified CDS sequence (opt2) from hemagglutinin__InfluenzaB__AIC73897

SEQ ID NO: 124375 - RNA, 1755 nt, Artificial Sequence; identical to SEQ ID NO: 124325
  derived and/or modified CDS sequence (opt2) from hemagglutinin__InfluenzaB__AIC73898

SEQ ID NO: 124376 - RNA, 1755 nt, Artificial Sequence; identical to SEQ ID NO: 124325
  derived and/or modified CDS sequence (opt2) from hemagglutinin__InfluenzaB__AIC73899

SEQ ID NO: 124377 - RNA, 1755 nt, Artificial Sequence; identical to SEQ ID NO: 124325
  derived and/or modified CDS sequence (opt2) from hemagglutinin__InfluenzaB__AIC73900

SEQ ID NO: 124378 - RNA, 1755 nt, Artificial Sequence; identical to SEQ ID NO: 124325
  derived and/or modified CDS sequence (opt2) from hemagglutinin__InfluenzaB__AIC73902

SEQ ID NO: 124379 - RNA, 1755 nt, Artificial Sequence
  derived and/or modified CDS sequence (opt2) from hemagglutinin__InfluenzaB__AIC73903
augaaggccaucaucguccuccucauggucgucaccuccaacgccgaccgcaucugcaccggcaucaccuccuccaacuccccccacgucgucaagaccgccacccagggcgaggucaacgucaccggcgucaucccccucaccaccacccccaccaaguccuacuucgccaaccucaagggcacccgcacccgcggcaagcucugccccgacugccucaacugcaccgaccucgacgucgcccucggccgccccaugugcgucggcaccacccccuccgccaaggccuccauccuccacgagguccgccccgucaccuccggcugcuuccccaucaugcacgaccgcaccaagauccgccagcuccccaaccuccuccgcggcuacgagaagauccgccucuccacccagaacgucaucgacgccgagaaggcccccggcggccccuaccgccucggcaccuccggcuccugccccaacgccaccuccaagaucggcuucuucgccaccauggccugggccguccccaaggacaacuacaagaacgccaccaacccccagaccgucgagguccccuacaucugcaccgagggcgaggaccagaucaccgucuggggcuuccacuccgacaacaagacccagaugaagucccucuacggcgacuccaacccccagaaguucaccuccuccgccaacggcaucaccacccacuacgucucccagaucggcgacuuccccgaccagaccgaggacggcggccucccccaguccggccgcaucgucgucgacuacaugaugcagaagcccggcaagaccggcaccaucgucuaccagcgcggcguccuccucccccagaaggucuggugcgccuccggccgcuccaaggucaucaagggcucccucccccucaucggcgaggccgacugccuccacgaggaguacggcggccucaacaaguccaagcccuacuacaccggcaagcacgccaaggccaucggcaacugccccaucugggucaagaccccccucaagcucgccaacggcaccaaguaccgcccccccgccaagcuccucaaggagcgcggcuucuucggcgccaucgccggcuuccucgagggcggcugggagggcaugaucgccggcuggcacggcuacaccucccacggcgcccacggcgucgccgucgccgccgaccucaaguccacccaggaggccaucaacaagaucaccaagaaccucaacucccucuccgagcucgaggucaagaaccuccagcgccucuccggcgccauggacgagcuccacaacgagauccucgagcucgacgagaaggucgacgaccuccgcgccgacaccaucuccucccagaucgagcucgccguccuccucuccaacgagggcaucaucaacuccgaggacgagcaccuccucgcccucgagcgcaagcucaagaagaugcucggccccuccgccgucgacaucggcaacggcugcuucgagaccaagcacaagugcaaccagaccugccucgaccgcaucgccgccggcaccuucaacgccggcgaguucucccuccccaccuucgacucccucaacaucaccgccgccucccucaacgacgacggccucgacaaccacaccauccuccucuacuacuccaccgccgccuccucccucgccgucacccucaugcucgccaucuucaucgucuacauggucucccgcgacaacgucuccugcuccaucugccucuga

SEQ ID NO: 124380 - RNA, 1755 nt, Artificial Sequence
  derived and/or modified CDS sequence (opt2) from hemagglutinin__InfluenzaB__AIC73904
augaaggccaucaucguccuccucauggucgucaccuccaacgccgaccgcaucugcaccggcaucaccuccuccaacuccccccacgucgucaagaccgccacccagggcgaggucaacgucaccggcgucaucccccucaccaccacccccaccaaguccuacuucgccaaccucaagggcacccgcacccgcggcaagcucugccccgacugccucaacugcaccgaccucgacgucgcccucggccgccccaugugcgucggcaucacccccuccgccaaggccuccauccuccacgagguccgccccgucaccuccggcugcuuccccaucaugcacgaccgcaccaagauccgccagcuccccaaccuccuccgcggcuacgagaagauccgccucuccacccagaacgucaucgacgccgagaaggcccccggcggccccuaccgccucggcaccuccggcuccugccccaacgccaccuccaagaucggcuucuucgccaccauggccugggccguccccaaggacaacuacaagaacgccaccaacccccagaccgucgagguccccuacaucugcaccgagggcgaggaccagaucaccgucuggggcuuccacuccgacaacaagacccagaugaagucccucuacggcgacuccaacccccagaaguucaccuccuccgccaacggcgucaccacccacuacgucucccagaucggcgacuuccccgaccagaccgaggacggcggccucccccaguccggccgcaucgucgucgacuacaugaugcagaagcccggcaagaccggcaccaucgucuaccagcgcggcguccuccucccccagaaggucuggugcgccuccggccgcuccaaggucaucaagggcucccucccccucaucggcgaggccgacugccuccacgaggaguacggcggccucaacaaguccaagcccuacuacaccggcaagcacgccaaggccaucggcaacugccccaucugggucaagaccccccucaagcucgccaacggcaccaaguaccgcccccccgccaagcuccucaaggagcgcggcuucuucggcgccaucgccggcuuccucgagggcggcugggagggcaugaucgccggcuggcacggcuacaccucccacggcgcccacggcgucgccgucgccgccgaccucaaguccacccaggaggccaucaacaagaucaccaagaaccucaacucccucuccgagcucgaggucaagaaccuccagcgccucuccggcgccauggacgagcuccacaacgagauccucgagcucgacgagaaggucgacgaccuccgcgccgacaccaucuccucccagaucgagcucgccguccuccucuccaacgagggcaucaucaacuccgaggacgagcaccuccucgcccucgagcgcaagcucaagaagaugcucggccccuccgccgucgacaucggcaacggcugcuucgagaccaagcacaagugcaaccagaccugccucgaccgcaucgccgccggcaccuucaacgccggcgaguucucccuccccaccuucgacucccucaacaucaccgccgccucccucaacgacgacggccucgacaaccacaccauccuccucuacuacuccaccgccgccuccucccucgccgucacccucaugcucgccaucuucaucgucuacauggucucccgcgacaacgucuccugcuccaucugccucuga

SEQ ID NO: 124381 - RNA, 1755 nt, Artificial Sequence; identical to SEQ ID NO: 124325
  derived and/or modified CDS sequence (opt2) from hemagglutinin__InfluenzaB__AIC73905

SEQ ID NO: 124382 - RNA, 1755 nt, Artificial Sequence; identical to SEQ ID NO: 124325
  derived and/or modified CDS sequence (opt2) from hemagglutinin__InfluenzaB__AIC73906

SEQ ID NO: 124383 - RNA, 1755 nt, Artificial Sequence; identical to SEQ ID NO: 124325
  derived and/or modified CDS sequence (opt2) from hemagglutinin__InfluenzaB__AIC73907

SEQ ID NO: 124384 - RNA, 1755 nt, Artificial Sequence; identical to SEQ ID NO: 124325
  derived and/or modified CDS sequence (opt2) from hemagglutinin__InfluenzaB__AIC73908

SEQ ID NO: 124385 - RNA, 1755 nt, Artificial Sequence; identical to SEQ ID NO: 124325
  derived and/or modified CDS sequence (opt2) from hemagglutinin__InfluenzaB__AIC73909

SEQ ID NO: 124386 - RNA, 1755 nt, Artificial Sequence; identical to SEQ ID NO: 124325
  derived and/or modified CDS sequence (opt2) from hemagglutinin__InfluenzaB__AIC73910

SEQ ID NO: 124387 - RNA, 1755 nt, Artificial Sequence; identical to SEQ ID NO: 124325
  derived and/or modified CDS sequence (opt2) from hemagglutinin__InfluenzaB__AIC73911

SEQ ID NO: 124388 - RNA, 1755 nt, Artificial Sequence; identical to SEQ ID NO: 124325
  derived and/or modified CDS sequence (opt2) from hemagglutinin__InfluenzaB__AIC73912

SEQ ID NO: 124389 - RNA, 1755 nt, Artificial Sequence; identical to SEQ ID NO: 124325
  derived and/or modified CDS sequence (opt2) from hemagglutinin__InfluenzaB__AIC73913

SEQ ID NO: 124390 - RNA, 1755 nt, Artificial Sequence; identical to SEQ ID NO: 124325
  derived and/or modified CDS sequence (opt2) from hemagglutinin__InfluenzaB__AIC73914

SEQ ID NO: 124391 - RNA, 1755 nt, Artificial Sequence; identical to SEQ ID NO: 124325
  derived and/or modified CDS sequence (opt2) from hemagglutinin__InfluenzaB__AIC73915

SEQ ID NO: 124392 - RNA, 1755 nt, Artificial Sequence; identical to SEQ ID NO: 124325
  derived and/or modified CDS sequence (opt2) from hemagglutinin__InfluenzaB__AIC73916

SEQ ID NO: 124393 - RNA, 1755 nt, Artificial Sequence; identical to SEQ ID NO: 124325
  derived and/or modified CDS sequence (opt2) from hemagglutinin__InfluenzaB__AIC73917

SEQ ID NO: 124394 - RNA, 1755 nt, Artificial Sequence; identical to SEQ ID NO: 124325
  derived and/or modified CDS sequence (opt2) from hemagglutinin__InfluenzaB__AIC73918

SEQ ID NO: 124395 - RNA, 1755 nt, Artificial Sequence; identical to SEQ ID NO: 124165
  derived and/or modified CDS sequence (opt2) from hemagglutinin__InfluenzaB__AIC73919

SEQ ID NO: 124396 - RNA, 1755 nt, Artificial Sequence; identical to SEQ ID NO: 124325
  derived and/or modified CDS sequence (opt2) from hemagglutinin__InfluenzaB__AIC73920

SEQ ID NO: 124397 - RNA, 1758 nt, Artificial Sequence; identical to SEQ ID NO: 123901
  derived and/or modified CDS sequence (opt2) from hemagglutinin__InfluenzaB__AIC73921

SEQ ID NO: 124398 - RNA, 1755 nt, Artificial Sequence; identical to SEQ ID NO: 124325
  derived and/or modified CDS sequence (opt2) from hemagglutinin__InfluenzaB__AIC73922

SEQ ID NO: 124399 - RNA, 1758 nt, Artificial Sequence; identical to SEQ ID NO: 122923
  derived and/or modified CDS sequence (opt2) from hemagglutinin__InfluenzaB__AIC73924

SEQ ID NO: 124400 - RNA, 1758 nt, Artificial Sequence
  derived and/or modified CDS sequence (opt2) from hemagglutinin__InfluenzaB__AIC73925
augaaggccaccaucguccuccucauggucgucaccuccaacgccgaccgcaucugcaccggcaucaccuccuccaacuccccccacgucgucaagaccgccacccagggcgaggucaacgucaccggcgucaucccccucaccaccacccccaccaagucccacuucgccaaccucaagggcaccgagacccgcggcaagcucugccccaagugccucaacugcaccgaccucgacgucgcccucggccgccccaagugcaccggcaagauccccuccgcccgcgucuccauccuccacgagguccgccccgucaccuccggcugcuuccccaucaugcacgaccgcaccaagauccgccagcuccccaaccuccuccgcggcuacgagcacauccgccucuccacccacaacgucaucaacgccgaggacgcccccggcggccccuacaagaucggcaccuccggcuccugccccaacgucaccaacggcaacggcuucuucgccaccauggccugggccguccccaagaacgacaagaacaagaccgccaccaacccccucaccaucgagguccccuacaucugcaccgagggcgaggaccagaucaccgucuggggcuuccacuccgacaacgagacccagauggccaagcucuacggcgacuccaagccccagaaguucaccuccuccgccaacggcgucaccacccacuacgucucccagaucggcggcuuccccaaccagaccgaggacggcggccucccccaguccggccgcaucgucgucgacuacaugguccagaaguccggcaagaccggcaccaucaccuaccagcgcggcauccuccucccccagaaggucuggugcgccuccggccgcuccaaggucaucaagggcucccucccccucaucggcgaggccgacugccuccacgagaaguacggcggccucaacaaguccaagcccuacuacaccggcgagcacgccaaggccaucggcaacugccccaucugggucaagaccccccucaagcucgccaacggcaccaaguaccgcccccccgccaagcuccucaaggagcgcggcuucuucggcgccaucgccggcuuccucgagggcggcugggagggcaugaucgccggcuggcacggcuacaccucccacggcgcccacggcgucgccgucgccgccgaccucaaguccacccaggaggccaucaacaagaucaccaagaaccucaacucccucuccgagcucgaggucaagaaccuccagcgccucuccggcgccauggacgagcuccacaacgagauccucgagcucgacgagaaggucgacgaccuccgcgccgacaccaucuccucccagaucgagcucgccguccuccucuccaacgagggcaucaucaacuccgaggacgagcaccuccucgcccucgagcgcaagcucaagaagaugcucggccccuccgccgucgagaucggcaacggcugcuucgagaccaagcacaagugcaaccagaccugccucgaccgcaucgccgccggcaccuucgacgccggcgaguucucccuccccaccuucgacucccucaacaucaccgccgccucccucaacgacgacggccucgacaaccacaccauccuccucuacuacuccaccgccgccuccucccucgccgucacccucaugaucgccaucuucgucgucuacauggucucccgcgacaacgucuccugcuccaucugccucuga

SEQ ID NO: 124401 - RNA, 1755 nt, Artificial Sequence; identical to SEQ ID NO: 124325
  derived and/or modified CDS sequence (opt2) from hemagglutinin__InfluenzaB__AIC73926

SEQ ID NO: 124402 - RNA, 1755 nt, Artificial Sequence; identical to SEQ ID NO: 122603
  derived and/or modified CDS sequence (opt2) from hemagglutinin__InfluenzaB__AIL94977

SEQ ID NO: 124403 - RNA, 1755 nt, Artificial Sequence; identical to SEQ ID NO: 122603
  derived and/or modified CDS sequence (opt2) from hemagglutinin__InfluenzaB__AIL94988

SEQ ID NO: 124404 - RNA, 1755 nt, Artificial Sequence
  derived and/or modified CDS sequence (opt2) from hemagglutinin__InfluenzaB__AIL94999
augaaggccaucaucguccuccucauggucgucaccuccaacgccgaccgcaucugcaccggcaucaccuccuccaacuccccccacgucgucaagaccgccacccagggcgaggucaacgucaccggcgucaucccccucaccaccacccccaccaaguccuacuucgccaaccucaagggcacccgcacccgcggcaagcucugccccgacugccucaacugcaccgaccucgacgucgcccucggccgccccaugugcgucggcaccacccccuccgccaaggccuccauccuccacgagguccgccccgucaccuccggcugcuuccccaucaugcacgaccgcaccaagauccgccagcuccccaaccuccuccgcggcuacgagaacauccgccucuccacccagaacgucaucgacgccgagaaggcccccggcggccccuaccgccucggcaccuccggcuccugccccaacgccaccuccaagaccggcuucuucgccaccauggccugggccguccccaaggacaacuacaagaacgccaccaacccccucaccgucgagguccccuacaucugcaccgagggcgaggaccagaucaccgucuggggcuuccacuccgacaacaagacccagaugaagaaccucuacggcgacuccaacccccagaaguucaccuccuccgccaacggcgucaccacccacuacgucucccagaucggcgacuuccccgaccagaccgaggacggcggccucccccaguccggccgcaucgucgucgacuacaugaugcagaagcccggcaagaccggcaccaucgucuaccagcgcggcguccuccucccccagaaggucuggugcgccuccggccgcuccaaggucaucaagggcucccucccccucaucggcgaggccgacugccuccacgagaaguacggcggccucaacaaguccaagcccuacuacaccggcgagcacgccaaggccaucggcaacugccccaucugggucaagaccccccucaagcucgccaacggcaccaaguaccgcccccccgccaagcuccucaaggagcgcggcuucuucggcgccaucgccggcuuccucgagggcggcugggagggcaugaucgccggcuggcacggcuacaccucccacggcgcccacggcgucgccgucgccgccgaccucaaguccacccaggaggccaucaacaagaucaccaagaaccucaacucccucuccgagcucgaggucaagaaccuccagcgccucuccggcgccauggacgagcuccacaacgagauccucgagcucgacgagaaggucgacgaccuccgcgccgacaccaucuccucccagaucgagcucgccguccuccucuccaacgagggcaucaucaacuccgaggacgagcaccuccucgcccucgagcgcaagcucaagaagaugcucggccccuccgccgucgacaucggcaacggcugcuucgagaccaagcacaagugcaaccagaccugccucgaccgcaucgccgccggcaccuucaacgccggcgaguucucccuccccaccuucgacucccucaacaucaccgccgccucccucaacgacgacggccucgacaaccacaccauccuccucuacuacuccaccgccgccuccucccucgccgucacccucaugcucgccaucuucaucgucuacauggucucccgcgacaacgucuccugcuccaucugccucuga

SEQ ID NO: 124405 - RNA, 1755 nt, Artificial Sequence; identical to SEQ ID NO: 122603
  derived and/or modified CDS sequence (opt2) from hemagglutinin__InfluenzaB__AIL95010

SEQ ID NO: 124406 - RNA, 1755 nt, Artificial Sequence; identical to SEQ ID NO: 122856
  derived and/or modified CDS sequence (opt2) from hemagglutinin__InfluenzaB__AIL95021

SEQ ID NO: 124407 - RNA, 1758 nt, Artificial Sequence; identical to SEQ ID NO: 122684
  derived and/or modified CDS sequence (opt2) from hemagglutinin__InfluenzaB__AIL95032

SEQ ID NO: 124408 - RNA, 1755 nt, Artificial Sequence; identical to SEQ ID NO: 122856
  derived and/or modified CDS sequence (opt2) from hemagglutinin__InfluenzaB__AIL95043

SEQ ID NO: 124409 - RNA, 1758 nt, Artificial Sequence; identical to SEQ ID NO: 122730
  derived and/or modified CDS sequence (opt2) from hemagglutinin__InfluenzaB__AIL95054

SEQ ID NO: 124410 - RNA, 1758 nt, Artificial Sequence; identical to SEQ ID NO: 122684
  derived and/or modified CDS sequence (opt2) from hemagglutinin__InfluenzaB__AIL95065

SEQ ID NO: 124411 - RNA, 1758 nt, Artificial Sequence; identical to SEQ ID NO: 122681
  derived and/or modified CDS sequence (opt2) from hemagglutinin__InfluenzaB__AIL95076

SEQ ID NO: 124412 - RNA, 1758 nt, Artificial Sequence; identical to SEQ ID NO: 122684
  derived and/or modified CDS sequence (opt2) from hemagglutinin__InfluenzaB__AIL95087

SEQ ID NO: 124413 - RNA, 1755 nt, Artificial Sequence; identical to SEQ ID NO: 122856
  derived and/or modified CDS sequence (opt2) from hemagglutinin__InfluenzaB__AIL95098

SEQ ID NO: 124414 - RNA, 1758 nt, Artificial Sequence; identical to SEQ ID NO: 124195
  derived and/or modified CDS sequence (opt2) from hemagglutinin__InfluenzaB__AIL95109

SEQ ID NO: 124415 - RNA, 1758 nt, Artificial Sequence
  derived and/or modified CDS sequence (opt2) from hemagglutinin__InfluenzaB__AIL95120
augaaggccaucaucguccuccucauggucgucaccuccaacgccgaccgcaucugcaccggcaucaccuccuccaacuccccccacgucgucaagaccgccacccagggcgaggucaacgucaccggcgucaucccccucaccaccacccccaccaagucccacuucgccaaccucaagggcaccgagacccgcggcaagcucugccccaagugccucaacugcaccgaccucgacgucgcccucggccgccccaagugcaccggcaagauccccuccgcccgcgucuccauccuccacgagguccgccccgucaccuccggcugcuuccccaucaugcacgaccgcaccaagauccgccagcuccccaaccuccuccgcggcuacgagcacauccgccucuccacccacaacgucaucaacgccgagaacgcccccggcggccccuacaagaucggcaccuccggcuccugccccaacgucaccaacggcaacggcuucuucgccaccauggccugggccguccccaagaacgacaagaacaagaccgccaccaacccccucaccaucgagguccccuacaucugcaccgagggcgaggaccagaucaccgucuggggcuuccacuccgacaacgagacccagauggccaagcucuacggcgacuccaagccccagaaguucaccuccuccgccaacggcgucaccacccacuacgucucccagaucggcggcuuccccaaccagaccgaggacggcggccucccccaguccggccgcaucgucgucgacuacaugguccagaaguccggcaagaccggcaccaucaccuaccagcgcggcauccuccucccccagaaggucuggugcgccuccggccgcuccaaggucaucaagggcucccucccccucaucggcgaggccgacugccuccacgagaaguacggcggccucaacaaguccaagcccuacuacaccggcgagcacgccaaggccaucggcaacugccccaucugggucaagaccccccucaagcucgccaacggcaccaaguaccgcccccccgccaagcuccucaaggagcgcggcuucuucggcgccaucgccggcuuccucgagggcggcugggagggcaugaucgccggcuggcacggcuacaccucccacggcgcccacggcgucgccgucgccgccgaccucaaguccacccaggaggccaucaacaagaucaccaagaaccucaacucccucuccgagcucgaggucaagaaccuccagcgccucuccggcgccauggacgagcuccacaacgagauccucgagcucgacgagaaggucgacgaccuccgcgccgacaccaucuccucccagaucgagcucgccguccuccucuccaacgagggcaucaucaacuccgaggacgagcaccuccucgcccucgagcgcaagcucaagaagaugcucggccccuccgccgucgagaucggcaacggcugcuucgagaccaagcacaagugcaaccagaccugccucgacaagaucgccgccggcaccuucgacgccggcgaguucucccuccccaccuucgacucccucaacaucaccgccgccucccucaacgacgacggccucgacaaccacaccauccuccucuacuacuccaccgccgccuccucccucgccgucacccucaugaucgccaucuucgucgucuacauggucucccgcgacaacgucuccugcuccaucugccucuga

SEQ ID NO: 124416 - RNA, 1755 nt, Artificial Sequence; identical to SEQ ID NO: 124325
  derived and/or modified CDS sequence (opt2) from hemagglutinin__InfluenzaB__AKA54644

SEQ ID NO: 124417 - RNA, 1755 nt, Artificial Sequence
  derived and/or modified CDS sequence (opt2) from hemagglutinin__InfluenzaB__AKA54645
augaaggccaucaccguccuccucauggucgucaccuccaacgccgaccgcaucugcaccggcaucaccuccuccaacuccccccacgucgucaagaccgccacccagggcgaggucaacgucaccggcgucaucccccucaccaccacccccaccaaguccuacuucgccaaccucaagggcacccgcacccgcggcaagcucugccccgacugccucaacugcaccgaccucgacgucgcccucggccgccccaugugcgucggcaccacccccuccgccaaggccuccauccuccacgagguccgccccgucaccuccggcugcuuccccaucaugcacgaccgcaccaagauccgccagcuccccaaccuccuccgcggcuacgagaagauccgccucuccacccagaacgucaucgacgccgagaaggcccccggcggccccuaccgccucggcaccuccggcuccugccccaacgccaccuccaagaucggcuucuucgccaccauggccugggccguccccaaggacaacuacaagaacgccaccaacccccucaccgucgagguccccuacaucugcaccgagggcgaggaccagaucaccgucuggggcuuccacuccgacaacaagacccagaugaagucccucuacggcgacuccaacccccagaaguucaccuccuccgccgacggcgucaccacccacuacgucucccagaucggcgacuuccccgaccagaccgaggacggcggccucccccaguccggccgcaucgucgucgacuacaugaugcagaagcccggcaagaccggcaccaucgucuaccagcgcggcguccuccucccccagaaggucuggugcgccuccggccgcuccaaggucaucaagggcucccucccccucaucggcgaggccgacugccuccacgaggaguacggcggccucaacaaguccaagcccuacuacaccggcaagcacgccaaggccaucggcaacugccccaucugggucaagaccccccucaagcucgccaacggcaccaaguaccgcccccccgccaagcuccucaaggagcgcggcuucuucggcgccaucgccggcuuccucgagggcggcugggagggcaugaucgccggcuggcacggcuacaccucccacggcgcccacggcgucgccgucgccgccgaccucaaguccacccaggaggccaucaacaagaucaccaagaaccucaacucccucuccgagcucgaggucaagaaccuccagcgccucuccggcgccauggacgagcuccacaacgagauccucgagcucgacgagaaggucgacgaccuccgcgccgacaccaucuccucccagaucgagcucgccguccuccucuccaacgagggcaucaucaacuccgaggacgagcaccuccucgcccucgagcgcaagcucaagaagaugcucggccccuccgccgucgacaucggcaacggcugcuucgagaccaagcacaagugcaaccagaccugccucgaccgcaucgccgccggcaccuucaacgccggcgaguucucccuccccaccuucgacucccucaacaucaccgccgccucccucaacgacgacggccucgacaaccacaccauccuccucuacuacuccaccgccgccuccucccucgccgucacccucaugcucgccaucuucaucgucuacauggucucccgcgacaacgucuccugcuccaucugccucuga

SEQ ID NO: 124418 - RNA, 1755 nt, Artificial Sequence; identical to SEQ ID NO: 124325
  derived and/or modified CDS sequence (opt2) from hemagglutinin__InfluenzaB__AKA54646

SEQ ID NO: 124419 - RNA, 1755 nt, Artificial Sequence; identical to SEQ ID NO: 124325
  derived and/or modified CDS sequence (opt2) from hemagglutinin__InfluenzaB__AKA54647

SEQ ID NO: 124420 - RNA, 1758 nt, Artificial Sequence; identical to SEQ ID NO: 122923
  derived and/or modified CDS sequence (opt2) from hemagglutinin__InfluenzaB__AKA54648

SEQ ID NO: 124421 - RNA, 1755 nt, Artificial Sequence
  derived and/or modified CDS sequence (opt2) from hemagglutinin__InfluenzaB__AKA54649
augaaggccaucaucguccuccucauggucgucaccuccaacgccgaccgcaucugcaccggcaucaccuccuccaacuccccccacgucgucaagaccgccacccagggcgaggucaacgucaccggcgucaucccccucaccaccacccccaccaaguccuacuucgccaaccucaagggcacccgcacccgcggcaagcucugccccgacugccucaacugcaccgaccucgacgucgcccucggccgccccaugugcgucggcaccacccccuccgccaaggccuccauccuccacgagguccgccccgucaccuccggcugcuuccccaucaugcacgaccgcaccaagauccgccagcuccccaaccuccuccgcggcuacgagaagauccgccucuccacccagaacgucaucgacgccgagaaggcccccggcggccccuaccgccucggcaccuccggcuccugccccaacaccaccuccaagaucggcuucuucgccaccauggccugggccguccccaaggacaacuacaagaacgccaccaacccccucaccgucgagguccccuacaucugcaccgagggcgaggaccagaucaccgucuggggcuuccacuccgacaacaagacccagaugaagucccucuacggcgacuccaacccccagaaguucaccuccuccgccaacggcgucaccacccacuacgucucccagaucggcgacuuccccgaccagaccgaggacggcggccucccccaguccggccgcaucgucgucgacuacaugaugcagaagcccggcaagaccggcaccaucgucuaccagcgcggcguccuccucccccagaaggucuggugcgccuccggccgcuccaaggucaucaagggcucccucccccucaucggcgaggccgacugccuccacgaggaguacggcggccucaacaaguccaagcccuacuacaccggcaagcacgccaaggccaucggcaacugccccaucugggucaagaccccccucaagcucgccaacggcaccaaguaccgcccccccgccaagcuccucaaggagcgcggcuucuucggcgccaucgccggcuuccucgagggcggcugggagggcaugaucgccggcuggcacggcuacaccucccacggcgcccacggcgucgccgucgccgccgaccucaaguccacccaggaggccaucaacaagaucaccaagaaccucaacucccucuccgagcucgaggucaagaaccuccagcgccucuccggcgccauggacgagcuccacaacgagauccucgagcucgacgagaaggucgacgaccuccgcgccgacaccaucuccucccagaucgagcucgccguccuccucuccaacgagggcaucaucaacuccgaggacgagcaccuccucgcccucgagcgcaagcucaagaagaugcucggccccuccgccgucgacaucggcaacggcugcuucgagaccaagcacaagugcaaccagaccugccucgaccgcaucgccgccggcaccuucaacgccggcgaguucucccuccccaccuucgacucccucaacaucaccgccgccucccucaacgacgacggccucgacaaccacaccauccuccucuacuacuccaccgccgccuccucccucgccgucacccucaugcucgccaucuucaucgucuacauggucucccgcgacaacgucuccugcuccaucugccucuga

SEQ ID NO: 124422 - RNA, 1755 nt, Artificial Sequence; identical to SEQ ID NO: 124325
  derived and/or modified CDS sequence (opt2) from hemagglutinin__InfluenzaB__AKU40581

SEQ ID NO: 124423 - RNA, 1755 nt, Artificial Sequence; identical to SEQ ID NO: 124325
  derived and/or modified CDS sequence (opt2) from hemagglutinin__InfluenzaB__AKU40592

SEQ ID NO: 124424 - RNA, 1755 nt, Artificial Sequence; identical to SEQ ID NO: 124165
  derived and/or modified CDS sequence (opt2) from hemagglutinin__InfluenzaB__AKU40603

SEQ ID NO: 124425 - RNA, 1755 nt, Artificial Sequence; identical to SEQ ID NO: 124325
  derived and/or modified CDS sequence (opt2) from hemagglutinin__InfluenzaB__AKU40614

SEQ ID NO: 124426 - RNA, 1755 nt, Artificial Sequence; identical to SEQ ID NO: 124165
  derived and/or modified CDS sequence (opt2) from hemagglutinin__InfluenzaB__AKU40625

SEQ ID NO: 124427 - RNA, 1755 nt, Artificial Sequence
  derived and/or modified CDS sequence (opt2) from hemagglutinin__InfluenzaB__AKU40636
augaaggccaucaucguccuccucauggucgucaccuccaacgccgaccgcaucugcaccggcaucaccuccuccaacuccccccacgucgucaagaccgccacccagggcgaggucaacgucaccggcgucaucccccucaccaccacccccgccaaguccuacuucgccaaccucaagggcacccgcacccgcggcaagcucugccccgacugccucaacugcaccgaccucgacgucgcccucggccgccccaugugcgucggcaccacccccuccgccaaggccuccauccuccacgagguccgccccgucaccuccggcugcuuccccaucaugcacgaccgcaccaagauccgccagcuccccaaccuccuccgcggcuacgagaacauccgccucuccaccaagaacgucaucgacgccgagaaggcccccggcggccccuaccgccucggcaccuccggcuccugccccaacgccaccuccaagaucggcuucuucgccaccauggccugggccguccccaaggacaacuacaagaacgccaccaacccccucaccgucgagguccccuacaucugcaaggagggcgaggaccagaucaccgucuggggcuuccacuccgacaacaagacccagaugaagaaccucuacggcgacuccaacccccagaaguucaccuccuccgccaacggcgucaccacccacuacgucucccagaucggcgacuuccccgaccagaccgaggacggcggccucccccaguccggccgcaucgucgucgacuacaugaugcagaagcccggcaagaccggcaccaucgucuaccagcgcggcguccuccucccccagaaggucuggugcgccuccggccgcuccaaggucaucaagggcucccucccccucaucggcgaggccgacugccuccacgaggaguacggcggccucaacaaguccaagcccuacuacaccggcaagcacgccaaggccaucggcaacugccccaucugggucaagaccccccucaagcucgccaacggcaccaaguaccgcccccccgccaagcuccucaaggagcgcggcuucuucggcgccaucgccggcuuccucgagggcggcugggagggcaugaucgccggcuggcacggcuacaccucccacggcgcccacggcgucgccgucgccgccgaccucaaguccacccaggaggccaucaacaagaucaccaagaaccucaacucccucuccgagcucgaggucaagaaccuccagcgccucuccggcgccauggacgagcuccacaacgagauccucgagcucgacgagaaggucgacgaccuccgcgccgacaccaucuccucccagaucgagcucgccguccuccucuccaacgagggcaucaucaacuccgaggacgagcaccuccucgcccucgagcgcaagcucaagaagaugcucggccccuccgccgucgacaucggcaacggcugcuucgagaccaagcacaagugcaaccagaccugccucgaccgcaucgccgccggcaccuucaacgccggcgaguucucccuccccaccuucgacucccucaacaucaccgccgccucccucaacgacgacggccucgacaaccacaccauccuccucuacuacuccaccgccgccuccucccucgccgucacccucaugcucgccaucuucaucgucuacauggucucccgcgacaacgucuccugcuccaucugccucuga

SEQ ID NO: 124428 - RNA, 1755 nt, Artificial Sequence
  derived and/or modified CDS sequence (opt2) from hemagglutinin__InfluenzaB__AKU40647
augaaggccaucaucguccuccucauggucgucaccuccaacgccgaccgcaucugcaccggcaucaccuccuccaacuccccccacgucgucaagaccgccacccagggcgaggucaacgucaccggcgucaucccccucaccaccacccccaccaaguccuacuucgccaaccucaagggcacccgcacccgcggcaagcucugccccgacugccucaacugcaccgaccucgacgucgcccucggccgccccaugugcgucggcaccacccccuccgccaaggccuccauccuccacgagguccgccccgucaccuccggcugcuuccccaucaugcacgaccgcaccaagauccgccagcuccccaaccuccuccgcggcuacgagaagauccgccucuccacccagaacgucaucgacgccgagaaggcccccggcggccccuaccgccucggcaccuccggcuccugccccaacgccaccuccaagaucggcuucuucgccaccauggccugggccguccccaaggacaacuacaagaacgccaccaacccccagaccgucgagauccccuacaucugcaccgagggcgaggaccagaucaccgucuggggcuuccacuccgacaacaagacccagaugaagucccucuacggcgacuccaacccccagaaguucaccuccuccgccaacggcgucaccacccacuacgucucccagaucggcgacuuccccgaccagaccgaggacggcggccucccccaguccggccgcaucgucgucgacuacaugaugcagaagcccggcaagaccggcaccaucgucuaccagcgcggcguccuccucccccagaaggucuggugcgccuccggccgcuccaaggucaucaagggcucccucccccucaucggcgaggccgacugccuccacgaggaguacggcggccucaacaaguccaagcccuacuacaccggcaagcacgccaaggccaucggcaacugccccaucugggucaagaccccccucaagcucgccaacggcaccaaguaccgcccccccgccaagcuccucaaggagcgcggcuucuucggcgccaucgccggcuuccucgagggcggcugggagggcaugaucgccggcuggcacggcuacaccucccacggcgcccacggcgucgccgucgccgccgaccucaaguccacccaggaggccaucaacaagaucaccaagaaccucaacucccucuccgagcucgaggucaagaaccuccagcgccucuccggcgccauggacgagcuccacaacgagauccucgagcucgacgagaaggucgacgaccuccgcgccgacaccaucuccucccagaucgagcucgccguccuccucuccaacgagggcaucaucaacuccgaggacgagcaccuccucgcccucgagcgcaagcucaagaagaugcucggccccuccgccgucgacaucggcaacggcugcuucgagaccaagcacaagugcaaccagaccugccucgaccgcaucgccgccggcaccuucaacgccggcgaguucucccuccccaccuucgacucccucaacaucaccgccgccucccucaacgacgacggccucgacaaccacaccauccuccucuacuacuccaccgccgccuccucccucgccgucacccucaugcucgccaucuucaucgucuacauggucucccgcgacaacgucuccugcuccaucugccucuga

SEQ ID NO: 124429 - RNA, 1755 nt, Artificial Sequence; identical to SEQ ID NO: 124325
  derived and/or modified CDS sequence (opt2) from hemagglutinin__InfluenzaB__AKU40658

SEQ ID NO: 124430 - RNA, 1755 nt, Artificial Sequence; identical to SEQ ID NO: 124325
  derived and/or modified CDS sequence (opt2) from hemagglutinin__InfluenzaB__AKU40669

SEQ ID NO: 124431 - RNA, 1755 nt, Artificial Sequence; identical to SEQ ID NO: 124325
  derived and/or modified CDS sequence (opt2) from hemagglutinin__InfluenzaB__AKU40680

SEQ ID NO: 124432 - RNA, 1755 nt, Artificial Sequence
  derived and/or modified CDS sequence (opt2) from hemagglutinin__InfluenzaB__AKU40691
augaaggccaucaucguccuccucauggucgucaccuccaacgccgaccgcaucugcaccggcaucaccuccuccaacuccccccacgucgucaagaccgccacccagggcgaggucaacgucaccggcgucaucccccucaccaccacccccaccaaguccuacuucgccaaccucaagggcacccgcacccgcggcaagcucugccccgacugccucaacugcaccgaccucgacgucgcccucggccgccccaugugcgucggcaccacccccuccgccaaggccuccauccuccacgagguccgccccgucaccuccggcugcuuccccaucaugcacgaccgcaccaagauccgccagcuccccaaccuccuccgcggcuacgagaagauccgccucuccacccagaacgucaucgacgccgagaaggcccccggcggccccuaccgccucggcaccuccggcuccugccccaacgccaccuccaagaucggcuucuucgccaccauggccugggccguccccaaggacaacuacaagaacgccaccaacccccagaccgucgagguccccuacaucugcaccgagggcgaggaccagaucaccgucuggggcuuccacuccgacaacaagacccagaugaagucccucuacggcgacuccaacccccagaaguucaccuccuccgccaacggcgucaccacccacuacgucucccagaucggcgacuuccccgaccagaccgaggacggcggccucccccaguccggccgcaucgucgucgacuacaugaugcagaagcccggcaagaccggcaccaucgucuaccagcgcggcguccuccucccccagaaggucuggugcgccuccggccgcuccaaggucaucaagggcucccucccccucaucggcgaggccgacugccuccacgaggaguacggcggccucaacaaguccaagcccuacuacaccggcaagcacgccaaggccaucggcaacugccccaucugggucaagaccccccucaagcucgccaacggcaccaaguaccgcccccccgccaagcuccucaaggagcgcggcuucuucggcgccaucgccggcuuccucgagggcggcugggagggcaugaucgccggcuggcacggcuacaccucccacggcgcccacggcgucgccgucgccgccgaccucaaguccacccaggaggccaucaacaagaucaccaagaaccucaacucccucuccgagcucgaggucaagaaccuccagcgccucuccggcgccauggacgaguuccacaacgagauccucgagcucgacgagaaggucgacgaccuccgcgccgacaccaucuccucccagaucgagcucgccguccuccucuccaacgagggcaucaucaacuccgaggacgagcaccuccucgcccucgagcgcaagcucaagaagaugcucggccccuccgccgucgacaucggcaacggcugcuucgagaccaagcacaagugcaaccagaccugccucgaccgcaucgccgccggcaccuucaacgccggcgaguucucccuccccaccuucgacucccucaacaucaccgccgccucccucaacgacgacggccucgacaaccacaccauccuccucuacuacuccaccgccgccuccucccucgccgucacccucaugcucgccaucuucaucgucuacauggucucccgcgacaacgucuccugcuccaucugccucuga

SEQ ID NO: 124433 - RNA, 1755 nt, Artificial Sequence; identical to SEQ ID NO: 124325
  derived and/or modified CDS sequence (opt2) from hemagglutinin__InfluenzaB__AKU40702

SEQ ID NO: 124434 - RNA, 1755 nt, Artificial Sequence; identical to SEQ ID NO: 124325
  derived and/or modified CDS sequence (opt2) from hemagglutinin__InfluenzaB__AKU40713

SEQ ID NO: 124435 - RNA, 1755 nt, Artificial Sequence; identical to SEQ ID NO: 124165
  derived and/or modified CDS sequence (opt2) from hemagglutinin__InfluenzaB__AKU40724

SEQ ID NO: 124436 - RNA, 1755 nt, Artificial Sequence; identical to SEQ ID NO: 124428
  derived and/or modified CDS sequence (opt2) from hemagglutinin__InfluenzaB__AKU40735

SEQ ID NO: 124437 - RNA, 1755 nt, Artificial Sequence; identical to SEQ ID NO: 124325
  derived and/or modified CDS sequence (opt2) from hemagglutinin__InfluenzaB__AKU40746

SEQ ID NO: 124438 - RNA, 1755 nt, Artificial Sequence; identical to SEQ ID NO: 124325
  derived and/or modified CDS sequence (opt2) from hemagglutinin__InfluenzaB__AKU40757

SEQ ID NO: 124439 - RNA, 1755 nt, Artificial Sequence; identical to SEQ ID NO: 124325
  derived and/or modified CDS sequence (opt2) from hemagglutinin__InfluenzaB__AKU40768

SEQ ID NO: 124440 - RNA, 1755 nt, Artificial Sequence; identical to SEQ ID NO: 124325
  derived and/or modified CDS sequence (opt2) from hemagglutinin__InfluenzaB__AKU40779

SEQ ID NO: 124441 - RNA, 1755 nt, Artificial Sequence; identical to SEQ ID NO: 124165
  derived and/or modified CDS sequence (opt2) from hemagglutinin__InfluenzaB__AKU40790

SEQ ID NO: 124442 - RNA, 1755 nt, Artificial Sequence; identical to SEQ ID NO: 124325
  derived and/or modified CDS sequence (opt2) from hemagglutinin__InfluenzaB__AKU40801

SEQ ID NO: 124443 - RNA, 1755 nt, Artificial Sequence
  derived and/or modified CDS sequence (opt2) from hemagglutinin__InfluenzaB__AKU40812
augaaggccaucaucguccuccucauggucgucaccuccaacgccgaccgcaucugcaccggcaucaccuccuccaacuccccccacgucgucaagaccgccacccagggcgaggucaacgucaccggcgucaucccccucaccaccacccccaccaaguccuacuucgccaaccucaagggcacccgcacccgcggcaagcucugccccgacugccucaacugcaccgaccucgacgucgcccucggccgccccaugugcgucggcaccacccccuccgccaaggccuccauccuccacgagguccgccccgucaccuccggcugcuuccccaucaugcacgaccgcaccaagauccgccagcuccccaaccuccuccgcggcuacgagaagauccgccucuccacccagaacgucaucgacgccgagaaggcccccggcggccccuaccgccucggcaccuccggcuccugccccaacgccaccuccaagaucggcuucuucgccaccauggccugggccguccccaaggacaacuacaagaacgccaccaacccccagaccgucgagguccccuacaucugcaccgagggcgaggaccagaucaccgucuggggcuuccacuccgacaacaagacccagaugaagucccucuacggcgacuccaacccccagaaguucaccuccuccgccaacggcgucaccacccacuacgucucccagaucggcgacuuccccgaccagaccgaggacggcggccucccccaguccggccgcaucgucgucgacuacaugaugcagaagcccggcaagaccggcaccaucgucuaccagcgcggcguccuccucccccagaaggucuggugcgccuccggccgcuccaaggucaucaagggcucccucccccucaucggcgaggccgacugccuccacgaggaguacggcggccucaacaaguccaagcccuacuacaccggcaagcacgccaaggccaucggcaacugccccaucugggucaagaccccccucaagcucgccaacggcaccaaguaccgcccccccgccaagcuccucaaggagcgcggcuucuucggcgccaucgccggcuuccucgagggcggcugggagggcaugaucgccggcuggcacggcuacaccucccacggcgcccacggcgucgccgucgccgccgaccucaaguccacccaggaggccaucaacaagaucaccaagaaccucaacucccucuccgagcucgaggucaagaaccuccagcgccucuccggcgccauggacgagcuccacaacgagauccucgagcucgacgagaaggucgacgaccuccgcgccgacaccaucuccucccagaucgagcucgccguccuccucuccaacgagggcaucaucaacuccgaggacgagcaccuccucgcccucgagcgcaagcucaagaagaugcucggccccuccgccgucgacaucggcaacggcugcuucgagaccaagcacaagugcaaccagaccugccucgaccgcaucgccgccggcaccuucaacgccggcgaguucucccuccccaccuucgacucccucaacaucaccgccgccucccucaacgacgacggccucgacucccacaccauccuccucuacuacuccaccgccgccuccucccucgccgucacccucaugcucgccaucuucaucgucuacauggucucccgcgacaacgucuccugcuccaucugccucuga

SEQ ID NO: 124444 - RNA, 1755 nt, Artificial Sequence; identical to SEQ ID NO: 124325
  derived and/or modified CDS sequence (opt2) from hemagglutinin__InfluenzaB__AKU40823

SEQ ID NO: 124445 - RNA, 1755 nt, Artificial Sequence; identical to SEQ ID NO: 124325
  derived and/or modified CDS sequence (opt2) from hemagglutinin__InfluenzaB__AKU40834

SEQ ID NO: 124446 - RNA, 1755 nt, Artificial Sequence; identical to SEQ ID NO: 124325
  derived and/or modified CDS sequence (opt2) from hemagglutinin__InfluenzaB__AKU40845

SEQ ID NO: 124447 - RNA, 1755 nt, Artificial Sequence; identical to SEQ ID NO: 124325
  derived and/or modified CDS sequence (opt2) from hemagglutinin__InfluenzaB__AKU40856

SEQ ID NO: 124448 - RNA, 1755 nt, Artificial Sequence; identical to SEQ ID NO: 124325
  derived and/or modified CDS sequence (opt2) from hemagglutinin__InfluenzaB__AKU40867

SEQ ID NO: 124449 - RNA, 1755 nt, Artificial Sequence; identical to SEQ ID NO: 124325
  derived and/or modified CDS sequence (opt2) from hemagglutinin__InfluenzaB__AKU40878

SEQ ID NO: 124450 - RNA, 1758 nt, Artificial Sequence
  derived and/or modified CDS sequence (opt2) from hemagglutinin__InfluenzaB__AKU40889
augaaggccaucaucguccuccucauggucgucaccuccaacgccgaccgcaucugcaccggcaucaccuccuccaacuccccccacgucgucaagaccgccacccagggcgaggucaacgucaccggcgucaucccccucaccaccacccccaccaagucccacuucgccaaccucaagggcaccgagacccgcggcaagcucugccccaagugccucaacugcaccgaccucgacgucgcccucggccgccccaagugcaccggcaagauccccuccgcccgcgucuccauccuccacgagguccgccccgucaccuccggcugcuuccccaucaugcacgaccgcaccaagauccgccagcuccccaaccuccuccgcggcuacgagcacauccgccucuccacccacaacgucaucaacgccgaggacgcccccggcggccccuacaagaucggcaccuccggcuccugccccaacgucaccaacggcaacggcuucuucgccaccauggccugggccguccccaagaacgacaagaacaagaccgccaccaacccccucaccaccgagguccccuacaucugcaccgagggcgaggaccagaucaccgucuggggcuuccacuccgacaacgagacccagauggccaagcucuacggcgacuccaagccccagaaguucaccuccuccgccaacggcgucaccacccacuacgucucccagaucggcggcuuccccaaccagaccgaggacggcggccucccccaguccggccgcaucgucgucgacuacaugguccagaaguccggcaagaccggcaccaucaccuaccagcgcggcauccuccucccccagaaggucuggugcgccuccggccgcuccaaggucaucaagggcucccucccccucaucggcgaggccgacugccuccacgagaaguacggcggccucaacaaguccaagcccuacuacaccggcgagcacgccaaggccaucggcaacugccccaucugggucaagaccccccucaagcucgccaacggcaccaaguaccgcccccccgccaagcuccucaaggagcgcggcuucuucggcgccaucgccggcuuccucgagggcggcugggagggcaugaucgccggcuggcacggcuacaccucccacggcgcccacggcgucgccgucgccgccgaccucaaguccacccaggaggccaucaacaagaucaccaagaaccucaacucccucuccgagcucgaggucaagaaccuccagcgccucuccggcgccauggacgagcuccacaacgagauccucgagcucgacgagaaggucgacgaccuccgcgccgacaccaucuccucccagaucgagcucgccguccuccucuccaacgagggcaucaucaacuccgaggacgagcaccuccucgcccucgagcgcaagcucaagaagaugcucggccccuccgccgucgagaucggcaacggcugcuucgagaccaagcacaagugcaaccagaccugccucgaccgcaucgccgccggcaccuucgacgccggcgaguucucccuccccaccuucgacucccucaacaucaccgccgccucccucaacgacgacggccucgacaaccacaccauccuccucuacuacuccaccgccgccuccucccucgccgucacccucaugaucgccaucuucgucgucuacauggucucccgcgacaacgucuccugcuccaucugccucuga

SEQ ID NO: 124451 - RNA, 1755 nt, Artificial Sequence; identical to SEQ ID NO: 124325
  derived and/or modified CDS sequence (opt2) from hemagglutinin__InfluenzaB__AKU40900

SEQ ID NO: 124452 - RNA, 1755 nt, Artificial Sequence; identical to SEQ ID NO: 124165
  derived and/or modified CDS sequence (opt2) from hemagglutinin__InfluenzaB__AKU40911

SEQ ID NO: 124453 - RNA, 1755 nt, Artificial Sequence
  derived and/or modified CDS sequence (opt2) from hemagglutinin__InfluenzaB__AKU40922
augaaggccaucaucguccuccucauggucgucaccuccaacgccgaccgcaucugcaccggcaucaccuccuccaacuccccccacgucgucaagaccgucacccagggcgaggucaacgucaccggcgucaucccccucaccaccacccccaccaaguccuacuucgccaaccucaagggcacccgcacccgcggcaagcucugccccgacugccucaacugcaccgaccucgacgucgcccucggccgccccaugugcgucggcaccacccccuccgccaaggccuccauccuccacgagguccgccccgucaccuccggcugcuuccccaucaugcacgaccgcaccaagauccgccagcuccccaaccuccuccgcggcuacgagaagauccgccucuccacccagaacgucaucgacgccgagaaggcccccggcggccccuaccgccucggcaccuccggcuccugccccaacgccaccuccaagaucggcuucuucgccaccauggccugggccguccccaaggacaacuacaagaacgccaccaacccccagaccgucgagguccccuacaucugcaccgagggcgaggaccagaucaccgucuggggcuuccacuccgacaacaagacccagaugaagucccucuacggcgacuccaacccccagaaguucaccuccuccgccaacggcgucaccacccacuacgucucccagaucggcgacuuccccgaccagaccgaggacggcggccucccccaguccggccgcaucgucgucgacuacaugaugcagaagcccggcaagaccggcaccaucgucuaccagcgcggcguccuccucccccagaaggucuggugcgccuccggccgcuccaaggucaucaagggcucccucccccucaucggcgaggccgacugccuccacgaggaguacggcggccucaacaaguccaagcccuacuacaccggcaagcacgccaaggccaucggcaacugccccaucugggucaagaccccccucaagcucgccaacggcaccaaguaccgcccccccgccaagcuccucaaggagcgcggcuucuucggcgccaucgccggcuuccucgagggcggcugggagggcaugaucgccggcuggcacggcuacaccucccacggcgcccacggcgucgccgucgccgccgaccucaaguccacccaggaggccaucaacaagaucaccaagaaccucaacucccucuccgagcucgaggucaagaaccuccagcgccucuccggcgccauggacgagcuccacaacgagauccucgagcucgacgagaaggucgacgaccuccgcgccgacaccaucuccucccagaucgagcucgccguccuccucuccaacgagggcaucaucaacuccgaggacgagcaccuccucgcccucgagcgcaagcucaagaagaugcucggccccuccgccgucgacaucggcaacggcugcuucgagaccaagcacaagugcaaccagaccugccucgaccgcaucgccgccggcaccuucaacgccggcgaguucucccuccccaccuucgacucccucaacaucaccgccgccucccucaacgacgacggccucgacaaccacaccauccuccucuacuacuccaccgccgccuccucccucgccgucacccucaugcucgccaucuucaucgucuacauggucucccgcgacaacgucuccugcuccaucugccucuga

SEQ ID NO: 124454 - RNA, 1755 nt, Artificial Sequence; identical to SEQ ID NO: 124428
  derived and/or modified CDS sequence (opt2) from hemagglutinin__InfluenzaB__AKU40933

SEQ ID NO: 124455 - RNA, 1755 nt, Artificial Sequence; identical to SEQ ID NO: 124325
  derived and/or modified CDS sequence (opt2) from hemagglutinin__InfluenzaB__AKU40944

SEQ ID NO: 124456 - RNA, 1755 nt, Artificial Sequence; identical to SEQ ID NO: 124325
  derived and/or modified CDS sequence (opt2) from hemagglutinin__InfluenzaB__AKU40955

SEQ ID NO: 124457 - RNA, 1755 nt, Artificial Sequence; identical to SEQ ID NO: 124325
  derived and/or modified CDS sequence (opt2) from hemagglutinin__InfluenzaB__AKU40966

SEQ ID NO: 124458 - RNA, 1755 nt, Artificial Sequence; identical to SEQ ID NO: 124325
  derived and/or modified CDS sequence (opt2) from hemagglutinin__InfluenzaB__AKU40977

SEQ ID NO: 124459 - RNA, 1755 nt, Artificial Sequence; identical to SEQ ID NO: 124325
  derived and/or modified CDS sequence (opt2) from hemagglutinin__InfluenzaB__AKU40987

SEQ ID NO: 124460 - RNA, 1755 nt, Artificial Sequence; identical to SEQ ID NO: 124325
  derived and/or modified CDS sequence (opt2) from hemagglutinin__InfluenzaB__AKU40998

SEQ ID NO: 124461 - RNA, 1755 nt, Artificial Sequence; identical to SEQ ID NO: 124325
  derived and/or modified CDS sequence (opt2) from hemagglutinin__InfluenzaB__AKU41009

SEQ ID NO: 124462 - RNA, 1755 nt, Artificial Sequence; identical to SEQ ID NO: 124325
  derived and/or modified CDS sequence (opt2) from hemagglutinin__InfluenzaB__AKU41020

SEQ ID NO: 124463 - RNA, 1755 nt, Artificial Sequence; identical to SEQ ID NO: 124325
  derived and/or modified CDS sequence (opt2) from hemagglutinin__InfluenzaB__ALA08485

SEQ ID NO: 124464 - RNA, 1755 nt, Artificial Sequence; identical to SEQ ID NO: 124325
  derived and/or modified CDS sequence (opt2) from hemagglutinin__InfluenzaB__ALA08486

SEQ ID NO: 124465 - RNA, 1755 nt, Artificial Sequence; identical to SEQ ID NO: 124325
  derived and/or modified CDS sequence (opt2) from hemagglutinin__InfluenzaB__ALA08487

SEQ ID NO: 124466 - RNA, 1755 nt, Artificial Sequence; identical to SEQ ID NO: 124325
  derived and/or modified CDS sequence (opt2) from hemagglutinin__InfluenzaB__ALA08564

SEQ ID NO: 124467 - RNA, 1755 nt, Artificial Sequence; identical to SEQ ID NO: 124325
  derived and/or modified CDS sequence (opt2) from hemagglutinin__InfluenzaB__ALA08565

SEQ ID NO: 124468 - RNA, 1755 nt, Artificial Sequence; identical to SEQ ID NO: 124325
  derived and/or modified CDS sequence (opt2) from hemagglutinin__InfluenzaB__ALA08566

SEQ ID NO: 124469 - RNA, 1755 nt, Artificial Sequence; identical to SEQ ID NO: 124325
  derived and/or modified CDS sequence (opt2) from hemagglutinin__InfluenzaB__ALA08567

SEQ ID NO: 124470 - RNA, 1755 nt, Artificial Sequence; identical to SEQ ID NO: 124325
  derived and/or modified CDS sequence (opt2) from hemagglutinin__InfluenzaB__ALA08568

SEQ ID NO: 124471 - RNA, 1755 nt, Artificial Sequence; identical to SEQ ID NO: 124325
  derived and/or modified CDS sequence (opt2) from hemagglutinin__InfluenzaB__ALA08569

SEQ ID NO: 124472 - RNA, 1758 nt, Artificial Sequence
  derived and/or modified CDS sequence (opt2) from hemagglutinin__InfluenzaB__ALA08689
augaaggccaucaucguccuccucauggucgucaccuccaacgccgaccgcaucugcaccggcaucaccuccuccaacuccccccacgucgucaagaccgccacccagggcgaggucaacgucaccggcgucaucccccucaccaccacccccaccaagucccacuucgccaaccucaagggcaccgagacccgcggcaagcucugccccaagugccccaacugcaccgaccucgacgucgcccucggccgccccaagugcaccggcaagauccccuccgcccgcgucuccauccuccacgagguccgccccgucaccuccggcugcuuccccaucaugcacgaccgcaccaagauccgccagcuccccaaccuccuccgcggcuacgagcacauccgccucuccacccacaacgucaucaacgccgagaacgcccccggcggccccuacaagaucggcaccuccggcuccugccccaacgucaccaacggcaacggcuucuucgccaccauggccugggccguccccaagaacgacaagaacaagaccgccaccaacccccucaccaucgagguccccuacaucugcaccgagggcgaggaccagaucaccgucuggggcuuccacuccgacaacgagacccagauggccaagcucuacggcgacuccaacccccagaaguucaccuccuccgccaacggcgucaccacccacuacgucucccagaucggcggcuuccccaaccagaccgaggacggcggccucccccaguccggccgcaucgucgucgacuacaugguccagaaguccggcaagaccggcaccaucaccuaccagcgcggcauccuccucccccagaaggucuggugcgccuccggccgcuccaaggucaucaagggcucccucccccucaucggcgaggccgacugccuccacgagaaguacggcggccucaacaaguccaagcccuacuacaccggcgagcacgccaaggccaucggcaacugccccaucugggucaagaccccccucaagcucgccaacggcaccaaguaccgcccccccgccaagcuccucaaggagcgcggcuucuucggcgccaucgccggcuuccucgagggcggcugggagggcaugaucgccggcuggcacggcuacaccucccacggcgcccacggcgucgccgucgccgccgaccucaaguccacccaggaggccaucaacaagaucaccaagaaccucaacucccucuccgagcucgaggucaagaaccuccagcgccucuccggcgccauggacgagcuccacaacgagauccucgagcucgacgagaaggucgacgaccuccgcgccgacaccaucuccucccagaucgagcucgccguccuccucuccaacgagggcaucaucaacuccgaggacgagcaccuccucgcccucgagcgcaagcucaagaagaugcucggccccuccgccgucgagaucggcaacggcugcuucgagaccaagcacaagugcaaccagaccugccucgaccgcaucgccgccggcaccuucgacgccggcgaguucucccuccccaccuucgacucccucaacaucaccgccgccucccucaacgacgacggccucgacaaccacaccauccuccucuacuacuccaccgccgccuccucccucgccgucacccucaugaucgccaucuucgucgucuacauggucucccgcgacaacgucuccugcuccaucugccucuga

SEQ ID NO: 124473 - RNA, 1758 nt, Artificial Sequence
  derived and/or modified CDS sequence (opt2) from hemagglutinin__InfluenzaB__ALA08690
augaaggccaucaucguccuccucauggucgucaccuccaacgccgaccgcaucugcaccggcaucaccuccuccaacuccccccacgucgucaagaccgccacccagggcgaggucaacgucaccggcgucaucccccucaccaccacccccaccaagucccacuucgccaaccucaagggcaccgagacccgcggcaagcucugccccaagugccucaacugcaccgaccucgacgucgcccucggccgccccaagugcaccggcaagauccccuccgcccgcgucuccauccuccacgagguccgccccgucaccuccggcugcuuccccaucaugcacgaccgcaccaagauccgccagcuccccaaccuccuccgcggcuacgagcacauccgccucuccacccacaacgucaucaacgccgaggacgcccccggcggccccuacaagaucggcaccuccggcuccugccccaacaucaccaacggcaacggcuucuucgccaccauggccugggccguccagaagaacgacaagaacaagaccgccaccaacccccucaccaucgagguccccuacaucugcaccgagggcgaggaccagaucaccgucuggggcuuccacuccgacaacgagacccagauggccaagcucuacggcgacuccaagccccagaaguucaccuccuccgccaacggcgucaccacccacuacgucucccagaucggcggcuuccccaaccagaccgaggacggcggccucccccaguccggccgcaucgucgucgacuacaugguccagaaguccggcaagaccggcaccaucaccuaccagcgcggcauccuccucccccagaaggucuggugcgccuccggccgcuccaaggucaucaagggcucccucccccucaucggcgaggccgacugccuccacgagaaguacggcggccucaacaaguccaagcccuacuacaccggcgagcacgccaaggccaucggcaacugccccaucugggucaagaccccccucaagcucgccaacggcaccaaguaccgcccccccgccaagcuccucaaggagcgcggcuucuucggcgccaucgccggcuuccucgagggcggcugggagggcaugaucgccggcuggcacggcuacaccucccacggcgcccacggcgucgccgucgccgccgaccucaaguccacccaggaggccaucaacaagaucaccaagaaccucaacucccucuccgagcucgaggucaagaaccuccagcgccucuccggcgccauggacgagcuccacaacgagauccucgagcucgacgagaaggucgacgaccuccgcgccgacaccaucuccucccagaucgagcucgccguccuccucuccaacgagggcaucaucaacuccgaggacgagcaccuccucgcccucgagcgcaagcucaagaagaugcucggccccuccgccgucgagaucggcaacggcugcuucgagaccaagcacaagugcaaccagaccugccucgaccgcaucgccgccggcaccuucgacgccggcgaguucucccuccccaccuucgacucccucaacaucaccgccgccucccucaacgacgacggccucgacgaccacaccauccuccucuacuacuccaccgccgccuccucccucgccgucacccucaugaucgccaucuucgucgucuacauggucucccgcgacaacgucuccugcuccaucugccucuga

SEQ ID NO: 124474 - RNA, 1755 nt, Artificial Sequence; identical to SEQ ID NO: 124325
  derived and/or modified CDS sequence (opt2) from hemagglutinin__InfluenzaB__ALE31766

SEQ ID NO: 124475 - RNA, 1758 nt, Artificial Sequence
  derived and/or modified CDS sequence (opt2) from hemagglutinin__InfluenzaB__ALE31768
augaaggccaucaucguccuccucauggucgucaccuccaacgccgaccgcaucugcaccggcaucaccuccuccaacuccccccacgucgucaagaccgccacccagggcgaggucaacgucaccggcgucaucccccucaccaccacccccaccaagucccacuucgccaaccucaagggcaccgagacccgcggcaagcucugccccaagugccucaacugcaccgaccucgacgucgcccucggccgccccaagugcaccggcaagauccccuccgcccgcgucuccauccuccacgagguccgccccgucaccuccggcugcuuccccaucaugcacgaccgcaccaagauccgccagcuccccaaccuccuccgcggcuacgagcacauccgccucuccacccacaacgucaucaacgccgaggacgcccccggcggccccuacaagaucggcaccuccggcuccugccccaacaucaccaacggcaacggcuucuucgccaccauggccugggccguccccaagaacgacaagaacaagaccgccaccaacccccucaccaucgagguccccuacaucugcaccgagggcgaggaccagaucaccgucuggggcuuccacuccgacaacgagacccagauggccaagcucuacggcgacuccaagccccagaaguucaccuccuccgccaacggcgucaccacccacuacgucucccagaucggcggcuuccccaaccagaccgaggacggcggccucccccaguccggccgcaucgucgucgacuacaugguccagaaguccggcaagaccggcaccaucaccuaccagcgcggcauccuccucccccagaaggucuggugcgccuccggccgcuccaaggucaucaagggcucccucccccucaucggcgaggccgacugccuccacgagaaguacggcggccucaacaaguccaagcccuacuacaccggcgagcacgccaaggccaucggcaacugccccaucugggucaagaccccccucaagcucgccaacggcaccaaguaccgcccccccgccaagcuccucaaggagcgcggcuucuucggcgccaucgccggcuuccucgagggcggcugggagggcaugaucgccggcuggcacggcuacaccucccacggcgcccacggcgucgccgucgccgccgaccucaaguccacccaggaggccaucaacaagaucaccaagaaccucaacucccucuccgagcucgaggucaagaaccuccagcgccucuccggcgccauggacgagcuccacaacgagauccucgagcucgacgagaaggucgacgaccuccgcgccgacaccaucuccucccagaucgagcucgccguccuccucuccaacgagggcaucaucaacuccgaggacgagcaccuccucgcccucgagcgcaagcucaagaagaugcucggccccuccgccgucgagaucggcaacggcugcuucgagaccaagcacaagugcaaccagaccugccucgaccgcaucgccgccggcaccuucgacgccggcgaguucucccuccccaccuucgacucccucaacaucaccgccgccucccucaacgacgacggccucgacaaccacaccauccuccucuacuacuccaccgccgccuccucccucgccgucacccucaugaucgccaucuucgucgucuacauggucucccgcgacaacgucuccugcuccaucugccucuga

SEQ ID NO: 124476 - RNA, 1758 nt, Artificial Sequence
  derived and/or modified CDS sequence (opt2) from hemagglutinin__InfluenzaB__ALE31770
augaaggccaucaucguccuccucauggucgucaccuccaacgccgaccgcaucugcaccggcaucaccuccuccaacuccccccacgucgucaagaccgccacccagggcgaggucaacgucaccggcgucaucccccucaccaccacccccaccaagucccacuucgccaaccucaagggcaccgagacccgcggcaagcucugccccaagugccucaacugcaccgaccucgacgucgcccucggccgccccaagugcaccggcaagauccccuccgcccgcgucuccauccuccacgagguccgccccgucaccuccggcugcuuccccaucaugcacgaccgcaccaagauccgccagcuccccaaccuccuccgcggcuacgagcacaucucccucuccacccacaacgucaucaacgccgaggacgcccccggcggccccuacaagaucggcaccuccggcuccugccccaacgucaccaacggcaacggcuucuucgccaccauggccugggccguccccaagaacgacaagaacaagaccgccaccaacccccucaccaucgagguccccuacaucugcaccgagggcgaggaccagaucaccgucuggggcuuccacuccgacaacgagacccagauggccaagcucuacggcgacuccaagccccagaaguucaccuccuccgccaacggcgucaccacccacuacgucucccagaucggcggcuuccccaaccagaccgaggacggcggccucccccaguccggccgcaucgucgucgacuacaugguccagaaguccggcaagaccggcaccaucaccuaccagcgcggcauccuccucccccagaaggucuggugcgccuccggccgcuccaaggucaucaagggcucccucccccucaucggcgaggccgacugccuccacgagaaguacggcggccucaacaaguccaagcccuacuacaccggcgagcacgccaaggccaucggcaacugccccaucugggucaagaccccccucaagcucgccaacggcaccaaguaccgcccccccgccaagcuccucaaggagcgcggcuucuucggcgccaucgccggcuuccucgagggcggcugggagggcaugaucgccggcuggcacggcuacaccucccacggcgcccacggcgucgccgucgccgccgaccucaaguccacccaggaggccaucaacaagaucaccaagaaccucaacucccucuccgagcucgaggucaagaaccuccagcgccucuccggcgccauggacgagcuccacaacgagauccucgagcucgacgagaaggucgacgaccuccgcgccgacaccaucuccucccagaucgagcucgccguccuccucuccaacgagggcaucaucaacuccgaggacgagcaccuccucgcccucgagcgcaagcucaagaagaugcucggccccuccgccgucgagaucggcaacggcugcuucgagaccaagcacaagugcaaccagaccugccucgaccgcaucgccgccggcaccuucgacgccggcgaguucucccuccccaccuucgacucccucaacaucaccgccgccucccucaacgacgacggccucgacaaccacaccauccuccucuacuacuccaccgccgccuccucccucgccgucacccucaugaucgccaucuucgucgucuacauggucucccgcgacaacgucuccugcuccaucugccucuga

SEQ ID NO: 124477 - RNA, 1755 nt, Artificial Sequence; identical to SEQ ID NO: 124325
  derived and/or modified CDS sequence (opt2) from hemagglutinin__InfluenzaB__ALE31772

SEQ ID NO: 124478 - RNA, 1755 nt, Artificial Sequence; identical to SEQ ID NO: 124325
  derived and/or modified CDS sequence (opt2) from hemagglutinin__InfluenzaB__ALE31773

SEQ ID NO: 124479 - RNA, 1755 nt, Artificial Sequence
  derived and/or modified CDS sequence (opt2) from hemagglutinin__InfluenzaB__ALE31884
augaaggccaucaucguccuccucauggucgucaccuccaacgccgaccgcaucugcaccggcaucaccuccuccaacuccccccacgucgucaagaccgccacccagggcgaggucaacgucaccggcgucaucccccucaccaccacccccaccaaguccuacuucgccaaccucaagggcacccgcacccgcggcaagcucugccccgacugccucaacugcaccgaccucgacgucgcccucggccgccccaugugcgucggcaccacccccuccgccaaggccuccauccuccacgagguccgccccgucaccuccggcugcuuccccaucaugcacgaccgcaccaagauccgccagcuccccaaccuccuccgcggcuacgagaagauccgccucuccacccagaacgucaucgacgccgagaaggcccccggcggccccuaccgccucggcaccuccggcuccugccccaacgccaccuccaagaucggcuucuucgccaccauggccugggccguccccaaggacaacuacaagaacgccaccaacccccagaccgucgagguccccuacaucugcaccgagggcgaggaccagaucaccgucuggggcuuccacuccgacaacaagacccagaugaagucccucuacggcgacuccaacccccagaaguucaccuccuccgccaacggcgucaccacccacuacgucucccagaucggcgacuuccccgaccagaccgaggacggcggccucccccaguccggccgcaucgucgucgacuacaugaugcagaagcccggcaagaccggcaccaucgucuaccagcgcggcguccuccucccccagaaggucuggugcgccuccggccgcuccaaggucaucaagggcucccucccccucaucggcgaggccgacugccuccacgaggaguacggcggccucaacaaguccaagcccuacuacaccggcaagcacgccaaggccaucggcaacugccccaucugggucaagaccccccucaagcucgccaacggcaccaaguaccgcccccccgccaagcuccucaaggagcgcggcuucuucggcgccaucgccggcuuccucgagggcggcugggagggcaugaucgccggcuggcacggcuacaccucccacggcgcccacggcgucgccgucgccgccgaccucaaguccacccaggaggccaucaacaagaucaccaagaaccucaacucccucuccgagcucgaggucaagaaccuccagcgccucuccggcgccauggacgagcuccacaacgagauccucgagcucgacgagaaggucgacgaccuccgcgccgacaccaucuccucccagaucgagcucgccguccuccucuccaacgagggcaucaucaacuccgaggacgagcaccuccucgcccucgagcgcaagcucaagaagaugcucggccccuccgccgucgacaucggcaacggcugcuucgagaccaagcacaagugcaaccagaccugccucgaccgcaucgccgccggcaccuucaacgccggcgaguucucccuccccaccuucgacucccucaacaucaccgccgccucccucaacgacgacggccucgacaaccacaccauccuccucuacuacuccaccgccgccuccucccucgccgucacccucaugcucgccaucuucaucgucuacauggucucccgcgacaacgucuccugcuccgucugccucuga

SEQ ID NO: 124480 - RNA, 1755 nt, Artificial Sequence
  derived and/or modified CDS sequence (opt2) from hemagglutinin__InfluenzaB__ALE31885
augaaggccaucaucguccuccucauggucgucaccuccaacgccgaccgcaucugcaccggcaucaccuccuccaacuccccccacgucgucaagaccgccacccagggcgaggucaacgucaccggcgucaucccccucaccaccacccccaccaaguccuacuucgccaaccucaagggcacccgcacccgcggcaagcucugccccgacugccucaacugcaccgaccucgacgucgcccucggccgccccaugugcgucggcaccacccccuccgccaaggccuccauccuccacgagguccgccccgucaccuccggcugcuuccccaucaugcacgaccgcaccaagauccgccagcuccccaaccuccuccgcggcuacgagaagauccgccucuccacccagaacgucaucgacgccgagaaggcccccggcggccccuaccgccucggcaccuccggcuccugccccaacgccaccuccaagaucggcuucuucgccaccauggccugggccguccccaaggacaacuacaagaacgccaccaacccccagaccgucgagguccccuacaucugcaccgagggcgaggaccagaucaccgucuggggcuuccacuccgacaacaagacccagaugaagucccucuacggcgacuccaacccccagaaguucaccuccuccgccaacggcgucaccacccacuacgucucccagaucggcgacuuccccgaccagaccgaggacggcggccucccccaguccggccgcaucgucgucgacuacaugaugcagaagcccggcaagaccggcaccaucgucuaccagcgcggcguccuccucccccagaaggucuggugcgccuccggccgcuccaaggucaucaagggcucccucccccucaucggcgaggccgacugccuccacgaggaguacggcggccucaacaaguccaagcccuacuacaccggcaagcacgccaaggccaucggcaacugccccaucugggucaagaccccccucaagcucgccaacggcaccaaguaccgcccccccgccaagcuccucaaggagcgcggcuucuucggcgccaucgccggcuuccucgagggcggcugggagggcaugaucgccggcuggcacggcuacaccucccacggcgcccacggcgucgccgucgccgccgaccucaaguccacccaggaggccaucaacaagaucaccaagaaccucaacucccucuccgagcucgaggucaagaaccuccagcgccucuccggcgccauggacgagcuccacaacgagauccucgagcucgacgagaaggucgacgaccuccgcgccgacaccaucuccucccagaucgagcucgccguccuccucuccaacgagggcaucaucaacuccgaggacgagcaccuccucgcccucgagcgcaagcucaagaagaugcucggccccuccgccgucgacaucggcaacggcugcuucgagaccaagcacaagugcaaccagaccugccucgaccgcaucgccgccggcaccuucaacgccggcgaguucucccuccccaccuucgacucccucaacaucaccgccgccucccucaacgacgacggccucgacaaccacaccauccuccucuacuacuccaccgccgccuccucccucgccgucacccucaugcucgccaucuucgucgucuacauggucucccgcgacaacgucuccugcuccaucugccucuga

SEQ ID NO: 124481 - RNA, 1755 nt, Artificial Sequence; identical to SEQ ID NO: 124325
  derived and/or modified CDS sequence (opt2) from hemagglutinin__InfluenzaB__ALE31886

SEQ ID NO: 124482 - RNA, 1755 nt, Artificial Sequence
  derived and/or modified CDS sequence (opt2) from hemagglutinin__InfluenzaB__ALE31887
augaaggccaucaucguccuccucauggucgucaccuccaacgccgaccgcaucugcaccggcaucaccuccuccaacuccccccacgucgucaagaccgccacccagggcgagaucaacgucaccggcgucaucccccucaccaccacccccaccaaguccuacuucgccaaccucaagggcacccgcacccgcggcaagcucugccccgacugccucaacugcaccgaccucgacgucgcccucggccgccccaugugcgucggcaccacccccuccgccaaggccuccauccuccacgagguccgccccgucaccuccggcugcuuccccaucaugcacgaccgcaccaagauccgccagcuccccaaccuccuccgcggcuacgagaagauccgccucuccacccagaacgucaucgacgccgagaaggcccccggcggccccuaccgccucggcaccuccggcuccugccccaacgccaccuccaagaucggcuucuucgccaccauggccugggccguccccaaggacaacuacaagaacgccaccaacccccagaccgucgagguccccuacaucugcaccgagggcgaggaccagaucaccgucuggggcuuccacuccgacaacaagacccagaugaagucccucuacggcgacuccaacccccagaaguucaccuccuccgccaacggcgucaccacccacuacgucucccagaucggcgacuuccccgaccagaccgaggacggcggccucccccaguccggccgcaucgucgucgacuacaugaugcagaagcccggcaagaccggcaccaucgucuaccagcgcggcguccuccucccccagaaggucuggugcgccuccggccgcuccaaggucaucaagggcucccucccccucaucggcgaggccgacugccuccacgaggaguacggcggccucaacaaguccaagcccuacuacaccggcaagcacgccaaggccaucggcaacugccccaucugggucaagaccccccucaagcucgccaacggcaccaaguaccgcccccccgccaagcuccucaaggagcgcggcuucuucggcgccaucgccggcuuccucgagggcggcugggagggcaugaucgccggcuggcacggcuacaccucccacggcgcccacggcgucgccgucgccgccgaccucaaguccacccaggaggccaucaacaagaucaccaagaaccucaacucccucuccgagcucgaggucaagaaccuccagcgccucuccggcgccauggacgagcuccacaacgagauccucgagcucgacgagaaggucgacgaccuccgcgccgacaccaucuccucccagaucgagcucgccguccuccucuccaacgagggcaucaucaacuccgaggacgagcaccuccucgcccucgagcgcaagcucaagaagaugcucggccccuccgccgucgacaucggcaacggcugcuucgagaccaagcacaagugcaaccagaccugccucgaccgcaucgccgccggcaccuucaacgccggcgaguucucccuccccaccuucgacucccucaacaucaccgccgccucccucaacgacgacggccucgacaaccacaccauccuccucuacuacuccaccgccgccuccucccucgccgucacccucaugcucgccaucuucaucgucuacauggucucccgcgacaacgucuccugcuccaucugccucuga

SEQ ID NO: 124483 - RNA, 1755 nt, Artificial Sequence; identical to SEQ ID NO: 124325
  derived and/or modified CDS sequence (opt2) from hemagglutinin__InfluenzaB__ALE31982

SEQ ID NO: 124484 - RNA, 1755 nt, Artificial Sequence
  derived and/or modified CDS sequence (opt2) from hemagglutinin__InfluenzaB__ALE31983
augaaggccaucaucguccuccucauggucgucaccuccaacgccgaccgcaucugcaccggcaucaccuccuccaacuccccccacgucgucaagaccgccacccagggcgaggucaacgucaccggcgucaucccccucaccaccacccccaccaaguccuacuucgccaaccucaagggcacccgcacccgcggcaagcucugccccgacugccucaacugcaccgaccucgacgucgcccucggccgccccaugugcgucggcaccacccccuccgccaaggccuccauccuccacgagguccgccccgucaccuccggcugcuuccccaucaugcacgaccgcaccaagauccgccagcuccccaaccuccuccgcggcuacgagaagauccgccucuccacccagaacgucaucgacgccgagaaggcccccggcggccccuaccgccucggcaccuccggcuccugccccaacgccaccuccaagaucggcuucuucgccaccauggccugggccguccccaaggacaacuacaagaacgccaccaacccccagaccgucgagguccccuacaucugcaccgagggcgaggaccagaucaccgucuggggcuuccacuccgacaacaagacccagaugaagucccucuacggcgacuccaacccccagaaguucaccuccuccgccaacggcgucaccacccacuacgucucccagaucggcgacuuccccgaccagaccgaggacggcggccucccccaguccggccgcaucgucgucgacuacaugaugcagaagcccggcaagaccggcaccaucgucuaccagcgcggcguccuccucccccagaaggucuggugcgccuccggccgcuccaaggucaucaagggcucccucccccucaucggcgaggccgacugccuccacgaggaguacggcggccucaacaaguccaagcccuacuacaccggcaagcacgccaaggccaucggcaacugccccaucugggucaagaccccccucaagcucgccaacggcaccaaguaccgcccccccgccaagcuccucaaggagcgcggcuucuucggcgccaucgccggcuuccucgagggcggcugggagggcaugaucgccggcuggcacggcuacaccucccacggcgcccacggcgucgccgucgccgccgaccucaaguccacccaggaggccaucaacaagaucaccaagaaccucaacucccucuccgagcucgaggucaagaaccuccagcgccucuccggcgccauggacgagcuccacaacgagauccucgagcucgacgagaaggucgacgaccuccgcgccgacaccaucuccucccagaucgagcucgccguccuccucuccaacgagggcaucaucaacuccgaggacgagcaccuccucgcccucgagcgcaagcucaagaagaugcucggccccuccgccgucgacaucggcaacggcugcuucgagaccaagcacaagugcaaccagaccugccucgaccgcaucgccgccggcaccuucaacgccggcgaguucucccuccccaccuucgacucccucaacaucaccgccgccucccucaacgacgacggccucgacaaccacaccauccuccucuacuacuccaccgccgccuccucccucgccgucacccucaugcucgcccucuucaucgucuacauggucucccgcgacaacgucuccugcuccaucugccucuga

SEQ ID NO: 124485 - RNA, 1755 nt, Artificial Sequence
  derived and/or modified CDS sequence (opt2) from hemagglutinin__InfluenzaB__ALE31984
augaaggccaucaucguccuccucauggucgucaccuccaacgccgaccgcaucugcaccggcaucaccuccuccaacuccccccacgucgucaagaccgccacccagggcgaggucaacgucaccggcgucaucccccucaccaccacccccaccaaguccuacuucgccaaccucaagggcacccgcacccgcggcaagcucugccccgacugccucaacugcaccgaccucgacgucgcccucggccgccccaugugcgucggcaccacccccuccgccaaggccuccauccuccacgagguccgccccgucaccuccggcugcuuccccaucaugcacgaccgcaccaagauccgccagcuccccaaccuccuccgcggcuacgagaagauccgccucuccacccagaacgucaucgacgccgagaaggcccccggcggccccuaccgccucggcaccuccggcuccugccccaacgccaccuccaagaucggcuucuucgccaccauggccugggccguccccaaggacaacuacaagaacgccaccaacccccagaccgucgagguccccuacaucugcaccgaggaggaggaccagaucaccgucuggggcuuccacuccgacaacaagacccagaugaagucccucuacggcgacuccaacccccagaaguucaccuccuccgccaacggcgucaccacccacuacgucucccagaucggcgacuuccccgaccagaccgaggacggcggccucccccaguccggccgcaucgucgucgacuacaugguccagaagcccggcaagaccggcaccaucgucuaccagcgcggcguccuccucccccagaaggucuggugcgccuccggccgcuccaaggucaucaagggcucccucccccucaucggcgaggccgacugccuccacgaggaguacggcggccucaacaaguccaagcccuacuacaccggcaagcacgccaaggccaucggcaacugccccaucugggucaagaccccccucaagcucgccaacggcaccaaguaccgcccccccgccaagcuccucaaggagcgcggcuucuucggcgccaucgccggcuuccucgagggcggcugggagggcaugaucgccggcuggcacggcuacaccucccacggcgcccacggcgucgccgucgccgccgaccucaaguccacccaggaggccaucaacaagaucaccaagaaccucaacucccucuccgagcucgaggucaagaaccuccagcgccucuccggcgccauggacgagcuccacaacgagauccucgagcucgacgagaaggucgacgaccuccgcgccgacaccaucuccucccagaucgagcucgccguccuccucuccaacgagggcaucaucaacuccgaggacgagcaccuccucgcccucgagcgcaagcucaagaagaugcucggccccuccgccgucgacaucggcaacggcugcuucgagaccaagcacaagugcaaccagaccugccucgaccgcaucgccgccggcaccuucaacgccggcgaguucucccuccccaccuucgacucccucaacaucaccgccgccucccucaacgacgacggccucgacaaccacaccauccuccucuacuacuccaccgccgccuccucccucgccgucacccucaugcucgccaucuucaucgucuacauggucucccgcgacaacgucuccugcuccaucugccucuga

SEQ ID NO: 124486 - RNA, 1755 nt, Artificial Sequence; identical to SEQ ID NO: 124325
  derived and/or modified CDS sequence (opt2) from hemagglutinin__InfluenzaB__ALE31985

SEQ ID NO: 124487 - RNA, 1758 nt, Artificial Sequence
  derived and/or modified CDS sequence (opt2) from hemagglutinin__InfluenzaB__ALE31986
augaaggccaucaucguccuccucauggucgucaccuccaacgccgaccgcaucugcaccggcaucaccuccuccaacuccccccacgucgucaagaccgccacccagggcgaggucaacgucaccggcgucaucccccucaccaccacccccaccaagucccacuucgccaaccucaagggcaccgagacccgcggcaagcucugccccaagugccucaacugcaccgaccucgacgucgcccucggccgccccaagugcaccggcaagauccccuccgcccgcgucuccauccuccacgagguccgccccgucaccuccggcugcuuccccaucaugcacgaccgcaccaagauccgccagcuccccaaccuccuccgcggcuacgagcacauccgccucuccacccacaacgucaucaacgccgaggacgcccccggcggccccuacaagaucggcaccuccggcuccugccccaacaucaccaacggcaacggcuucuucgccaccauggccugggccguccccaagaacgacaagaacaagaccgccaccaacccccucaccaucgagguccccuacaucugcaccgagggcgaggaccagaucaccgucuggggcuuccacuccgacaacgagacccagauggccaagcucuacggcgacuccaagccccagaaguucaccuccuccgccaacggcgucaccacccacuacgucucccagaucggcggcuuccccaaccagaccgaggacggcggccucccccaguccggccgcaucgucaucgacuacaugguccagaaguccggcaagaccggcaccaucaccuaccagcgcggcauccuccucccccagaaggucuggugcgccuccggccgcuccaaggucaucaagggcucccucccccucaucggcgaggccgacugccuccacgagaaguacggcggccucaacaaguccaagcccuacuacaccggcgagcacgccaaggccgucggcaacugccccaucugggucaagaccccccucaagcucgccaacggcaccaaguaccgcccccccgccaagcuccucaaggagcgcggcuucuucggcgccaucgccggcuuccucgagggcggcugggagggcaugaucgccggcuggcacggcuacaccucccacggcgcccacggcgucgccgucgccgccgaccucaaguccacccaggaggccaucaacaagaucaccaagaaccucaacucccucuccgagcucgaggucaagaaccuccagcgccucuccggcgccauggacgagcuccacaacgagauccucgagcucgacgagaaggucgacgaccuccgcgccgacaccaucuccucccagaucgagcucgccguccuccucuccaacgagggcaucaucaacuccgaggacgagcaccuccucgcccucgagcgcaagcucaagaagaugcucggccccuccgccgucgagaucggcaacggcugcuucgagaccaagcacaagugcaaccagaccugccucgaccgcaucgccgccggcaccuucgacgccggcgaguucucccuccccaccuucgacucccucaacaucaccgccgccucccucaacgacgacggccucgacaaccacaccauccuccucuacuacuccaccgccgccuccucccucgccgucacccucaugaucgccaucuucgucgucuacauggucucccgcgacaacgucuccugcuccaucugccucuga

SEQ ID NO: 124488 - RNA, 1755 nt, Artificial Sequence
  derived and/or modified CDS sequence (opt2) from hemagglutinin__InfluenzaB__ALE31988
augaaggccaucaucguccuccucauggucgucaccuccaacgccgaccgcaucugcaccggcaucaccuccuccaacuccccccacgucgucaagaccgccacccagggcgaggucaacgucaccggcgucaucccccucaccaccacccccaccaaguccuacuucgccaaccucaagggcacccgcacccgcggcaagcucugccccgacugccucaacugcaccgaccucgacgucgcccucggccgccccaugugcgucggcaccacccccuccgccaaggccuccauccuccacgagguccgccccgucaccuccggcugcuuccccaucaugcacgaccgcaccaagauccgccagcuccccaaccuccuccgcggcuacgagaagauccgccucuccacccagaacgucaucgacgccgagaaggcccccggcggccccuaccgccucggcaccuccggcuccugccccaacgccaccuccaagaucggcuucuucgccaccauggccugggccguccccaaggacaacuacaagaacgccaccaacccccagaccgucgagguccccuacaucugcaccgagggcgaggaccagaucaccgucuggggcuuccacuccgacaacaagacccagaugaagucccucuacggcgacuccaacccccagaaguucaccuccuccgccaacggcgucaccacccacuacgucucccagaucggcgacuuccccgaccagaccgaggacggcggccucccccaguccggccgcaucgucgucgacuacaugguccagaagcccggcaagaccggcaccaucgucuaccagcgcggcguccuccucccccagaaggucuggugcgccuccggccgcuccaaggucaucaagggcucccucccccucaucggcgaggccgacugccuccacgaggaguacggcggccucaacaaguccaagcccuacuacaccggcaagcacgccaaggccaucggcaacugccccaucugggucaagaccccccucaagcucgccaacggcaccaaguaccgcccccccgccaagcuccucaaggagcgcggcuucuucggcgccaucgccggcuuccucgagggcggcugggagggcaugaucgccggcuggcacggcuacaccucccacggcgcccacggcgucgccgucgccgccgaccucaaguccacccaggaggccaucaacaagaucaccaagaaccucaacucccucuccgagcucgaggucaagaaccuccagcgccucuccggcgccauggacgagcuccacaacgagauccucgagcucgacgagaaggucgacgaccuccgcgccgacaccaucuccucccagaucgagcucgccguccuccucuccaacgagggcaucaucaacuccgaggacgagcaccuccucgcccucgagcgcaagcucaagaagaugcucggccccuccgccgucgacaucggcaacggcugcuucgagaccaagcacaagugcaaccagaccugccucgaccgcaucgccgccggcaccuucaacgccggcgaguucucccuccccaccuucgacucccucaacaucaccgccgccucccucaacgacgacggccucgacaaccacaccauccuccucuacuacuccaccgccgccuccucccucgccgucacccucaugcucgccaucuucaucgucuacauggucucccgcgacaacgucuccugcuccaucugccucuga

SEQ ID NO: 124489 - RNA, 1758 nt, Artificial Sequence; identical to SEQ ID NO: 124487
  derived and/or modified CDS sequence (opt2) from hemagglutinin__InfluenzaB__ALE31989

SEQ ID NO: 124490 - RNA, 1758 nt, Artificial Sequence; identical to SEQ ID NO: 124487
  derived and/or modified CDS sequence (opt2) from hemagglutinin__InfluenzaB__ALE31990

SEQ ID NO: 124491 - RNA, 1755 nt, Artificial Sequence; identical to SEQ ID NO: 124325
  derived and/or modified CDS sequence (opt2) from hemagglutinin__InfluenzaB__ALE31991

SEQ ID NO: 124492 - RNA, 1758 nt, Artificial Sequence
  derived and/or modified CDS sequence (opt2) from hemagglutinin__InfluenzaB__ALE31992
augaaggccaucaucguccuccucauggucgucaccuccaacgccgaccgcaucugcaccggcaucaccuccuccaacuccccccacgucgucaagaccgccacccagggcgaggucaacgucaccggcgucaucccccucaccaccacccccaccaagucccacuucgccaaccucaagggcaccgagacccgcggcaagcucugccccaagugccucaacugcaccgaccucgacgucgcccucggccgccccaagugcaccggcaagauccccuccgcccgcgucuccauccuccacgagguccgccccgucaccuccggcugcuuccccaucaugcacgaccgcaccaagauccgccagcuccccaaccuccuccgcggcuacgagcacguccgccucuccacccacaacgucaucaacgccgaggacgcccccggcggccccuacaagaucggcaccuccggcuccugccccaacaucaccaacggcaacggcuucuucgccaccauggccugggccguccccaagaacgacaagaacaagaccgccaccaacccccucaccaucgagguccccuacaucugcaccgagcgcgaggaccagaucaccgucuggggcuuccacuccgacaacgagacccagauggccaagcucuacggcgacuccaagccccagaaguucaccuccuccgccaacggcgucaccacccacuacgucucccagaucggcggcuuccccaaccagaccgaggacggcggccucccccaguccggccgcaucgucgucgacuacaugguccagaaguccggcaagaccggcaccaucaccuaccagcgcggcauccuccucccccagaaggucuggugcgccuccggccgcuccaaggucaucaagggcucccucccccucaucggcgaggccgacugccuccacgagaaguacggcggccucaacaaguccaagcccuacuacaccggcgagcacgccaaggccaucggcaacugccccaucugggucaagaccccccucaagcucgccaacggcaccaaguaccgcccccccgccaagcuccucaaggagcgcggcuucuucggcgccaucgccggcuuccucgagggcggcugggagggcaugaucgccggcuggcacggcuacaccucccacggcgcccacggcgucgccgucgccgccgaccucaaguccacccaggaggccaucaacaagaucaccaagaaccucaacucccucuccgagcucgaggucaagaaccuccagcgccucuccggcgccauggacgagcuccacaacgagauccucgagcucgacgagaaggucgacgaccuccgcgccgacaccaucuccucccagaucgagcucgccguccuccucuccaacgagggcaucaucaacuccgaggacgagcaccuccucgcccucgagcgcaagcucaagaagaugcucggccccuccgccgucgagaucggcaacggcugcuucgagaccaagcacaagugcaaccagaccugccucgaccgcaucgccgccggcaccuucgacgccggcgaguucucccuccccaccuucgacucccucaacaucaccgccgccucccucaacgacgacggccucgacaaccacaccauccuccucuacuacuccaccgccgccuccucccucgccgucacccucaugaucgccaucuucgucgucuacauggucucccgcgacaacgucuccugcuccaucugccucuga

SEQ ID NO: 124493 - RNA, 1758 nt, Artificial Sequence; identical to SEQ ID NO: 123901
  derived and/or modified CDS sequence (opt2) from hemagglutinin__InfluenzaB__ALE31993

SEQ ID NO: 124494 - RNA, 1758 nt, Artificial Sequence
  derived and/or modified CDS sequence (opt2) from hemagglutinin__InfluenzaB__ALE31994
augaaggccaucaucguccuccucauggucgucaccuccaacgccgaccgcaucugcaccggcaucaccuccuccaacuccccccacgucgucaagaccgccacccagggcgaggucaacgucaccggcgucaucccccucaccaccacccccaccaagucccacuucgccaaccucaagggcaccgagacccgcggcaagcucugccccaagugccucaacugcaccgaccucgacgucgcccucggccgccccaagugcaccggcaagauccccuccgcccgcgucuccauccuccacgagguccgccccgucaccuccggcugcuuccccaucaugcacgaccgcaccaagauccgccagcuccccaaccuccuccgcggcuacgagcacguccgccucuccacccacaacgucaucaacgccgaggacgcccccggcggccccuacaagaucggcaccuccggcuccugccccaacaucaccaacggcaacggcuucuucgccaccauggccugggccguccccaagaacgacaagaacaagaccgccaccaacccccucaccaucgagguccccuacaucugcaccgagggcgaggaccagaucaccgucuggggcuuccacuccgacaacgagacccagauggccaagcucuacggcgacuccaagccccagaaguucaccuccuccgccaacggcgucaccacccacuacgucucccagaucggcggcuuccccaaccagaccgaggacggcggccucccccaguccggccgcaucgucgucgacuacaugguccagaaguccggcaagaccggcaccaucaccuaccagcgcggcauccuccucccccagaaggucuggugcgccuccggccgcuccaaggucaucaagggcucccucccccucaucggcgaggccgacugccuccacgagaaguacggcggccucaacaaguccaagcccuacuacaccggcgagcacgccaaggccaucggcaacugccccaucuggguccgcaccccccucaagcucgccaacggcaccaaguaccgcccccccgccaagcuccucaaggagcgcggcuucuucggcgccaucgccggcuuccucgagggcggcugggagggcaugaucgccggcuggcacggcuacaccucccacggcgcccacggcgucgccgucgccgccgaccucaaguccacccaggaggccaucaacaagaucaccaagaaccucaacucccucuccgagcucgaggucaagaaccuccagcgccucuccggcgccauggacgagcuccacaacgagauccucgagcucgacgagaaggucgacgaccuccgcgccgacaccaucuccucccagaucgagcucgccguccuccucuccaacgagggcaucaucaacuccgaggacgagcaccuccucgcccucgagcgcaagcucaagaagaugcucggccccuccgccgucgagaucggcaacggcugcuucgagaccaagcacaagugcaaccagaccugccucgaccgcaucgccgccggcaccuucgacgccggcgaguucucccuccccaccuucgacucccucaacaucaccgccgccucccucaacgacgacggccucgacaaccacaccauccuccucuacuacuccaccgccgccuccucccucgccgucacccucaugaucgccaucuucgucgucuacauggucucccgcgacaacgucuccugcuccaucugccucuga

SEQ ID NO: 124495 - RNA, 1755 nt, Artificial Sequence; identical to SEQ ID NO: 124484
  derived and/or modified CDS sequence (opt2) from hemagglutinin__InfluenzaB__ALN39719

SEQ ID NO: 124496 - RNA, 1755 nt, Artificial Sequence; identical to SEQ ID NO: 124325
  derived and/or modified CDS sequence (opt2) from hemagglutinin__InfluenzaB__ALN39720

SEQ ID NO: 124497 - RNA, 1755 nt, Artificial Sequence; identical to SEQ ID NO: 124325
  derived and/or modified CDS sequence (opt2) from hemagglutinin__InfluenzaB__ALN39721

SEQ ID NO: 124498 - RNA, 1755 nt, Artificial Sequence; identical to SEQ ID NO: 124325
  derived and/or modified CDS sequence (opt2) from hemagglutinin__InfluenzaB__ALN39723

SEQ ID NO: 124499 - RNA, 1755 nt, Artificial Sequence; identical to SEQ ID NO: 124325
  derived and/or modified CDS sequence (opt2) from hemagglutinin__InfluenzaB__ALN39724

SEQ ID NO: 124500 - RNA, 1755 nt, Artificial Sequence; identical to SEQ ID NO: 124488
  derived and/or modified CDS sequence (opt2) from hemagglutinin__InfluenzaB__ALN39725

SEQ ID NO: 124501 - RNA, 1755 nt, Artificial Sequence
  derived and/or modified CDS sequence (opt2) from hemagglutinin__InfluenzaB__ALN39726
augaaggccaucaucguccuccucauggucgucaccuccaacgccgaccgcaucugcaccggcaucaccuccuccaacuccccccacgucgucaagaccgccacccagggcgaggucaacgucaccggcgucaucccccucaccaccacccccaccaaguccuacuucgccaaccucaagggcacccgcacccgcggcaagcucugccccgacugccucaacugcaccgaccucgacgucgcccucggccgccccaugugcgucggcaccacccccuccgccaaggccuccauccuccacgagguccgccccgucaccuccggcugcuuccccaucaugcacgaccgcaccaagauccgccagcuccccaaccuccuccgcggcuacgagaagauccgccucuccacccagaacgucaucgacgccgagaaggcccccggcggccccuaccgccucggcaccuccggcuccugccccaacgccaccuccaagaucggcuucuucgccaccauggccugggccguccccaaggacaacuacaagaacgccaccaacccccagaccgucgagguccccuacaucugcaccgagggcgaggaccagaucaccgucuggggcuuccacuccgacaacaagacccagaugaagucccucuacggcgacuccaacccccagaaguucaccuccuccgccgacggcgucaccacccacuacgucucccagaucggcgacuuccccgaccagaccgaggacggcggccucccccaguccggccgcaucgucgucgacuacaugaugcagaagcccggcaagaccggcaccaucgucuaccagcgcggcguccuccucccccagaaggucuggugcgccuccggccgcuccaaggucaucaagggcucccucccccucaucggcgaggccgacugccuccacgaggaguacggcggccucaacaaguccaagcccuacuacaccggcaagcacgccaaggccaucggcaacugccccaucugggucaagaccccccucaagcucgccaacggcaccaaguaccgcccccccgccaagcuccucaaggagcgcggcuucuucggcgccaucgccggcuuccucgagggcggcugggagggcaugaucgccggcuggcacggcuacaccucccacggcgcccacggcgucgccgucgccgccgaccucaaguccacccaggaggccaucaacaagaucaccaagaaccucaacucccucuccgagcucgaggucaagaaccuccagcgccucuccggcgccauggacgagcuccacaacgagauccucgagcucgacgagaaggucgacgaccuccgcgccgacaccaucuccucccagaucgagcucgccguccuccucuccaacgagggcaucaucaacuccgaggacgagcaccuccucgcccucgagcgcaagcucaagaagaugcucggccccuccgccgucgacaucggcaacggcugcuucgagaccaagcacaagugcaaccagaccugccucgaccgcaucgccgccggcaccuucaacgccggcgaguucucccuccccaccuucgacucccucaacaucaccgccgccucccucaacgacgacggccucgacaaccacaccauccuccucuacuacuccaccgccgccuccucccucgccgucacccucaugcucgccaucuucaucgucuacauggucucccgcgacaacgucuccugcuccaucugccucuga

SEQ ID NO: 124502 - RNA, 1755 nt, Artificial Sequence; identical to SEQ ID NO: 124488
  derived and/or modified CDS sequence (opt2) from hemagglutinin__InfluenzaB__ALN39727

SEQ ID NO: 124503 - RNA, 1755 nt, Artificial Sequence; identical to SEQ ID NO: 124325
  derived and/or modified CDS sequence (opt2) from hemagglutinin__InfluenzaB__ALN39728

SEQ ID NO: 124504 - RNA, 1755 nt, Artificial Sequence; identical to SEQ ID NO: 124325
  derived and/or modified CDS sequence (opt2) from hemagglutinin__InfluenzaB__ALN39729

SEQ ID NO: 124505 - RNA, 1758 nt, Artificial Sequence
  derived and/or modified CDS sequence (opt2) from hemagglutinin__InfluenzaB__ALN39730
augaaggccaucaucguccuccucauggucgucaccuccaacgccgaccgcaucugcaccggcaucaccuccuccaacuccccccacgucgucaagaccgccacccagggcgaggucaacgucaccggcgucaucccccucaccaccacccccaccaagucccacuucgccaaccucaagggcaccgagacccgcggcaagcucugccccaagugccucaacugcaccgaccucgacgucgcccucggccgccccaagugcaccggcaagauccccuccgcccgcgucuccauccuccacgagguccgccccgucaccuccggcugcuuccccaucaugcacgaccgcaccaagauccgccagcuccccaaccuccuccgcggcuacgagcacguccgccucuccacccacaacgucaucaacgccgaggacgcccccggcggccccuacaagaucggcaccuccggcuccugccccaacaucaccaacggcaacggcuucuucgccaccauggccugggccguccccaagaacgacaagaacaagaccgccaccaacccccucaccaucgagguccccuacaucugcaccgagggcgaggaccagaucaccgucuggggcuuccacuccgacaacgagacccagauggccaagcucuacggcgacuccaagccccagaaguucaccuccuccgccaacggcgucaccacccacuacgucucccagaucggcggcuuccccaaccagaccgaggacggcggccucccccaguccggccgcaucgucgucgacuacaugguccagaaguccggcaagaccggcaccaucaccuaccagcgcggcauccuccucccccagaaggucuggugcgccuccggccgcuccaaggucaucaagggcucccucccccucaucggcgaggccgacugccuccacgagaaguacggcggccucaacaaguccaagcccuacuacaccggcgagcacgccaaggccaucggcaacugccccaucugggucaagaccccccucaagcucgccaacggcaccaaguaccgcccccccgccaagcuccucaaggagcgcggcuucuucggcgccaucgccggcuuccucgagggcggcugggagggcaugaucgccggcuggcacggcuacaccucccacggcgcccacggcgucgccgucgccgccgaccucaaguccacccaggaggccaucaacaagaucaccaagaaccucaacucccucuccgagcucgaggucaagaaccuccagcgccucuccggcgccauggacgagcuccacaacgagauccucgagcucgacgagaaggucgacgaccuccgcgccgacaccaucuccucccagaucgagcucgccguccuccucuccaacgagggcaucaucaacuccgaggacgagcaccuccucgcccucgagcgcaagcucaagaagaugcucggccccuccgccgucgagaucggcaacggcugcuucgagaccaagcacaagugcaaccagaccugccucgaccgcaucgccgccggcaccuucgacgccggcgaguucuuccuccccaccuucgacucccucaacaucaccgccgccucccucaacgacgacggccucgacaaccacaccauccuccucuacuacuccaccgccgccuccucccucgccgucacccucaugaucgccaucuucgucgucuacauggucucccgcgacaacgucuccugcuccaucugccucuga

SEQ ID NO: 124506 - RNA, 1755 nt, Artificial Sequence; identical to SEQ ID NO: 124325
  derived and/or modified CDS sequence (opt2) from hemagglutinin__InfluenzaB__ALN39732

SEQ ID NO: 124507 - RNA, 1755 nt, Artificial Sequence
  derived and/or modified CDS sequence (opt2) from hemagglutinin__InfluenzaB__ALN39733
augaaggccaucaucguccuccucauggucgucaccuccaacgccgaccgcaucugcaccggcaucaccuccuccaacuccccccacgucgucaagaccgccacccagggcgaggucaacgucaccggcgucaucccccucaccaccacccccaccaaguccuacuucgccaaccucaagggcacccgcacccgcggcaagcucugccccgacugccucaacugcaccgaccucgacgucgcccucggccgccccaugugcgucggcaccacccccuccgccaaggccuccauccuccacgagguccgccccgucaccuccggcugcuuccccaucaugcacgaccgcaccaagauccgccagcuccccaaccuccuccgcggcuacgagaagauccgccucuccacccagaacgucaucgacgccgagaaggcccccggcggccccuaccgccucggcaccuccggcuccugccccaacgccaccuccaagaucggcuucuucgccaccauggccugggccguccccaaggacaacuacaagaacgccaccaacccccagaccgucgagguccccuacaucugcaccgagggcgaggaccagaucaccgucuggggcuuccacuccgacaacaagacccagaugaagucccucuacggcgacuccaacccccagaaguucaccuccuccgccaacggcgucaccacccacuacgucucccagaucggcgacuuccccgaccagaccgaggacggcggccucccccaguccggccgcaucgucgucgacuacaugaugcagaagcccggcaagaccggcaccaucgucuaccagcgcggcguccuccucccccagaaggucuggugcgccuccggccgcuccaaggucaucaagggcucccucccccucaucggcgaggccgacugccuccacgaggaguacggcggccucaacaaguccaagcccuacuacaccggcaagcacgccaaggccaucggcaacugccccaucugggucaagaccccccucaagcucgccaacggcaccaaguaccgcccccccgccaagcuccucaaggagcgcggcuucuucggcgccaucgccggcuuccucgagggcggcugggagggcaugaucgccggcuggcacggcuacaccucccacggcgcccacggcgucgccgucgccgccgaccucaaguccacccaggaggccaucaacaagaucaccaagaaccucaacucccucuccgagcucgaggucaagaaccuccagcgccucuccggcgccauggacgagcuccacaacgagauccucgagcucgacgagaaggucgacgaccuccgcgccgacaccaucuccucccagaucgagcucgccguccuccucuccaacgagggcaucaucaacuccgaggacgagcaccuccucgcccucgagcgcaagcucaagaagaugcucggccccuccgccgucgacaucggcaacggcugcuucgagaccaagcaccgcugcaaccagaccugccucgaccgcaucgccgccggcaccuucaacgccggcgaguucucccuccccaccuucgacucccucaacaucaccgccgccucccucaacgacgacggccucgacaaccacaccauccuccucuacuacuccaccgccgccuccucccucgccgucacccucaugcucgccaucuucaucgucuacauggucucccgcgacaacgucuccugcuccaucugccucuga

SEQ ID NO: 124508 - RNA, 1755 nt, Artificial Sequence
  derived and/or modified CDS sequence (opt2) from hemagglutinin__InfluenzaB__ALN39751
augaaggccaucaucguccuccucauggucgucaccuccaacgccgaccgcaucugcaccggcaucaccuccuccaacuccccccacgucgucaagaccgccacccagggcgaggucaacgucaccggcgucaucccccucaccaccacccccaccaaguccuacuucgccaaccucaagggcacccgcacccgcggcaagcucugccccgacugccucaacugcaccgaccucgacgucgcccucggccgccccaugugcgucggcaccacccccuccgccaaggccuccauccuccacgagguccgccccgucaccuccggcugcuuccccaucaugcacgaccgcaccaagauccgccagcuccccaaccuccuccgcggcuacgagaagauccgccucuccacccagaacgucaucgacgccgagaaggcccccggcggccccuaccgccucggcaccuccggcuccugccccaacgccaccuccaagaucggcuucuucgccaccauggccugggccguccccaaggacaacuacaagaacgccaccaacccccagaccgucgagguccccuacaucugcaccgagggcgaggaccagaucaccgucuggggcuuccacuccgacaacaagacccagaugaagucccucuacggcgacuccaacccccagaaguucaccuccuccgccaacggcgucaccacccacuacgucucccagaucggcgacuuccccgaccagaccgaggacggcggccucccccaguccggccgcaucgucgucgacuacaugaugcagaagcccggcaagaccggcaccaucgucuaccagcgcggcguccuccucccccagaaggucuggugcgccuccggccgcuccaaggucaucaagggcucccucccccucaucggcgaggccgacugccuccacgaggaguacggcggccucaacaaguccaagcccuacuacaccggcaagcacgccaaggccaucggcaacugccccaucugggucaagaccccccucaagcucgccaacggcaccaaguaccgcccccccgccaagcuccucaaggagcgcggcuucuucggcgccaucgccggcuuccucgagggcggcugggagggcauggucgccggcuggcacggcuacaccucccacggcgcccacggcgucgccgucgccgccgaccucaaguccacccaggaggccaucaacaagaucaccaagaaccucaacucccucuccgagcucgaggucaagaaccuccagcgccucuccggcgccauggacgagcuccacaacgagauccucgagcucgacgagaaggucgacgaccuccgcgccgacaccaucuccucccagaucgagcucgccguccuccucuccaacgagggcaucaucaacuccgaggacgagcaccuccucgcccucgagcgcaagcucaagaagaugcucggccccuccgccgucgacaucggcaacggcugcuucgagaccaagcacaagugcaaccagaccugccucgaccgcaucgccgccggcaccuucaacgccggcgaguucucccuccccaccuucgacucccucaacaucaccgccgccucccucaacgacgacggccucgacaaccacaccauccuccucuacuacuccaccgccgccuccucccucgccgucacccucaugcucgcccucuucaucgucuacauggucucccgcgacaacgucuccugcuccaucugccucuga

SEQ ID NO: 124509 - RNA, 1755 nt, Artificial Sequence; identical to SEQ ID NO: 124484
  derived and/or modified CDS sequence (opt2) from hemagglutinin__InfluenzaB__ALN39752

SEQ ID NO: 124510 - RNA, 1755 nt, Artificial Sequence; identical to SEQ ID NO: 124325
  derived and/or modified CDS sequence (opt2) from hemagglutinin__InfluenzaB__ALN39753

SEQ ID NO: 124511 - RNA, 1758 nt, Artificial Sequence
  derived and/or modified CDS sequence (opt2) from hemagglutinin__InfluenzaB__ALN39754
augaaggccaucaucguccuccucauggucgucaccuccaacgccgaccgcaucugcaccggcaucaccuccuccaacuccccccacgucgucaagaccgccacccagggcgaggucaacgucaccggcgucaucccccucaccaccacccccaccaagucccacuucgccaaccucaagggcaccgagacccgcggcaagcucugccccaagugccucaacugcaccgaccucgacgucgcccucggccgccccaagugcaccggcaagauccccuccgcccgcgucuccauccuccacgagguccgccccgucaccuccggcugcuuccccaucaugcacgaccgcaccaagauccgccagcuccccaaccuccuccgcggcuacgagcacguccgccucuccacccacaacgucaucaacgccgaggacgcccccggcggccccuacaagaucggcaccuccggcuccugccccaacaucaccaacggcaacggcuucuucgccaccauggccugggccguccccaagaacgacaagaacaagaccgccaccaacccccucaccaucgagguccccuacaucugcaccgagggcgaggaccagaucaccgucuggggcuuccacuccgacaacgagacccagauggccaagcucuacggcgacuccaagccccagaaguucaccuccuccgccaacggcgucaccacccacuacgucucccagaucggcggcuuccccaaccagaccgaggacggcggccucccccaguccggccgcaucgucgucgacuacaugguccagaaguccggcaagaccggcaccaucaccuaccagcgcggcauccuccucccccagaaggucuggugcgccuccggccgcuccaaggucaucaagggcucccucccccucaucggcgaggccgacugccuccacgagaaguacggcggccucaacaaguccaagcccuacuacaccggcgagcacgccaaggccaucggcaacugccccaucugggucaagaccccccucaagcucgccaacggcaccaaguaccgcccccccgccaagcuccucaaggagcgcggcuucuucggcgccaucgccggcuuccucgagggcggcugggagggcaugaucgccggcuggcacggcuacaccucccacggcgcccacggcgucgccgucgccgccgaccucaaguccacccaggaggccaucaacaagaucaccaagaaccucaacucccucuccgagcucgaggucaagaaccuccagcgccucuccggcgccauggacgagcuccacaacgagauccucgagcucgacgagaaggucgacgaccuccgcgccgacaccaucuccucccagaucgagcucgccguccuccucuccaacgagggcaucaucaacuccgaggacgagcaccuccucgcccucgagcgcaagcucaagaagaugcucggccccuccgccgucgagaucggcaacggcugcuucgagaccaagcacaagugcaaccagaccugccucgaccgcaucgccgccggcaccuucgacgccggcgaguucucccuccccaccuucgacucccucaacaucaccgccgccucccucaacgacgacggccucgacaaccacaccauccuccucuacuacuccaccgccgccuccucccucgccgucacccucaugaucgccaucuucgucgucuacauggucucccgcgacaacgucuccugcuccaucugccucuga

SEQ ID NO: 124512 - RNA, 1758 nt, Artificial Sequence
  derived and/or modified CDS sequence (opt2) from hemagglutinin__InfluenzaB__ALN39755
augaaggccaucaucguccuccuccucgucgucaccuccaacgccgaccgcaucugcaccggcaucaccuccuccaacuccccccacgucgucaagaccgccacccagggcgaggucaacgucaccggcgucaucccccucaccaccacccccaccaagucccacuucgccaaccucaagggcaccgagacccgcggcaagcucugccccaagugccucaacugcaccgaccucgacgucgcccucggccgccccaagugcaccggcaagauccccuccgcccgcgucuccauccuccacgagguccgccccgucaccuccggcugcuuccccaucaugcacgaccgcaccaagauccgccagcuccccaaccuccuccgcggcuacgagcacguccgccucuccacccacaacgucaucaacgccgaggacgcccccggcggccccuacaagaucggcaccuccggcuccugccccaacaucaccaacggcaacggcuucuucgccaccauggccugggccguccccaagaacgacaagaacaagaccgccaccaacccccucaccaucgagguccccuacaucugcaccgagggcgaggaccagaucaccgucuggggcuuccacuccgacaacgagacccagauggccaagcucuacggcgacuccaagccccagaaguucaccuccuccgccaacggcgucaccacccacuacgucucccagaucggcggcuuccccaaccagaccgaggacggcggccucccccaguccggccgcaucgucgucgacuacaugguccagaaguccggcaagaccggcaccaucaccuaccagcgcggcauccuccucccccagaaggucuggugcgccuccggccgcuccaaggucaucaagggcucccucccccucaucggcgaggccgacugccuccacgagaaguacggcggccucaacaaguccaagcccuacuacaccggcgagcacgccaaggccaucggcaacugccccaucugggucaagaccccccucaagcucgccaacggcaccaaguaccgcccccccgccaagcuccucaaggagcgcggcuucuucggcgccaucgccggcuuccucgagggcggcugggagggcaugaucgccggcuggcacggcuacaccucccacggcgcccacggcgucgccgucgccgccgaccucaaguccacccaggaggccaucaacaagaucaccaagaaccucaacucccucuccgagcucgaggucaagaaccuccagcgccucuccggcgccauggacgagcuccacaacgagauccucgagcucgacgagaaggucgacgaccuccgcgccgacaccaucuccucccagaucgagcucgccguccuccucuccaacgagggcaucaucaacuccgaggacgagcaccuccucgcccucgagcgcaagcucaagaagaugcucggccccuccgccgucgagaucggcaacggcugcuucgagaccaagcacaagugcaaccagaccugccucgaccgcaucgccgccggcaccuucgacgccggcgaguucucccuccccaccuucgacucccucaacaucaccgccgccucccucaacgacgacggccucgacaaccacaccauccuccucuacuacuccaccgccgccuccucccucgccgucacccucaugaucgccaucuucgucgucuacauggucucccgcgacaacgucuccugcuccaucugccucuga

SEQ ID NO: 124513 - RNA, 1755 nt, Artificial Sequence
  derived and/or modified CDS sequence (opt2) from hemagglutinin__InfluenzaB__ALN39756
augaaggccaucaucguccuccucauggucgucaccuccaacgccgaccgcaucugcaccggcaucaccuccuccaacuccccccacgucgucaagaccgccacccagggcgaggucaacgucaccggcgucaucccccucaccaccacccccaccaaguccuacuucgccaaccucaagggcacccgcacccgcggcaagcucugccccgacugccucaacugcaccgaccucgacgucgcccucggccgccccaugugcgucggcaccacccccuccgccaaggccuccauccuccacgagguccgccccgucaccuccggcugcuuccccaucaugcacgaccgcaccaagauccgccagcuccccaaccuccuccgcggcuacgagaagauccgccucuccacccagaacgucaucgacgccgagaaggcccccggcggccccuaccgccucggcaccuccggcuccugccccaacgccaccuccaagaucggcuucuucgccaccauggccugggccguccccaaggacaacuacaagaacgccaccaacccccagaccgucgagguccccuacaucugcaccgagggcgaggaccagaucaccgucuggggcuuccacuccgacaacaagacccagaugaagucccucuacggcgacuccaacccccagaaguucaccuccuccgccaacggcgucaccacccacuacgucucccagaucggcgacuuccccgaccagaccgaggacggcggccucccccaguccggccgcaucgucgucgacuacaugaugcagaagcccggcaagaccggcaccaucgucuaccagcgcggcguccuccucccccagaaggucuggugcgccuccggccgcuccaaggucaucaagggcucccucccccucaucggcgaggccgacugccuccacgaggaguacggcggccucaacaaguccaagcccuacuacaccggcaagcacgccaaggccaucggcaacugccccaucugggucaagaccccccucaagcucgccaacggcaccaaguaccgcccccccgccaagcuccucaaggagcgcggcuucuucggcgccaucgccggcuuccucgagggcggcugggagggcaugaucgccggcuggcacggcuacaccucccacggcgcccacggcgucgccgucgccgccgaccucaaguccacccaggaggccaucaacaagaucaccaagaaccucaacucccucuccgagcucgaggucaagaaccuccagcgccucuccggcgccauggacgagcuccacaacgagauccucgagcucgacgagaaggucgacgaccuccgcgccgacaccaucuccucccagaucgagcucgccguccuccucuccaacgagggcaucaucaacuccgaggacgagcaccuccucgcccucgagcgcaagcucaagaagaugcucggccccuccgccgucgacaucggcaacggcugcuucgagaccaagcacaagugcaaccagaccugccucgaccgcaucgccgccggcaccuucaacgucggcgaguucucccuccccaccuucgacucccucaacaucaccgccgccucccucaacgacgacggccucgacaaccacaccauccuccucuacuacuccaccgccgccuccucccucgccgucacccucaugcucgccaucuucaucgucuacauggucucccgcgacaacgucuccugcuccaucugccucuga

SEQ ID NO: 124514 - RNA, 1758 nt, Artificial Sequence; identical to SEQ ID NO: 124511
  derived and/or modified CDS sequence (opt2) from hemagglutinin__InfluenzaB__ALN39757

SEQ ID NO: 124515 - RNA, 1755 nt, Artificial Sequence; identical to SEQ ID NO: 124325
  derived and/or modified CDS sequence (opt2) from hemagglutinin__InfluenzaB__ALN39758

SEQ ID NO: 124516 - RNA, 1755 nt, Artificial Sequence
  derived and/or modified CDS sequence (opt2) from hemagglutinin__InfluenzaB__ALN39759
augaagaccaucaucguccuccucauggucgucaccuccaacgccgaccgcaucugcaccggcaucaccuccuccaacuccccccacgucgucaagaccgccacccagggcgaggucaacgucaccggcgucaucccccucaccaccacccccaccaaguccuacuucgccaaccucaagggcacccgcacccgcggcaagcucugccccgacugccucaacugcaccgaccucgacgucgcccucggccgccccaugugcgucggcaccacccccuccgccaaggccuccauccuccacgagguccgccccgucaccuccggcugcuuccccaucaugcacgaccgcaccaagauccgccagcuccccaaccuccuccgcggcuacgagaagauccgccucuccacccagaacgucaucgacgccgagaaggcccccggcggccccuaccgccucggcaccuccggcuccugccccaacgccaccuccaagaucggcuucuucgccaccauggccugggccguccccaaggacaacuacaagaacgccaccaacccccagaccgucgagguccccuacaucugcaccgagggcgaggaccagaucaccgucuggggcuuccacuccgacaacaagacccagaugaagucccucuacggcgacuccaacccccagaaguucaccuccuccgccaacggcgucaccacccacuacgucucccagaucggcgacuuccccgaccagaccgaggacggcggccucccccaguccggccgcaucgucgucgacuacaugaugcagaagcccggcaagaccggcaccaucgucuaccagcgcggcguccuccucccccagaaggucuggugcgccuccggccgcuccaaggucaucaagggcucccucccccucaucggcgaggccgacugccuccacgaggaguacggcggccucaacaaguccaagcccuacuacaccggcaagcacgccaaggccaucggcaacugccccaucugggucaagaccccccucaagcucgccaacggcaccaaguaccgcccccccgccaagcuccucaaggagcgcggcuucuucggcgccaucgccggcuuccucgagggcggcugggagggcaugaucgccggcuggcacggcuacaccucccacggcgcccacggcgucgccgucgccgccgaccucaaguccacccaggaggccaucaacaagaucaccaagaaccucaacucccucuccgagcucgaggucaagaaccuccagcgccucuccggcgccauggacgagcuccacaacgagauccucgagcucgacgagaaggucgacgaccuccgcgccgacaccaucuccucccagaucgagcucgccguccuccucuccaacgagggcaucaucaacuccgaggacgagcaccuccucgcccucgagcgcaagcucaagaagaugcucggccccuccgccgucgacaucggcaacggcugcuucgagaccaagcacaagugcaaccagaccugccucgaccgcaucgccgccggcaccuucaacgccggcgaguucucccuccccaccuucgacucccucaacaucaccgccgccucccucaacgacgacggccucgacaaccacaccauccuccucuacuacuccaccgccgccuccucccucgccgucacccucaugcucgccaucuucaucgucuacauggucucccgcgacaacgucuccugcuccaucugccucuga

SEQ ID NO: 124517 - RNA, 1758 nt, Artificial Sequence; identical to SEQ ID NO: 124475
  derived and/or modified CDS sequence (opt2) from hemagglutinin__InfluenzaB__ALN39760

SEQ ID NO: 124518 - RNA, 1755 nt, Artificial Sequence; identical to SEQ ID NO: 124325
  derived and/or modified CDS sequence (opt2) from hemagglutinin__InfluenzaB__ALN39761

SEQ ID NO: 124519 - RNA, 1755 nt, Artificial Sequence; identical to SEQ ID NO: 124325
  derived and/or modified CDS sequence (opt2) from hemagglutinin__InfluenzaB__ALN39762

SEQ ID NO: 124520 - RNA, 1755 nt, Artificial Sequence; identical to SEQ ID NO: 124325
  derived and/or modified CDS sequence (opt2) from hemagglutinin__InfluenzaB__ALN39763

SEQ ID NO: 124521 - RNA, 1758 nt, Artificial Sequence; identical to SEQ ID NO: 124511
  derived and/or modified CDS sequence (opt2) from hemagglutinin__InfluenzaB__ALN39764

SEQ ID NO: 124522 - RNA, 1755 nt, Artificial Sequence
  derived and/or modified CDS sequence (opt2) from hemagglutinin__InfluenzaB__ALN39765
augaaggccaucaucguccuccucauggucgucaccuccaacgccgaccgcaucugcaccggcaucaccuccuccaacuccccccacgucgucaagaccgccacccagggcgaggucaacgucaccggcgucaucccccucaccaccacccccaccaaguccuacuucgccaaccucaagggcacccgcacccgcggcaagcucugccccgacugccucaacugcaccgaccucgacgucgcccucggccgccccaugugcgucggcaccacccccuccgccaaggccuccauccuccacgagguccgccccgucaccuccggcugcuuccccaucaugcacgaccgcaccaagauccgccagcuccccaaccuccuccgcggcuacgagaagauccgccucuccacccagaacgucaucgacgccgagaaggcccccggcggccccuaccgccucggcaccuccggcuccugccccaacgccaccuccaagaucggcuucuucgccaccauggccugggccguccccaaggacaacuacaagaacgccaccaacccccagaccgucgagguccccuacaucugcaccgagggcgaggaccagaucaccgucuggggcuuccacuccgacaacaagacccagaugaagucccucuacggcgacuccaacccccagaaguucaccuccuccgccaacggcgucaccacccacuacgucucccagaucggcgacuuccccgaccagaccgaggacggcggccucccccaguccggccgcaucgucgucgacuacaugaugcagaagcccggcaagaccggcaccaucgucuaccagcgcggcguccuccucccccagaaggucuggugcgccuccggccgcuccaaggucaucaagggcucccucccccucaucggcgaggccgacugccuccacgaggaguacggcggccucaacaaguccaagcccuacuacaccggcaagcacgccaaggccaucggcaacugccccaucugggucaagaccccccucaagcucgccaacggcaccaaguaccgcccccccgccaagcuccucaaggagcgcggcuucuucggcgccaucgccggcuuccucgagggcggcugggagggcaugaucgccggcuggcacggcuacaccucccacggcgcccacggcgucgccgucgccgccgaccucaaguccacccaggaggccaucaacaagaucaccaagaaccucaacucccucuccgagcucgaggucaacaaccuccagcgccucuccggcgccauggacgagcuccacaacgagauccucgagcucgacgagaaggucgacgaccuccgcgccgacaccaucuccucccagaucgagcucgccguccuccucuccaacgagggcaucaucaacuccgaggacgagcaccuccucgcccucgagcgcaagcucaagaagaugcucggccccuccgccgucgacaucggcaacggcugcuucgagaccaagcacaagugcaaccagaccugccucgaccgcaucgccgccggcaccuucaacgccggcgaguucucccuccccaccuucgacucccucaacaucaccgccgccucccucaacgacgacggccucgacaaccacaccauccuccucuacuacuccaccgccgccuccucccucgccgucacccucaugcucgcccucuucaucgucuacauggucucccgcgacaacgucuccugcuccaucugccucuga

SEQ ID NO: 124523 - RNA, 1755 nt, Artificial Sequence; identical to SEQ ID NO: 124488
  derived and/or modified CDS sequence (opt2) from hemagglutinin__InfluenzaB__ALN39766

SEQ ID NO: 124524 - RNA, 1755 nt, Artificial Sequence; identical to SEQ ID NO: 124325
  derived and/or modified CDS sequence (opt2) from hemagglutinin__InfluenzaB__ALN39767

SEQ ID NO: 124525 - RNA, 1755 nt, Artificial Sequence; identical to SEQ ID NO: 124488
  derived and/or modified CDS sequence (opt2) from hemagglutinin__InfluenzaB__ALN39768

SEQ ID NO: 124526 - RNA, 1755 nt, Artificial Sequence
  derived and/or modified CDS sequence (opt2) from hemagglutinin__InfluenzaB__ALN39769
augaaggccaucaucguccuccucauggucgucaccuccaacgccgaccgcaucugcaccggcaucaccuccuccaacuccccccacgucgucaagaccgccacccagggcgaggucaacgucaccggcgucaucccccucaccaccacccccaccaaguccuacuucgccaaccucaagggcacccgcacccgcggcaagcucugccccgacugccucaacugcaccgaccucgacgucgcccucggccgccccaugugcgucggcaccacccccuccgccaaggccuccauccuccacgagguccgccccgucaccuccggcugcuuccccaucaugcacggccgcaccaagauccgccagcuccccaaccuccuccgcggcuacgagaagauccgccucuccacccagaacgucaucgacgccgagaaggcccccggcggccccuaccgccucggcaccuccggcuccugccccaacgccaccuccaagaucggcuucuucgccaccauggccugggccguccccaaggacaacuacaagaacgccaccaacccccagaccgucgagguccccuacaucugcaccgagggcgaggaccagaucaccgucuggggcuuccacuccgacaacaagacccagaugaagucccucuacggcgacuccaacccccagaaguucaccuccuccgccaacggcgucaccacccacuacgucucccagaucggcgacuuccccgaccagaccgaggacggcggccucccccaguccggccgcaucgucgucgacuacaugaugcagaagcccggcaagaccggcaccaucgucuaccagcgcggcguccuccucccccagaaggucuggugcgccuccggccgcuccaaggucaucaagggcucccucccccucaucggcgaggccgacugccuccacgaggaguacggcggccucaacaaguccaagcccuacuacaccggcaagcacgccaaggccaucggcaacugccccaucugggucaagaccccccucaagcucgccaacggcaccaaguaccgcccccccgccaagcuccucaaggagcgcggcuucuucggcgccaucgccggcuuccucgagggcggcugggagggcaugaucgccggcuggcacggcuacaccucccacggcgcccacggcgucgccgucgccgccgaccucaaguccacccaggaggccaucaacaagaucaccaagaaccucaacucccucuccgagcucgaggucaagaaccuccagcgccucuccggcgccauggacgagcuccacaacgagauccucgagcucgacgagaaggucgacgaccuccgcgccgacaccaucuccucccagaucgagcucgccguccuccucuccaacgagggcaucaucaacuccgaggacgagcaccuccucgcccucgagcgcaagcucaagaagaugcucggccccuccgccgucgacaucggcaacggcugcuucgagaccaagcacaagugcaaccagaccugccucgaccgcaucgccgccggcaccuucaacgccggcgaguucucccuccccaccuucgacucccucaacaucaccgccgccucccucaacgacgacggccucgacaaccacaccauccuccucuacuacuccaccgccgccuccucccucgccgucacccucaugcucgccaucuucaucgucuacauggucucccgcgacaacgucuccugcuccaucugccucuga

SEQ ID NO: 124527 - RNA, 1755 nt, Artificial Sequence; identical to SEQ ID NO: 124484
  derived and/or modified CDS sequence (opt2) from hemagglutinin__InfluenzaB__ALN39770

SEQ ID NO: 124528 - RNA, 1755 nt, Artificial Sequence; identical to SEQ ID NO: 124484
  derived and/or modified CDS sequence (opt2) from hemagglutinin__InfluenzaB__ALN39771

SEQ ID NO: 124529 - RNA, 1755 nt, Artificial Sequence; identical to SEQ ID NO: 124325
  derived and/or modified CDS sequence (opt2) from hemagglutinin__InfluenzaB__ALN39773

SEQ ID NO: 124530 - RNA, 1755 nt, Artificial Sequence; identical to SEQ ID NO: 124325
  derived and/or modified CDS sequence (opt2) from hemagglutinin__InfluenzaB__ALN39774

SEQ ID NO: 124531 - RNA, 1758 nt, Artificial Sequence
  derived and/or modified CDS sequence (opt2) from hemagglutinin__InfluenzaB__ALN39775
augcaggccaucaucguccuccucauggucgucaccuccaacgccgaccgcaucugcaccggcaucaccuccuccaacuccccccacgucgucaagaccgccacccagggcgaggucaacgucaccggcgucaucccccucaccaccacccccaccaagucccacuucgccaaccucaagggcaccgagacccgcggcaagcucugccccaagugccucaacugcaccgaccucgacgucgcccucggccgccccaagugcaccggcaagauccccuccgcccgcgucuccauccuccacgagguccgccccgucaccuccggcugcuuccccaucaugcacgaccgcaccaagauccgccagcuccccaaccuccuccgcggcuacgagcacauccgccucuccacccacaacgucaucaacgccgaggacgcccccggcggccccuacaagaucggcaccuccggcuccugccccaacaucaccaacggcaacggcuucuucgccaccauggccugggccguccccaagaacgacaagaacaagaccgccaccaacccccucaccaucgagguccccuacaucugcaccgagggcgaggaccagaucaccgucuggggcuuccacuccgacaacgagacccagauggccaagcucuacggcgacuccaagccccagaaguucaccuccuccgccaacggcgucaccacccacuacgucucccagaucggcggcuuccccaaccagaccgaggacggcggccucccccaguccggccgcaucgucaucgacuacaugguccagaaguccggcaagaccggcaccaucaccuaccagcgcggcauccuccucccccagaaggucuggugcgucuccggccgcuccaaggucaucaagggcucccucccccucaucggcgaggccgacugccuccacgagaaguacggcggccucaacaaguccaagcccuacuacaccggcgagcacgccaaggccgucggcaacugccccaucugggucaagaccccccucaagcucgccaacggcaccaaguaccgcccccccgccaagcuccucaaggagcgcggcuucuucggcgccaucgccggcuuccucgagggcggcugggagggcaugaucgccggcuggcacggcuacaccucccacggcgcccacggcgucgccgucgccgccgaccucaaguccacccaggaggccaucaacaagaucaccaagaaccucaacucccucuccgagcucgaggucaagaaccuccagcgccucuccggcgccauggacgagcuccacaacgagauccucgagcucgacgagaaggucgacgaccuccgcgccgacaccaucuccucccagaucgagcucgccguccuccucuccaacgagggcaucaucaacuccgaggacgagcaccuccucgcccucgagcgcaagcucaagaagaugcucggccccuccgccgucgagaucggcaacggcugcuucgagaccaagcacaagugcaaccagaccugccucgaccgcaucgccgccggcaccuucgacgccggcgaguucucccuccccaccuucgacucccucaacaucaccgccgccucccucaacgacgacggccucgacaaccacaccauccuccucuacuacuccaccgccgccuccucccucgccgucacccucaugaucgccaucuucgucgucuacauggucucccgcgacaacgucuccugcuccaucugccucuga

SEQ ID NO: 124532 - RNA, 1755 nt, Artificial Sequence
  derived and/or modified CDS sequence (opt2) from hemagglutinin__InfluenzaB__ALN39776
augaaggccaucaucauccuccucauggucgucaccuccaacgccgaccgcaucugcaccggcaucaccuccuccaacuccccccacgucgucaagaccgccacccagggcgaggucaacgucaccggcgucaucccccucaccaccacccccaccaaguccuacuucgccaaccucaagggcacccgcacccgcggcaagcucugccccgacugccucaacugcaccgaccucgacgucgcccucggccgccccaugugcgucggcaccacccccuccgccaaggccuccauccuccacgagguccgccccgucaccuccggcugcuuccccaucaugcacgaccgcaccaagauccgccagcuccccaaccuccuccgcggcuacgagaagauccgccucuccacccagaacgucaucgacgccgagaaggcccccggcggccccuaccgccucggcaccuccggcuccugccccaacgccaccuccaagaucggcuucuucgccaccauggccugggccguccccaaggacaacuacaagaacgccaccaacccccagaccgucgagguccccuacaucugcaccgagggcgaggaccagaucaccgucuggggcuuccacuccgacaacaagacccagaugaagucccucuacggcgacuccaacccccagaaguucaccuccuccgccaacggcgucaccacccacuacgucucccagaucggcgacuuccccgaccagaccgaggacggcggccucccccaguccggccgcaucgucgucgacuacaugaugcagaagcccggcaagaccggcaccaucgucuaccagcgcggcguccuccucccccagaaggucuggugcgccuccggccgcuccaaggucaucaagggcucccucccccucaucggcgaggccgacugccuccacgaggaguacggcggccucaacaaguccaagcccuacuacaccggcaagcacgccaaggccaucggcaacugccccaucugggucaagaccccccucaagcucgccaacggcaccaaguaccgcccccccgccaagcuccucaaggagcgcggcuucuucggcgccaucgccggcuuccucgagggcggcugggagggcaugaucgccggcuggcacggcuacaccucccacggcgcccacggcgucgccgucgccgccgaccucaaguccacccaggaggccaucaacaagaucaccaagaaccucaacucccucuccgagcucgaggucaagaaccuccagcgccucuccggcgccauggacgagcuccacaacgagauccucgagcucgacgagaaggucgacgaccuccgcgccgacaccaucuccucccagaucgagcucgccguccuccucuccaacgagggcaucaucaacuccgaggacgagcaccuccucgcccucgagcgcaagcucaagaagaugcucggccccuccgccgucgacaucggcaacggcugcuucgagaccaagcacaagugcaaccagaccugccucgaccgcaucgccgccggcaccuucaacgccggcgaguucucccuccccaccuucgacucccucaacaucaccgccgccucccucaacgacgacggccucgacaaccacaccauccuccucuacuacuccaccgccgccuccucccucgccgucacccucaugcucgccaucuucaucgucuacauggucucccgcgacaacgucuccugcuccaucugccucuga

SEQ ID NO: 124533 - RNA, 1755 nt, Artificial Sequence; identical to SEQ ID NO: 124488
  derived and/or modified CDS sequence (opt2) from hemagglutinin__InfluenzaB__ALN39778

SEQ ID NO: 124534 - RNA, 1758 nt, Artificial Sequence; identical to SEQ ID NO: 124511
  derived and/or modified CDS sequence (opt2) from hemagglutinin__InfluenzaB__ALN39779

SEQ ID NO: 124535 - RNA, 1755 nt, Artificial Sequence; identical to SEQ ID NO: 124325
  derived and/or modified CDS sequence (opt2) from hemagglutinin__InfluenzaB__ALN39780

SEQ ID NO: 124536 - RNA, 1758 nt, Artificial Sequence; identical to SEQ ID NO: 124511
  derived and/or modified CDS sequence (opt2) from hemagglutinin__InfluenzaB__ALN39781

SEQ ID NO: 124537 - RNA, 1758 nt, Artificial Sequence; identical to SEQ ID NO: 124475
  derived and/or modified CDS sequence (opt2) from hemagglutinin__InfluenzaB__ALN39782

SEQ ID NO: 124538 - RNA, 1755 nt, Artificial Sequence
  derived and/or modified CDS sequence (opt2) from hemagglutinin__InfluenzaB__ALN39783
augaaggccaucaucguccuccucauggucgucaccuccaacgccgaccgcaucugcaccggcaucaccuccuccaacuccccccacgucgucaagaccgccacccagggcgaggucaacgucaccggcgucaucccccucaccaccacccccaccaaguccuacuucgccaaccucaagggcacccgcacccgcggcaagcucugccccgacugccucaacugcaccgaccucgacgucgcccucggccgccccaugugcgucggcaccacccccuccgccaaggccuccauccuccacgagguccgccccgucaccuccggcugcuuccccaucaugcacgaccgcaccaagauccgccagcuccccaaccuccuccgcggcuacgagaagauccgccucuccacccagaacgucaucgacgccgagaaggcccccggcggccccuaccgccucggcaccuccggcuccugccccaacgccaccuccaagaucggcuucuucgccaccauggccugggccguccccaaggacaacuacaagaacgccaccaaccuccagaccgucgagguccccuacaucugcaccgagggcgaggaccagaucaccgucuggggcuuccacuccgacaacaagacccagaugaagucccucuacggcgacuccaacccccagaaguucaccuccuccgccaacggcgucaccacccacuacgucucccagaucggcgacuuccccgaccagaccgaggacggcggccucccccaguccggccgcaucgucgucgacuacaugguccagaagcccggcaagaccggcaccaucgucuaccagcgcggcguccuccucccccagaaggucuggugcgccuccggccgcuccaaggucaucaagggcucccucccccucaucggcgaggccgacugccuccacgaggaguacggcggccucaacaaguccaagcccuacuacaccggcaagcacgccaaggccaucggcaacugccccaucugggucaagaccccccucaagcucgccaacggcaccaaguaccgcccccccgccaagcuccucaaggagcgcggcuucuucggcgccaucgccggcuuccucgagggcggcugggagggcaugaucgccggcuggcacggcuacaccucccacggcgcccacggcgucgccgucgccgccgaccucaaguccacccaggaggccaucaacaagaucaccaagaaccucaacucccucuccgagcucgaggucaagaaccuccagcgccucuccggcgccauggacgagcuccacaacgagauccucgagcucgacgagaaggucgacgaccuccgcgccgacaccaucuccucccagaucgagcucgccguccuccucuccaacgagggcaucaucaacuccgaggacgagcaccuccucgcccucgagcgcaagcucaagaagaugcucggccccuccgccgucgacaucggcaacggcugcuucgagaccaagcacaagugcaaccagaccugccucgaccgcaucgccgccggcaccuucaacgccggcgaguucucccuccccaccuucgacucccucaacaucaccgccgccucccucaacgacgacggccucgacaaccacaccauccuccucuacuacuccaccgccgccuccucccucgccgucacccucaugcucgccaucuucaucgucuacauggucucccgcgacaacgucuccugcuccaucugccucuga

SEQ ID NO: 124539 - RNA, 1758 nt, Artificial Sequence; identical to SEQ ID NO: 124487
  derived and/or modified CDS sequence (opt2) from hemagglutinin__InfluenzaB__ALN39784

SEQ ID NO: 124540 - RNA, 1758 nt, Artificial Sequence; identical to SEQ ID NO: 124511
  derived and/or modified CDS sequence (opt2) from hemagglutinin__InfluenzaB__ALN39785

SEQ ID NO: 124541 - RNA, 1755 nt, Artificial Sequence; identical to SEQ ID NO: 124325
  derived and/or modified CDS sequence (opt2) from hemagglutinin__InfluenzaB__ALN39786

SEQ ID NO: 124542 - RNA, 1758 nt, Artificial Sequence; identical to SEQ ID NO: 124511
  derived and/or modified CDS sequence (opt2) from hemagglutinin__InfluenzaB__ALN39787

SEQ ID NO: 124543 - RNA, 1758 nt, Artificial Sequence; identical to SEQ ID NO: 124511
  derived and/or modified CDS sequence (opt2) from hemagglutinin__InfluenzaB__ALN39788

SEQ ID NO: 124544 - RNA, 1755 nt, Artificial Sequence
  derived and/or modified CDS sequence (opt2) from hemagglutinin__InfluenzaB__ALN39790
augaaggccaucaucguccuccucauggucgucaccuccgacgccgaccgcaucugcaccggcaucaccuccuccaacuccccccacgucgucaagaccgccacccagggcgaggucaacgucaccggcgucaucccccucaccaccacccccaccaaguccuacuucgccaaccucaagggcacccgcacccgcggcaagcucugccccgacugccucaacugcaccgaccucgacgucgcccucggccgccccaugugcgucggcaccacccccuccgccaaggccuccauccuccacgagguccgccccgucaccuccggcugcuuccccaucaugcacgaccgcaccaagauccgccagcuccccaaccuccuccgcggcuacgagaagauccgccucuccacccagaacgucaucgacgccgagaaggcccccggcggccccuaccgccucggcaccuccggcuccugccccaacgccaccuccaagaucggcuucuucgccaccauggccugggccguccccaaggacaacuacaagaacgccaccaacccccagaccgucgagguccccuacaucugcaccgagggcgaggaccagaucaccgucuggggcuuccacuccgacaacaagacccagaugaagucccucuacggcgacuccaacccccagcgcuucaccuccuccgccaacggcgucaccacccacuacgucucccagaucggcgacuuccccgaccagaccgaggacggcggccucccccaguccggccgcaucgucgucgacuacaugguccagaagcccggcaagaccggcaccaucgucuaccagcgcggcguccuccucccccagaaggucuggugcgccuccggccgcuccaaggucaucaagggcucccucccccucaucggcgaggccgacugccuccacgaggaguacggcggccucaacaaguccaagcccuacuacaccggcaagcacgccaaggccaucggcaacugccccaucugggucaagaccccccucaagcucgccaacggcaccaaguaccgcccccccgccaagcuccucaaggagcgcggcuucuucggcgccaucgccggcuuccucgagggcggcugggagggcaugaucgccggcuggcacggcuacaccucccacggcgcccacggcgucgccgucgccgccgaccucaaguccacccaggaggccaucaacaagaucaccaagaaccucaacucccucuccgagcucgaggucaagaaccuccagcgccucuccggcgccauggacgagcuccacaacgagauccucgagcucgacgagaaggucgacgaccuccgcgccgacaccaucuccucccagaucgagcucgccguccuccucuccaacgagggcaucaucaacuccgaggacgagcaccuccucgcccucgagcgcaagcucaagaagaugcucggccccuccgccgucgacaucggcaacggcugcuucgagaccaagcacaagugcaaccagaccugccucgaccgcaucgccgccggcaccuucaacgccggcgaguucucccuccccaccuucgacucccucaacaucaccgccgccucccucaacgacgacggccucgacaaccacaccauccuccucuacuacuccaccgccgccuccucccucgccgucacccucaugcucgccaucuucaucgucuacauggucucccgcgacaacgucuccugcuccaucugccucuga

SEQ ID NO: 124545 - RNA, 1755 nt, Artificial Sequence
  derived and/or modified CDS sequence (opt2) from hemagglutinin__InfluenzaB__ALN39791
augaaggccaucaucguccuccucauggucgucauguccaacgccgaccgcaucugcaccggcaucaccuccuccaacuccccccacgucgucaagaccgccacccagggcgaggucaacgucaccggcgucaucccccucaccaccacccccaccaaguccuacuucgccaaccucaagggcacccgcacccgcggcaagcucugccccgacugccucaacugcaccgaccucgacgucgcccucggccgccccaugugcgucggcaccacccccuccgccaaggccuccauccuccacgagguccgccccgucaccuccggcugcuuccccaucaugcacgaccgcaccaagauccgccagcuccccaaccuccuccgcggcuacgagaagauccgccucuccacccagaacgucaucgacgccgagaaggcccccggcggccccuaccgccucggcaccuccggcuccugccccaacgccaccuccaagaucggcuucuucgccaccauggccugggccguccccaaggacaacuacaagaacgccaccaacccccagaccgucgagguccccuacaucugcaccgagggcgaggaccagaucaccgucuggggcuuccacuccgacaacaagacccagaugaagucccucuacggcgacuccaacccccagaaguucaccuccuccgccaacggcgucaccacccacuacgucucccagaucggcgacuuccccgaccagaccgaggacggcggccucccccaguccggccgcaucgucgucgacuacaugguccagaagcccggcaagaccggcaccaucgucuaccagcgcggcguccuccucccccagaaggucuggugcgccuccggccgcuccaaggucaucaagggcucccucccccucaucggcgaggccgacugccuccacgaggaguacggcggccucaacaaguccaagcccuacuacaccggcaagcacgccaaggccaucggcaacugccccaucugggucaagaccccccucaagcucgccaacggcaccaaguaccgcccccccgccaagcuccucaaggagcgcggcuucuucggcgccaucgccggcuuccucgagggcggcugggagggcaugaucgccggcuggcacggcuacaccucccacggcgcccacggcgucgccgucgccgccgaccucaaguccacccaggaggccaucaacaagaucaccaagaaccucaacucccucuccgagcucgaggucaagaaccuccagcgccucuccggcgccauggacgagcuccacaacgagauccucgagcucgacgagaaggucgacgaccuccgcgccgacaccaucuccucccagaucgagcucgccguccuccucuccaacgagggcaucaucaacuccgaggacgagcaccuccucgcccucgagcgcaagcucaagaagaugcucggccccuccgccgucgacaucggcaacggcugcuucgagaccaagcacaagugcaaccagaccugccucgaccgcaucgccgccggcaccuucaacgccggcgaguucucccuccccaccuucgacucccucaacaucaccgccgccucccucaacgacgacggccucgacaaccacaccauccuccucuacuacuccaccgccgccuccucccucgccgucacccucaugcucgccaucuucaucgucuacauggucucccgcgacaacgucuccugcuccaucugccucuga

SEQ ID NO: 124546 - RNA, 1758 nt, Artificial Sequence; identical to SEQ ID NO: 124511
  derived and/or modified CDS sequence (opt2) from hemagglutinin__InfluenzaB__ALN39792

SEQ ID NO: 124547 - RNA, 1758 nt, Artificial Sequence; identical to SEQ ID NO: 124511
  derived and/or modified CDS sequence (opt2) from hemagglutinin__InfluenzaB__ALN39793

SEQ ID NO: 124548 - RNA, 1755 nt, Artificial Sequence
  derived and/or modified CDS sequence (opt2) from hemagglutinin__InfluenzaB__ALN39794
augaaggccaucaucauccuccucauggucgucaccuccaacgccgaccgcaucugcaccggcaucaccuccuccaacuccccccacgucgucaagaccgccacccagggcgaggucaacgucaccggcgucaucccccucaccaccacccccaccaaguccuacuucgccaaccucaagggcacccgcacccgcggcaagcucugccccgacugccucaacugcaccgaccucgacgucgcccucggccgccccaugugcgucggcaccacccccuccgccaaggccuccauccuccacgagguccgccccgucaccuccggcugcuuccccaucaugcacgaccgcaccaagauccgccagcuccccaaccuccuccgcggcuacgagaagauccgccucuccacccagaacgucaucgacgccgagaaggcccccggcggccccuaccgccucggcaccuccggcuccugccccaacgccaccuccaagaucggcuucuucgccaccauggccugggccguccccaaggacaacuacaagaacgccaccaacccccagaccgucgagguccccuacaucugcaccgagggcgaggaccagaucaccgucuggggcuuccacuccgacaacaagacccagaugaagucccucuacggcgacuccaacccccagaaguucaccuccuccgccgacggcgucaccacccacuacgucucccagaucggcgacuuccccgaccagaccgaggacggcggccucccccaguccggccgcaucgucgucgacuacaugaugcagaagcccggcaagaccggcaccaucgucuaccagcgcggcguccuccucccccagaaggucuggugcgccuccggccgcuccaaggucaucaagggcucccucccccucaucggcgaggccgacugccuccacgaggaguacggcggccucaacaaguccaagcccuacuacaccggcaagcacgccaaggccaucggcaacugccccaucugggucaagaccccccucaagcucgccaacggcaccaaguaccgcccccccgccaagcuccucaaggagcgcggcuucuucggcgccaucgccggcuuccucgagggcggcugggagggcaugaucgccggcuggcacggcuacaccucccacggcgcccacggcgucgccgucgccgccgaccucaaguccacccaggaggccaucaacaagaucaccaagaaccucaacucccucuccgagcucgaggucaagaaccuccagcgccucuccggcgccauggacgagcuccacaacgagauccucgagcucgacgagaaggucgacgaccuccgcgccgacaccaucuccucccagaucgagcucgccguccuccucuccaacgagggcaucaucaacuccgaggacgagcaccuccucgcccucgagcgcaagcucaagaagaugcucggccccuccgccgucgacaucggcaacggcugcuucgagaccaagcacaagugcaaccagaccugccucgaccgcaucgccgccggcaccuucaacgccggcgaguucucccuccccaccuucgacucccucaacaucaccgccgccucccucaacgacgacggccucgacaaccacaccauccuccucuacuacuccaccgccgccuccucccucgccgucacccucaugcucgccaucuucaucgucuacauggucucccgcgacaacgucuccugcuccaucugccucuga

SEQ ID NO: 124549 - RNA, 1755 nt, Artificial Sequence; identical to SEQ ID NO: 124488
  derived and/or modified CDS sequence (opt2) from hemagglutinin__InfluenzaB__ALN39795

SEQ ID NO: 124550 - RNA, 1758 nt, Artificial Sequence
  derived and/or modified CDS sequence (opt2) from hemagglutinin__InfluenzaB__ALN39796
augaaggccaucaucguccuccucauggucgucaccuccaacgccgaccgcaucugcaccggcaucaccuccuccaacuccccccacgucgucaagaccgccacccagggcgaggucaacgucaccggcgucaucccccucaccaccacccccaccaagucccacuucgccaaccucaagggcaccgagacccgcggcaagcucugccccaagugccucaacugcaccgaccucgacgucgcccucggccgccccaagugcaccggcaagauccccuccgcccgcgucuccauccuccacgagguccgccccgucaccuccggcugcuuccccaucaugcacgaccgcaccaagauccgccagcuccccaaccuccuccgcggcuacgagcacauccgccucuccacccacaacgucaucaacgccgaggacgcccccggcggccccuacaagaucggcaccuccggcuccugccccaacgccaccaacggcaacggcuucuucgccaccauggccugggccguccccaagaacgacaagaacaagaccgccaccaacccccucaccaucgagguccccuacaucugcaccgagggcgaggaccagaucaccgucuggggcuuccacuccgacaacgagacccagauggccaagcucuacggcgacuccaagccccagaaguucaccuccuccgccaacggcgucaccacccacuacgucucccagaucggcggcuuccccaaccagaccgaggacggcggccucccccaguccggccgcaucgucgucgacuacaugguccagaaguccggcaagaccggcaccaucaccuaccagcgcggcauccuccucccccagaaggucuggugcgccuccggccgcuccaaggucaucaagggcucccucccccucaucggcgaggccgacugccuccacgagaaguacggcggccucaacaaguccaagcccuacuacaccggcgagcacgccaaggccaucggcaacugccccaucugggucaagaccccccucaagcucgccaacggcaccaaguaccgcccccccgccaagcuccucaaggagcgcggcuucuucggcgccaucgccggcuuccucgagggcggcugggagggcaugaucgccggcuggcacggcuacaccucccacggcgcccacggcgucgccgucgccgccgaccucaaguccacccaggaggccaucaacaagaucaccaagaaccucaacucccucuccgagcucgaggucaagaaccuccagcgccucuccggcgccauggacgagcuccacaacgagauccucgagcucgacgagaaggucgacgaccuccgcgccgacaccaucuccucccagaucgagcucgccguccuccucuccaacgagggcaucaucaacuccgaggacgagcaccuccucgcccucgagcgcaagcucaagaagaugcucggccccuccgccgucgagaucggcaacggcugcuucgagaccaagcacaagugcaaccagaccugccucgaccgcaucgccgccggcaccuucgacgccggcgaguucucccuccccaccuucgacucccucaacaucaccgccgccucccucaacgacgacggccucgacaaccacaccauccuccucuacuacuccaccgccgccuccucccucgccgucacccucaugaucgccaucuucgucgucuacauggucucccgcgacaacgucuccugcuccaucugccucuga

SEQ ID NO: 124551 - RNA, 1755 nt, Artificial Sequence; identical to SEQ ID NO: 124488
  derived and/or modified CDS sequence (opt2) from hemagglutinin__InfluenzaB__ALN39797

SEQ ID NO: 124552 - RNA, 1755 nt, Artificial Sequence
  derived and/or modified CDS sequence (opt2) from hemagglutinin__InfluenzaB__ALN39798
augaaggccaucaucguccuccucauggucgucaccuccaacgccgaccgcaucugcaccggcaucaccuccuccuccuccccccacgucgucaagaccgccacccagggcgaggucaacgucaccggcgucaucccccucaccaccacccccaccaaguccuacuucgccaaccucaagggcacccgcacccgcggcaagcucugccccgacugccucaacugcaccgaccucgacgucgcccucggccgccccaugugcgucggcaccacccccuccgccaaggccuccauccuccacgagguccgccccgucaccuccggcugcuuccccaucaugcacgaccgcaccaagauccgccagcuccccaaccuccuccgcggcuacgagaagauccgccucuccacccagaacgucaucgacgccgagaaggcccccggcggccccuaccgccucggcaccuccggcuccugccccaacgccaccuccaagaucggcuucuucgccaccauggccugggccguccccaaggacaacuacaagaacgccaccaacccccagaccgucgagguccccuacaucugcaccgagggcgaggaccagaucaccgucuggggcuuccacuccgacaacaagacccagaugaagucccucuacggcgacuccaacccccagaaguucaccuccuccgccaacggcgucaccacccacuacgucucccagaucggcgacuuccccgaccagaccgaggacggcggccucccccaguccggccgcaucgucgucgacuacaugaugcagaagcccggcaagaccggcaccaucgucuaccagcgcggcguccuccucccccagaaggucuggugcgccuccggccgcuccaaggucaucaagggcucccucccccucaucggcgaggccgacugccuccacgaggaguacggcggccucaacaaguccaagcccuacuacaccggcaagcacgccaaggccaucggcaacugccccaucugggucaagaccccccucaagcucgccaacggcaccaaguaccgcccccccgccaagcuccucaaggagcgcggcuucuucggcgccaucgccggcuuccucgagggcggcugggagggcaugaucgccggcuggcacggcuacaccucccacggcgcccacggcgucgccgucgccgccgaccucaaguccacccaggaggccaucaacaagaucaccaagaaccucaacucccucuccgagcucgaggucaagaaccuccagcgccucuccggcgccauggacgagcuccacaacgagauccucgagcucgacgagaaggucgacgaccuccgcgccgacaccaucuccucccagaucgagcucgccguccuccucuccaacgagggcaucaucaacuccgaggacgagcaccuccucgcccucgagcgcaagcucaagaagaugcucggccccuccgccgucgacaucggcaacggcugcuucgagaccaagcacaagugcaaccagaccugccucgaccgcaucgccgccggcaccuucaacgccggcgaguucucccuccccaccuucgacucccucaacaucaccgccgccucccucaacgacgacggccucgacaaccacaccauccuccucuacuacuccaccgccgccuccucccucgccgucacccucaugcucgccaucuucaucgucuacauggucucccgcgacaacgucuccugcuccaucugccucuga

SEQ ID NO: 124553 - RNA, 1755 nt, Artificial Sequence; identical to SEQ ID NO: 124325
  derived and/or modified CDS sequence (opt2) from hemagglutinin__InfluenzaB__ALN39799

SEQ ID NO: 124554 - RNA, 1755 nt, Artificial Sequence
  derived and/or modified CDS sequence (opt2) from hemagglutinin__InfluenzaB__ALN39800
augaaggccaucaucguccuccucauggucgucaccuccaacgccgaccgcaucugcaccggcaucaccuccuccaacuccccccacgucgucaagaccgccacccagggcgaggucaacgucaccggcgucaucccccucaccaccacccccaccaaguccuacuucgccaaccucaagggcacccgcacccgcggcaagcucugccccgacugccucaacugcaccgaccucgacgucgcccucggccgccccaugugcgucggcaccacccccuccgccaaggccuccauccuccacgagguccgccccgucaccuccggcugcuuccccaucaugcacgaccgcaccaagauccgccagcuccccaaccuccuccgcggcuacgagaagauccgccucuccacccagaacgucaucgacgccgagaaggcccccggcggccccuaccgccucggcaccuccggcuccugccccaacgccaccuccaagaucggcuucuucgccaccauggccugggccguccccaaggacaacuacaagaacgccaccaacccccagaccgucgagguccccuacaucugcaccgagggcgaggaccagaucaccgucuggggcuuccacuccgacaacaagacccagaugaagucccucuacggcgacuccaacccccagaaguucaccuccuccgccaacggcgucaccacccacuacgucucccagaucggcgacuuccccgaccagaccgaggacggcggccucccccaguccggccgcaucgucgucgacuacaugaugcagaagcccggcaagaccggcaccaucgucuaccagcgcggcguccuccucccccagaaggucuggugcgccuccggccgcuccaaggucaucaagggcucccucccccucaucggcgaggccgacugccuccacgaggaguacggcggccucaacaaguccaagcccuacuacaccggcaagcacgccaaggccaucggcaacugccccaucugggucaagaccccccucaagcucgccaacggcaccaaguaccgcccccccgccaagcuccucaaggagcgcggcuucuucggcgccaucgccggcuuccucgagggcggcugggagggcaugaucgccggcuggcacggcuacaccucccacggcgcccacggcgucgccgucgccgccgaccucaaguccacccaggaggccaucaacaagaucaccaagaaccucaacucccucuccgagcucgaggucaagaaccuccagcgccucuccggcgccauggacgagcuccacaacgagauccucgagcucgacgagaaggucgacgaccuccgcgccgacaccaucuccucccagaucgagcucgccguccuccucuccaacgagggcaucaucaacuccgaggacgagcaccuccucgcccucgagaagaagcucaagaagaugcucggccccuccgccgucgacaucggcaacggcugcuucgagaccaagcacaagugcaaccagaccugccucgaccgcaucgccgccggcaccuucaacgccggcgaguucucccuccccaccuucgacucccucaacaucaccgccgccucccucaacgacgacggccucgacaaccacaccauccuccucuacuacuccaccgccgccuccucccucgccgucacccucaugcucgccaucuucaucgucuacauggucucccgcgacaacgucuccugcuccaucugccucuga

SEQ ID NO: 124555 - RNA, 1755 nt, Artificial Sequence; identical to SEQ ID NO: 124545
  derived and/or modified CDS sequence (opt2) from hemagglutinin__InfluenzaB__ALN39801

SEQ ID NO: 124556 - RNA, 1755 nt, Artificial Sequence; identical to SEQ ID NO: 124488
  derived and/or modified CDS sequence (opt2) from hemagglutinin__InfluenzaB__ALN39802

SEQ ID NO: 124557 - RNA, 1755 nt, Artificial Sequence; identical to SEQ ID NO: 124545
  derived and/or modified CDS sequence (opt2) from hemagglutinin__InfluenzaB__ALN39803

SEQ ID NO: 124558 - RNA, 1755 nt, Artificial Sequence; identical to SEQ ID NO: 124484
  derived and/or modified CDS sequence (opt2) from hemagglutinin__InfluenzaB__ALN39804

SEQ ID NO: 124559 - RNA, 1758 nt, Artificial Sequence; identical to SEQ ID NO: 124511
  derived and/or modified CDS sequence (opt2) from hemagglutinin__InfluenzaB__ALN39805

SEQ ID NO: 124560 - RNA, 1758 nt, Artificial Sequence; identical to SEQ ID NO: 123025
  derived and/or modified CDS sequence (opt2) from hemagglutinin__InfluenzaB__ACN29380

SEQ ID NO: 124561 - RNA, 1758 nt, Artificial Sequence; identical to SEQ ID NO: 123357
  derived and/or modified CDS sequence (opt2) from hemagglutinin__InfluenzaB__EPI498048

SEQ ID NO: 124562 - RNA, 1758 nt, Artificial Sequence
  derived and/or modified CDS sequence (opt2) from hemagglutinin__InfluenzaB__ANC28539
augaaggccaucaucguccuccucauggucgucaccuccaacgccgaccgcaucugcaccggcaucaccuccuccaacuccccccacgucgucaagaccgccacccagggcgaggucaacgucaccggcgucaucccccucaccaccacccccaccaagucccacuucgccaaccucaagggcaccgagacccgcggcaagcucugccccaagugccucaacugcaccgaccucgacgucgcccucggccgccccaagugcaccggcaagauccccuccgcccgcgucuccauccuccacgagguccgccccgucaccuccggcugcuuccccaucaugcacgaccgcaccaagauccgccagcuccccaaccuccuccgcggcuacgagcacauccgccucuccacccacaacgucaucaacgccgagaacgcccccggcggccccuacaagaucggcaccuccggcuccugccccaacaucaccaacggcaacggcuucuucgccaccauggccugggccguccccaagaacgacaagaacaagaccgccaccaacccccucaccaucgagguccccuacaucugcaccgagggcgaggaccagaucaccgucuggggcuuccacuccgacaacgaggcccagauggccaagcucuacggcgacuccaagccccagaaguucaccuccuccgccaacggcgucaccacccacuacgucucccagaucggcggcuuccccaaccagaccgaggacggcggccucccccaguccggccgcaucgucgucgacuacaugguccagaaguccggcaagaccggcaccaucaccuaccagcgcggcauccuccucccccagaaggucuggugcgccuccggccgcuccaaggucaucaagggcucccucccccucaucggcgaggccgacugccuccacgagaaguacggcggccucaacaaguccaagcccuacuacaccggcgagcacgccaaggccaucggcaacugccccaucugggucaagaccccccucaagcucgccaacggcaccaaguaccgcccccccgccaagcuccucaaggagcgcggcuucuucggcgccaucgccggcuuccucgagggcggcugggagggcaugaucgccggcuggcacggcuacaccucccacggcgcccacggcgucgccgucgccgccgaccucaaguccacccaggaggccaucaacaagaucaccaagaaccucaacucccucuccgagcucgaggucaagaaccuccagcgccucuccggcgccauggacgagcuccacaacgagauccucgagcucgacgagaaggucgacgaccuccgcgccgacaccaucuccucccagaucgagcucgccguccuccucuccaacgagggcaucaucaacuccgaggacgagcaccuccucgcccucgagcgcaagcucaagaagaugcucggccccuccgccgucgagaucggcaacggcugcuucgagaccaagcacaagugcaaccagaccugccucgaccgcaucgccgccggcaccuucgacgccggcgaguucucccuccccaccuucgacucccucaacaucaccgccgccucccucaacgacgacggccucgacaaccacaccauccuccucuacuacuccaccgccgccuccucccucgccgucacccucaugaucgccaucuucgucgucuacauggucucccgcgacaacgucuccugcuccaucugccucuga

SEQ ID NO: 124563 - RNA, 1758 nt, Artificial Sequence
  derived and/or modified CDS sequence (opt2) from hemagglutinin__InfluenzaB__EPI827073
augaaggccaucaucguccuccucauggucgucaccuccaacgccgaccgcaucugcaccggcaucaccuccuccaacuccccccacgucgucaagaccgccacccagggcgaggucaacgucaccggcgucaucccccucaccaccacccccaccaagucccacuucgccaaccucaagggcaccgagacccgcggcaagcucugccccaagugccucaacugcaccgaccucgacgucgcccucggccgccccaagugcaccggcaagauccccuccgcccgcgucuccauccuccacgagguccgccccgucaccuccggcugcuuccccaucaugcacgaccgcaccaagauccgccagcuccccaaccuccuccgcggcuacgagcacauccgccucuccacccacaacgucaucaacgccgagaacgcccccggcggccccuacaagaucggcaccuccggcuccugccccaacaucaccaacggcaacggcuucuucgccaccauggccugggccguccccaagaacgacaagaacaagaccgccaccaacccccucaccaucgagguccccuacaucugcaccgagggcgaggaccagaucaccgucuggggccuccacuccgacaacgagauccagauggccaagcucuacggcgacuccaagccccagaaguucaccuccuccgccaacggcgucaccacccacuacgucucccagaucggcggcuuccccaaccagaccgaggacggcggccucccccaguccggccgcaucgucgucgacuacaugguccagaaguccggcaagaccggcaccaucaccuaccagcgcggcauccuccucccccagaaggucuggugcgccuccggccgcuccaaggucaucaagggcucccucccccucaucggcgaggccgacugccuccacgagaaguacggcggccucaacaaguccaagcccuacuacaccggcgagcacgccaaggccaucggcaacugccccaucugggucaagaccccccucaagcucgccaacggcaccaaguaccgcccccccgccaagcuccucaaggagcgcggcuucuucggcgccaucgccggcuuccucgagggcggcugggagggcaugaucgccggcuggcacggcuacaccucccacggcgcccacggcgucgccgucgccgccgaccucaaguccacccaggaggccaucaacaagaucaccaagaaccucaacucccucuccgagcucgaggucaagaaccuccagcgccucuccggcgccauggacgagcuccacaacgagauccucgagcucgacgagaaggucgacgaccuccgcgccgacaccaucuccucccagaucgagcucgccguccuccucuccaacgagggcaucaucaacuccgaggacgagcaccuccucgcccucgagcgcaagcucaagaagaugcucggccccuccgccgucgagaucggcaacggcugcuucgagaccaagcacaagugcaaccagaccugccucgaccgcaucgccgccggcaccuucgacgccggcgaguucucccuccccaccuucgacucccucaacaucaccgccgccucccucaacgacgacggccucgacaaccacaccauccuccucuacuacuccaccgccgccuccucccucgccgucacccucaugaucgccaucuucgucgucuacauggucucccgcgacaacgucuccugcuccaucugccucuga

SEQ ID NO: 124564 - RNA, 1758 nt, Artificial Sequence; identical to SEQ ID NO: 122783
  derived and/or modified CDS sequence (opt2) from hemagglutinin__InfluenzaB__EPI244699

SEQ ID NO: 124565 - RNA, 1758 nt, Artificial Sequence; identical to SEQ ID NO: 122776
  derived and/or modified CDS sequence (opt2) from hemagglutinin__InfluenzaB__EPI244702

SEQ ID NO: 124566 - RNA, 1755 nt, Artificial Sequence; identical to SEQ ID NO: 124165
  derived and/or modified CDS sequence (opt2) from hemagglutinin__InfluenzaB__EPI540671

SEQ ID NO: 124567 - RNA, 1755 nt, Artificial Sequence
  derived and/or modified CDS sequence (opt2) from hemagglutinin__InfluenzaB__EPI573303
augaaggccaucaucguccuccucauggucgucaccuccaacgccgaccgcaucugcaccggcaucaccuccuccaacuccccccacgucgucaagaccgccacccagggcgaggucaacgucaccggcgucaucccccucaccaccacccccaccaaguccuacuucgccaaccucaagggcacccgcacccgcggcaagcucugccccgacugccucaacugcaccgaccucgacgucgcccucggccgccccaugugcgucggcaccacccccuccgccaaggccuccauccuccacgagguccgccccgucaccuccggcugcuuccccaucaugcacgaccgcaccaagauccgccagcuccccaaccuccuccgcggcuacgagaagauccgccucuccacccagaacgucaucgacgccgagaaggcccccggcggccccuaccgccucggcaccuccggcuccugccccaacgccaccuccaagaucggcuucuucgccaccauggccugggccguccccaaggacaacuacaagaacgccaccaacccccucaccgucgagguccccuacaucugcaccgagggcgaggaccagaucaccgucuggggcuuccacuccgacgacaagacccagaugaagucccucuacggcgacuccaacccccagaaguucaccuccuccgccaacggcgucaccacccacuacgucucccagaucggcgacuuccccgaccagaccgaggacggcggccucccccaguccggccgcaucgucgucgacuacaugaugcagaagcccggcaagaccggcaccaucgucuaccagcgcggcguccuccucccccagaaggucuggugcgccuccggccgcuccaaggucaucaagggcucccucccccucaucggcgaggccgacugccuccacgaggaguacggcggccucaacaaguccaagcccuacuacaccggcaagcacgccaaggccaucggcaacugccccaucugggucaagaccccccucaagcucgccaacggcaccaaguaccgcccccccgccaagcuccucaaggagcgcggcuucuucggcgccaucgccggcuuccucgagggcggcugggagggcaugaucgccggcuggcacggcuacaccucccacggcgcccacggcgucgccgucgccgccgaccucaaguccacccaggaggccaucaacaagaucaccaagaaccucaacucccucuccgagcucgaggucaagaaccuccagcgccucuccggcgccauggacgagcuccacaacgagauccucgagcucgacgagaaggucgacgaccuccgcgccgacaccaucuccucccagaucgagcucgccguccuccucuccaacgagggcaucaucaacuccgaggacgagcaccuccucgcccucgagcgcaagcucaagaagaugcucggccccuccgccgucgacaucggcaacggcugcuucgagaccaagcacaagugcaaccagaccugccucgaccgcaucgccgccggcaccuucaacgccggcgaguucucccuccccaccuucgacucccucaacaucaccgccgccucccucaacgacgacggccucgacaaccacaccauccuccucuacuacuccaccgccgccuccucccucgccgucacccucaugcucgccaucuucaucgucuacauggucucccgcgacaacgucuccugcuccaucugccucuga

SEQ ID NO: 124568 - RNA, 1755 nt, Artificial Sequence
  derived and/or modified CDS sequence (opt2) from hemagglutinin__InfluenzaB__EPI829466
augaaggccaucaucguccuccucauggucgucaccuccaacgccgaccgcaucugcaccggcaucaccuccuccaacuccccccacgucgucaagaccgccacccagggcgaggucaacgucaccggcgucaucccccucaccaccacccccaccaaguccuacuucgccaaccucaagggcacccgcacccgcggcaagcucugccccgacugccucaacugcaccgaccucgacgucgcccucggccgccccaugugcgucggcaccacccccuccgccaaggccuccauccuccacgagguccgccccgucaccuccggcugcuuccccaucaugcacgaccgcaccaagauccgccagcuccccaaccuccuccgcggcuacgagaagauccgccucuccacccagaacgucaucgacgccgagaaggcccccggcggccccuaccgccucggcaccuccggcuccugccccaacgccaccuccaagaucggcuucuucgccaccauggccugggccguccccaaggacaacuacaagaacgccaccaacccccucaccgucgagguccccuacaucugcaccgagggcgaggaccagaucaccgucuggggcuuccacuccgacgacaagacccagaugaagucccucuacggcgacuccaacccccagaaguucaccuccuccgccaacggcgucaccacccacuacgucucccagaucggcgacuuccccgaccagaccgaggacgagggccucccccaguccggccgcaucgucgucgacuacaugaugcagaagcccggcaagaccggcaccaucgucuaccagcgcggcguccuccucccccagaaggucuggugcgccuccggccgcuccaaggucaucaagggcucccucccccucaucggcgaggccgacugccuccacgaggaguacggcggccucaacaaguccaagcccuacuacaccggcaagcacgccaaggccaucggcaacugccccaucugggucaagaccccccucaagcucgccaacggcaccaaguaccgcccccccgccaagcuccucaaggagcgcggcuucuucggcgccaucgccggcuuccucgagggcggcugggagggcaugaucgccggcuggcacggcuacaccucccacggcgcccacggcgucgccgucgccgccgaccucaaguccacccaggaggccaucaacaagaucaccaagaaccucaacucccucuccgagcucgaggucaagaaccuccagcgccucuccggcgccauggacgagcuccacaacgagauccucgagcucgacgagaaggucgacgaccuccgcgccgacaccaucuccucccagaucgagcucgccguccuccucuccaacgagggcaucaucaacuccgaggacgagcaccuccucgcccucgagcgcaagcucaagaagaugcucggccccuccgccgucgacaucggcaacggcugcuucgagaccaagcacaagugcaaccagaccugccucgaccgcaucgccgccggcaccuucaacgccggcgaguucucccuccccaccuucgacucccucaacaucaccgccgccucccucaacgacgacggccucgacaaccacaccauccuccucuacuacuccaccgccgccuccucccucgccgucacccucaugcucgccaucuucaucgucuacauggucucccgcgacaacgucuccugcuccaucugccucuga

SEQ ID NO: 124569 - RNA, 1755 nt, Artificial Sequence
  derived and/or modified CDS sequence (opt2) from hemagglutinin__InfluenzaB__EPI684429
augaaggccaucaucguccuccucauggucgucauguccaacgccgaccgcaucugcaccggcaucaccuccuccaacuccccccacgucgucaagaccgccacccagggcgaggucaacgucaccggcgucaucccccucaccaccacccccaccaaguccuacuucgccaaccucaagggcacccgcacccgcggcaagcucugccccgacugccucaacugcaccgaccucgacgucgcccucggccgccccaugugcgucggcaccacccccuccgccaaggccuccauccuccacgagguccgccccgucaccuccggcugcuuccccaucaugcacgaccgcaccaagauccgccagcuccccaaccuccuccgcggcuacgagaagauccgccucuccacccagaacgucaucgacgccgagaaggcccccggcggccccuaccgccucggcaccuccggcuccugccccaacgccaccuccaagaucggcuucuucgccaccauggccugggccguccccaaggacaacuacaagaacgccaccaacccccagaccgucgagguccccuacaucugcaccgagggcgaggaccagaucaccgucuggggcuuccacuccgacaacaagacccagaugaagucccucuacggcgacuccaacccccagaaguucaccuccuccgccaacggcgucaccacccacuacgucucccagaucggcgacuuccccgaccagaccgaggacggcggccucccccaguccggccgcaucgucgucgacuacaugguccagaagcccggcaagaccggcaccaucgucuaccagcgcggcguccuccucccccagaaggucuggugcgucuccggccgcuccaaggucaucaagggcucccucccccucaucggcgaggccgacugccuccacgaggaguacggcggccucaacaaguccaagcccuacuacaccggcaagcacgccaaggccaucggcaacugccccaucugggucaagaccccccucaagcucgccaacggcaccaaguaccgcccccccgccaagcuccucaaggagcgcggcuucuucggcgccaucgccggcuuccucgagggcggcugggagggcaugaucgccggcuggcacggcuacaccucccacggcgcccacggcgucgccgucgccgccgaccucaaguccacccaggaggccaucaacaagaucaccaagaaccucaacucccucuccgagcucgaggucaagaaccuccagcgccucuccggcgccauggacgagcuccacaacgagauccucgagcucgacgagaaggucgacgaccuccgcgccgacaccaucuccucccagaucgagcucgccguccuccucuccaacgagggcaucaucaacuccgaggacgagcaccuccucgcccucgagcgcaagcucaagaagaugcucggccccuccgccgucgacaucggcaacggcugcuucgagaccaagcacaagugcaaccagaccugccucgaccgcaucgccgccggcaccuucaacgccggcgaguucucccuccccaccuucgacucccucaacaucaccgccgccucccucaacgacgacggccucgacaaccacaccauccuccucuacuacuccaccgccgccuccucccucgccgucacccucaugcucgccaucuucaucgucuacauggucucccgcgacaacgucuccugcuccaucugccucuga

SEQ ID NO: 124570 - RNA, 1758 nt, Artificial Sequence; identical to SEQ ID NO: 122788
  derived and/or modified CDS sequence (opt2) from hemagglutinin__InfluenzaB__AFH58447

SEQ ID NO: 124571 - RNA, 1758 nt, Artificial Sequence
  derived and/or modified CDS sequence (opt2) from hemagglutinin__InfluenzaB__EPI173279
augaaggccaucaucgucauccucauggucgucaccuccaacgccgaccgcaucugcaccggcaucaccuccuccaacuccccccacgucgucaagaccgccacccagggcgaggucaacgucaccggcgucaucccccucaccaccacccccaccaagucccacuucgccaaccucaagggcaccgagacccgcggcaagcucugccccaagugccucaacugcaccgaccucgacgucgcccucggccgccccaagugcaccggcaagauccccuccgcccgcgucuccauccuccacgagguccgccccgucaccuccggcugcuuccccaucaugcacgaccgcaccaagauccgccagcuccccaaccuccuccgcggcuacgagcacauccgccucuccacccacaacgucaucaacgccgagaacgcccccggcggccccuacaagaucggcaccuccggcuccugccccaacaucaccaacggcaacggcuucuucgccaccauggccugggccguccccaagaacgacaagaacaagaccgccaccaacccccucaccaucgagguccccuacaucugcaccgagggcgaggaccagaucaccgucuggggcuuccacuccgacuccgagacccagauggccaagcucuacggcgacuccaagccccagaaguucaccuccuccgccaacggcgucaccacccacuacgucucccagaucggcggcuuccccaaccagaccgaggacggcggccucccccaguccggccgcaucgucgucgacuacaugguccagaaguccggcaagaccggcaccaucaccuaccagcgcggcauccuccucccccagaaggucuggugcgccuccggccgcuccaaggucaucaagggcucccucccccucaucggcgaggccgacugccuccacgagaaguacggcggccucaacaaguccaagcccuacuacaccggcgagcacgccaaggccaucggcaacugccccaucugggucaagaccccccucaagcucgccaacggcaccaaguaccgcccccccgccaagcuccucaaggagcgcggcuucuucggcgccaucgccggcuuccucgagggcggcugggagggcaugaucgccggcuggcacggcuacaccucccacggcgcccacggcgucgccgucgccgccgaccucaaguccacccaggaggccaucaacaagaucaccaagaaccucaacucccucuccgagcucgaggucaagaaccuccagcgccucuccggcgccauggacgagcuccacaacgagauccucgagcucgacgagaaggucgacgaccuccgcgccgacaccaucuccucccagaucgagcucgccguccuccucuccaacgagggcaucaucaacuccgaggacgagcaccuccucgcccucgagcgcaagcucaagaagaugcucggccccuccgccgucgagaucggcaacggcugcuucgagaccaagcacaagugcaaccagaccugccucgaccgcaucgccgccggcaccuucgacgccggcgaguucucccuccccaccuucgacucccucaacaucaccgccgccucccucaacgacgacggccucgacaaccacaccauccuccucuacuacuccaccgccgccuccucccucgccgucacccucaugaucgccaucuucgucgucuacauggucucccgcgacaacgucuccugcuccaucugccucuga

SEQ ID NO: 124572 - RNA, 1758 nt, Artificial Sequence; identical to SEQ ID NO: 123357
  derived and/or modified CDS sequence (opt2) from hemagglutinin__InfluenzaB__EPI163726

SEQ ID NO: 124573 - RNA, 1758 nt, Artificial Sequence; identical to SEQ ID NO: 124511
  derived and/or modified CDS sequence (opt2) from hemagglutinin__InfluenzaB__EPI636340

SEQ ID NO: 124574 - RNA, 1758 nt, Artificial Sequence
  derived and/or modified CDS sequence (opt2) from hemagglutinin__InfluenzaB__EPI645995
augaaggccaucaucguccuccucauggucgucaccuccaacgccgaccgcaucugcaccggcaucaccuccuccaacuccccccacgucgucaagaccgccacccagggcgaggucaacgucaccggcgucaucccccucaccaccacccccaccaagucccacuucgccaaccucaagggcaccgagacccgcggcaagcucugccccaagugccucaacugcaccgaccucgacgucgcccucggccgccccaagugcaccggcaagauccccuccgcccgcgucuccauccuccacgagguccgccccgucaccuccggcugcuuccccaucaugcacgaccgcaccaagauccgccagcuccccaaccuccuccgcggcuacgagcacguccgccucuccacccacaacgucaucaacgccgaggacgcccccggcggccccuacaagaucggcaccuccggcuccugccccaacaucaccaacggcaacggcuucuucgccaccauggccugggccguccccaagaacgacaagaacaagaccgccaccaacccccucaccaucgagguccccuacaucugcaccgagggcgaggaccagaucaccgucuggggcuuccacuccgacgacgagacccagauggccaagcucuacggcgacuccaagccccagaaguucaccuccuccgccaacggcgucaccacccacuacgucucccagaucggcggcuuccccaaccagaccgaggacggcggccucccccaguccggccgcaucgucgucgacuacaugguccagaaguccggcaagaccggcaccaucaccuaccagcgcggcauccuccucccccagaaggucuggugcgccuccggccgcuccaaggucaucaagggcucccucccccucaucggcgaggccgacugccuccacgagaaguacggcggccucaacaaguccaagcccuacuacaccggcgagcacgccaaggccaucggcaacugccccaucugggucaagaccccccucaagcucgccaacggcaccaaguaccgcccccccgccaagcuccucaaggagcgcggcuucuucggcgccaucgccggcuuccucgagggcggcugggagggcaugaucgccggcuggcacggcuacaccucccacggcgcccacggcgucgccgucgccgccgaccucaaguccacccaggaggccaucaacaagaucaccaagaaccucaacucccucuccgagcucgaggucaagaaccuccagcgccucuccggcgccauggacgagcuccacaacgagauccucgagcucgacgagaaggucgacgaccuccgcgccgacaccaucuccucccagaucgagcucgccguccuccucuccaacgagggcaucaucaacuccgaggacgagcaccuccucgcccucgagcgcaagcucaagaagaugcucggccccuccgccgucgagaucggcaacggcugcuucgagaccaagcacaagugcaaccagaccugccucgaccgcaucgccgccggcaccuucgacgccggcgaguucucccuccccaccuucgacucccucaacaucaccgccgccucccucaacgacgacggccucgacaaccacaccauccuccucuacuacuccaccgccgccuccucccucgccgucacccucaugaucgccaucuucgucgucuacauggucucccgcgacaacgucuccugcuccaucugccucuga

SEQ ID NO: 124575 - RNA, 1755 nt, Artificial Sequence; identical to SEQ ID NO: 124165
  derived and/or modified CDS sequence (opt2) from hemagglutinin__InfluenzaB__EPI539769

SEQ ID NO: 124576 - RNA, 1755 nt, Artificial Sequence; identical to SEQ ID NO: 124567
  derived and/or modified CDS sequence (opt2) from hemagglutinin__InfluenzaB__EPI551249

SEQ ID NO: 124577 - RNA, 1755 nt, Artificial Sequence
  derived and/or modified CDS sequence (opt2) from hemagglutinin__InfluenzaB__EPI544259
augaaggccaucaucguccuccucauggucgucaccuccaacgccgaccgcaucugcaccggcaucaccuccuccaacuccccccacgucgucaagaccgccacccagggcgaggucaacgucaccggcgucaucccccucaccaccacccccaccaaguccuacuucgccaaccucaagggcacccgcacccgcggcaagcucugccccgacugccucaacugcaccgaccucgacgucgcccucggccgccccaugugcgucggcaccacccccuccgccaaggccuccauccuccacgagguccgccccgucaccuccggcugcuuccccaucaugcacgaccgcaccaagauccgccagcuccccaaccuccuccgcggcuacgagaagauccgccucuccacccagaacgucaucgacgccgagaaggcccccggcggccccuaccgccucggcaccuccggcuccugccccaacgccaccuccaagaucggcuucuucgccaccauggccugggccguccccaaggacaacuacaagaacgccaccaacccccucaccgucgagguccccuacaucugcaccgagggcgaggaccagaucaccgucuggggcuuccacuccgacaacaagaaccagaugaagucccucuacggcgacuccaacccccagaaguucaccuccuccgccaacggcgucaccacccacuacgucucccagaucggcgacuuccccgaccagaccgaggacggcggccucccccaguccggccgcaucgucgucgacuacaugaugcagaagcccggcaagaccggcaccaucgucuaccagcgcggcguccuccucccccagaaggucuggugcgccuccggccgcuccaaggucaucaagggcucccucccccucaucggcgaggccgacugccuccacgaggaguacggcggccucaacaaguccaagcccuacuacaccggcaagcacgccaaggccaucggcaacugccccaucugggucaagaccccccucaagcucgccaacggcaccaaguaccgcccccccgccaagcuccucaaggagcgcggcuucuucggcgccaucgccggcuuccucgagggcggcugggagggcaugaucgccggcuggcacggcuacaccucccacggcgcccacggcgucgccgucgccgccgaccucaaguccacccaggaggccaucaacaagaucaccaagaaccucaacucccucuccgagcucgaggucaagaaccuccagcgccucuccggcgccauggacgagcuccacaacgagauccucgagcucgacgagaaggucgacgaccuccgcgccgacaccaucuccucccagaucgagcucgccguccuccucuccaacgagggcaucaucaacuccgaggacgagcaccuccucgcccucgagcgcaagcucaagaagaugcucggccccuccgccgucgacaucggcaacggcugcuucgagaccaagcacaagugcaaccagaccugccucgaccgcaucgccgccggcaccuucaacgccggcgaguucucccuccccaccuucgacucccucaacaucaccgccgccucccucaacgacgacggccucgacaaccacaccauccuccucuacuacuccaccgccgccuccucccucgccgucacccucaugcucgccaucuucaucgucuacauggucucccgcgacaacgucuccugcuccaucugccucuga

SEQ ID NO: 124578 - RNA, 1755 nt, Artificial Sequence
  derived and/or modified CDS sequence (opt2) from hemagglutinin__InfluenzaB__EPI592699
augaaggccaucaucguccuccucauggucgucaccuccaacgccgaccgcaucugcaccggcaucaccuccuccaacuccccccacgucgucaagaccgccacccagggcgaggucaacgucaccggcgucaucccccucaccaccacccccaccaaguccuacuucgccaaccucaagggcacccgcacccgcggcaagcucugccccgacugccucaacugcaccgaccucgacgucgcccucggccgccccaugugcgucggcaccacccccuccgccaaggccuccauccuccacgagguccgccccgucaccuccggcugcuuccccaucaugcacgaccgcaccaagauccgccagcuccccaaccuccuccgcggcuacgagaagauccgccucuccacccagaacgucaucgacgccgagaaggcccccggcggccccuaccgccucggcaccuccggcuccugccccaacgccaccuccaagaucggcuucuucgccaccauggccugggccguccccaaggacaacuacaagaacgccaccaacccccagaccgucgagguccccuacaucugcaccgagggcgaggaccagaucaccgucuggggcuuccacuccgacaacaagauccagaugaagucccucuacggcgacuccaacccccagaaguucaccuccuccgccaacggcgucaccacccacuacgucucccagaucggcgacuuccccgaccagaccgaggacggcggccucccccaguccggccgcaucgucgucgacuacaugguccagaagcccggcaagaccggcaccaucgucuaccagcgcggcguccuccucccccagaaggucuggugcgccuccggccgcuccaaggucaucaagggcucccucccccucaucggcgaggccgacugccuccacgaggaguacggcggccucaacaaguccaagcccuacuacaccggcaagcacgccaaggccaucggcaacugccccaucugggucaagaccccccucaagcucgccaacggcaccaaguaccgcccccccgccaagcuccucaaggagcgcggcuucuucggcgccaucgccggcuuccucgagggcggcugggagggcaugaucgccggcuggcacggcuacaccucccacggcgcccacggcgucgccgucgccgccgaccucaaguccacccaggaggccaucaacaagaucaccaagaaccucaacucccucuccgagcucgaggucaagaaccuccagcgccucuccggcgccauggacgagcuccacaacgagauccucgagcucgacgagaaggucgacgaccuccgcgccgacaccaucuccucccagaucgagcucgccguccuccucuccaacgagggcaucaucaacuccgaggacgagcaccuccucgcccucgagcgcaagcucaagaagaugcucggccccuccgccgucgacaucggcaacggcugcuucgagaccaagcacaagugcaaccagaccugccucgaccgcaucgccgccggcaccuucaacgccggcgaguucucccuccccaccuucgacucccucaacaucaccgccgccucccucaacgacgacggccucgacaaccacaccauccuccucuacuacuccaccgccgccuccucccucgccgucacccucaugcucgccaucuucaucgucuacauggucucccgcgacaacgucuccugcuccaucugccucuga

SEQ ID NO: 124579 - RNA, 1755 nt, Artificial Sequence; identical to SEQ ID NO: 124488
  derived and/or modified CDS sequence (opt2) from hemagglutinin__InfluenzaB__EPI592707

SEQ ID NO: 124580 - RNA, 1755 nt, Artificial Sequence
  derived and/or modified CDS sequence (opt2) from hemagglutinin__InfluenzaB__EPI693094
augaaggccaucaucguccuccucauggucgucaccuccaacgccgaccgcaucugcaccggcaucaccuccuccaacuccccccacgucgucaagaccgccacccagggcgaggucaacgucaccggcgucaucccccucaccaccacccccaccaaguccuacuucgccaaccucaagggcacccgcacccgcggcaagcucugccccgacugccucaacugcaccgaccucgacgucgcccucggccgccccaugugcgucggcaccacccccuccgccaaggccuccauccuccacgagguccgccccgucaccuccggcugcuuccccaucaugcacgaccgcaccaagauccgccagcuccccaaccuccuccgcggcuacgagaagauccgccucuccacccagaacgucaucgacgccgagaaggcccccggcggccccuaccgccucggcaccuccgaguccugccccaacgccaccuccaagaucggcuucuucgccaccauggccugggccguccccaaggacaacuacaagaacgccaccaacccccagaccgucgagguccccuacaucugcaccgagggcgaggaccagaucaccgucuggggcuuccacuccgacaacaagauccagaugaagucccucuacggcgacuccaacccccagaaguucaccuccuccgccaacggcgucaccacccacuacgucucccagaucggcgacuuccccgaccagaccgaggacggcggccucccccaguccggccgcaucgucgucgacuacaugguccagaagcccggcaagaccggcaccaucgucuaccagcgcggcguccuccucccccagaaggucuggugcgccuccggccgcuccaaggucaucaagggcucccucccccucaucggcgaggccgacugccuccacgaggaguacggcggccucaacaaguccaagcccuacuacaccggcaagcacgccaaggccaucggcaacugccccaucugggucaagaccccccucaagcucgccaacggcaccaaguaccgcccccccgccaagcuccucaaggagcgcggcuucuucggcgccaucgccggcuuccucgagggcggcugggagggcaugaucgccggcuggcacggcuacaccucccacggcgcccacggcgucgccgucgccgccgaccucaaguccacccaggaggccaucaacaagaucaccaagaaccucaacucccucuccgagcucgaggucaagaaccuccagcgccucuccggcgccauggacgagcuccacaacgagauccucgagcucgacgagaaggucgacgaccuccgcgccgacaccaucuccucccagaucgagcucgccguccuccucuccaacgagggcaucaucaacuccgaggacgagcaccuccucgcccucgagcgcaagcucaagaagaugcucggccccuccgccgucgacaucggcaacggcugcuucgagaccaagcacaagugcaaccagaccugccucgaccgcaucgccgccggcaccuucaacgccggcgaguucucccuccccaccuucgacucccucaacaucaccgccgccucccucaacgacgacggccucgacaaccacaccauccuccucuacuacuccaccgccgccuccucccucgccgucacccucaugcucgccaucuucaucgucuacauggucucccgcgacaacgucuccugcuccaucugccucuga

SEQ ID NO: 124581 - RNA, 1758 nt, Artificial Sequence; identical to SEQ ID NO: 124511
  derived and/or modified CDS sequence (opt2) from hemagglutinin__InfluenzaB__EPI678796

SEQ ID NO: 124582 - RNA, 1758 nt, Artificial Sequence
  derived and/or modified CDS sequence (opt2) from hemagglutinin__InfluenzaB__EPI721064
augaaggccaucaucguccuccucauggucgucaccuccaacgccgaccgcaucugcaccggcaucaccuccuccaacuccccccacgucgucaagaccgccacccagggcgaggucaacgucaccggcgucaucccccucaccaccacccccaccaagucccacuucgccaaccucaagggcaccgagacccgcggcaagcucugccccaagugccucaacugcaccgaccucgacgucgcccucggccgccccaagugcaccggcaagauccccuccgcccgcgucuccauccuccacgagguccgccccgucaccuccggcugcuuccccaucaugcacgaccgcaccaagauccgccagcuccccaaccuccuccgcggcuacgagcacguccgccucuccacccacaacgucaucaacgccgaggacgcccccggcggccccuacaagaucggcaccucccgcuccugccccaacaucaccaacggcaacggcuucuucgccaccauggccugggccguccccaagaacgacaagaacaagaccgccaccaacccccucaccaucgagguccccuacaucugcaccgagggcgaggaccagaucaccgucuggggcuuccacuccgacaacgagacccagauggccaagcucuacggcgacuccaagccccagaaguucaccuccuccgccaacggcgucaccacccacuacgucucccagaucggcggcuuccccaaccagaccgaggacggcggccucccccaguccggccgcaucgucgucgacuacaugguccagaaguccggcaagaccggcaccaucaccuaccagcgcggcauccuccucccccagaaggucuggugcgccuccggccgcuccaaggucaucaagggcucccucccccucaucggcgaggccgacugccuccacgagaaguacggcggccucaacaaguccaagcccuacuacaccggcgagcacgccaaggccaucggcaacugccccaucugggucaagaccccccucaagcucgccaacggcaccaaguaccgcccccccgccaagcuccucaaggagcgcggcuucuucggcgccaucgccggcuuccucgagggcggcugggagggcaugaucgccggcuggcacggcuacaccucccacggcgcccacggcgucgccgucgccgccgaccucaaguccacccaggaggccaucaacaagaucaccaagaaccucaacucccucuccgagcucgaggucaagaaccuccagcgccucuccggcgccauggacgagcuccacaacgagauccucgagcucgacgagaaggucgacgaccuccgcgccgacaccaucuccucccagaucgagcucgccguccuccucuccaacgagggcaucaucaacuccgaggacgagcaccuccucgcccucgagcgcaagcucaagaagaugcucggccccuccgccgucgagaucggcaacggcugcuucgagaccaagcacaagugcaaccagaccugccucgaccgcaucgccgccggcaccuucgacgccggcgaguucucccuccccaccuucgacucccucaacaucaccgccgccucccucaacgacgacggccucgacaaccacaccauccuccucuacuacuccaccgccgccuccucccucgccgucacccucaugaucgccaucuucgucgucuacauggucucccgcgacaacgucuccugcuccaucugccucuga

SEQ ID NO: 124583 - RNA, 1758 nt, Artificial Sequence; identical to SEQ ID NO: 122792
  derived and/or modified CDS sequence (opt2) from hemagglutinin__InfluenzaB__EPI328904

SEQ ID NO: 124584 - RNA, 1755 nt, Artificial Sequence
  derived and/or modified CDS sequence (opt2) from hemagglutinin__InfluenzaB__EPI543191
augaaggccaucaucguccuccucauggucgucaccuccaacgccgaccgcaucugcaccggcaucaccuccuccaacuccccccacgucgucaagaccgccacccagggcgaggucaacgucaccggcgucaucccccucaccaccacccccaccaaguccuacuucgccaaccucaagggcacccgcacccgcggcaagcucugccccgacugccucaacugcaccgaccucgacgucgcccucggccgccccaugugcgucggcaccacccccuccgccaaggccuccauccuccacgagguccgccccgucaccuccggcugcuuccccaucaugcacgaccgcaccaagauccgccagcuccccaaccuccuccgcggcuacgagaagauccgccucuccacccagaacgucaucgacgccgagaaggcccccggcggccccuaccgccucggcaccuccggcuccugccccaacgccaccuccaagaucggcuucuucgccaccauggccugggccguccccaaggacaacuacaagaacgccaccaacccccucaccgucgagguccccuacaucugcaccgagggcgaggaccagaucaccgucuggggcuuccacuccgacaagaagacccagaugaagucccucuacggcgacuccaacccccagaaguucaccuccuccgccaacggcgucaccacccacuacgucucccagaucggcgacuuccccgaccagaccgaggacggcggccucccccaguccggccgcaucgucgucgacuacaugaugcagaagcccggcaagaccggcaccaucgucuaccagcgcggcguccuccucccccagaaggucuggugcgccuccggccgcuccaaggucaucaagggcucccucccccucaucggcgaggccgacugccuccacgaggaguacggcggccucaacaaguccaagcccuacuacaccggcaagcacgccaaggccaucggcaacugccccaucugggucaagaccccccucaagcucgccaacggcaccaaguaccgcccccccgccaagcuccucaaggagcgcggcuucuucggcgccaucgccggcuuccucgagggcggcugggagggcaugaucgccggcuggcacggcuacaccucccacggcgcccacggcgucgccgucgccgccgaccucaaguccacccaggaggccaucaacaagaucaccaagaaccucaacucccucuccgagcucgaggucaagaaccuccagcgccucuccggcgccauggacgagcuccacaacgagauccucgagcucgacgagaaggucgacgaccuccgcgccgacaccaucuccucccagaucgagcucgccguccuccucuccaacgagggcaucaucaacuccgaggacgagcaccuccucgcccucgagcgcaagcucaagaagaugcucggccccuccgccgucgacaucggcaacggcugcuucgagaccaagcacaagugcaaccagaccugccucgaccgcaucgccgccggcaccuucaacgccggcgaguucucccuccccaccuucgacucccucaacaucaccgccgccucccucaacgacgacggccucgacaaccacaccauccuccucuacuacuccaccgccgccuccucccucgccgucacccucaugcucgccaucuucaucgucuacauggucucccgcgacaacgucuccugcuccaucugccucuga

SEQ ID NO: 124585 - RNA, 1755 nt, Artificial Sequence; identical to SEQ ID NO: 124165
  derived and/or modified CDS sequence (opt2) from hemagglutinin__InfluenzaB__EPI500359

SEQ ID NO: 124586 - RNA, 1755 nt, Artificial Sequence
  derived and/or modified CDS sequence (opt2) from hemagglutinin__InfluenzaB__EPI543185
augaaggccaucaucguccuccucauggucgucaccuccaacgccgaccgcaucugcaccggcaucaccuccuccaacuccccccacgucgucaagaccgccacccagggcgaggucaacgucaccggcgucaucccccucaccaccacccccaccaaguccuacuucgccaaccucaagggcacccgcacccgcggcaagcucugccccgacugccucaacugcaccgaccucgacgucgcccucggccgccccaugugcgucggcaccacccccuccgccaaggccuccauccuccacgagguccgccccgucaccuccggcugcuuccccaucaugcacgaccgcaccaagauccgccagcuccccaaccuccuccgcggcuacgagaagauccgccucuccacccagaacgucaucgacgccgagaaggcccccggcggccccuaccgccucggcaccuccggcuccugccccaacgccaccuccaagaucggcuucuucgccaccauggccugggccguccccaaggacaacuacaagaacgccaccaacccccagaccgucgagguccccuacaucugcaccgagggcgaggaccagaucaccgucuggggcuuccacuccgacaacaagaaccagaugaagucccucuacggcgacuccaacccccagaaguucaccuccuccgccaacggcgucaccacccacuacgucucccagaucggcgacuuccccgaccagaccgaggacggcggccucccccaguccggccgcaucgucgucgacuacaugaugcagaagcccggcaagaccggcaccaucgucuaccagcgcggcguccuccucccccagaaggucuggugcgccuccggccgcuccaaggucaucaagggcucccucccccucaucggcgaggccgacugccuccacgaggaguacggcggccucaacaaguccaagcccuacuacaccggcaagcacgccaaggccaucggcaacugccccaucugggucaagaccccccucaagcucgccaacggcaccaaguaccgcccccccgccaagcuccucaaggagcgcggcuucuucggcgccaucgccggcuuccucgagggcggcugggagggcaugaucgccggcuggcacggcuacaccucccacggcgcccacggcgucgccgucgccgccgaccucaaguccacccaggaggccaucaacaagaucaccaagaaccucaacucccucuccgagcucgaggucaagaaccuccagcgccucuccggcgccauggacgagcuccacaacgagauccucgagcucgacgagaaggucgacgaccuccgcgccgacaccaucuccucccagaucgagcucgccguccuccucuccaacgagggcaucaucaacuccgaggacgagcaccuccucgcccucgagcgcaagcucaagaagaugcucggccccuccgccgucgacaucggcaacggcugcuucgagaccaagcacaagugcaaccagaccugccucgaccgcaucgccgccggcaccuucaacgccggcgaguucucccuccccaccuucgacucccucaacaucaccgccgccucccucaacgacgacggccucgacaaccacaccauccuccucuacuacuccaccgccgccuccucccucgccgucacccucaugcucgccaucuucaucgucuacauggucucccgcgacaacgucuccugcuccaucugccucuga

SEQ ID NO: 124587 - RNA, 1755 nt, Artificial Sequence; identical to SEQ ID NO: 124325
  derived and/or modified CDS sequence (opt2) from hemagglutinin__InfluenzaB__EPI536447

SEQ ID NO: 124588 - RNA, 1755 nt, Artificial Sequence; identical to SEQ ID NO: 122794
  derived and/or modified CDS sequence (opt2) from hemagglutinin__InfluenzaB__NP_056660

SEQ ID NO: 124589 - RNA, 1755 nt, Artificial Sequence
  derived and/or modified CDS sequence (opt2) from hemagglutinin__InfluenzaB__ABG85167
augaaggccaucaucguccuccucauggucgucaccuccaacgccgaccgcaucugcaccggcaucaccuccuccaacuccccccacgucgucaagaccgccacccagggcgaggucaacgucaccggcgucaucccccucaccaccacccccacccgcucccacuucgccaaccucaagggcacccagacccgcggcaagcucugccccaacugcuucaacugcaccgaccucgacgucgcccucggccgccccaagugcaugggcaacauccccuccgccaaggucuccauccuccacgaggucaagcccgucaccuccggcugcuuccccaucaugcacgaccgcaccaagauccgccagcuccccaaccuccuccgcggcuacgagaacauccgccucuccaccuccaacgucaucaacgccgagaccgcccccggcggccccuacaaggucggcaccuccggcuccugccccaacgucgccaaccgcaacggcuucuucaacaccauggccugggucauccccaaggacaacaacaagaccgccaucaaccccgucaccgucgagguccccuacaucugcuccgagggcgaggaccagaucaccgucuggggcuuccacuccgacgacaagacccagauggagcgccucuacggcgacuccaacccccagaaguucaccuccuccgccaacggcgucaccacccacuacgucucccagaucggcggcuuccccaaccagaccgaggacgagggccucaagcaguccggccgcaucgucgucgacuacaugguccagaagcccggcaagaccggcaccaucgucuaccagcgcggcauccuccucccccagaaggucuggugcgccuccggccgcuccaaggucaucaagggcucccucccccucaucggcgaggccgacugccuccacgagaaguacggcggccucaacaaguccaagcccuacuacaccggcgagcacgccaaggccaucggcaacugccccaucugggucaagaccccccucaagcucgccaacggcaccaaguaccgcccccccgccaagcuccucaaggagcgcggcuucuucggcgccaucgccggcuuccucgagggcggcugggagggcaugaucgccggcuggcacggcuacaccucccacggcgcccacggcgucgccgucgccgccgaccucaaguccacccaggaggccaucaacaagaucaccaagaaccucaacucccucuccgagcucgaggucaagaaccuccagcgccucuccggcgccaugaacggccuccacgacgagauccucgagcucgacgagaaggucgacgaccuccgcgccgacaccaucuccucccagaucgagcucgccguccuccucuccaacgagggcaucaucaacuccgaggacgagcaccuccucgcccucgagcgcaagcucaagaagaugcucggccccuccgccgucgagaucggcaacggcugcuucgagaccaagcacaagugcaaccagaccugccucgaccgcaucgccgccggcaccuucaacgccggcgacuucucccuccccaccuucgacucccucaacaucaccgccgccucccucaacgacgacgaccucgacaaccacaccauccuccucuacuacuccaccgccgccuccucccucgccgucacccucaugaucgccaucuucaucgucuacauggucucccgcgacaacgucuccugcuccaucugccucuga

SEQ ID NO: 124590 - RNA, 1755 nt, Artificial Sequence
  derived and/or modified CDS sequence (opt2) from hemagglutinin__InfluenzaB__EPI376346
augaaggccaucaucguccuccucauggucgucaccuccaacgccgaccgcaucugcaccggcaucaccuccuccaacuccccccacgucgucaagaccgccacccagggcgaggucaacgucaccggcgucaucccccucaccaccacccccaccaaguccuacuucgccaaccucaagggcaccaagacccgcggcaagcucugccccgacugccucaacugcaccgaccucgacgucgcccucggccgccccaugugcgucggcaccacccccuccgccaaggccuccauccuccacgagguccgccccgucaccuccggcugcuuccccaucaugcacgaccgcaccaagauccgccagcucgccaaccuccuccgcggcuacgagaacauccgccucuccacccagaacgucaucgacgccgagaaggcccccggcggccccuaccgccucggcaccuccggcuccugccccaacgccaccuccaaguccggcuucuucgccaccauggccugggccguccccaaggacaacaacaagaacgccaccaacccccucaccgucgagguccccuacaucugcgccgagggcgaggaccagaucaccgucuggggcuuccacuccgacgacaagacccagaugaagaaccucuacggcgacuccaacccccagaaguucaccuccuccgccaacggcgucaccacccacuacgucucccagaucggcggcuuccccgaccagaccgaggacggcggccucccccaguccggccgcaucgucgucgacuacaugaugcagaagcccggcaagaccggcaccaucgucuaccagcgcggcguccuccucccccagaaggucuggugcgccuccggccgcuccaaggucaucaagggcucccucccccucaucggcgaggccgacugccuccacgagaaguacggcggccucaacaaguccaagcccuacuacaccggcgagcacgccaaggccaucggcaacugccccaucugggucaagaccccccucaagcucgccaacggcaccaaguaccgcccccccgccaagcuccucaaggagcgcggcuucuucggcgccaucgccggcuuccucgagggcggcugggagggcaugaucgccggcuggcacggcuacaccucccacggcgcccacggcgucgccgucgccgccgaccucaaguccacccaggaggccaucaacaagaucaccaagaaccucaacucccucuccgagcucgaggucaagaaccuccagcgccucuccggcgccauggacgagcuccacaacgagauccucgagcucgacgagaaggucgacgaccuccgcgccgacaccaucuccucccagaucgagcucgccguccuccucuccaacgagggcaucaucaacuccgaggacgagcaccuccucgcccucgagcgcaagcucaagaagaugcucggccccuccgccgucgacaucggcaacggcugcuucgagaccaagcacaagugcaaccagaccugccucgaccgcaucgccgccggcaccuucaacgccggcgaguucucccuccccaccuucgacucccucaacaucaccgccgccucccucaacgacgacggccucgacaaccacaccauccuccucuacuacuccaccgccgccuccucccucgccgucacccucaugcucgccaucuucaucgucuacauggucucccgcgacaacgucuccugcuccaucugccucuga

SEQ ID NO: 124591 - RNA, 1755 nt, Artificial Sequence; identical to SEQ ID NO: 122890
  derived and/or modified CDS sequence (opt2) from hemagglutinin__InfluenzaB__EPI368425

SEQ ID NO: 124592 - RNA, 1755 nt, Artificial Sequence; identical to SEQ ID NO: 122856
  derived and/or modified CDS sequence (opt2) from hemagglutinin__InfluenzaB__ACH53430

SEQ ID NO: 124593 - RNA, 1758 nt, Artificial Sequence; identical to SEQ ID NO: 122681
  derived and/or modified CDS sequence (opt2) from hemagglutinin__InfluenzaB__EPI331151

SEQ ID NO: 124594 - RNA, 1758 nt, Artificial Sequence
  derived and/or modified CDS sequence (opt2) from hemagglutinin__InfluenzaB__EPI356777
augaaggccaucaucguccuccucauggucgucaccuccaacgccgaccgcaucugcaccggcaucaccuccuccaacuccccccacgucgucaagaccgccacccagggcgaggucaacgucaccggcgucaucccccucaccaccacccccaccaagucccacuucgccaaccucaagggcaccgagacccgcggcaagcucugccccaagugccucaacugcaccgaccucgacgucgcccucggccgccccaagugcaccggcaagauccccuccgcccgcgucuccauccuccacgagguccgccccgucaccuccggcugcuuccccaucaugcacgaccgcaccaagauccgccagcuccccaaccuccuccgcggcuacgagcacauccgccucuccacccacaacgucaucaacgccgagaacgcccccggcggccccuacaagaucggcaccuccggcuccugccccaacgucaccaacggcaacggcuucuucgccaccauggccugggccguccccaagaacgacaagaacaagaccgccaccaacccccucaccaucgagguccccuacaucugcaccgagggcgaggaccagaucaccgucuggggcuuccacuccgacgacgagacccagauggccaagcucuacggcgacuccaagccccagaaguucaccuccuccgccaacggcgucaccacccacuacgucucccagaucggcggcuuccccaaccagaccgaggacggcggccucccccaguccggccgcaucgucgucgacuacaugguccagaaguccggcaagaccggcaccaucaccuaccagcgcggcauccuccucccccagaaggucuggugcgccuccggccgcuccaaggucaucaagggcucccucccccucaucggcgaggccgacugccuccacgagaaguacggcggccucaacaaguccaagcccuacuacaccggcgagcacgccaaggccaucggcaacugccccaucugggucaagaccccccucaagcucgccaacggcaccaaguaccgcccccccgccaagcuccucaaggagcgcggcuucuucggcgccaucgccggcuuccucgagggcggcugggagggcaugaucgccggcuggcacggcuacaccucccacggcgcccacggcgucgccgucgccgccgaccucaaguccacccaggaggccaucaacaagaucaccaagaaccucaacucccucuccgagcucgaggucaagaaccuccagcgccucuccggcgccauggacgagcuccacaacgagauccucgagcucgacgagaaggucgacgaccuccgcgccgacaccaucuccucccagaucgagcucgccguccuccucuccaacgagggcaucaucaacuccgaggacgagcaccuccucgcccucgagcgcaagcucaagaagaugcucggccccuccgccgucgagaucggcaacggcugcuucgagaccaagcacaagugcaaccagaccugccucgaccgcaucgccgccggcaccuucgacgccggcgaguucucccuccccaccuucgacucccucaacaucaccgccgccucccucaacgacgacggccucgacaaccacaccauccuccucuacuacuccaccgccgccuccucccucgccgucacccucaugaucgccaucuucgucgucuacauggucucccgcgacaacgucuccugcuccaucugccucuga

SEQ ID NO: 124595 - RNA, 1752 nt, Artificial Sequence; identical to SEQ ID NO: 122463
  derived and/or modified CDS sequence (opt2) from hemagglutinin__InfluenzaB__CY018349

SEQ ID NO: 124596 - RNA, 1752 nt, Artificial Sequence
  derived and/or modified CDS sequence (opt2) from hemagglutinin__InfluenzaB__AY581945
augaaggccaucaucguccuccucauggucgucaccuccaacgccgaccgcaucugcaccggcaucaccuccuccaacuccccccacgucgucaagaccgccacccagggcgaggucaacgucaccggcgucaucccccucaccaccacccccaccaagucccacuucgccaaccucaagggcaccaagacccgcggcaagcucugccccaacugccucaacugcaccgaccucgacgucgcccucgcccgccccaugugcgucggcaccacccccuccgccaaggccuccauccuccacgagguccgccccgucaccuccggcugcuuccccaucaugcacgaccgcaccaagauccgccagcuccccaaccuccuccgcggcuacgagaacauccgccucuccacccagaacgucaucaacgccgagcgcgcccccggcggccccuaccgccucggcaccuccggcuccugccccaacgucaccucccgcgacggcuucuucgccaccauggccugggccgucccccgcgacaacaagaccgccaccaacccccucaccgucgagguccccuacaucugcaccaagggcgaggaccagaucaccgucuggggcuuccacuccgacaacaagacccagaugaagaaccucuacggcgacuccaacccccagaaguucaccuccuccgccaacggcgucaccacccacuacgucucccagaucggcggcuuccccaaccagaccgaggacggcggccucccccaguccggccgcaucgucgucgacuacaugguccagaagcccggcaagaccggcaccaucgucuaccagcgcggcguccuccucccccagaaggucuggugcgccuccggccgcuccaaggucaucaagggcucccucccccucaucggcgaggccgacugccuccacgagaaguacggcggccucaacaaguccaagcccuacuacaccggcgagcacgccaaggccaucggcaacugccccaucugggucaagaccccccucaagcucgccaacggcaccaaguaccgcccccccgccaagcuccucaaggagcgcggcuucuucggcgccaucgccggcuuccucgagggcggcugggagggcaugaucgccggcuggcacggcuacaccucccacggcgcccacggcgucgccgucgccgccgaccucaaguccacccaggaggccaucaacaagaucaccaagaaccucaacucccucuccgagcucgaggucaagaaccuccagcgccucuccggcgccauggacgagcuccacaacgagauccucgagcucgacgagaaggucgacgaccuccgcgccgacaccaucuccucccagaucgagcucgccguccuccucuccaacgagggcaucaucaacuccgaggacgagcaccuccucgcccucgagcgcaagcucaagaagaugcucggccccuccgccgucgacaucggcaacggcugcuucgagaccaagcacaagugcaaccagaccugccucgaccgcaucgccgccggcaccuucaacgccggcgaguucucccuccccaccuucgacucccucaacaucaccgccgccucccucaacgacgacggccucgacaaccacaccauccuccucuacuacuccaccgccgccuccucccucgccgucacccucaugaucgccaucuucaucgucuacauggucucccgcgacaacgucuccugcuccaucugccucuga

SEQ ID NO: 124597 - RNA, 1755 nt, Artificial Sequence; identical to SEQ ID NO: 124344
  derived and/or modified CDS sequence (opt2) from hemagglutinin__InfluenzaB__EPI541351

SEQ ID NO: 124598 - RNA, 1755 nt, Artificial Sequence
  derived and/or modified CDS sequence (opt2) from hemagglutinin__InfluenzaB__EPI541760
augaaggccgucaucguccuccucauggucgucaccuccaacgccgaccgcaucugcaccggcaucaccuccuccaacuccccccacgucgucaagaccgccacccagggcgaggucaacgucaccggcgucaucccccucaccaccacccccaccaaguccuacuucgccaaccucaagggcacccgcacccgcggcaagcucugccccgacugccucaacugcaccgaccucgacgucgcccucggccgccccaugugcgucggcaccacccccuccgccaaggccuccauccuccacgagguccgccccgucaccuccggcugcuuccccaucaugcacgaccgcaccaagauccgccagcuccccaaccuccuccgcggcuacgagaagauccgccucuccacccagaacgucaucgacgccgagaaggcccccggcggccccuaccgccucggcaccuccggcuccugccccaacgccaccuccaagaucggcuucuucgccaccauggccugggccguccccaaggacaacuacaagaacgccaccaacccccucaccgucgagguccccuacaucugcaccgagggcgaggaccagaucaccgucuggggcuuccacuccgacaacaagacccagaugaagucccucuacggcgacuccaacccccagaaguucaccuccuccgccaacggcgucaccacccacuacgucucccagaucggcgacuuccccgaccagaccgaggacggcggccucccccaguccggccgcaucgucgucgacuacaugaugcagaagcccggcaagaccggcaccaucgucuaccagcgcggcguccuccucccccagaaggucuggugcgccuccggccgcuccaaggucaucaagggcucccucccccucaucggcgaggccgacugccuccacgaggaguacggcggccucaacaaguccaagcccuacuacaccggcaagcacgccaaggccaucggcaacugccccaucugggucaagaccccccucaagcucgccaacggcaccaaguaccgcccccccgccaagcuccucaaggagcgcggcuucuucggcgccaucgccggcuuccucgagggcggcugggagggcaugaucgccggcuggcacggcuacaccucccacggcgcccacggcgucgccgucgccgccgaccucaaguccacccaggaggccaucaacaagaucaccaagaaccucaacucccucuccgagcucgaggucaagaaccuccagcgccucuccggcgccauggacgagcuccacaacgagauccucgagcucgacgagaaggucgacgaccuccgcgccgacaccaucuccucccagaucgagcucgccguccuccucuccaacgagggcaucaucaacuccgaggacgagcaccuccucgcccucgagcgcaagcucaagaagaugcucggccccuccgccgucgacaucggcaacggcugcuucgagaccaagcacaagugcaaccagaccugccucgaccgcaucgccgccggcaccuucaacgccggcgaguucucccuccccaccuucgacucccucaacaucaccgccgccucccucaacgacgacggccucgacaaccacaccauccuccucuacuacuccaccgccgccuccucccucgccgucacccucaugcucgccaucuucaucgucuacauggucucccgcgacaacgucuccugcuccaucugccucuga

SEQ ID NO: 124599 - RNA, 1758 nt, Artificial Sequence; identical to SEQ ID NO: 122923
  derived and/or modified CDS sequence (opt2) from hemagglutinin__InfluenzaB__EPI477397

SEQ ID NO: 124600 - RNA, 1758 nt, Artificial Sequence
  derived and/or modified CDS sequence (opt2) from hemagglutinin__InfluenzaB__EPI492571
augaaggccaucaucguccuccucauggucgucaccuccaacgccgaccgcaucugcaccggcaucaccuccuccaacuccccccacgucgucaagaccgccacccagggcgaggucaacgucaccggcgucaucccccucaccaccacccccaccaagucccacuucgccaaccucaagggcaccgagacccgcggcaagcucugccccaagugccucaacugcaccgaccucgacgucgcccucggccgccccaagugcaccggcaagauccccuccgcccgcgucuccauccuccacgagguccgccccgucaccuccggcugcuuccccaucaugcacgaccgcaccaagauccgccagcuccccaaccuccuccgcggcuacgagcacauccgccucuccacccacaacgucaucaacgccgaggacgcccccggcggccccuacaagaucggcaccuccggcuccugccccaacgucaccaacggcaacggcuucuucgccaccauggccugggccguccccaagaacgacaagaacaagaccgccaccaacccccucaccaucgagguccccuacaucugcaccgagggcgaggaccagaucaccgucuggggcuuccacuccgacaucgagacccagauggccaagcucuacggcgacuccaagccccagaaguucaccuccuccgccaacggcgucaccacccacuacgucucccagaucggcggcuuccccaaccagaccgaggacggcggccucccccaguccggccgcaucgucgucgacuacaugguccagaaguccggcaagaccggcaccaucaccuaccagcgcggcauccuccucccccagaaggucuggugcgccuccggccgcuccaaggucaucaagggcucccucccccucaucggcgaggccgacugccuccacgagaaguacggcggccucaacaaguccaagcccuacuacaccggcgagcacgccaaggccaucggcaacugccccaucugggucaagaccccccucaagcucgccaacggcaccaaguaccgcccccccgccaagcuccucaaggagcgcggcuucuucggcgccaucgccggcuuccucgagggcggcugggagggcaugaucgccggcuggcacggcuacaccucccacggcgcccacggcgucgccgucgccgccgaccucaaguccacccaggaggccaucaacaagaucaccaagaaccucaacucccucuccgagcucgaggucaagaaccuccagcgccucuccggcgccauggacgagcuccacaacgagauccucgagcucgacgagaaggucgacgaccuccgcgccgacaccaucuccucccagaucgagcucgccguccuccucuccaacgagggcaucaucaacuccgaggacgagcaccuccucgcccucgagcgcaagcucaagaagaugcucggccccuccgccgucgagaucggcaacggcugcuucgagaccaagcacaagugcaaccagaccugccucgaccgcaucgccgccggcaccuucgacgccggcgaguucucccuccccaccuucgacucccucaacaucaccgccgccucccucaacgacgacggccucgacaaccacaccauccuccucuacuacuccaccgccgccuccucccucgccgucacccucaugaucgccaucuucgucgucuacauggucucccgcgacaacgucuccugcuccaucugccucuga

SEQ ID NO: 124601 - RNA, 1758 nt, Artificial Sequence
  derived and/or modified CDS sequence (opt2) from hemagglutinin__InfluenzaB__EPI498340
augaaggccaucaucguccuccucauggucgucaccuccaacgccgaccgcaucugcaccggcaucaccuccuccaacuccccccacgucgucaagaccgccacccagggcgaggucaacgucaccggcgucaucccccucaccaccacccccaccaagucccacuucgccaaccucaagggcaccgagacccgcggcaagcucugccccaagugccucaacugcaccgaccucgacgucgcccucggccgccccaagugcaccggcaagauccccuccgcccgcgucuccauccuccacgagguccgccccgucaccuccggcugcuuccccaucaugcacgaccgcaccaagauccgccagcuccccaaccuccuccgcggcuacgagcacauccgccucuccacccacaacgucaucaacaccgaggacgcccccggcggccccuacaagaucggcaccuccggcuccugccccaacgucaccaacggcaacggcuucuucgccaccauggccugggccguccccaagaacgacaagaacaagaccgccaccaacccccucaccaucgagguccccuacaucugcaccgagggcgaggaccagaucaccgucuggggcuuccacuccgacaucgagacccagauggccaagcucuacggcgacuccaagccccagaaguucaccuccuccgccaacggcgucaccacccacuacgucucccagaucggcggcuuccccaaccagaccgaggacggcggccucccccaguccggccgcaucgucgucgacuacaugguccagaaguccggcaagaccggcaccaucaccuaccagcgcggcauccuccucccccagaaggucuggugcgccuccggccgcuccaaggucaucaagggcucccucccccucaucggcgaggccgacugccuccacgagaaguacggcggccucaacaaguccaagcccuacuacaccggcgagcacgccaaggccaucggcaacugccccaucugggucaagaccccccucaagcucgccaacggcaccaaguaccgcccccccgccaagcuccucaaggagcgcggcuucuucggcgccaucgccggcuuccucgagggcggcugggagggcaugaucgccggcuggcacggcuacaccucccacggcgcccacggcgucgccgucgccgccgaccucaaguccacccaggaggccaucaacaagaucaccaagaaccucaacucccucuccgagcucgaggucaagaaccuccagcgccucuccggcgccauggacgagcuccacaacgagauccucgagcucgacgagaaggucgacgaccuccgcgccgacaccaucuccucccagaucgagcucgccguccuccucuccaacgagggcaucaucaacuccgaggacgagcaccuccucgcccucgagcgcaagcucaagaagaugcucggccccuccgccgucgagaucggcaacggcugcuucgagaccaagcacaagugcaaccagaccugccucgaccgcaucgccgccggcaccuucgacgccggcgaguucucccuccccaccuucgacucccucaacaucaccgccgccucccucaacgacgacggccucgacaaccacaccauccuccucuacuacuccaccgccgccuccucccucgccgucacccucaugaucgccaucuucgucgucuacauggucucccgcgacaacgucuccugcuccaucugccucuga

SEQ ID NO: 124602 - RNA, 1758 nt, Artificial Sequence
  derived and/or modified CDS sequence (opt2) from hemagglutinin__InfluenzaB__EPI516490
augaaggccaucaucguccuccucauggucgucaccuccaacgccgaccgcaucugcaccggcaucaccuccuccaacuccccccacgucgucaagaccgccacccagggcgaggucaacgucaccggcgucaucccccucaccaccacccccaccaagucccacuucgccaaccucaagggcaccgagacccgcggcaagcucugccccaagugccucaacugcaccgaccucgacgucgcccucggccgccccaagugcaccggcaagauccccuccgcccgcgucuccauccuccacgagguccgccccgucaccuccggcugcuuccccaucaugcacgaccgcaccaagauccgccagcuccccaaccuccuccgcggcuacgagcacauccgccucuccacccacaacgucaucaacgccgaggacgcccccggcggccccuacaagaucggcaccuccggcuccugccccaacgucaccaacggcaacggcuucuucgccaccauggccugggccguccccaagaacgacaagaacaagaccgccaccaacccccucaccaucgagguccccuacaucugcaccgagggcgaggaccagaucaccgucuggggcuuccacuccgacaacgagauccagauggccaagcucuacggcgacuccaagccccagaaguucaccuccuccgccaacggcgucaccacccacuacgucucccagaucggcggcuuccccaaccagaccgaggacggcggccucccccaguccggccgcaucgucgucgacuacaugguccagaaguccggcaagaccggcaccaucaccuaccagcgcggcauccuccucccccagaaggucuggugcgccuccggccgcuccaaggucaucaagggcucccucccccucaucggcgaggccgacugccuccacgagaaguacggcggccucaacaaguccaagcccuacuacaccggcgagcacgccaaggccaucggcaacugccccaucugggucaagaccccccucaagcucgccaacggcaccaaguaccgcccccccgccaagcuccucaaggagcgcggcuucuucggcgccaucgccggcuuccucgagggcggcugggagggcaugaucgccggcuggcacggcuacaccucccacggcgcccacggcgucgccgucgccgccgaccucaaguccacccaggaggccaucaacaagaucaccaagaaccucaacucccucuccgagcucgaggucaagaaccuccagcgccucuccggcgccauggacgagcuccacaacgagauccucgagcucgacgagaaggucgacgaccuccgcgccgacaccaucuccucccagaucgagcucgccguccuccucuccaacgagggcaucaucaacuccgaggacgagcaccuccucgcccucgagcgcaagcucaagaagaugcucggccccuccgccgucgagaucggcaacggcugcuucgagaccaagcacaagugcaaccagaccugccucgaccgcaucgccgccggcaccuucgacgccggcgaguucucccuccccaccuucgacucccucaacaucaccgccgccucccucaacgacgacggccucgacaaccacaccauccuccucuacuacuccaccgccgccuccucccucgccgucacccucaugaucgccaucuucgucgucuacauggucucccgcgacaacgucuccugcuccaucugccucuga

SEQ ID NO: 124603 - RNA, 1755 nt, Artificial Sequence; identical to SEQ ID NO: 124165
  derived and/or modified CDS sequence (opt2) from hemagglutinin__InfluenzaB__EPI538119

SEQ ID NO: 124604 - RNA, 1755 nt, Artificial Sequence; identical to SEQ ID NO: 124584
  derived and/or modified CDS sequence (opt2) from hemagglutinin__InfluenzaB__EPI538125

SEQ ID NO: 124605 - RNA, 1755 nt, Artificial Sequence
  derived and/or modified CDS sequence (opt2) from hemagglutinin__InfluenzaB__EPI556422
augaaggccaucaucguccuccucauggucgucaccuccaacgccgaccgcaucugcaccggcaucaccuccuccaacuccccccacgucgucaagaccgccacccagggcgaggucaacgucaccggcgucaucccccucaccaccacccccaccaaguccuacuucgccaaccucaagggcacccgcacccgcggcaagcucugccccgacugccucaacugcaccgaccucgacgucgcccucggccgccccaugugcgucggcaccacccccuccgccaaggccuccauccuccacgagguccgccccgucaccuccggcugcuuccccaucaugcacgaccgcaccaagauccgccagcuccccaaccuccuccgcggcuacgagaagauccgccucuccacccagaacgucaucgacgccgagaaggcccccggcggccccuaccgccucggcaccuccggcuccugccccaacgccaccuccaagaucggcuucuucgccaccauggccugggccguccccaaggacaacuacaagaacgccaccaacccccucaccgucgagguccccuacaucugcaccgagggcgaggaccagaucaccgucuggggcuuccacuccgacaucaagacccagaugaagucccucuacggcgacuccaacccccagaaguucaccuccuccgccaacggcgucaccacccacuacgucucccagaucggcgacuuccccgaccagaccgaggacggcggccucccccaguccggccgcaucgucgucgacuacaugaugcagaagcccggcaagaccggcaccaucgucuaccagcgcggcguccuccucccccagaaggucuggugcgccuccggccgcuccaaggucaucaagggcucccucccccucaucggcgaggccgacugccuccacgaggaguacggcggccucaacaaguccaagcccuacuacaccggcaagcacgccaaggccaucggcaacugccccaucugggucaagaccccccucaagcucgccaacggcaccaaguaccgcccccccgccaagcuccucaaggagcgcggcuucuucggcgccaucgccggcuuccucgagggcggcugggagggcaugaucgccggcuggcacggcuacaccucccacggcgcccacggcgucgccgucgccgccgaccucaaguccacccaggaggccaucaacaagaucaccaagaaccucaacucccucuccgagcucgaggucaagaaccuccagcgccucuccggcgccauggacgagcuccacaacgagauccucgagcucgacgagaaggucgacgaccuccgcgccgacaccaucuccucccagaucgagcucgccguccuccucuccaacgagggcaucaucaacuccgaggacgagcaccuccucgcccucgagcgcaagcucaagaagaugcucggccccuccgccgucgacaucggcaacggcugcuucgagaccaagcacaagugcaaccagaccugccucgaccgcaucgccgccggcaccuucaacgccggcgaguucucccuccccaccuucgacucccucaacaucaccgccgccucccucaacgacgacggccucgacaaccacaccauccuccucuacuacuccaccgccgccuccucccucgccgucacccucaugcucgccaucuucaucgucuacauggucucccgcgacaacgucuccugcuccaucugccucuga

SEQ ID NO: 124606 - RNA, 1755 nt, Artificial Sequence
  derived and/or modified CDS sequence (opt2) from hemagglutinin__InfluenzaB__EPI614608
augaaggccaucaucguccuccucauggucgucaccuccaacgccgaccgcaucugcaccggcaucaccuccuccaacuccccccacgucgucaagaccgccacccagggcgaggucaacgucaccggcgucaucccccucaccaccacccccaccaaguccuacuucgccaaccucaagggcacccgcacccgcggcaagcucugccccgacugccucaacugcaccgaccucgacgucgcccucggccgccccaugugcgucggcaccacccccuccgccaaggccuccauccuccacgagguccgccccaucaccuccggcugcuuccccaucaugcacgaccgcaccaagauccgccagcuccccaaccuccuccgcggcuacgagaagauccgccucuccacccagaacgucaucgacgccgagaaggcccccggcggccccuaccgccucggcaccuccggcuccugccccaacgccaccuccaagaucggcuucuucgccaccauggccugggccguccccaaggacaacuacaagaacgccaccaacccccucaccgucgagguccccuacaucugcaccgagggcgaggaccagaucaccgucuggggcuuccacuccgacgagaagacccagaugaagucccucuacggcgacuccaacccccagaaguucaccuccuccgccaacggcgucaccacccacuacgucucccagaucggcgacuuccccgaccagaccgaggacggcggccucccccaguccggccgcaucgucgucgacuacaugaugcagaagcccggcaagaccggcaccaucgucuaccagcgcggcguccuccucccccagaaggucuggugcgccuccggccgcuccaaggucaucaagggcucccucccccucaucggcgaggccgacugccuccacgaggaguacggcggccucaacaaguccaagcccuacuacaccggcaagcacgccaaggccaucggcaacugccccaucugggucaagaccccccucaagcucgccaacggcaccaaguaccgcccccccgccaagcuccucaaggagcgcggcuucuucggcgccaucgccggcuuccucgagggcggcugggagggcaugaucgccggcuggcacggcuacaccucccacggcgcccacggcgucgccgucgccgccgaccucaaguccacccaggaggccaucaacaagaucaccaagaaccucaacucccucuccgagcucgaggucaagaaccuccagcgccucuccggcgccauggacgagcuccacaacgagauccucgagcucgacgagaaggucgacgaccuccgcgccgacaccaucuccucccagaucgagcucgccguccuccucuccaacgagggcaucaucaacuccgaggacgagcaccuccucgcccucgagcgcaagcucaagaagaugcucggccccuccgccgucgacaucggcaacggcugcuucgagaccaagcacaagugcaaccagaccugccucgaccgcaucgccgccggcaccuucaacgccggcgaguucucccuccccaccuucgacucccucaacaucaccgccgccucccucaacgacgacggccucgacaaccacaccauccuccucuacuacuccaccgccgccuccucccucgccgucacccucaugcucgccaucuucaucgucuacauggucucccgcgacaacgucuccugcuccaucugccucuga

SEQ ID NO: 124607 - RNA, 1755 nt, Artificial Sequence
  derived and/or modified CDS sequence (opt2) from hemagglutinin__InfluenzaB__EPI614610
augaaggccaucaucguccuccucauggucgucaccuccaacgccgaccgcaucugcaccggcaucaccuccuccaacuccccccacgucgucaagaccgccacccagggcgaggucaacgucaccggcgucaucccccucaccaccacccccaccaaguccuacuucgccaaccucaagggcacccgcacccgcggcaagcucugccccgacugccucaacugcaccgaccucgacgucgcccucggccgccccaugugcgucggcaccacccccuccgccaaggccuccauccuccacgagguccgccccgucaccuccggcugcuuccccaucaugcacgaccgcaccaagauccgccagcuccccaaccuccuccgcggcuacgagaagauccgccucuccacccagaacgucaucgacgccgagaaggcccccggcggccccuaccgccucggcaccuccggcuccugccccaacgccaccuccaagaucggcuucuucgccaccauggccugggccguccccaaggacaacuacaagaacgccaccaacccccucaccgucgagguccccuacaucugcaccgagggcgaggaccagaucaccgucuggggcuuccacuccgacgagaagacccagaugaagucccucuacggcgacuccaacccccagaaguucaccuccuccgccaacggcgucaccacccacuacgucucccagaucggcgacuuccccgaccagaccgaggacggcggccucccccaguccggccgcaucgucgucgacuacaugaugcagaagcccggcaagaccggcaccaucgucuaccagcgcggcguccuccucccccagaaggucuggugcgccuccggccgcuccaaggucaucaagggcucccucccccucaucggcgaggccgacugccuccacgaggaguacggcggccucaacaaguccaagcccuacuacaccggcaagcacgccaaggccaucggcaacugccccaucugggucaagaccccccucaagcucgccaacggcaccaaguaccgcccccccgccaagcuccucaaggagcgcggcuucuucggcgccaucgccggcuuccucgagggcggcugggagggcaugaucgccggcuggcacggcuacaccucccacggcgcccacggcgucgccgucgccgccgaccucaaguccacccaggaggccaucaacaagaucaccaagaaccucaacucccucuccgagcucgaggucaagaaccuccagcgccucuccggcgccauggacgagcuccacaacgagauccucgagcucgacgagaaggucgacgaccuccgcgccgacaccaucuccucccagaucgagcucgccguccuccucuccaacgagggcaucaucaacuccgaggacgagcaccuccucgcccucgagcgcaagcucaagaagaugcucggccccuccgccgucgacaucggcaacggcugcuucgagaccaagcacaagugcaaccagaccugccucgaccgcaucgccgccggcaccuucaacgccggcgaguucucccuccccaccuucgacucccucaacaucaccgccgccucccucaacgacgacggccucgacaaccacaccauccuccucuacuacuccaccgccgccuccucccucgccgucacccucaugcucgccaucuucaucgucuacauggucucccgcgacaacgucuccugcuccaucugccucuga

SEQ ID NO: 124608 - RNA, 1758 nt, Artificial Sequence
  derived and/or modified CDS sequence (opt2) from hemagglutinin__InfluenzaB__AAA43697
augaaggccaucaucguccuccucauggucgucaccuccaacgccgaccgcaucugcaccggcaucaccuccuccaacuccccccacgucgucaagaccgccacccagggcgaggucaacgucaccggcgucaucccccucaccaccacccccaccaagucccacuucgccaaccucaagggcaccaagacccgcggcaagcucugccccaagugccucaacugcaccgaccucgacgucgcccucgcccgccccaagugcaugggcaccauccccuccgccaaggccuccauccuccacgaggucaagcccgucaccuccggcugcuuccccaucaugcacgaccgcaccaagauccgccagcuccccaaccuccuccgcggcuacgagcacauccgccucuccacccacaacgucaucaacgccgagaccgcccccggcggccccuacaaggucggcaccuccggcuccugccccaacgucaccaacggcaacggcuucuucgccaccauggccugggccguccccaagaacgacaacaacaagaccgccaccaacccccucaccgucgagguccccuacaucugcaccgagggcgaggaccagaucaccgucuggggcuuccacuccgacuccgagacccagauggucaagcucuacggcgacuccaagccccagaaguucaccuccuccgccaacggcgucaccacccacuacgucucccagaucggcggcuuccccaaccaggccgaggacggcggccucccccaguccggccgcaucgucgucgacuacaugguccagaaguccggcaagaccggcaccaucaccuaccagcgcggcauccuccucccccagaaggucuggugcgccuccggccgcuccaaggucaucaagggcucccucccccucaucggcgaggccgacugccuccacgagaaguacggcggccucaacaaguccaagcccuacuacaccggcgagcacgccaaggccaucggcaacugccccaucugggucaagaccccccucaagcucgccaacggcaccaaguaccgcccccccgccaagcuccucaaggagcgcggcuucuucggcgccaucgccggcuuccucgagggcggcugggagggcaugaucgccggcuggcacggcuacaccucccacggcgcccacggcgucgccgucgccgccgaccucaaguccacccaggaggccaucaacaagaucaccaagaaccucaacucccucuccgagcucgaggucaagaaccuccagcgccucuccggcgccauggacgagcuccacaacgagauccucgagcucgacgagaaggucgacgaccuccgcgccgacaccaucuccucccagaucgagcucgccguccuccucuccaacgagggcaucaucaacuccgaggacgagcaccuccucgcccucgagcgcaagcucaagaagaugcucggccccuccgccgucgagaucggcaacggcugcuucgagaccaagcacaagugcaaccagaccugccucgaccgcaucgccgccggcaccuucaacgccggcgaguucucccuccccaccuucgacucccucaacaucaccgccgccucccucaacgacgacggccucgacaaccacaccauccuccucuacuacuccaccgccgccuccucccucgccgucacccucaugaucgccaucuucaucgucuacauggucucccgcgacaacgucuccugcuccaucugccucuga

SEQ ID NO: 124609 - RNA, 1755 nt, Artificial Sequence
  derived and/or modified CDS sequence (opt2) from hemagglutinin__InfluenzaB__EPI271545
augaaggccaucaucguccuccucauggucgucaccuccaacgccgaccgcaucugcaccggcaucaccuccuccaacuccccccacgucgucaagaccgccacccagggcgaggucaacgucaccggcgucaucccccucaccaccacccccaccaaguccuacuucgccaaccucaagggcacccgcacccgcggcaagcucugccccgacugccucaacugcaccgaccucgacgucgcccucggccgccccaugugcgucggcaccacccccuccgccaaggccuccauccuccacgagguccgccccgucaccuccggcugcuuccccaucaugcacgaccgcaccaagauccgccagcuccccaaccuccuccgcggcuacgagaacauccgccucuccacccagaacgucaucgacgccgagaaggcccccggcggccccuaccgccucggcaccuccggcuccugccccaacgccaccuccaagaucggcuucuucgccaccauggccugggccguccccaaggacaacuacaagaacgccaccaacccccucaccgucgagguccccuacaucugcaccgagggcgaggaccagaucaccgucuggggcuuccacuccgacaacaagacccagaugaagucccucuacggcgacuccaacccccagaaguucaccuccuccgccaacggcgucaccacccacuacgucucccagaucggcgacuuccccgaccagaccgaggacggcggccucccccaguccggccgcaucgucgucgacuacaugaugcagaagcccggcaagaccggcaccaucgucuaccagcgcggcguccuccucccccagaaggucuggugcgccuccggccgcuccaaggucaucaagggcucccucccccucaucggcgaggccgacugccuccacgagaaguacggcggccucaacaaguccaagcccuacuacaccggcgagcacgccaaggccaucggcaacugccccaucugggucaagaccccccucaagcucgccaacggcaccaaguaccgcccccccgccaagcuccucaaggagcgcggcuucuucggcgccaucgccggcuuccucgagggcggcugggagggcaugaucgccggcuggcacggcuacaccucccacggcgcccacggcgucgccgucgccgccgaccucaaguccacccaggaggccaucaacaagaucaccaagaaccucaacucccucuccgagcucgaggucaagaaccuccagcgccucuccggcgccauggacgagcuccacaacgagauccucgagcucgacgagaaggucgacgaccuccgcgccgacaccaucuccucccagaucgagcucgccguccuccucuccaacgagggcaucaucaacuccgaggacgagcaccuccucgcccucgagcgcaagcucaagaagaugcucggccccuccgccgucgacaucggcaacggcugcuucgagaccaagcacaagugcaaccagaccugccucgaccgcaucgccgccggcaccuucaacgccggcgaguucucccuccccaccuucgacucccucaacaucaccgccgccucccucaacgacgacggccucgacaaccacaccauccuccucuacuacuccaccgccgccuccucccucgccgucacccucaugcucgccaucuucaucgucuacauggucucccgcgacaacgucuccugcuccaucugccucuga

SEQ ID NO: 124610 - RNA, 1755 nt, Artificial Sequence
  derived and/or modified CDS sequence (opt2) from hemagglutinin__InfluenzaB__AGB08329
augaaggccaucaucguccuccucauggucgucaccuccaacgccgaccgcaucugcaccggcaucaccuccuccaacuccccccacgucgucaagaccgccacccagggcgaggucaacgucaccggcgucaucccccucaccaccacccccaccaaguccuacuucgccaaccucaagggcacccgcacccgcggcaagcucugccccgacugccucaacugcaccgaccucgacgucgcccucggccgccccaugugcgucggcaccacccccuccgccaaggccuccauccuccacgagguccgccccgucaccuccggcugcuuccccaucaugcacgaccgcaccaagauccgccagcuccccaaccuccuccgcggcuacgagaacauccgccucuccacccagaacgucaucgacgccgagaaggcccccggcggccccuaccgccucggcaccuccggcuccugccccaacgccaccuccaagaucggcuucuucgccaccauggccugggccguccccaaggacaacuacaagaacgccaccaacccccucaccgucgagguccccuacaucugcaccgagggcgaggaccagaucaccgucuggggcuuccacuccgacaacaagauccagaugaagucccucuacggcgacuccaacccccagaaguucaccuccuccgccaacggcgucaccacccacuacgucucccagaucggcgacuuccccgaccagaccgaggacggcggccucccccaguccggccgcaucgucgucgacuacaugaugcagaagcccggcaagaccggcaccaucgucuaccagcgcggcguccuccucccccagaaggucuggugcgccuccggccgcuccaaggucaucaagggcucccucccccucaucggcgaggccgacugccuccacgagaaguacggcggccucaacaaguccaagcccuacuacaccggcgagcacgccaaggccaucggcaacugccccaucugggucaagaccccccucaagcucgccaacggcaccaaguaccgcccccccgccaagcuccucaaggagcgcggcuucuucggcgccaucgccggcuuccucgagggcggcugggagggcaugaucgccggcuggcacggcuacaccucccacggcgcccacggcgucgccgucgccgccgaccucaaguccacccaggaggccaucaacaagaucaccaagaaccucaacucccucuccgagcucgaggucaagaaccuccagcgccucuccggcgccauggacgagcuccacaacgagauccucgagcucgacgagaaggucgacgaccuccgcgccgacaccaucuccucccagaucgagcucgccguccuccucuccaacgagggcaucaucaacuccgaggacgagcaccuccucgcccucgagcgcaagcucaagaagaugcucggccccuccgccgucgacaucggcaacggcugcuucgagaccaagcacaagugcaaccagaccugccucgaccgcaucgccgccggcaccuucaacgccggcgaguucucccuccccaccuucgacucccucaacaucaccgccgccucccucaacgacgacggccucgacaaccacaccauccuccucuacuacuccaccgccgccuccucccucgccgucacccucaugcucgccaucuucaucgucuacauggucucccgcgacaacgucuccugcuccaucugccucuga

SEQ ID NO: 124611 - RNA, 1755 nt, Artificial Sequence; identical to SEQ ID NO: 122791
  derived and/or modified CDS sequence (opt2) from hemagglutinin__InfluenzaB__EPI294880

SEQ ID NO: 124612 - RNA, 1752 nt, Artificial Sequence; identical to SEQ ID NO: 122502
  derived and/or modified CDS sequence (opt2) from hemagglutinin__InfluenzaB__CY018765

SEQ ID NO: 124613 - RNA, 1401 nt, Artificial Sequence
  derived and/or modified CDS sequence (opt2) from neuraminidase__InfluenzaB__AAN39743
augcuccccuccaccauccagacccucacccucuuccucaccuccggcggcguccuccucucccucuacgucuccgcccuccucuccuaccuccucuacuccgacauccuccucaaguucucccccaccaaggucaucgcccccaccaugucccucgacugcgccaacgccuccaacguccaggccgucaaccacuccgccaccgaggagaugaccuuccuccuccccgagcccgaguggaccuacccccgccucuccugccagggcuccaccuuccagaaggcccuccucaucuccccccaccgcuucggcgaggccaagggcaacuccgccccccucaucauccgcgagcccuucaucgccugcggccccaaggagugcauccacuucgcccucacccacuacgccgcccagcccggcggcuacuacaacggcacccgcgaggaccgcaacaagcuccgccaccucaucuccgucaaccucggcaagauccccaccgucgagaacuccaucuuccacauggccgccugguccggcuccgccugccacgacggccgcgaguggaccuacaucggcgucgacggccccgacuccaacgcccucaucaagaucaaguacggcgaggccuacaccgacaccuaccacuccuacgccaacaacauccuccgcacccaggaguccgccugcaacugcaucggcggcgacugcuaccucaugaucaccgacggcuccgccuccggcaucucccgcugccgcuuccucaagauccgcgagggccgcaucaucaaggagaucuuccccaccggccgcgucgagcacaccgaggagugcaccugcggcuucgccuccaacaagaccaucgagugcgucugccgcgacaacuccuacaccgccaagcgccccuucgucaagcucaacgucgagaccgacaccgccgagauccgccucaugugcaccgagaccuaccucgacaccccccgccccgacgacggcuccaucaccggccccugcgaguccaacggcgacaagggcaacggcggcaucaagggcggcuucguccaccagcgcauggccucccgcaucggccgcugguacucccgcaccauguccaagaccaagcgcaugggcauggagcucuacgucaaguacgacggcgaccccuggaccgacuccgacgcccucgcccccuccggcgucauggucuccauggaggagcccggcugguacuccuucggcuucgagaucaaggacaagaagugcgacguccccugcaucggcaucgagaugguccacgacggcggcaagaagaccuggcacuccgccgccaccgccaucuacugccucaugggcuccggccagcuccucugggacaccgucaccggcgucgacauggcccucuga

SEQ ID NO: 124614 - RNA, 1401 nt, Artificial Sequence
  derived and/or modified CDS sequence (opt2) from neuraminidase__InfluenzaB__AAN39747
augcuccccuccaccauccagacccucauccucuuccucaccuccggcggcguccuccucucccucuacgucuccgcccuccucuccuaccuccucuacuccgacauccuccucaaguucucccccaccaagaucaucgcccccaccaugucccucgacugcgccaacgccuccaacguccaggccgucaaccacuccgccaccaaggagaugaccuuccuccuccccgagcccgaguggaccuacccccgccucuccugccagggcuccaccuuccagaaggcccuccucaucuccccccaccgcuucggcgaggccaagggcaacuccgccccccucaucauccgcgagcccuucaucgccugcggccccaaggagugcaagcacuucgcccucacccacuacgccgcccagcccggcggcuacuacaacggcacccgcgaggaccgcaacaagcuccgccaccucaucuccgucaaccucggcaagauccccaccgucgagaacuccaucuuccacauggccgccugguccggcuccgccugccacgacggccgcgaguggaccuacaucggcgucgacggccccgacuccaacgcccucaucaagaucaaguacggcgaggccuacaccgacaccuaccacuccuacgccaacaacauccuccgcacccaggaguccgccugcaacugcaucggcggcgacugcuaccucaugaucaccgacggcuccgccuccggcaucuccaagugccgcuuccucaagauccgcgagggccgcaucaucaaggagaucuuccccaccggccgcgucgagcacaccgaggagugcaccugcggcuucgccuccaacaagaccaucgagugcgccugccgcgacaacuccuacaccgccaagcgccccuucgucaagcucaacgucgagaccgacaccgccgagauccgccucaugugcaccaagaccuaccucgacaccccccgccccgacgacggcuccaucaccggccccugcgaguccaacggcgacaagggcuccggcggcaucaagggcggcuucguccaccagcgcauggccuccaagaucggccgcugguacucccgcaccauguccaagaccaagcgcaugggcauggagcucuacgucaaguacgacggcgaccccuggaccgacuccgacgcccucgcccccuccggcgucauggucuccaucgaggagcccggcugguacuccuucggcuucgagaucaaggacaagaagugcgacguccccugcaucggcaucgagaugguccacgacggcggcaagaagaccuggcacuccgccgccaccgccaucuacugccucaugggcuccggccagcuccucugggacaccgucaccggcgucgacauggcccucuga

SEQ ID NO: 124615 - RNA, 1401 nt, Artificial Sequence
  derived and/or modified CDS sequence (opt2) from neuraminidase__InfluenzaB__AAN39749
augcuccccuccaccauccagacccucacccucuuccucaccuccggcggcguccuccucucccucuacgucuccgcccuccucuccuaccuccucuacuccgacauccuccucaaguucucccccaccaaggucaucgcccccaccaugucccucgacugcgccaacgccuccaacguccaggccgucaaccacuccgccaccgaggagaugaccuuccuccuccccgagcccgaguggaccuacccccgccucuccugccagggcuccaccuuccagaaggcccuccucaucuccccccaccgcuucggcgaggccaagggcaacuccgccccccucaucauccgcgagcccuucaucgccugcggccccaaggagugcaagcacuucgcccucacccacuacgccgcccagcccggcggcuacuacaacggcacccgcgaggaccgcaacaagcuccgccaccucaucuccgucaaccucggcaagauccccaccgucgagaacuccaucuuccacauggccgccugguccggcuccgccugccacgacggccgcgaguggaccuacaucggcgucgacggccccgacuccaacgcccucaucaagaucaaguacggcgaggccuacaccgacaccuaccacuccuacgccaacaacauccuccgcacccaggaguccgccugcaacugcaucggcggcgacugcuaccucaugaucaccgacggcuccgccuccggcaucucccgcugccgcuuccucaagauccgcgagggccgcaucaucaaggagaucuuccccaccggccgcgucgagcacaccgaggagugcaccugcggcuucgccuccaacaagaccaucgagugcgccugccgcgacaacuccuacaccgccaagcgccccuucgucaagcucaacgucgagaccgacaccgccgagauccgccucaugugcaccgagaccuaccucgacaccccccgccccgacgacggcuccaucaccggccccugcgaguccaacggcgacaagggcaacggcggcaucaagggcggcuucguccaccagcgcauggccucccgcaucggccgcugguacucccgcaccauguccaagaccaagcgcaugggcauggagcucuacgucaaguacgacggcgaccccuggaccgacuccgacgcccucgcccccuccggcgucauggucuccauggaggagcccggcugguacuccuucggcuucgagaucaaggacaagaagugcgacguccccugcaucggcaucgagaugguccacgacggcggcaagaagaccuggcacuccgccgccaccgccaucuacugccucaugggcuccggccagcuccucugggacaccgucaccggcgucgacauggcccucuga

SEQ ID NO: 124616 - RNA, 1401 nt, Artificial Sequence
  derived and/or modified CDS sequence (opt2) from neuraminidase__InfluenzaB__AAN39751
augcuccccuccaccauccagacccucacccucuuccucaccuccggcggcguccuccucucccucuacgucuccgcccuccucuccuaccuccucuacuccgacauccuccucaaguucucccccaccaaggucaucgcccccaccaugucccucgacugcgccaacgccuccaacguccaggccgucaaccacuccgccaccgaggagaugaccuuccuccuccccgagcccgaguggaccuacccccgccucuccugccagggcuccaccuuccagaaggcccuccucaucuccccccaccgcuucggcgaggccaagggcaacuccgccccccucaucauccgcgagcccuucaucgccugcggccccaaggagugcaagcacuucgcccucacccacuacgccgcccagcccggcggcuacuacaacggcacccgcgaggaccgcaacaagcuccgccaccucaucuccgucaaccucggcaagauccccaccgucgagaacuccaucuuccacauggccgccugguccggcuccgccugccacgacggccgcgaguggaccuacaucggcgucgacggccccgacuccaacgcccucaucaagaucaaguacggcgaggccuacaccgacaccuaccacuccuacgccaacaacauccuccgcacccaggaguccgccugcaacugcaucggcggcgacugcuaccucaugaucaccgacggcuccgccuccggcaucucccgcugccgcuuccucaagauccgcgagggccgcauccucaaggagaucuuccccaccggccgcgucgagcacaccgaggagugcaccugcggcuucgccuccaacaagaccaucgagugcgccugccgcgacaacuccuacaccgccaagcgccccuucguccagcucaacgucgagaccgacaccgccgagauccgccucaugugcaccgagaccuaccucgacaccccccgccccgacgacggcuccaucaccggccccugcgaguccaacggcgacaagggcaacggcggcaucaagggcggcuucguccaccagcgcauggccucccgcaucggccgcugguacucccgcaccauguccaagaccaagcgcaugggcauggaccucuacgucaaguacgacggcgaccccuggaccgacuccgacgcccucgcccccuccggcgucauggucuccauggaggagcccggcugguacuccuucggcuucgagaucaaggacaagaagugcgacguccccugcaucggcaucgagaugguccacgacggcggcaagaagaccuggcacuccgccgccaccgccaucuacugccucaugggcuccggccagcuccucugggacaccgucaccggcgucgacauggcccucuga

SEQ ID NO: 124617 - RNA, 1401 nt, Artificial Sequence
  derived and/or modified CDS sequence (opt2) from neuraminidase__InfluenzaB__AAN39753
augcuccccuccaccauccagacccucacccucuuccucaccuccggcggcguccuccucucccucuacgucuccgcccuccucuccuaccuccucuacuccgacauccuccucaaguucucccccaccaaggucaucgcccccaccaugucccucgacugcgccaacgccuccaacguccaggccgucaaccacuccgccaccgaggagaugaccuuccuccuccccgagcccgaguggaccuacccccgccucuccugccagggcuccaccuuccagaaggcccuccucaucuccccccaccgcuucggcgaggccaagggcaacuccgccccccucaucauccgcgagcccuucaucgccugcggccccaaggagugcaagcacuucgcccucacccacuacgccgcccagcccggcgaguacuacaacggcacccgcgaggaccgcaacaagcuccgccaccucaucuccgucaaccucggcaagauccccaccgucgagaacuccaucuuccacauggccgccugguccggcuccgccugccacgacggccgcgaguggaccuacaucggcgucgacggccccgacuccaacgcccucaucaagaucaaguacggcgaggccuacaccgacaccuaccacuccuacgccaacaacauccuccgcacccaggaguccgccugcaacugcaucggcggcgacugcuaccucaugaucaccgacggcuccgccuccggcaucucccgcugccgcuuccucaagauccgcgagggccgcaucaucaaggagaucuuccccaccggccgcgucgagcacaccgaggagugcaccugcggcuucgccuccaacaagaccaucgagugcgccugccgcgacaacuccuacaccgccaagcgccccuucgucaagcucaacgucgagaccgacaccgccgagauccgccucaugugcaccgagaccuaccucgacaccccccgccccgacgacggcuccaucaccggccccugcgaguccaacggcgacaagggcaacggcggcaucaagggcggcuucguccaccagcgcauggccucccgcaucggccgcugguacucccgcaccauguccaagaccaagcgcaugggcauggagcucuacgucaaguacgacggcgaccccuggaccgacuccgacgcccucgcccccuccggcgucauggucuccauggaggagcccggcugguacuccuucggcuucgagaucaaggacaagaagugcgacguccccugcaucggcaucgagaugguccacgacggcggcaagaagaccuggcacuccgccgccaccgccaucuacugccucaugggcuccggccagcuccucugggacaccgucaccggcgucgacauggcccucuga

SEQ ID NO: 124618 - RNA, 1401 nt, Artificial Sequence
  derived and/or modified CDS sequence (opt2) from neuraminidase__InfluenzaB__AAN39759
augcuccccuccaccauccagacccucacccucuuccucaccuccggcggcguccuccucucccucuacgucuccgccucccucuccuaccuccucuacuccgacauccuccucaagcucucccccaccgagaucaccgcccccaccaugccccucgacugcgccaacgccuccaacguccaggccgucaaccgcuccgccaccaagggcgucacccuccuccuccccgagcccgaguggaccuacccccgccucuccugccccggcuccaccuuccagaaggcccuccucaucuccccccaccgcuucggcgagaccaagggcaacuccgccccccucaucauccgcgagcccuucaucgccugcggccccaaggagugcaagcacuucgcccucacccacuacgccgcccagcccggcggcuacuacaacggcacccgcgaggaccgcaacaagcuccgccaccucaucuccgucaagcucggcaagauccccaccgucgagaacuccaucuuccacauggccgccugguccggcuccgccugccacgacggcaaggaguggaccuacaucggcgucgacggccccgacuccaacgcccuccucaagaucaaguacggcgaggccuacaccgacaccuaccacuccuacgccaacaacauccuccgcacccaggaguccgccugcaacugcaucggcggcaacugcuaccucaugaucaccgacggcuccgccuccggcaucuccgagugccgcuuccucaagauccgcgagggccgcaucaucaaggagaucuuccccaccggccgcgucaagcacaccgaggagugcaccugcggcuucgccuccaacaagaccaucgagugcgccugccgcgacaacuccuacaccgccaagcgccccuucgucaagcucaacgucgagaccgacaccgccgagauccgccucaugugcaccgagaccuaccucgacaccccccgccccgacgacggcuccaucaccggccccugcgaguccaacggcgacaagggcuccggcggcaucaagggcggcuucguccaccagcgcauggaguccaagaucggccgcugguacucccgcaccauguccaagaccaagcgcaugggcaugggccucuacgucaaguacgacggcgaccccuggaccgacuccgacgcccucgcccucuccggcgucauggucuccaucgaggagcccggcugguacuccuucggcuucgagaucaaggacaagaagugcgacguccccugcaucggcaucgagaugguccacgacggcggcaaggagaccuggcacuccgccgccaccgccaucuacugccucaugggcuccggccagcuccucugggacaccgucaccggcgucgacauggcccucuga

SEQ ID NO: 124619 - RNA, 1401 nt, Artificial Sequence
  derived and/or modified CDS sequence (opt2) from neuraminidase__InfluenzaB__AAN39761
augcuccccuccaccauccagacccucacccucuuccucaccuccggcggcguccuccucucccucuacgucuccgccucccucuccuaccuccucuacuccgacauccuccucaaguucucccagaccgagaucaccgcccccaccaugccccucgacugcgccaacgccuccaacguccaggccgucaaccgcuccgccaccaagggcgucacccuccuccuccccgagcccgaguggaccuacccccgccucuccugccccggcuccaccuuccagaaggcccuccucaucuccccccaccgcuucggcgagaccaagggcaacuccgccccccucaucauccgcgagcccuucaucgccugcggccccaaggagugcaagcacuucgcccucacccacuacgccgcccagcccggcggcuacuacaacggcacccgcgaggaccgcaacaagcuccgccaccucaucuccgucaagcucggcaagauccccaccgucgagaacuccaucuuccacauggccgccugguccggcuccgccugccacgacggccgcgaguggaccuacaucggcgucgacggccccgacuccaacgcccuccucaagaucaaguacggcgaggccuacaccgacaccuaccacuccuacgccaagaacauccuccgcacccaggaguccgccugcaacugcaucggcggcgacugcuaccucaugaucaccgacggcuccgccuccggcaucuccgagugccgcuuccucaagauccgcgagggccgcaucaucaaggagaucuuccccaccggccgcaucaagcacaccgaggagugcaccugcggcuucgccuccaacaagaccaucgagugcgccugccgcgacaacuccuacaccgccaagcgccccuucgucaagcucaacgucgagaccgacaccgccgagauccgccucaugugcaccgagaccuaccucgacaccccccgccccgacgacggcuccaucaccggccccugcgaguccaacggcgacaagggcuccggcggcaucaagggcggcuucguccaccagcgcauggccuccaagaucggccgcugguacucccgcaccauguccaagaccaagcgcaugggcaugggccucuacgucaaguacgacggcgaccccuggaccgacuccgaggcccucgcccucuccggcgucauggucuccauggaggagcccggcugguacuccuucggcuucgagaucaaggacaagaagugcgacguccccugcaucggcaucgagaugguccacgacggcggcaagaccaccuggcacuccgccgccaccgccaucuacugccucaugggcuccggccagcuccucugggacaccgucaccggcgucgacauggcccucuga

SEQ ID NO: 124620 - RNA, 1401 nt, Artificial Sequence
  derived and/or modified CDS sequence (opt2) from neuraminidase__InfluenzaB__AAN39769
augcuccccuccaccauccagacccucacccucuuccucaccuccggcggcguccuccucucccucuacgucuccgcccuccucuccuaccuccucuacuccgacauccuccucaaguucucccccaccaagaucaucgcccccaccaccucccucgacuccgccaacgccuccaacuuccaggccgucaaccacuccgccaccaaggagaugaccuuccuccuccccgagcccgaguggaccuacccccgccucuccugccagggcuccaccuuccagaaggcccuccucaucuccccccaccgcuucggcgaggccaagggcaacuccgccccccucaucauccgcgagcccuucaucgccugcggccccaaggagugcaagcacuucgcccucacccacuacgccgcccagcccggcggcuacuacaacggcacccgcgaggaccgcaacaagcuccgccaccucaucuccgucaaccucggcaagauccccaccgucgagaacuccaucuuccacauggccgccugguccggcuccgccugccacgacggccgcgaguggaccuacaucggcgucgacggccccgacuccaacgcccucaucaagaucaaguacggcgaggccuacaccgacaccuaccacuccuacgccaacaacauccuccgcacccaggaguccgccugcaacugcaucggcggcgacugcuaccucaugaucaccgacggcuccgccuccggcaucuccaagugccgcuuccucaagauccgcgagggccgcaucaucaaggagaucuuccccaccggccgcgucgagcacaccgaggagugcaccugcggcuucgccuccaacaagaccaucgagugcgccugccgcgacaacuccuacaccgccaagcgccccuucgucaagcucaacgucgagaccgacaccgccgagauccgccucaugugcaccgagaccuaccucgacaccccccgccccgacgacggcuccaucaccggccccugcgaguccaacggcgacaagggcuccggcggcaucaagggcggcuucguccaccagcgcauggccuccaagaucggccgcugguacucccgcaccauguccaagaccaagcgcaugggcauggagcucuacgucaaguacgacggcgaccccuggaccgacuccgacgcccucgcccccuccggcgucauggucuccaucgaggagcccggcugguacuccuucggcuucgagaucaaggacaagaagugcgacguccccugcaucggcaucgagaugguccacgacggcggcaagaccaccuggcacuccgccgccaccgccaucuacugccucaugggcuccggccagcuccucugggacaccgucaccggcgucgacauggcccucuga

SEQ ID NO: 124621 - RNA, 1401 nt, Artificial Sequence
  derived and/or modified CDS sequence (opt2) from neuraminidase__InfluenzaB__AAN39771
augcuccccuccaccauccagacccucacccucuuccucaccuccggcggcguccuccucucccucuacgucuccgcccuccucuccuaccuccucuacuccgacauccuccucaaguucucccccaccaagaucaucgcccccaccaccucccucgacuccgccaacgccuccaacuuccaggccgucaaccacuccgccaccaaggagaugaccuuccuccuccccgagcccgaguggaccuacccccgccucuccugccagggcuccaccuuccagaaggcccuccucaucuccccccaccgcuucggcgaggccaagggcaacuccgccccccucaucauccgcgagcccuucaucgccugcggccccaaggagugcaagcacuucgcccucacccacuacgccgcccagcccggcggcuacuacaacggcacccgcgaggaccgcaacaagcuccgccaccucaucuccgucaaccucggcaagauccccaccgucgagaacuccaucuuccacauggccgccugguccggcuccgccugccacgacggccgcgaguggaccuacaucggcgucgacggccccgacuccaacgcccucaucaagaucaaguacggcgaggccuacaccgacaccuaccacuccuacgccaacaacauccuccgcacccaggaguccgccugcaacugcaucggcggcgacugcuaccucaugaucaccgacggcuccgccuccggcaucuccaagugccgcuuccucaagauccgcgagggccgcaucgucaaggagaucuuccccaccggccgcgucgagcacaccgaggagugcaccugcggcuucgccuccaacaagaccaucgagugcgccugccgcgacaacuccuacaccgccaagcgccccuucgucaagcucaacgucgagaccgacaccgccgagauccgccucaugugcaccgagaccuaccucgacaccccccgccccgacgacggcuccaucaccggccccugcgaguccaacggcgacaagggcuccggcggcaucaagggcggcuucguccaccagcgcauggccuccaagaucggccgcugguacucccgcaccauguccaagaccaagcgcaugggcauggagcucuacgucaaguacgacggcgaccccuggaccgacuccgacgcccucgaccccuccggcgucauggucuccaucgaggagcccggcugguacuccuucggcuucgagaucaaggacaagaagugcgacguccccugcaucggcaucgagaugguccacgacggcggcaagaccaccuggcacuccgccgccaccgccaucuacugccucaugggcuccggccagcuccucugggacaccaucaccggcgucgacauggcccucuga

SEQ ID NO: 124622 - RNA, 1401 nt, Artificial Sequence
  derived and/or modified CDS sequence (opt2) from neuraminidase__InfluenzaB__AAN39773
augcuccccuccaccauccagacccucacccucuuccucaccuccggcggcguccuccucucccucuacgucuccgcccuccucuccuaccuccucuacuccgacauccuccucaaguucucccccaccaagaucaucgcccccaccaccucccucgacuccgccaacgccuccaacuuccaggccgucaaccacuccgccaccaaggagaugaccuuccuccuccccgagcccgaguggaccuacccccgccucuccugccagggcuccaccuuccagaaggcccuccucaucuccccccaccgcuucggcgaggccaagggcaacuccgccccccucaucauccgcgagcccuucaucgccugcggccccaaggagugcaagcacuucgcccucacccacuacgccgcccagcccggcggcuacuacaacggcacccgcgaggaccgcaacaagcuccgccaccucaucuccgucaacuucggcaagauccccaccgucgagaacuccaucuuccacauggccgccugguccggcuccgccugccacgacggccgcgaguggaccuacaucggcgucgacggccccgacuccaacgcccucaucaagaucaaguacggcgaggccuacaccgacaccuaccacuccuacgccaacaacauccuccgcacccaggaguccgccugcaacugcaucggcggcgacugcuaccucaugaucaccgacggcuccgccuccggcaucuccaagugccgcuuccucaagauccgcgagggccgcaucgucaaggagaucuuccccaccggccgcgucgagcacaccgaggagugcaccugcggcuucgccuccaacaagaccaucgagugcgccugccgcgacaacuccuacaccgccaagcgccccuucgucaagcucaacgucgagaccgacaccgccgagauccgccucaugugcaccgagaccuaccucgacaccccccgccccgacgacggcuccaucaccggccccugcgaguccaacggcgacaagggcuccggcggcaucaagggcggcuucguccaccagcgcauggccuccaagaucggccgcugguacucccgcaccauguccaagaccaagcgcaugggcauggagcucuacgucaaguacgacggcgaccccuggaccgacuccgacgcccucgcccccuccggcgucauggucuccaucgaggagcccggcugguacuccuucggcuucgagaucaaggacaagaagugcgacguccccugcaucggcaucgagaugguccacgacggcggcaagaccaccuggcacuccgccgccaccgccaucuacugccucaugggcuccggccagcuccucugggacaccaucaccggcgucgacauggcccucuga

SEQ ID NO: 124623 - RNA, 1401 nt, Artificial Sequence
  derived and/or modified CDS sequence (opt2) from neuraminidase__InfluenzaB__AAN39775
augcuccccuccaccauccagacccucacccucuuccucaccuccggcggcguccuccucucccucuacgucuccgcccuccucuccuaccuccucuacuccgacauccuccucaaguucucccccaccaagaucaucgcccccaccaccucccucgacuccgccaacgccuccaacuuccaggccgucaaccacuccgccaccaaggagaugaccuuccuccuccccgagcccgaguggaccuacccccgccucuccugccagggcuccaccuuccagaaggcccuccucaucuccccccaccgcuucggcgaggccaagggcaacuccgccccccucaucauccgcgagcccuucaucgccugcggccccaaggagugcaagcacuucgcccucacccacuacgccgcccagcccggcggcuacuacaacggcacccgcgaggaccgcaacaagcuccgccaccucaucuccgucaaccucggcaagauccccaccgucgagaacuccaucuuccacauggccgccugguccggcuccgccugccacgacggcaaggaguggaccuacaucggcgucgacggccccgacuccaacgcccucaucaagaucaaguacggcgaggccuacaccgacaccuaccacuccuacgccaacaacauccuccgcacccaggaguccgccugcaacugcaucggcggcgacugcuaccucaugaucaccgacggcuccgccuccggcaucuccaagugccgcuuccucaagauccgcgagggccgcaucaucaaggagaucuuccccaccggccgcgucgagcacaccgaggagugcaccugcggcuucgccuccaacaagaccaucgagugcgccugccgcgacaacuccuacaccgccaagcgccccuucgucaagcucaacgucgagaccgacaccgccgagauccgccucaugugcaccgagaccuaccucgacaccccccgccccgacgacggcuccaucaccggccccugcgaguccaacggcgacaagggcuccggcggcaucaagggcggcuucguccaccagcgcauggccuccaagaucggccgcugguacucccgcaccauguccaagaccaagcgcaugggcauggagcucuacgucaaguacgacggcgaccccuggaccgacuccgacgcccucgcccccuccggcgucauggucuccaucgaggagcccggcugguacuccuucggcuucgagaucaaggacaagaagugcgacguccccugcaucggcaucgagaugguccacgacggcggcaagaccaccuggcacuccgccgccaccgccaucuacugccucaugggcuccggccagcuccucugggacaccgucaccggcgucgacauggcccucuga

SEQ ID NO: 124624 - RNA, 1401 nt, Artificial Sequence
  derived and/or modified CDS sequence (opt2) from neuraminidase__InfluenzaB__AAN39777
augcuccccuccaccauccagacccucacccucuuccucaccuccggcggcguccuccucucccucuacgucuccgccucccucuccuaccuccucuacuccgacauccuccucaaguucucccagaccgagaucaccgcccccaccaugccccucgacugcgccaacgccuccaacguccaggccgucaaccgcuccgccaccaagggcgucacccuccucccccccgagcccgaguggaccuacccccgccucuccugccccggcuccaccuuccagaaggcccuccucaucuccccccaccgcuucggcgagaccaagggcaacuccgccccccucaucauccgcgagcccuucaucgccugcggccccaaggagugcaagcacuucgcccucacccacuacgccgcccagcccggcggcuacuacaacggcacccgcgaggaccgcaacaagcuccgccaccucaucuccgucaagcucggcaagauccccaccgucgagaacuccaucuuccacauggccgccugguccggcuccgccugccacgacggccgcgaguggaccuacaucggcgucgacggccccgacuccaacgcccuccucaagaucaaguacggcgaggccuacaccgacaccuaccacuccuacgccaagaacauccuccgcacccaggaguccgccugcaacugcaucggcggcgacugcuaccucaugaucaccgacggcuccgccuccggcaucuccgagugccgcuuccucaagauccgcgagggccgcaucaucaaggagaucuuccccaccggccgcgucaagcacaccgaggagugcaccugcggcuucgccuccaacaagaccaucgagugcgccugccgcgacaacuccuacaccgccaagcgccccuucgucaagcucaacgucgagaccgacaccgccgagauccgccucaugugcaccgagaccuaccucgacaccccccgccccgacgacggcuccaucaccggccccugcgaguccaacggcaacaagggcuccggcggcaucaagggcggcuucguccaccagcgcauggccuccaagaucggccgcugguacucccgcaccauguccaagaccaagcgcaugggcaugggccucuacgucaaguacgacggcgaccccuggaccgacuccgaggcccucgcccucuccggcgucauggucuccauggaggagcccggcugguacuccuucggcuucgagaucaaggacaagaagugcgacguccccugcaucggcaucgagaugguccacgacggcggcaagaccaccuggcacuccgccgccaccgccaucuacugccucaugggcuccggccagcuccucugggacaccgucaccggcgucgacauggcccucuga

SEQ ID NO: 124625 - RNA, 1401 nt, Artificial Sequence; identical to SEQ ID NO: 124620
  derived and/or modified CDS sequence (opt2) from neuraminidase__InfluenzaB__AAN39779

SEQ ID NO: 124626 - RNA, 1401 nt, Artificial Sequence
  derived and/or modified CDS sequence (opt2) from neuraminidase__InfluenzaB__AAN39781
augcuccccuccaccauccagacccucacccucuuccucaccuccggcggcguccuccucucccucuacgucuccgccucccucuccuaccuccucuacuccgacauccuccucaaguucuccuccaccgagaucaccgcccccaccaugccccucaacugcgccaacgccuccaacguccaggccgucaaccacuccgccaccaagggcgucacccucccccuccccgagcccgaguggaccuacccccgccucuccugccccggcuccaccuuccagaaggcccuccucaucuccccccaccgcuucggcgagaccaagggcaacuccgccccccucaucauccgcgagcccuucaucgccugcggccccaaggagugcaagcacuucgcccucacccacuacgccgcccagcccggcggcuacuacaacggcacccgcgaggaccgcaacaagcuccgccaccucaucuccgucaagcucggcaagauccccaccgucgagaacuccaucuuccacauggccgccugguccggcuccgccugccacgacggccgcgaguggaccuacaucggcgucgacggccccgacuccaacgcccuccucaagaucaaguacggcgaggccuacaccgacaccuaccacuccuacgccaacaacauccuccgcacccaggaguccgccugcaacugcaucggcggcgacugcuaccucaugaucaccgacggcuccgccuccggcgucuccgagugccgcuuccucaagauccgcgagggccgcaucaucaaggagaucuuccccaccggccgcgucgagcacaccgaggagugcaccugcggcuucgccuccaacaagaccaucgagugcgccugccgcgacaacuccuacaccgccaagcgccccuucgucaagcucaacgucgagaccgacaccgccgagauccgccucaugugcaccgagaccuaccucgacaccccccgccccgacgacggcuccaucaccggccccugcgaguccaacggcgacaagggcuccggcggcaucaagggcggcuucguccaccagcgcauggccuccaagaucggccgcugguacucccgcaccauguccaagaacaagcgcaugggcaugggccucuacgucaaguacgacggcgaccccuggaucgacuccgacgcccucacccucuccggcgucauggucuccauggaggagcccggcugguacuccuucggcuucgagaucaaggacaagaagugcgacguccccugcaucggcaucgagaugguccacgacggcggcaaggagaccuggcacuccgccgccaccgccaucuacugccucaugggcuccggccagcuccucugggacaccgucaccggcgucaacauggcccucuga

SEQ ID NO: 124627 - RNA, 1401 nt, Artificial Sequence
  derived and/or modified CDS sequence (opt2) from neuraminidase__InfluenzaB__AAN39783
augcuccccuccaccauccagacccucacccucuuccucaccuccggcggcguccuccucucccucuacgucuccgccucccucuccuaccuccucuacuccgacauccuccucaaguucucccagaccgagaucaccgcccccaccaugccccucgacugcgccaacgccuccaacguccaggccgucaaccgcuccgccaccaagggcgucacccuccuccuccccgagcccgaguggaccuacccccgccucuccugccccggcuccaccuuccagaaggcccuccucaucuccccccaccgcuucggcgagaccaagggcaacuccgccccccucaucauccgcgagcccuucaucgccugcggccccaaggagugcaagcacuucgcccucacccacuacgccgcccagcccggcggcuacuacaacggcacccgcgaggaccgcaacaagcuccgccaccucaucuccgucaagcucggcaagauccccaccgucgagaacuccaucuuccacauggccgccugguccggcuccgccugccacgacggccgcgaguggaccuacaucggcgucgacggccccgacuccaacgcccuccucaagaucaaguacggcgaggccuacaccgacaccuaccacuccuacgccaagaacauccuccgcacccaggaguccgccugcaacugcaucggcggcgacugcuaccucaugaucaccgacggcuccgccuccggcaucuccgagugccgcuuccucaagauccgcgagggccgcaucaucaaggagaucuuccccaccggccgcgucaagcacaccgaggagugcaccugcggcuucgccuccaacaagaccaucgagugcgccugccgcgacaacuccuacaccgccaagcgccccuucgucaagcucaacgucgagaccgacaccgccgagauccgccucaugugcaccgagaccuaccucgacaccccccgccccaacgacggcuccaucaccggccccugcgaguccaacggcgacaagggcuccggcggcaucaagggcggcuucguccaccagcgcauggccuccaagaucggccgcugguacucccgcaccauguccaagaccaagcgcaugggcaugggccucuacgucaaguacgacggcgaccccuggaccgacuccgaggcccucgcccucuccggcgucauggucuccauggaggagcccggcugguacuccuucggcuucgagaucaaggacaagaagugcgacguccccugcaucggcaucgagaugguccacgacggcggcaagaccaccuggcacuccgccgccaccgccaucuacugccucaugggcuccggccagcuccucugggacaccgucaccggcgucgacauggcccucuga

SEQ ID NO: 124628 - RNA, 1401 nt, Artificial Sequence
  derived and/or modified CDS sequence (opt2) from neuraminidase__InfluenzaB__AAN39785
augcuccccuccaccauccagacccucacccucuuccucaccuccggcggcguccuccucucccucuacgucuccgcccuccucuccuaccuccucuacuccgacauccuccucaaguucucccccaccaaggucaucgcccccaccaugucccucgacuacgccaacgccuccaacguccaggccgucaaccacuccgccaccgaggagaugaccuuccuccuccccgagcccgaguggaccuacccccgccucuccugccagggcuccaccuuccagaaggcccuccucaucuccccccaccgcuucggcgaggccaagggcaacuccgccccccucaucauccgcgagcccuucaucgccugcggccccaaggagugcaagcacuucgcccucacccacuacgccgcccagcccggcggcuacuacaacggcacccgcgaggaccgcaacaagcuccgccaccucaucuccgucaaccucggcaagauccccaccgucgagaacuccaucuuccacauggccgccugguccggcuccgccugccacgacggccgcgaguggaccuacaucggcgucgacggccccgacuccaacgcccucaucaagaucaaguacggcgaggccuacaccgacaccuaccacuccuacgccaacaacauccuccgcacccaggaguccgccugcaacugcaucggcggcgacugcuaccucaugaucaccgacggcuccgccuccggcaucucccgcugccgcuuccucaagauccgcgagggccgcaucaucaaggagaucuuccccaccggccgcgucgagcacaccgaggagugcaccugcggcuucgccuccaacaagaccaucgagugcgccugccgcgacaacuccuacaccgccaagcgccccuucgucaagcucaacgucgagaccgacaccgccgagauccgccucaugugcaccgagaccuaccucgacaccccccgccccgacgacggcuccaucaccggccccugcgaguccaacggcgacaagggcuccggcggcaucaagggcggcuucguccaccagcgcaugaccucccgcaucggccgcugguacucccgcaccauguccaagaccaagcgcaugggcauggagcucuacgucaaguacgacggcgaccccuggaccgacuccgacgcccucgcccccuccggcgucauggucuccauggaggagcccggcugguacuccuucggcuucgagaucaaggacaagaagugcgacguccccugcaucggcaucgagaugguccacgacggcggcaagaagaccuggcacuccgccgccaccgccaucuacugccucaugggcuccggccagcuccucugggacaccgucaccggcgucgacauggcccucuga

SEQ ID NO: 124629 - RNA, 1401 nt, Artificial Sequence
  derived and/or modified CDS sequence (opt2) from neuraminidase__InfluenzaB__AAN39787
augcuccccuccaccauccagacccucacccucuuccucaccuccggcggcguccuccucucccucuacgucuccgcccuccucuccuaccuccucuacuccgacauccuccucaaguucucccccaccaaggucaucgcccccaccaugucccucgacuacgccaacgccuccaacguccaggccgucaaccacuccgccaccgaggagaugaccuuccuccuccccgagcccgaguggaccuacccccgccucuccugccagggcuccaccuuccagaaggcccuccucaucuccccccaccgcuucggcgaggccaagggcaacuccgccccccucaucauccgcgagcccuucaucgccugcggccccaaggagugcaagcacuucgcccucacccacuacgccgcccagcccggcggcuacuacaacggcacccgcgaggaccgcaacaagcuccgccaccucaucuccgucaaccucggcaagauccccaccgucgagaacuccaucuuccacauggccgccugguccggcuccgccugccacgacggccgcgaguggaccuacaucggcgucgacggccccgacuccaacgcccucaucaagaucaaguacggcgaggccuacaccgacaccuaccacuccuacgccaacaacauccuccgcacccaggaguccgccugcaacugcaucggcggcgacugcuaccucaugaucaccgacggcuccgccuccggcaucucccgcugccgcuuccucaagauccgcgagggccgcaucaucaaggagaucuuccccaccggccgcgucgagcacaccgaggagugcaccugcggcuucgccuccaacaagaccaucgagugcgccugccgcgacaacuccuacaccgccaagcgccccuucgucaagcucaacgucgagaccgacaccgccgagauccgccucaugugcaccgagaccuaccucgacaccccccgccccgacgacggcuccaucaccggccccugcgaguccaacggcgacaagggcaacggcggcaucaagggcggcuucguccaccagcgcauggccucccgcaucggccgcugguacucccgcaccauguccaagaccaagcgcaugggcauggagcucuacgucaaguacgacggcgaccccuggaccgacuccgacgcccucgcccccuccggcgucauggucuccauggaggagcccggcugguacuccuucggcuucgagaucaaggacaagaagugcgacguccccugcaucggcaucgagaugguccacgacggcggcaagaagaccuggcacuccgccgccaccgccaucuacugccucaugggcuccggccagcuccucugggacaccgucaccggcgucgacauggcccucuga

SEQ ID NO: 124630 - RNA, 1401 nt, Artificial Sequence
  derived and/or modified CDS sequence (opt2) from neuraminidase__InfluenzaB__AAN39795
augcuccccuccaccauccagacccucacccucuuccucaccuccggcggcguccuccucucccucuacgucuccgccucccucuccuaccuccucuacuccgacauccuccucaaguucucccccaccgagaucaccgcccccaccaugccccucgacugcgccaacgccuccaacguccaggccgucaaccgcuccgccaccaagggcgucacccuccuccuccccgagcccgaguggaccuacccccgccucuccugccccggcuccaccuuccagaaggcccuccucaucuccccccaccgcuucggcgagacccgcggcaacuccgccccccucaucauccgcgagcccuucaucgccugcggccccaaggagugcaagcacuucgcccucacccacuacgccgcccagcccggcggcuacuacaacggcacccgcgaggaccgcaacaagcuccgccaccucaucuccgucaagcucggcaagauccccaccgucgagaacuccaucuuccacauggccgccugguccggcuccgccugccacgacggccgcgaguggaccuacaucggcgucgacggccccgacuccaacgcccuccucaagaucaaguacggcgaggccuacaccgacaccuaccacuccuacgccaacaacauccuccgcacccaggaguccgccugcaacugcaucggcggcgacugcuaccucaugaucaccgacggcuccgccuccggcaccuccaagugccgcuuccucaagauccgcgagggccgcaucaucaaggagaucuuccccaccggccgcgucgagcacaccgaggagugcaccugcggcuucgccuccaacaagaccaucgagugcgccugccgcgacaacaacuacaccgccaagcgccccuucgucaagcucaacgucgagaccgacgccgccgagauccgccucaugugcaccgagaccuaccucgacaccccccgccccgacgacggcuccaucaccggccccugcgaguccaacggcgacaagggccgcggcggcaucaagggcggcuucguccaccagcgcauggccuccaagaucggccgcugguacucccgcaccauguccaagaccgagcgcaugggcauggagcucuacgucaaguacgacggcgaccccuggaccgacuccgacgcccucgcccucuccggcgucauggucuccauggaggagcccggcugguacuccuucggcuucgagaucaaggacaagaagugcgacguccccugcaucggcaucgagaugguccacgacggcggcaagaagaccuggcacuccgccgccaccgccaucuacugccucaugggcuccggccagcuccucugggacaccgucaccggcgucgacauggcccucuga

SEQ ID NO: 124631 - RNA, 1401 nt, Artificial Sequence; identical to SEQ ID NO: 124615
  derived and/or modified CDS sequence (opt2) from neuraminidase__InfluenzaB__AAN39797

SEQ ID NO: 124632 - RNA, 1401 nt, Artificial Sequence
  derived and/or modified CDS sequence (opt2) from neuraminidase__InfluenzaB__AAN39799
augcuccccuccaccauccagacccucacccucuuccucaccuccggcggcguccuccucucccucuacgucuccgcccuccucuccuaccuccucuacuccgacguccuccucaaguucucccccaccaagaucaucgcccccaccaugucccucgacugcgccaacgccuccaacguccaggccgucaaccacuccgccaccgaggagaugaccuuccuccuccccgagcccgaguggaccuacccccgccucuccugccagggcuccaccuuccagaaggcccuccucaucuccccccaccgcuucggcgaggccaagggcaacuccgccccccucaucauccgcgagcccuucaucgccugcggccccaaggagugcaagcacuucgcccucacccacuacgccgcccagcccggcggcuacuacaacggcacccgcgaggaccgcaacaagcuccgccaccucaucuccgucaaccucggcaagauccccaccgucgagaacuccaucuuccacauggccgccugguccggcuccgccugccacgacggccgcgaguggaccuacaucggcgucgacggccccgacuccaacgcccucaucaagaucgaguacggcgaggccuacaccgacaccuaccacuccuacgccuacaacauccuccgcacccaggaguccgccugcaacugcaucggcggcgacugcuaccucaugaucaccgacggcuccgccuccggcaucuccaagugccgcuuccucaagauccgcgagggccgcaucaucaaggagaucuuccccaccggccgcgucgagcacaccgaggagugcaccugcggcuucgccuccaacaagaccaucgagugcgccugccgcgacaacuccuacaccgccaagcgccccuucgucaagcucaacgucgagaccgacaccgccgagauccgccucaugugcaccgagaccuaccucgacaccccccgccccgacgacggcuccaucaccggccccugcgaguccaacggcgacaagggcuccggcggcaucaagggcggcuucguccaccagcgcauggccuccaagaucggccgcugguacucccgcaccauguccaagaccaagcgcaugggcauggagcucuacgucaaguacgacggcgaccccuggaccgacuccgacgcccucgcccccuccggcgucauggucuccauggaggagcccggcugguacuccuucggcuucgagaucaaggacaagaagugcgacguccccugcaucggcaucgagaugguccacgacggcggcaagaagaccuggcacuccgccgccaccgccaucuacugccucaugggcuccggccagcuccucugggacaccgucaccggcgucgacauggcccucuga

SEQ ID NO: 124633 - RNA, 1401 nt, Artificial Sequence
  derived and/or modified CDS sequence (opt2) from neuraminidase__InfluenzaB__AAN39801
augcuccccuccaccauccagacccucacccucuuccucaccuccggcggcguccuccucucccucuacgucuccgccucccucuccuaccuccucuacuccgacauccuccucaaguucucccccaccgagaucaccgcccccaccaugccccucgacugcgccaacgccuccaacgcccaggccgucaaccgcuccgccaccaagggcgucacccuccuccuccccgagcccgaguggaccuacccccgccucuccugccccggcuccaccuuccagaaggcccuccucaucuccccccaccgcuucggcgagaccaagggcaacuccgccccccucaucauccgcgagcccuucaucgccugcggccccaaggagugcaagcacuucgcccucacccacuacgccgcccagcccggcggcuacuacaacggcacccgcgaggaccgcaacaagcuccgccaccucaucuccgucaagcucggcaagauccccaccgucgagaacuccaucuuccacauggccgccugguccggcuccgccugccacgacggcaaggaguggaccuacaucggcgucgacggccccgacuccaacgcccuccucaagaucaaguacggcgaggccuacaccgacaccuaccacuccuacgccaacaacauccuccgcacccaggaguccgccugcaacugcaucggcggcaacugcuaccucaugaucaccgacggcuccgccuccggcaucuccgagugccgcuuccucaagauccgcgagggccgcaucaucaaggagaucuuccccaccggccgcgucaagcacaccgaggagugcaccugcggcuucgccuccaacaagaccaucgagugcgccugccgcgacaacuccuacaccgccaagcgccccuucgucaagcucaacgucgagaccgacaccgccgagauccgccucaugugcaccgagaccuaccucgacaccccccgccccgacgacggcuccaucaccggccccugcgaguccaacggcgacaagggcuccggcggcaucaagggcggcuucguccaccagcgcauggccuccaagaucggccgcugguacucccgcaccauguccaagaccaagcgcaugggcaugggccucuacgucaaguacgacggcgaccccuggaccgacuccgacgcccucgcccucuccggcgucauggucuccauggaggagcccggcugguacuccuucggcuucgagaucaaggacaagaagugcgacguccccugcaucggcaucgagaugguccacgacggcggcaaggagaccuggcacuccgccgccaccgccaucuacugccucaugggcuccggccagcuccucugggacaccgucaccggcgucgacauggcccucuga

SEQ ID NO: 124634 - RNA, 1401 nt, Artificial Sequence
  derived and/or modified CDS sequence (opt2) from neuraminidase__InfluenzaB__AAN39803
augcuccccuccaccauccagacccucacccucuuccucaccuccggcggcguccuccucucccucuacgucuccgccucccucuccuaccuccucuacuccgacauccuccucaaguucucccccaccgagaucaccgcccccaaggucccccucgacugcgccaacgccuccaacguccaggccgucaaccgcuccgccaccaagggcaugacccuccuccucuccgagcccgaguggaccuacccccgccucuccugccagggcuccaccuuccagaaggcccuccucaucuccccccaccgcuucggcgagacccgcggcaacuccgccccccucaucauccgcgagcccuucaucgccugcggccccaaggagugcaagcacuucgcccucacccacuacgccgcccagcccggcggcuacuacaacggcacccgcgaggaccgcaacaagcuccgccaccucaucuccgucaagcucggcaagauccccaccgucgagaacuccaucuuccacauggccgccugguccggcuccgccugccacgacggccgcgaguggaccuacaucggccucgacggccccgacuccaacgcccucaucaagaucaaguacggcgaggccuacaccgacaccuaccacuccuacgccaacaacauccuccgcacccaggaguccgccugcaacugcaucggcggcgacugcuaccucaugaucaccgacggcuccgccuccggcaucuccaagugccgcuuccucaagauccgcgagggccgcaucaucaaggagaucuuccccaccggccgcgucgagcacaccgaggagugcaccugcggcuucgccuccaacaagaccaucgagugcgccugccgcgacaacuccuacaccgccaagcgccccuucgucaagcucaacgucgagaccgacaccgccgagauccgccucaugugcaccgagaccuaccucgacaccccccgccccgacgacggcuccaucaccggccccugcgaguccaacggcgacaagggccgcggcggcaucaagggcggcuucguccaccagcgcauggccuccaagaucggccgcugguacucccgcaccauguccaagaccgagcgcaugggcauggagcucuacgucaaguacgacggcgaccccuggaccgacuccgacgcccucgcccccuccggcgucauggucuccaugaaggagcccggcugguacuccuucggcuucgagaucaaggacaagaagugcgacguccccugcaucggcaucgagaugguccacgacggcggcaaggagaccuggcacuccgccgccaccgccaucuacugccucaugggcuccggccagcuccucugggacaccgucaccggcgucgacauggcccucuga

SEQ ID NO: 124635 - RNA, 1401 nt, Artificial Sequence
  derived and/or modified CDS sequence (opt2) from neuraminidase__InfluenzaB__ABA02232
augcuccccuccaccauccagacccucacccucuuccucaccuccggcggcguccuccucucccucuacgucuccgccucccucuccuaccuccucuacuccgacauccuccucaaguucucccccaccgagaucaccgcccccaccaugccccucgacugcgccaacgccuccaacguccaggccgucaaccgcuccgccaccaagggcgucacccuccuccuccccgagcccgaguggaccuacccccgccucuccugccccggcuccaccuuccagaaggcccuccucaucuccccccaccgcuucggcgagaccaagggcaacuccgccccccucaucauccgcgagcccuucaucgccugcggccccaaggagugcaagcacuucgcccucacccacuacgccgcccagcccggcggcuacuacaacggcacccgcggcgaccgcaacaagcuccgccaccucaucuccgucaagcucggcaagauccccaccgucgagaacuccaucuuccacauggccgccugguccggcuccgccugccacgacggcaaggaguggaccuacaucggcgucgacggccccgagaacaacgcccuccucaagaucaaguacggcgaggccuacaccgacaccuaccacuccuacgccaacaacauccuccgcacccaggaguccgccugcaacugcaucggcggcaacugcuaccucaugaucaccgacggcuccgccuccggcaucuccgagugccgcuuccucaagauccgcgagggccgcaucaucaaggagaucuuccccaccggccgcgucaagcacaccgaggagugcaccugcggcuucgccuccaacaagaccaucgagugcgccugccgcgacaacuccuacaccgccaagcgccccuucgucaagcucaacgucgagaccgacaccgccgagauccgccucaugugcaccgagaccuaccucgacaccccccgccccgacgacggcuccaucaccggccccugcgaguccaacggcgacaagggcuccggcggcaucaagggcggcuucguccaccagcgcauggccuccaagaucggccgcugguacucccgcaccauguccaagaccaagcgcaugggcaugggccucuacgucaaguacgacggcgaccccuggaccgacuccgacgcccucgcccucuccggcgucauggucuccauggaggagcccggcugguacuccuucggcuucgagaucaaggacaagaagugcgacguccccugcaucggcaucgagaugguccacgacggcggcaaggagaccuggcacuccgccgccaccgccaucuacugccucaugggcuccggccagcuccucugggacaccgucaccggcgucgacauggcccucuga

SEQ ID NO: 124636 - RNA, 1401 nt, Artificial Sequence
  derived and/or modified CDS sequence (opt2) from neuraminidase__InfluenzaB__ABI84039
augcuccccuccaccauccagacccucacccucuuccucaccuccggcggcguccuccucucccucuacgucuccgccucccucuccuaccuccucuacuccgacauccuccucaaguucucccccaccgagaucaccgcccccaccaugccccucgacugcgccaacgccuccaacguccaggccgucaaccgcuccgccaccaagggcgucacccuccuccuccccgagcccgaguggaccuacccccgccucuccugccccggcuccaccuuccagaaggcccuccucaucuccccccaccgcuucggcgagaccaagggcaacuccgccccccucaucauccgcgagcccuucaucgccugcggccccaacgagugcaagcacuucgcccucacccacuacgccgcccagcccggcggcuacuacaacggcacccgcggcgaccgcaacaagcuccgccaccucaucuccgucaagcucggcaagauccccaccgucgagaacuccaucuuccacauggccgccugguccggcuccgccugccacgacggcaaggaguggaccuacaucggcgucgacggccccgacaacaacgcccuccucaagaucaaguacggcgaggccuacaccgacaccuaccacuccuacgccaacaacauccuccgcacccaggaguccgccugcaacugcaucggcggcaacugcuaccucaugaucaccgacggcuccgccuccggcgucuccgagugccgcuuccucaagauccgcgagggccgcaucaucaaggagaucuuccccaccggccgcgucaaguacaccgaggagugcaccugcggcuucgccuccaacaagaccaucgagugcgccugccgcgacaacuccuacaccgccaagcgccccuucgucaagcucaacgucgagaccgacaccgccgagauccgccucaugugcaccgacaccuaccucgacaccccccgccccgacgacggcuccaucaccggccccugcgaguccaacggcgacaagggcuccggcggcaucaagggcggcuucguccaccagcgcauggccuccaagaucggccgcugguacucccgcaccauguccaagaccgagcgcaugggcaugggccucuacgucaaguacgacggcgaccccugggccgacuccgacgcccucgccuucuccggcgucauggucuccaugaaggagcccggcugguacuccuucggcuucgagaucaaggacaagaagugcgacguccccugcaucggcaucgagaugguccacgacggcggcaaggagaccuggcacuccgccgccaccgccaucuacugccucaugggcuccggccagcuccucugggacaccgucaccggcgucgacauggcccucuga

SEQ ID NO: 124637 - RNA, 1401 nt, Artificial Sequence
  derived and/or modified CDS sequence (opt2) from neuraminidase__InfluenzaB__ABI84051
augcuccccuccaccauccagacccucacccucuuccucaccuccggcggcguccuccucucccucuacgucuccgccucccucuccuaccuccucuacuccgacauccuccuccgcuucucccagaccgagaucaccgcccccaucaugccccucgacugcgccaacgccuccaacguccaggccgucaaccacuccgccaccaagggcgucacccuccuccuccccgagcccgaguggaccuacccccgccucuccugccccggcuccaccuuccagaaggcccuccucaucuccccccaccgcuucggcgagaccaagggcaacuccgccccccucaucauccgcgagcccuucaucgccugcggccccaaggagugcaagcacuucgcccucacccacuacgccgcccagcccggcggcuacuacaacggcacccgcgaggaccgcaacaagcuccgccaccucaucuccgucaagcucggcaagauccccaccgucgagaacuccaucuuccacauggccgccugguccggcuccgccugccacgacggccgcgaguggaccuacaucggcgucgacggccccgacuccaacgcccuccucaagaucaaguacggcgaggccuacaccgacaccuaccacuccuacgccaagaacauccuccgcacccaggaguccgccugcaacugcaucggcggcgacugcuaccucaugaucaccgacggccccgccuccggcaucuccgagugccgcuuccucaagauccgcgagggccgcaucaucaaggagaucuuccccaccggccgcgucaagcacaccgaggagugcaccugcggcuucgccuccaacaagaccaucgagugcgccugccgcgacaacuccuacaccgccaagcgccccuucgucaagcucaacgucgagaccgacaccgccgagauccgccucaugugcaccgagaccuaccucgacaccccccgccccaacgacggcuccaucaccggccccugcgaguccaacggcgacaagggcuccggcggcaucaagggcggcuucguccaccagcgcauggccuccaagaucggccgcugguacucccgcaccauguccaagaccaagcgcaugggcaugggccucuacgucaaguacgacggcgaccccuggaccgacuccgaggcccucgcccucuccggcgucauggucuccauggaggagcccggcugguacuccuucggcuucgagaucaaggacaagaagugcgacguccccugcaucggcaucgagaugguccacgacggcggcaagaccaccuggcacuccgccgccaccgccaucuacugccucaugggcuccggccagcuccucugggacaccgucaccggcgucgacauggcccucuga

SEQ ID NO: 124638 - RNA, 1401 nt, Artificial Sequence
  derived and/or modified CDS sequence (opt2) from neuraminidase__InfluenzaB__ABI84062
augcuccccuccaccauccagacccucacccucuuccucaccuccggcggcguccuccucucccucuacgucuccgccucccucuccuaccuccucuacuccgacauccuccucaaguucucccccaccgagaucaucgcccccaucaugccccucgacugcgccaacgccuccaacguccaggccgucaaccgcuccaccaccaagggcgucacccuccuccuccccgagcccgaguggaccuacccccgccucuccugccccggcuccaccuuccagaaggcccuccucaucuccccccaccgcuucggcgagaccaagggcaacuccgccccccucaucauccgcgagcccuucaucgccugcggccccaaggagugcaagcacuucgcccucacccacuacgccgcccagcccggcggcuacuacaacggcacccgcggcgaccgcaacaagcuccgccaccucaucuccgucaagcucggcaagauccccaccgucgagaacuccaucuuccacauggccgccugguccggcuccgccugccacgacggcaaggaguggaccuacaucggcgucgacggccccgacaacaacgcccuccucaagaucaaguacggcgaggccuacaccgacaccuaccacuccuacgccaacaacauccuccgcacccaggaguccgccugcaacugcaucggcggcaacugcuaccucaugaucaccgacggccccgccuccggcaucuccgagugccgcuuccucaagauccgcgagggccgcaucaucaaggagaucuuccccaccggccgcgucaagcacaccgaggagugcaccugcggcuucgccuccaacaagaccaucgagugcgccugccgcgacaacuccuacaccgccaagcgccccuucgucaagcucaacgucgagaccgacaccgccgagauccgccucaugugcaccgagaccuaccucgacaccccccgccccgacgacggcuccaucaccggccccugcgaguccaacggcgacaagggcuccggcggcaucaagggcggcuucguccaccagcgcauggccuccaagaucggccgcugguacucccgcaccauguccaagaccgagcgcaugggcaugggccucuacgucaaguacgacggcgaccccugggccgacuccgacgcccucgcccucuccggcgucauggucuccauggaggagcccggcugguacuccuucggcuucgagaucaaggacaagaagugcgacguccccugcaucggcaucgagaugguccacgacggcggcaaggagaccuggcacuccgccgccaccgccaucuacugccucaugggcuccggccagcuccucugggacaccgucaccggcgucgacauggcccucuga

SEQ ID NO: 124639 - RNA, 1401 nt, Artificial Sequence
  derived and/or modified CDS sequence (opt2) from neuraminidase__InfluenzaB__ABL76280
augcuccccuccaccauccagacccucacccucuuccucaccuccggcggcguccuccucucccucuacgucuccgccucccucuccuaccuccucuacuccgacauccuccucaaguucucccccaccgagaucaccgcccccaccaugccccucaacugcgccaacgccuccaacguccaggccgucaaccgcuccgccaccaagggcgucacccuccuccuccccgagcccgaguggaccuacccccgccucuccugccccggcuccaccuuccagaaggcccuccucaucuccccccaccgcuucggcgagaccaagggcaacuccgccccccucaucauccgcgagcccuucaucgccugcggccccaaggagugcaagcacuucgcccucacccacuacgccgcccagcccggcggcuacuacaacggcacccgcgaggaccgcaacaagcuccgccaccucaucuccgucaagcucggcaagauccccaccgucgagaacuccaucuuccacauggccgccugguccggcuccgccugccacgacggccgcgaguggaccuacaucggcgucgacggccccgacuccaacgcccuccucaagaucaaguacggcgaggccuacaccgacaccuaccacuccuacgccaacaacauccuccgcacccaggaguccgccugcaacugcaucggcggcgacugcuaccucaugaucaccgacggcuccgccuccggcaucuccgagugccgcuuccucaagauccgcgagggccgcaucaucaaggagaucuuccccaccggccgcgucgagcacaccgaggagugcaccugcggcuucgccuccaacaagaccaucgagugcgccugccgcgacaacuccuacaccgccaagcgccccuucgucaagcucaacgucgagaccgacaccgccgagauccgccucaugugcaccgagaccuaccucgacaccccccgccccgacgacggcuccaucaccggccccugcgaguccaacggcgacaagggcuccggcggcaucaagggcggcuucguccaccagcgcauggccuccaagaucggccgcugguacucccgcaccauguccaagaccaagcgcaugggcaugggccucuacgucaaguacgacggcgaccccuggaucgacuccgacgcccucacccucuccggcgucauggucuccauggaggagcccggcugguacuccuucggcuucgagaucaaggacaagaagugcgacguccccugcaucggcaucgagaugguccacgacggcggcaagaagaccuggcacuccgccgccaccgccaucuacugccucaugggcuccggccagcuccucugggacaccgucaccggcgucgacauggcccucuga

SEQ ID NO: 124640 - RNA, 1401 nt, Artificial Sequence
  derived and/or modified CDS sequence (opt2) from neuraminidase__InfluenzaB__ABL76302
augcuccccuccaccauccagacccucacccucuuccucaccuccggcggcguccuccucucccucuacgucuccgccucccucuccuaccuccucuacuccgacauccuccucaaguucccccccaccgagaucaccgcccccaccaugccccucgacugcgccaacgccuccaacguccaggccgucaaccgcuccgccaccaagggcgucacccuccuccuccccgagcccgaguggaccuacccccgccucuccugccccggcuccaccuuccagaaggcccuccucaucuccccccaccgcuucggcgagaccaagggcaacuccgccccccucaucauccgcgagcccuucaucgccugcggccccaaggagugcaagcacuucgcccucacccacuacgccgcccagcccggcggcuacuacaacggcacccgcgaggaccgcaacaagcuccgccaccucaucuccgucaagcucggcaagauccccaccgucgagaacuccaucuuccacauggccgccugguccggcuccgccugccacgacggccgcgaguggaccuacaucggcgucgacggccccgacuccaacgcccuccucaagaucaaguacggcgaggccuacaccgacaccuaccacuccuacgccaacaacauccuccgcacccaggaguccgccugcaacugcaucggcggcaacugcuaccucaugaucaccgacggcuccgccuccggcaucuccgagugccgcuuccucaagauccgcgagggccgcaucaucaaggagaucuuccccaccggccgcgucaagcacaccgaggagugcaccugcggcuucgccuccaacaagaccaucgagugcgccugccgcgacaacuccuacaccgccaagcgccccuucgucaagcucaacgucgagaccgacaccgccgagauccgccucaugugcaccgagaccuaccucgacaccccccgccccgacgacggcuccaucaccggccccugcgaguccaacggcgacaagggcuccggcggcaucaagggcggcuucguccaccagcgcauggccuccaagaucggccgcugguacucccgcaccauguccaagaccaagcgcaugggcaugggccucuacgucaaguacgacggcgaccccuggaccgacuccgacccccucgcccucuccggcgucauggucuccauggaggagcccggcugguacuccuucggcuucgagaucaaggacaagaagugcgacguccccugcaucggcaucgagaugguccacgacggcggcaaggagaccuggcacuccgccgccaccgccaucuacugccucaugggcuccggccagaugcucugggacaccgucaccggcgucgacauggcccucuga

SEQ ID NO: 124641 - RNA, 1401 nt, Artificial Sequence
  derived and/or modified CDS sequence (opt2) from neuraminidase__InfluenzaB__ABL76313
augcuccccuccaccauccagacccucacccucuuccucaccuccggcggcguccuccucucccucuacgucuccgccucccucuccuaccuccucuacuccgacauccuccucaaguucucccccaaggagaucaccgcccccaccaugccccucaacugcgccaacgccuccaacguccaggccgucaaccgcuccgccaccaagggcgucaccuucccccuccccgagcccgaguggaccuacccccgccucuccugccccggcuccaccuuccagaaggcccuccucaucuccccccaccgcuucggcgagaccaagggcaacuccgccccccucaucauccgcgagcccuucaucgccugcggccccaaggagugcaagcacuucgcccucacccacuacgccgcccagcccggcggcuacuacaacggcacccgcgaggaccgcaacaagcuccgccaccucaucuccgucaagcucggcaagauccccaccgucgagaacuccaucuuccacauggccgccugguccggcuccgccugccacgacggccgcgaguggaccuacaucggcgucgacggccccgacuccaacgcccuccucaagaucaaguacggcgaggccuacaccgacaccuaccacuccuacgccaacaacauccuccgcacccaggaguccgccugcaacugcaucggcggcgacugcuaccucaugaucaccgacggcuccgccuccggcaucuccgagugccgcuuccucaagauccgcgagggccgcaucaucaaggagaucuuccccaccggccgcgucgagcacaccgaggagugcaccugcggcuucgccuccaacaagaccaucgagugcgccugccgcgacaacuccuacaccgccaagcgccccuucgucaagcucaacgucgagaccgacaccgccgagauccgccucaugugcaccgagaccuaccucgacaccccccgccccgacgacggcuccaucaccggccccugcgaguccaacggcgacaagggcuccggcggcaucaagggcggcuucguccaccagcgcauggccuccaagaucggccgcugguacucccgcaccauguccaagaccaagcgcaugggcaugggccucuacgucaaguacgacggcgaccccuggaucgacuccgacgcccucacccucuccggcgucauggucuccgucgaggagcccggcugguacuccuucggcuucgagaucaaggacaagaagugcgacguccccugcaucggcaucgagaugguccacgacggcggcaagaccaccuggcacuccgccgccaccgccaucuacugccucaugggcuccggccagcuccucugggacaccgucaccggcgucgacauggcccucuga

SEQ ID NO: 124642 - RNA, 1401 nt, Artificial Sequence
  derived and/or modified CDS sequence (opt2) from neuraminidase__InfluenzaB__ABL76335
augcuccccuccaccauccagacccucacccucuuccucaccuccggcggcguccuccucucccucuacgucuccgccucccucuccuaccuccucuacuccgacauccuccucaaguucucccccaccgagaucaccgcccccaccaugccccucaacugcgccaacgccuccaacguccaggccgucaaccgcuccgccaccaagggcgucacccucccccuccccgagcccgaguggaccuacccccgccucuccugccccggcuccaccuuccagaaggcccuccucaucuccccccaccgcuucggcgagaccaagggcaacuccgccccccucaucauccgcgagcccuucaucgccugcggccccaaggagugcaagcacuucgcccucacccacuacgccgcccagcccggcggcuacuacaacggcacccgcgaggaccgcaacaagcuccgccaccucaucuccgucaagcucggcaagauccccaccgucgagaacuccaucuuccacauggccgccugguccggcuccgccugccacgacggccgcgaguggaccuacaucggcgucgacggccccgacuccaacgcccuccucaagaucaaguacggcgaggccuacaccgacaccuaccacuccuacgccaacaacauccuccgcacccaggaguccgccugcaacugcaucggcggcgacugcuaccucaugaucaccgacggcuccgccuccggcaucuccgagugccgcuuccucaagauccgcgagggccgcaucaucaaggagaucuuccccaccggccgcgucgagcacaccgaggagugcaccugcggcuucgccuccaacaagaccaucgagugcgccugccgcgacaacuccuacaccgccaagcgccccuucgucaagcucaacgucgagaccgacaccgccgagauccgccucaugugcaccgagaccuaccucgacaccccccgccccgacgacggcuccaucaccggccccugcgaguccaacggcgacaagggcuccggcggcaucaagggcggcuucguccaccagcgcauggccuccaagaucggccgcugguacucccgcaccauguccaagaccaagcgcaugggcaugggccucuacgucaaguacgacggcgaccccuggaucgacuccgacgcccucacccucuccggcgucauggucuccauggaggagcccggcugguacuccuucggcuucgagaucaaggacaagaagugcgacguccccugcaucggcaucgagaugguccacgacggcggcaagaccaccuggcacuccgccgccaccgccaucuacugccucaugggcuccggccagcuccucugggacaccgucaccggcgucgacauggcccucuga

SEQ ID NO: 124643 - RNA, 1401 nt, Artificial Sequence
  derived and/or modified CDS sequence (opt2) from neuraminidase__InfluenzaB__ABL76346
augcuccccuccaccauccagacccucacccucuuccucaccuccggcggcguccuccucucccucuacgucuccgccucccucuccuaccuccucuacuccgacauccuccucaaguucucccccaaggagaucaccacccccaccaugccccucaacugcgccaacgccuccaacguccaggccgucaaccgcuccgccaccaagggcgucacccuccuccuccccgagcccgaguggaccuacccccgccucuccugccccggcuccaccuuccagaaggcccuccucaucuccccccaccgcuucggcgagaccaagggcaacuccgccccccucaucauccgcgagcccuucaucgccugcggccccaaggagugcaagcacuucgcccucacccacuacgccgcccagcccggcggcuacuacaacggcacccgcgaggaccgcaacaagcuccgccaccucaucuccgucaagcucggcaagauccccaccgucgagaacuccaucuuccacauggccgccugguccggcuccgccugccacgacggccgcgaguggaccuacaucggcgucgacggccccgacuccaacgcccuccucaagaucaaguacggcgaggccuacaccgacaccuaccacuccuacgccaacaacauccuccgcacccaggaguccgccugcaacugcaucggcggcgacugcuaccucaugaucaccgacggcuccgccuccggcaucuccgagugccgcuuccucaagauccgcgagggccgcaucaucaaggagaucuuccccaccggccgcgucgagcacaccgaggagugcaccugcggcuucgccuccaacaagaccaucgagugcgccugccgcgacaacuccuacaccgccaagcgccccuucgucaagcucaacgucgagaccgacaccgccgagauccgccucaugugcaccgagaccuaccucgacaccccccgccccgacgacggcuccaucaccggccccugcgaguccaacggcgacaagggcuccggcggcaucaagggcggcuucguccaccagcgcauggccuccaagaucggccgcugguacucccgcaccauguccaagaccaagcgcaugggcaugggccucuacgucaaguacgacggcgaccccuggaucgacuccgacgcccucacccucuccggcgucauggucuccauggaggagcccggcugguacuccuucggcuucgagaucaaggacaagaagugcgacguccccugcaucggcaucgagaugguccacgacggcggcaagaccaccuggcacuccgccgccaccgccaucuacugccucaugggcuccggccagcuccucugggacaccgucaccggcgucgacauggcccucuga

SEQ ID NO: 124644 - RNA, 1401 nt, Artificial Sequence; identical to SEQ ID NO: 124643
  derived and/or modified CDS sequence (opt2) from neuraminidase__InfluenzaB__ABL76357

SEQ ID NO: 124645 - RNA, 1401 nt, Artificial Sequence
  derived and/or modified CDS sequence (opt2) from neuraminidase__InfluenzaB__ABL76368
augcuccccuccaccauccagacccucacccucuuccucaccuccggcggcguccuccucucccucuacgucuccgccucccucuccuaccuccucuacuccgacauccuccucaaguucucccccaccgagaucaccgcccccaccaugccccucgacugcgccaacgccuccaacguccaggccgucaaccgcuccgccaccaagggcgucacccuccuccuccccgagcccgaguggaccuacccccgccucuccugccccggcuccaccuuccagaaggcccuccucaucuccccccaccgcuucggcgagaccaagggcaacuccgccccccucaucauccgcgagcccuucaucgccugcggccccaaggagugcaagcacuucgcccucacccacuacgccgcccagcccggcggcuacuacaacggcacccgcgaggaccgcaacaagcuccgccaccucaucuccgucaagcucggcaagauccccaccgucgagaacuccaucuuccacauggccgccugguccggcuccgccugccacgacggcaaggaguggaccuacaucggcgucgacggccccgacuccaacgcccuccucaagaucaaguacggcgaggccuacaccgacaccuaccacuccuacgccaacaacauccuccgcacccaggaguccgccugcaacugcaucggcggcaacugcuaccucaugaucaccgacggcuccgccuccggcaucuccgagugccgcuuccucaagauccgcgagggccgcaucaucaaggagaucuuccccaccggccgcgucaagcacaccgaggagugcaccugcggcuucgccuccaacaagaccaucgagugcgccugccgcgacaacuccuacaccgccaagcgccccuucgucaagcucaacgucgagaccgacaccgccgagauccgccucaugugcaccgagaccuaccucgacaccccccgccccgacgacggcuccaucaccggccccugcgaguccaacggcgacaagggcuccggcggcaucaagggcggcuucguccaccagcgcauggccuccaagaucggccgcugguacucccgcaccauguccaagaccaagcgcaugggcaugggccucuacgucaaguacgacggcgaccccuggaccgacuccggcgcccucgcccucuccggcgucauggucuccauggaggagcccggcugguacuccuucggcuucgagaucaaggacaagaagugcgacguccccugcaucggcaucgagaugguccacgacggcggcaaggagaccuggcacuccgccgccaccgccaucuacugccucaugggcuccggccagcuccucugggacaccgucaccggcgucgacauggcccucuga

SEQ ID NO: 124646 - RNA, 1404 nt, Artificial Sequence
  derived and/or modified CDS sequence (opt2) from neuraminidase__InfluenzaB__ABL76379
augcuccccuccaccauccagacccucacccucuuccucaccuccggcggcguccuccucucccucuacgucuccgccucccucuccuaccuccucuacuccgacauccuccucaaguucucccccaccgagaucaccgcccccaccaugccccucgacugcgccaacgccuccaacguccaggccgucaaccgcuccgccaccaagggcgucaccuuccuccuccuccccgagcccgaguggaccuacccccgccucuccugccccggcuccaccuuccagaaggcccuccucaucuccccccaccgcuucggcgagaccaagggcaacuccgccccccucaucauccgcgagcccuucaucgccugcggccccaaggagugcaagcacuucgcccucacccacuacgccgcccagcccggcggcuacuacaacggcacccgcggcgaccgcaacaagcuccgccaccucaucuccgucaagcucggcaagauccccaccgucgagaacuccaucuuccacauggccgccugguccggcuccgccugccacgacggcaaggaguggaccuacaucggcgucgacggccccgacuccaacgcccuccucaagaucaaguacggcgaggccuacaccgacaccuaccacuccuacgccaacaacauccuccgcacccaggaguccgccugcaacugcaucggcggcaacugcuaccucaugaucaccgacggcuccgccuccggcaucuccgagugccgcuuccucaagauccgcgagggccgcaucaucaaggagaucuuccccaccggccgcgucaagcacaccgaggagugcaccugcggcuucgccuccaacaagaccaucgagugcgccugccgcgacaacuccuacaccgccaagcgccccuucgucaagcucaacgucgagaccgacaccgccgagauccgccucaugugcaccgagaccuaccucgacaccccccgccccgacgacggcuccaucaccggccccugcgaguccaacggcgacaagggcuccggcggcaucaagggcggcuucguccaccagcgcauggccuccaagaucggccgcugguacucccgcaccauguccaagaccaagcgcaugggcaugggccucuacgucaaguacgacggcgaccccuggaccgacuccgacgcccucgcccucuccggcgucauggucuccauggaggagcccggcugguacuccuucggcuucgagaucaaggacaagaagugcgacguccccugcaucggcaucgagaugguccacgacggcggcaaggagaccuggcacuccgccgccaccgccaucuacugccucaugggcuccggccagcuccucugggacaccgucaccggcgucgacauggcccucuga

SEQ ID NO: 124647 - RNA, 1401 nt, Artificial Sequence
  derived and/or modified CDS sequence (opt2) from neuraminidase__InfluenzaB__ABL76390
augcuccccuccaccauccagacccucacccucuuccucaccuccggcggcguccuccucucccucuacgucuccgccucccucuccuaccuccucuacuccgacauccuccucaaguucucccccaccgagaucaccgcccccaccaugccccucgacugcgccaacgccuccaacguccaggccgucaaccgcuccuccaccaagggcgucaccuuccuccuccccgagcccgaguggaccuacccccgccucuccugccccggcuccaccuuccagaaggcccuccucaucuccccccaccgcuucggcgagaccaagggcaacuccgccccccucaucauccgcgagcccuucaucgccugcggccccaaggagugcaagcacuucgcccucacccacuacgccgcccagcccggcggcuacuacaacggcacccgcgaggaccgcaacaagcuccgccaccucaucuccgucaagcucggcaagauccccaccgucgagaacuccaucuuccacauggccgccugguccggcuccgccugccacgacggcaaggaguggaccuacaucggcgucgacggccccgacuccaacgcccuccucaagaucaaguacggcgaggccuacaccgacaccuaccacuccuacgccaacaacauccuccgcacccaggaguccgccugcaacugcaucggcggcaacugcuaccucaugaucaccgacggcuccgccuccggcaucuccgagugccgcuuccucaagauccgcgagggccgcaucaucaaggagaucuuccccaccggccgcgucaagcacaccgaggagugcaccugcggcuucgccuccaacaagaccaucgagugcgccugccgcgacaacuccuacaccgccaagcgccccuucgucaagcucaacgucgagaccgacaccgccgagauccgccucaugugcaccgagaccuaccucgacaccccccgccccgacgacggcuccaucaccggcuccugcgaguccgacggcgacaagggcuccggcggcaucaagggcggcuucguccaccagcgcauggccuccaagaucggccgcugguacucccgcaccauguccaagaccaagcgcaugggcaugggccucuacguccgcuacgacggcgaccccuggaccgacuccuccgcccucgcccucuccggcgucauggucuccauggaggagcccggcugguacuccuucggcuucgagaucaaggacaagaagugcgacguccccugcaucggcaucgagaugguccacgacggcggcaaggagaccuggcacuccgccgccaccgccaucuacugccucaugggcuccggccagcuccucugggacaccgucaccggcgucgacauggcccucuga

SEQ ID NO: 124648 - RNA, 1401 nt, Artificial Sequence
  derived and/or modified CDS sequence (opt2) from neuraminidase__InfluenzaB__ABL76412
augcuccccuccaccauccagacccucacccucuuccucaccuccggcggcguccuccucucccucuacgucuccgccucccucuccuaccuccucuacuccgacauccuccucaaguucucccccaccgagaucaccgcccccaccaugccccucgacugcgccaacgccuccaacguccaggccgucaaccgcuccgccaccaagggcgucacccuccucauccccgagcccgaguggaccuacccccgccucuccugccccggcuccaccuuccagaaggcccuccucaucuccccccaccgcuucggcgagaccaagggcaacuccgccccccucaucauccgcgagcccuucaucgccugcggccccaaggagugcaagcacuucgcccucacccacuacaccgcccagcccggcggcuacuacaacggcacccgcggcgaccgcaacaagcuccgccaccucaucuccgucaagcucggcaagauccccaccgucgagaacuccaucuuccacauggccgccugguccggcuccgccugccacgacggcaaggaguggaccuacaucggcgucgacggccccgacuccaacgcccuccucaagaucaaguacggcgaggccuacaccgacaccuaccacuccuacgccaacaacauccuccgcacccaggaguccgccugcaacugcaucggcggcaacugcuaccucaugaucaccgacggcuccgccuccggcaucuccgagugccgcuuccucaagauccgcgagggccgcaucaucaaggagaucuuccccaccggccgcgucaagcacaccgaggagugcaccugcggcuucgccuccaacaagaccaucgagugcgccugccgcgacaacuccuacaccgccaagcgccccuucgucaagcucaacgucgagaccgacaccgccgagauccgccucaugugcaccgagaccuaccucgacaccccccgccccgacgacggcuccaucaccggccccugcgaguccaacggcgacaagggcuccggcggcaucaagggcggcuucguccaccagcgcauggccuccaagaucggccgcugguacucccgcaccauguccaagaccaagcgcaugggcaugggccucuacgucaaguacgacggcgaccccuggaccgacuccgacgcccucgcccucuccggcgucauggucuccauggaggagcccggcugguacuccuucggcuucgagaucaaggacaagaagugcgacguccccugcaucggcaucgagaugguccacgacggcggcaaggagaccuggcacuccgccgccaccgccaucuacugccucaugggcuccggccagcuccucugggacaccgucaccggcgucgacauggcccucuga

SEQ ID NO: 124649 - RNA, 1401 nt, Artificial Sequence
  derived and/or modified CDS sequence (opt2) from neuraminidase__InfluenzaB__ABL76423
augcuccccuccaccauccagacccucacccucuuccucaccuccggcggcguccuccucucccucuacgucuccgccucccucuccuaccuccucuacuccgacauccuccucaaguucucccccaccgagaucaccgcccccaccaugccccucgacugcgccaacgccuccaacguccaggccgucaaccacuccgccaccaagggcgucacccuccuccuccccgagcccgaguggaccuacccccgccucuccugccccggcuccaccuuccagaaggcccuccucaucuccccccaccgcuucggcgagaccaagggcaacuccgccccccucaucauccgcgagcccuucaucgccugcggccccaaggagugcaagcacuucgcccucacccacuacgccgcccagcccggcggcuacuacaacggcacccgcggcgaccgcaacaagcuccgccaccucaucuccgucaagcucggcaagauccccaccgucgagaacuccaucuuccacauggccgccugguccggcuccgccugccacgacggcaaggaguggaccuacaucggcgucgacggccccgacuccaacgcccuccucaagaucaaguacggcgaggccuacaccgacaccuaccacuccuacgccaacaacauccuccgcacccaggaguccgccugcaacugcaucggcggcaacugcuaccucaugaucaccgacggcuccgccuccggcaucuccgagugccgcuuccucaagauccgcgagggccgcaucaucaaggagaucuuccccaccggccgcgucaagcacaccgaggagugcaccugcggcuucgccuccaacaagaccaucgagugcgccugccgcgacaacuccuacaccgccaagcgccccuucgucaagcucaacgucgagaccgacaccgccgagauccgccucaugugcaccgagaccuaccucgacaccccccgccccgacgacggcuccaucaccggccccugcgaguccaacggcgacaagggcuccggcggcaucaagggcggcuucguccaccagcgcauggccuccaagaucggccgcugguacucccgcaccauguccaagaccaagcgcaugggcaugggccucuacgucaaguacgacggcgaccccuggaccgacuccgacgcccucgccuucuccggcgucauggucuccauggaggagcccggcugguacuccuucggcuucgagaucaaggacaagaagugcgacguccccugcaucggcaucgagaugguccacgacggcggcaaggagaccuggcacuccgccgccaccgccaucuacugccucaugggcuccggccagcuccucugggacaccgucaccggcgucgacauggcccucuga

SEQ ID NO: 124650 - RNA, 1401 nt, Artificial Sequence
  derived and/or modified CDS sequence (opt2) from neuraminidase__InfluenzaB__ABL76434
augcuccccuccaccauccagacccucacccucuuccucaccuccggcggcguccuccucucccucuacgucuccgccucccucuccuaccuccucuacuccgacauccuccucaaguucucccccaccgagaucaccgcccccaccaugccccucgacugcgccaacgccuccaacguccaggccgucaaccgcuccgccaccaagggcgucacccuccuccuccccgagcccgaguggaccuacccccgccucuccugccccggcuccaccuuccagaaggcccuccucaucuccccccaccgcuucggcgagaccaagggcaacuccgccccccucaucauccgcgagcccuucaucgccugcggccccaaggagugcaagcacuucgcccucacccacuacgccgcccagcccggcggcuacuacaacggcacccgcggcgaccgcaacaagcuccgccaccucaucuccgucaagcucggcaagauccccaccgucgagaacuccaucuuccacauggccgccugguccggcuccgccugccacgacggcaaggaguggaccuacaucggcgucgacggccccgacaacaacgcccuccucaagaucaaguacggcgaggccuacaccgacaccuaccacuccuacgccaacaacauccuccgcacccaggaguccgccugcaacugcaucggcggcaacugcuaccucaugaucaccgacggcuccgccuccggcaucuccgagugccgcuuccucaagauccgcgagggccgcaucaucaaggagaucuuccccaccggccgcgucaagcacaccgaggagugcaccugcggcuucgccuccaacaagaccaucgagugcgccugccgcgacaacuccuacaccgccaagcgccccuucgucaagcucaacgucgagaccgacaccgccgagauccgccucaugugcaccgagaccuaccucgacaccccccgccccgacgacggcuccaucaccggccccugcgaguccaacggcgacaagggcuccggcggcaucaagggcggcuucguccaccagcgcauggccuccaagaucggccgcugguacucccgcaccauguccaagaccaagcgcaugggcaugggccucuacgucaaguacgacggcgaccccugggccgacuccgacgcccucgcccucuccggcgucauggucuccauggaggagcccggcugguacuccuucggcuucgagauccgcgacaagaagugcgacguccccugcaucggcaucgagaugguccacgacggcggcaaggagaccuggcacuccgccgccaccgccaucuacugccucaugggcuccggccagcuccucugggacaccgucaccggcgucgacauggcccucuga

SEQ ID NO: 124651 - RNA, 1401 nt, Artificial Sequence
  derived and/or modified CDS sequence (opt2) from neuraminidase__InfluenzaB__ABL76456
augcuccccuccaccauccagacccucacccucuuccucaccuccggcggcguccuccucucccucuacgucuccgccucccucuccuaccuccucuacuccgacauccuccucaaguucucccccaccgagaucaccgcccccaccaugccccucgacugcgccaacgccuccaacguccaggccgucaaccgcuccgccaccaagggcgucaagcuccuccuccccgagcccgaguggaccuacccccgccucuccugccccggcuccaccuuccagaaggcccuccucaucuccccccaccgcuucggcgagaccaagggcaacuccgccccccucaucauccgcgagcccuucaucgccugcggccccaaggagugcaagcacuucgcccucacccacuacgccgcccagcccggcggcuacuacaacggcacccgcggcgaccgcaacaagcuccgccaccucaucuccgucaagcucggcaagauccccaccgucgagaacuccaucuuccacauggccgccugguccggcuccgccugccacgacggcaaggaguggaccuacaucggcgucgacggccccgacaacaacgcccuccucaagaucaaguacggcgaggccuacaccgacaccuaccacuccuacgccaacaacauccuccgcacccaggaguccgccugcaacugcaucggcggcaacugcuaccucaugaucaccgacggcuccgccuccggcgucuccgagugccgcuuccucaagauccgcgagggccgcaucaucaaggagaucuuccccaccggccgcgucaagcacaccgaggagugcaccugcggcuucgccuccaacaagaccaucgagugcgccugccgcgacaacuccuacaccgccaagcgccccuucgucaagcucaacgucgagaccgacaccgccgagauccgccucaugugcaccgagaccuaccucgacaccccccgccccgacgacggcuccaucaccggccccugcgaguccaacggcgacaagggcuccggcggcaucaagggcggcuucguccaccagcgcauggccuccaagaucggccgcugguacucccgcaccauguccaagaccaagcgcaugggcaugggccucuacgucaaguacgacggcgaccccugggccgacuccgacgcccucgcccucuccggcgucauggucuccauggaggagcccggcugguacuccuucggcuucgagaucaaggacaagaagugcgacguccccugcaucggcaucgagaugguccacgacggcggcaaggagaccuggcacuccgccgccaccgccaucuacugccucaugggcuccggccagcuccucugggacaccgucaccggcgucgacauggcccucuga

SEQ ID NO: 124652 - RNA, 1401 nt, Artificial Sequence
  derived and/or modified CDS sequence (opt2) from neuraminidase__InfluenzaB__ABL76467
augcuccccuccaccauccagacccucacccucuuccucaccuccggcggcguccuccucucccucuacgucuccgccucccucuccuaccuccucuacuccgacauccuccucaaguucucccccaccgagaucaccgcccccaccaugccccucgacugcgccaacgccuccaacguccaggccgucaaccgcuccgccaccaagggcgucacccuccuccuccccgagcccgaguggaccuacccccgccucuccugccccggcuccaccuuccagaaggcccuccucaucuccccccaccgcuucggcgagaccaagggcaacuccgccccccucaucauccgcgagcccuucaucgccugcggccccaaggagugcaagcacuucgcccucacccacuacgccgcccagcccggcggcuacuacaacggcacccgcggcgaccgcaacaagcuccgccaccucaucuccgucaagcucggcaagauccccaccgucgagaacuccaucuuccacauggccgccugguccggcuccgccugccacgacggcaaggaguggaccuacaucggcgucgacggccccgacaacaacgcccuccucaagaucaaguacggcgaggccuacaccgacaccuaccacuccuacgccaacaacauccuccgcacccaggaguccgccugcaacugcaucggcggcaacugcuaccucaugaucaccgacggcuccgccuccggcaucuccgagugccgcuuccucaagauccgcgagggccgcaucaucaaggagaucuuccccaccggccgcgucaagcacaccgaggagugcaccugcggcuucgccuccaacaagaccaucgagugcgccugccgcgacaacuccuacaccgccaagcgccccuucgucaagcucaacgucgagaccgacaccgccgagauccgccucaugugcaccgagaccuaccucgacaccccccgccccgacgacggcuccaucaccggccccugcgaguccaacggcgacaagggcuccggcggcaucaagggcggcuucguccaccagcgcauggccuccaagaucggccgcugguacucccgcaccauguccaagaccaagcgcaugggcaugggccucuacgucaaguacgacggcgaccccugggccgacuccgacgcccucgcccucuccggcgucauggucuccauggaggagcccggcugguacuccuucggcuucgagaucaaggacaagaagugcgacguccccugcaucggcaucgagaugguccacgacggcggcaaggagaccuggcacuccgccgccaccgccaucuacugccucaugggcuccggccagcuccucugggacaccgucaccggcgucgacauggcccucuga

SEQ ID NO: 124653 - RNA, 1401 nt, Artificial Sequence
  derived and/or modified CDS sequence (opt2) from neuraminidase__InfluenzaB__ABL76478
augcuccccuccaccauccagacccucacccucuuccucaccuccggcggcguccuccucucccucuacgucuccgccucccucuccuaccuccucuacuccgacauccuccucaaguucucccccaccgagaucaccgcccccaccaugccccucgacugcgccaacgccuccaacguccaggccgucaaccgcuccgccaccaagggcgucaagcuccuccuccccgagcccgaguggaccuacccccgccucuccugccccggcuccaccuuccagaaggcccuccucaucuccccccaccgcuucggcgagaccaagggcaacuccgccccccucaucauccgcgagcccuucaucgccugcggccccaaggagugcaagcacuucgcccucacccacuacgccgcccagcccggcggcuacuacaacggcacccgcggcgaccgcaacaagcuccgccaccucaucuccgucaagcucggcaagauccccaccgucgagaacuccaucuuccacauggccgccugguccggcuccgccugccacgacggcaaggaguggaccuacaucggcgucgacggccccgacaacaacgcccuccucaagaucaaguacggcgaggccuacaccgacaccuaccacuccuacgccaacaacauccuccgcacccaggaguccgccugcaacugcaucggcggcaacugcuaccucaugaucaccgacggcuccgccuccggcgucuccgagugccgcuuccucaagauccgcgagggccgcaucaucaaggagaucuuccccaccggccgcgucaagcacaccgaggagugcaccugcggcuucgccuccaacaagaccaucgagugcgccugccgcgacaacuccuacaccgccaagcgccccuucgucaagcucaacgucgagaccgacaccgccgagauccgccucaugugcaccaagaccuaccucgacaccccccgccccgacgacggcuccaucaccggccccugcgaguccaacggcgacaagggcuccggcggcaucaagggcggcuucguccaccagcgcauggccuccaagaucggccgcugguacucccgcaccauguccaagaccaagcgcaugggcaugggccucuacgucaaguacgacggcgaccccugggccgacuccgacgcccucgcccucuccggcgucauggucuccauggaggagcccggcugguacuccuucggcuucgagaucaaggacaagaagugcgacguccccugcaucggcaucgagaugguccacgacggcggcaaggagaccuggcacuccgccgccaccgccaucuacugccucaugggcuccggccagcuccucugggacaccgucaccggcgucgacauggcccucuga

SEQ ID NO: 124654 - RNA, 1401 nt, Artificial Sequence
  derived and/or modified CDS sequence (opt2) from neuraminidase__InfluenzaB__ABL76522
augcuccccuccaccauccagacccucacccucuuccucaccuccggcggcguccuccucucccucuacgucuccgccucccucuccuaccuccucuacuccgacauccuccucaaguucucccccaccgagaucaccgcccccaccaugccccucgacugcgccaacgccuccaacguccaggccgucaaccgcuccgccaccaagggcgucacccuccuccuccccgagcccgaguggaccuacccccgccucuccugccccggcuccaccuuccagaaggcccuccucaucuccccccaccgcuucggcgagaccaagggcaacuccgccccccucaucauccgcgagcccuucaucgccugcggccccaacgagugcaagcacuucgcccucacccacuacgccgcccagcccggcggcuacuacaacggcacccgcggcgaccgcaacaagcuccgccaccucaucuccgucaagcucggcaagauccccaccgucgagaacuccaucuuccacauggccgccugguccggcuccgccugccacgacggcaaggaguggaccuacaucggcgucgacggccccgacaacaacgcccuccucaagaucaaguacggcgaggccuacaccgacaccuaccacuccuacgccaacaacauccuccgcacccaggaguccgccugcaacugcaucggcggcaacugcuaccucaugaucaccgacggcuccgccuccggcgucuccgagugccgcuuccucaagauccgcgagggccgcaucaucaaggagaucuuccccaccggccgcgucaagcacaccgaggagugcaccugcggcuucgccuccaacaagaccaucgagugcgccugccgcgacaacuccuacaccgccaagcgccccuucgucaagcucaacgucgagaccgacaccgccgagauccgccucaugugcaccgagaccuaccucgacaccccccgccccgacgacggcuccaucaccggccccugcgaguccaacggcgacaagggcuccggcggcaucaagggcggcuucguccaccagcgcauggccuccaagaucggccgcugguacucccgcaccauguccaagaccgagcgcaugggcaugggccucuacgucaaguacgacggcgaccccugggccgacuccgacgcccucgcccucuccggcgucauggucuccauggaggagcccggcugguacuccuucggcuucgagaucaaggacaagaagugcgacguccccugcaucggcaucgagaugguccacgacggcggcaaggagaccuggcacuccgccgccaccgccaucuacugccucaugggcuccggccagcuccucugggacaccgucaccggcgucgacauggcccucuga

SEQ ID NO: 124655 - RNA, 1401 nt, Artificial Sequence
  derived and/or modified CDS sequence (opt2) from neuraminidase__InfluenzaB__ABL76533
augcuccccuccaccauccagacccucacccucuuccucaccuccggcggcguccuccucucccucuacgucuccgccucccucuccuaccuccucuacuccgacauccuccucaaguucucccccaccgagaucaccgcccccaccaugccccucgacugcgccaacgccuccaacguccaggccgucaaccgcuccgccaccaagggcgucacccuccuccuccccgagcccgaguggaccuacccccgccucuccugccccggcuccaccuuccagaaggcccuccucaucuccccccaccgcuucggcgagaccaagggcaacuccgccccccucaucauccgcgagcccuucaucgccugcggccccaacgagugcaagcacuucgcccucacccacuacgccgcccagcccggcggcuacuacaacggcaagcgcggcgaccgcaacaagcuccgccaccucaucuccgucaagcucggcaagauccccaccgucgagaacuccaucuuccacauggccgccugguccggcuccgccugccacgacggcaaggaguggaccuacaucggcgucgacggccccgacaacaacgcccuccucaagaucaaguacggcgaggccuacaccgacaccuaccacuccuacgccaacaacauccuccgcacccaggaguccgccugcaacugcaucggcggcaacugcuaccucaugaucaccgacggcuccgccuccggcgucuccgagugccgcuuccucaagauccgcgagggccgcaucaucaaggagaucuuccccaccggccgcgucaagcacaccgaggagugcaccugcggcuucgccuccaacaagaccaucgagugcgccugccgcgacaacuccuacaccgccaagcgccccuucgucaagcucaacgucgagaccgacaccgccgagauccgccucaugugcaccgagaccuaccucgacaccccccgccccgacgacggcuccaucaccggccccugcgaguccaacggcgacaagggcuccggcggcaucaagggcggcuucguccaccagcgcauggccuccaagaucggccgcugguacucccgcaccauguccaagaccgagcgcaugggcaugggccucuacgucaaguacgacggcgaccccugggccgacuccgacgcccucgcccucuccggcgucauggucuccauggaggagcccggcugguacuccuucggcuucgagaucaaggacaagaagugcgacguccccugcaucggcaucgagaugguccacgacggcggcaaggagaccuggcacuccgccgccaccgccaucuacugccucaugggcuccggccagcuccucugggacaccgucaccggcgucgacauggcccucuga

SEQ ID NO: 124656 - RNA, 1401 nt, Artificial Sequence
  derived and/or modified CDS sequence (opt2) from neuraminidase__InfluenzaB__ABL76544
augcuccccuccaccauccagacccucacccucuuccucaccuccggcggcguccuccucucccucuacgucuccgccucccucuccuaccuccucuacuccgacauccuccucaaguucucccccaccgagaucaccgcccccaccaugccccucgacugcgccaacgccuccaacguccaggccgucaaccgcuccgccaccaagggcgucacccuccuccuccccgagcccgaguggaccuacccccgccucuccugccccggcuccaccuuccagaaggcccuccucaucuccccccaccgcuucggcgagaccaagggcaacuccgccccccucaucauccgcgagcccuucaucgccugcggccccaacgagugcaagcacuucgcccucacccacuacgccgcccagcccggcggcuacuacaacggcacccgcggcgagcgcaacaagcuccgccaccucaucuccgucaagcucggcaagauccccaccgucgagaacuccaucuuccacauggccgccugguccggcuccgccugccacgacggcaaggaguggaccuacaucggcgucgacggccccgacaacaacgcccuccucaagaucaaguacggcgaggccuacaccgacaccuaccacuccuacgccaacaacauccuccgcacccaggaguccgccugcaacugcaucggcggcaacugcuaccucaugaucaccgacggcuccgccuccggcgucuccgagugccgcuuccucaagauccgcgagggccgcaucaucaaggagaucuuccccaccggccgcgucaagcacaccgaggagugcaccugcggcuucgccuccaacaagaccaucgagugcgccugccgcgacaacuccuacaccgccaagcgccccuucgucaagcucaacgucgagaccgacaccgccgagauccgccucaugugcaccgagaccuaccucgacaccccccgccccgacgacggcuccaucaccggccccugcgaguccaacggcgacaagggcuccggcggcaucaagggcggcuucguccaccagcgcauggccuccaagaucggccgcugguacucccgcaccauguccaagaccgagcgcaugggcaugggccucuacgucaaguacgacggcgaccccugggccgacuccgacgcccucgcccucuccggcgucauggucuccauggaggagcccggcugguacuccuucggcuucgagaucaaggacaagaagugcgacguccccugcaucggcaucgagaugguccacgacggcggcaaggagaccuggcacuccgccgccaccgccaucuacugccucaugggcuccggccagcuccucugggacaccgucaccggcgucgacauggcccucuga

SEQ ID NO: 124657 - RNA, 1401 nt, Artificial Sequence; identical to SEQ ID NO: 124655
  derived and/or modified CDS sequence (opt2) from neuraminidase__InfluenzaB__ABL76566

SEQ ID NO: 124658 - RNA, 1401 nt, Artificial Sequence
  derived and/or modified CDS sequence (opt2) from neuraminidase__InfluenzaB__ABL76588
augcuccccuccaccauccagacccucacccucuuccucaccuccggcggcguccuccucucccucuacgucuccgccucccucuccuaccuccucuacuccgacauccuccucaaguucucccccaccgagaucaccgcccccaccaugccccucgacuacgccaacgccuccaacguccaggccgucaaccgcuccgccaccaagggcgucacccuccuccuccccgagcccgaguggaccuacccccgccucuccugccccggcuccaccuuccagaaggcccuccucaucuccccccaccgcuucggcgagaccaagggcaacuccgccccccucaucauccgcgagcccuucaucgccugcggccccaacgagugcaagcacuucgcccucacccacuacgccgcccagcccggcggcuacuacaacggcacccgcggcgaccgcaacaagcuccgccaccucaucuccgucaagcucggcaagauccccaccgucgagaacuccaucuuccacauggccgccugguccggcuccgccugccacgacggcaaggaguggaccuacaucggcgucgacggccccgacaacaacgcccuccucaagaucaaguacggcgaggccuacaccgacaccuaccacuccuacgccaacaacauccuccgcacccaggaguccgccugcaacugcaucggcggcaacugcuaccucaugaucaccgacggcuccgccuccggcgucuccgagugccgcuuccucaagauccgcgagggccgcaucaucaaggagaucuuccccaccggccgcgucaagcacaccgaggagugcaccugcggcuucgccuccaacaagaccaucgagugcgccugccgcgacaacuccuacaccgccaagcgccccuucgucaagcucaacgucgagaccgacaccgccgagauccgccucaugugcaccgagaccuaccucgacaccccccgccccgacgacggcuccaucaccggccccugcgaguccaacggcgacaagggcuccggcggcaucaagggcggcuucguccaccagcgcauggccuccaagaucggccgcugguacucccgcaccauguccaagaccgagcgcaugggcaugggccucuacgucaaguacgacggcgaccccugggccgacuccgacgcccucgcccucuccggcgucauggucuccauggaggagcccggcugguacuccuucggcuucgagaucaaggacaagaagugcgacguccccugcaucggcaucgagaugguccacgacggcggcaaggagaccuggcacuccgccgccaccgccaucuacugccucaugggcuccggccagcuccucugggacaccgucaccggcgucgacauggcccucuga

SEQ ID NO: 124659 - RNA, 1401 nt, Artificial Sequence; identical to SEQ ID NO: 124654
  derived and/or modified CDS sequence (opt2) from neuraminidase__InfluenzaB__ABL76599

SEQ ID NO: 124660 - RNA, 1401 nt, Artificial Sequence; identical to SEQ ID NO: 124654
  derived and/or modified CDS sequence (opt2) from neuraminidase__InfluenzaB__ABL76610

SEQ ID NO: 124661 - RNA, 1401 nt, Artificial Sequence
  derived and/or modified CDS sequence (opt2) from neuraminidase__InfluenzaB__ABL76621
augcuccccuccaccauccagacccucacccucuuccucaccuccggcggcguccuccucucccucuacgucuccgccucccucuccuaccuccucuacuccgacauccuccucaaguucucccccaccgagaucaccgcccccaccaugccccucgacugcgccaacgccuccaacguccaggccgucaaccgcuccgccaccaagggcgucacccuccuccuccccgagcccgaguggaccuacccccgccucuccugccccggcuccaccuuccagaaggcccuccucaucuccccccaccgcuucggcgagaccaagggcaacuccgccccccucaucauccgcgagcccuucaucgccugcggccccaaggagugcaagcacuucgcccucacccacuacgccgcccagcccggcggcuacuacaacggcacccgcggcgaccgcaacaagcuccgccaccucaucuccgucaagcucggcaagauccccaccgucgagaacuccaucuuccacauggccgccugguccggcuccgccugccacgacggcaaggaguggaccuacaucggcgucgacggccccgacaacaacgcccuccucaagaucaaguacggcgaggccuacaccgacaccuaccacuccuacgccaacaacauccuccgcacccaggaguccgccugcaacugcaucggcggcaacugcuaccucaugaucaccgacggcuccgccuccggcgucuccgagugccgcuuccucaagauccgcgagggccgcaucaucaaggagaucuuccccaccggccgcgucaagcacaccgaggagugcaccugcggcuucgccuccaacaagaccaucgagugcgccugccgcgacaacuccuacaccgccaagcgccccuucgucaagcucaacgucgagaccgacaccgccgagauccgccucaugugcaccgagaccuaccucgacaccccccgccccgacgacggcuccaucaccggccccugcgaguccaacggcgagaagggcuccggcggcaucaagggcggcuucguccaccagcgcauggccuccaagaucggccgcugguacucccgcaccauguccaagaccaagcgcaugggcaugggccucuacgucaaguacgacggcgaccccugggccgacuccgacgcccucgcccucuccggcgucauggucuccauggaggagcccggcugguacuccuucggcuucgagaucaaggacaagaagugcgacauccccugcaucggcaucgagaugguccacgacggcggcaaggagaccuggcacuccgccgccaccgccaucuacugccucaugggcuccggccagcuccucugggacaccgucaccggcgucgacauggcccucuga

SEQ ID NO: 124662 - RNA, 1401 nt, Artificial Sequence
  derived and/or modified CDS sequence (opt2) from neuraminidase__InfluenzaB__ABL76632
augcuccccuccaccauccagacccucacccucuuccucaccuccggcggcguccuccucucccucuacgucuccgccucccucuccuaccuccucuacuccgacauccuccucaaguucucccagaccgagaucaccgcccccaucaugccccucgacugcgccaacgccuccaacguccaggccgucaaccgcuccgccaccaagggcgucacccuccuccuccccgagcccgaguggaccuacccccgccucuccugccccggcuccaccuuccagaaggcccuccucaucuccccccaccgcuucggcgagaccaagggcaacuccgccccccucaucauccgcgagcccuucaucgccugcggccccaccgagugcaagcacuucgcccucacccacuacgccgcccagcccggcggcuacuacaacggcacccgcgaggaccgcaacaagaugcgccaccucaucuccgucaagcucggcaagauccccaccgucgagaacuccaucuuccacauggccgccugguccggcuccgccugccacgacggcaaggaguggaccuacaucggcgucgacggccccgacuccaacgcccuccucaagaucaaguacggcgaggccuacaccgacaccuaccacuccuacgccaagaacauccuccgcacccaggaguccgccugcaacugcaucggcggcgacugcuaccucaugaucaccgacggccccgccuccggcaucuccgagugccgcuuccucaagauccgcgagggccgcaucaucaaggagaucuuccccaccggccgcgucaagcacaccgaggagugcaccugcggcuucgccuccaacaagaccaucgagugcgccugccgcgacaacuccuacaccgccaagcgccccuucgucaagcucaacgucgagaccgacaccgccgagauccgccucaugugcaccgagaccuaccucgacaccccccgccccaacgacggcuccaucaccggccccugcgaguccgacggcgacaagggcuccggcggcaucaagggcggcuucguccaccagcgcauggccuccaagaucggccgcugguacucccgcaccauguccaagaccaagcgcaugggcaugggccucuacgucaaguacgacggcgaccccuggaccgacuccgaggcccucgcccucuccggcgucauggucuccauggaggagcccggcugguacuccuucggcuucgagaucaaggacaagaagugcgacguccccugcaucggcaucgagaugguccacgacggcggcaagaccaccuggcacuccgccgccaccgccgucuacugccucaugggcuccggccagcuccucugggacaccgucaccggcgucgacauggcccucuga

SEQ ID NO: 124663 - RNA, 1401 nt, Artificial Sequence
  derived and/or modified CDS sequence (opt2) from neuraminidase__InfluenzaB__ABL76643
augcuccccuccaccauccagacccucacccucuuccucaccuccggcggcguccuccucucccucuacgucuccgccucccucuccuaccuccucuacuccgacauccuccucaaguucucccagaccgagaucaccgcccccaucaugccccucgacugcgccaacgccuccaacguccaggccgucaaccgcuccgccaccaagggcgucacccuccuccuccccgagcccgaguggaccuacccccgccucuccugccccggcuccaccuuccagaaggcccuccucaucuccccccaccgcuucggcgagaccaagggcaacuccgccccccucaucauccgcgagcccuucaucgccugcggccccaccgagugcaagcacuucgcccucacccacuacgccgcccagcccggcggcuacuacaacggcacccgcgaggaccgcaacaagcuccgccaccucaucuccgucaagcucggcaagauccccaccgucgagaacuccaucuuccacauggccgccugguccggcuccgccugccacgacggcaaggaguggaccuacaucggcgucgacggccccgacuccaacgcccuccucaagaucaaguacggcgaggccuacaccgacaccuaccacuccuacgccaagaacauccuccgcacccaggaguccgccugcaacugcaucggcggcgacugcuaccucaugaucaccgacggccccgccuccggcaucuccgagugccgcuuccucaagauccgcgagggccgcaucaucaaggagaucuuccccaccggccgcgucaagcacaccgaggagugcaccugcggcuucgccuccaacaagaccaucgagugcgccugccgcgacaacuccuacaccgccaagcgccccuucgucaagcucaacgucgagaccgacaccgccgagauccgccucaugugcaccgagaccuaccucgacaccccccgccccaacgacggcuccaucaccggccccugcgaguccgacggcgacaagggcuccggcggcaucaagggcggcuucguccaccagcgcauggccuccaagaucggccgcugguacucccgcaccauguccaagaccaagcgcaugggcaugggccucuacgucaaguacgacggcgaccccuggaccgacuccgaggcccucgcccucuccggcgucauggucuccauggaggagcccggcugguacuccuucggcuucgagaucaaggacaagaagugcgacguccccugcaucggcaucgagaugguccacgacggcggcaagaccaccuggcacuccgccgccaccgccaucuacugccucaugggcuccggccagcuccucugggacaccgucaccggcgucgacauggcccucuga

SEQ ID NO: 124664 - RNA, 1401 nt, Artificial Sequence
  derived and/or modified CDS sequence (opt2) from neuraminidase__InfluenzaB__ABL76654
augcuccccuccaccauccagacccucacccucuuccucaccuccggcggcguccuccucucccucuacgucuccgccucccucuccuaccuccucuacuccgacauccuccucaaguucucccagaccgagaucaccgcccccaucaugccccucgacugcgccaacgccuccaacguccaggccgucaaccgcuccaccaccaagggcgucacccuccuccuccccgagcccgaguggaccuacccccgccucuccugccccggcuccaccuuccagaaggcccuccucaucuccccccaccgcuucggcgagaccaagggcaacuccgccccccucaucauccgcgagcccuucaucgccugcggccccaccgagugcaagcacuucgcccucacccacuacgccgcccagcccggcggcuacuacaacggcacccgcgaggaccgcaacaagcuccgccaccucaucuccgucaagcucggcaagauccccaccgucgagaacuccaucuuccacauggccgccugguccggcuccgccugccacgacggcaaggaguggaccuacaucggcgucgacggccccgacuccaacgcccuccucaagaucaaguacggcgaggccuacaccgacaccuaccacuccuacgccaagaacauccuccgcacccaggaguccgccugcaacugcaucggcggcgacugcuaccucaugaucaccgacggccccgccuccggcaucuccgagugccgcuuccucaagauccgcgagggccgcaucaucaaggagaucuuccccaccggccgcgucaagcacaccgaggagugcaccugcggcuucgccuccaacaagaccaucgagugcgccugccgcgacaacuccuacaccgccaagcgccccuucgucaagcucaacgucgagaccgacaccgccgagauccgccucaugugcaccgagaccuaccucgacaccccccgccccaacgacggcuccaucaccggccccugcgaguccgacggcgacaagggcuccggcggcaucaagggcggcuucguccaccagcgcauggccuccaagaucggccgcugguacucccgcaccauguccaagaccaagcgcaugggcaugggccucuacgucaaguacgacggcgaccccuggaccgacuccgaggcccucgcccucuccggcgucauggucuccauggaggagcccggcugguacuccuucggcuucgagaucaaggacaagaagugcgacguccccugcaucggcaucgagaugguccacgacggcggcaagaccaccuggcacuccgccgccaccgccaucuacugccucaugggcuccggccagcuccucugggacaccgucaccggcgucgacauggcccucuga

SEQ ID NO: 124665 - RNA, 1401 nt, Artificial Sequence
  derived and/or modified CDS sequence (opt2) from neuraminidase__InfluenzaB__ABL76665
augcuccccuccaccauccagacccucacccucuuccucaccuccggcggcguccuccucucccucuacgucuccgccucccucuccuaccuccucuacuccgacauccuccucaaguucucccagaccgagaucaccgcccccaucaugccccucgacugcgccaacgccuccaacguccaggccgucaaccgcuccgccaccaagggcgucacccuccuccuccccgagcccgaguggaccuacccccgccucuccugccccggcuccaccuuccagaaggcccuccucaucuccccccaccgcuucggcgagaccaagggcaacuccgccccccucaucauccgcgagcccuucaucgccugcggccccaccgagugcaagcacuucgcccucacccacuacgccgcccagcccggcggcuacuacaacggcacccgcgaggaccgcaacaagcuccgccaccucaucuccgucaagcucggcaagauccccaccgucgagaacuccaucuuccacauggccgccugguccggcuccgccugccacgacggcaaggaguggaccuacaucggcgucgacggccccgacuccaacgcccuccucaagaucaaguacggcgaggccuacaccgacaccuaccacuccuacgccaagaacauccuccgcacccaggaguccgccugcaacugcaucggcggcgacugcuaccucaugaucaccgacggccccgccuccggcaucuccgagugccgcuuccucaagauccgcgagggccgcaucaucaaggagaucuuccccaccggccgcgucaagcacaccgaggagugcaccugcggcuucgccuccaacaagaccaucgagugcgccugccgcgacaacuccuacaccgccaagcgccccuucgucaagcucaacgucgagaccgacaccgccgagauccgccucaugugcaccgagaccuaccucgacaccccccgccccaacgacggcuccaucaccggccccugcgaguucgacggcgacaagggcuccggcggcaucaagggcggcuucguccaccagcgcauggccuccaagaucggccgcugguacucccgcaccauguccaagaccaagcgcaugggcaugggccucuacgucaaguacgacggcgaccccuggaccgacuccgaggcccucgcccucuccggcgucauggucuccauggaggagcccggcugguacuccuucggcuucgagaucaaggacaagaagugcgacguccccugcaucggcaucgagaugguccacgacggcggcaagaccaccuggcacuccgccgccaccgccaucuacugccucaugggcuccggccagcuccucugggacaccgucaccggcgucgacauggcccucuga

SEQ ID NO: 124666 - RNA, 1401 nt, Artificial Sequence
  derived and/or modified CDS sequence (opt2) from neuraminidase__InfluenzaB__ABL76676
augcuccccuccaccauccagacccucacccucuuccucaccuccggcggcguccuccucucccucuacgucuccgccucccucuccuaccuccucuacuccgacauccuccucaaguucucccagaccggcaucaccgcccccaucaugccccucgacugcgccaacgccuccaacguccaggccgucaaccgcuccgccaccaagggcgucacccuccuccuccccgagcccgaguggaccuacccccgccucuccugccccggcuccaccuuccagaaggcccuccucaucuccccccaccgcuucggcgagaccaagggcaacuccgccccccucaucauccgcgagcccuucaucgccugcggccccaaggagugcaagcacuucgcccucacccacuacgccgcccagcccggcggcuacuacaacggcacccgcgaggaccgcaacaagcuccgccaccucaucuccgucaagcucggcaagauccccaccgucgagaacuccaucuuccacauggccgccugguccggcuccgccugccacgacggccgcgaguggaccuacaucggcgucgacggccccgacuccaacgcccuccucaagaucaaguacggcgaggccuacaccgacaccuaccacuccuacgccaagaacauccuccgcacccaggaguccgccugcaacugcaucggcggcgacugcuaccucaugaucaccgacggccccgccuccggcaucuccgagugccgcuuccucaagauccgcgagggccgcaucaucaaggagaucuuccccaccggccgcgucaagcacaccgaggagugcaccugcggcuucgccuccaacaagaccaucgagugcgccugccgcgacaacuccuacaccgccaagcgccccuucgucaagcucaacgucgagaccgacaccgccgagauccgccucaugugcaccgagaccuaccucgacaccccccgccccaacgacggcuccaucaccggccccugcgaguccaacggcgacaagggcuccggcggcaucaagggcggcuucguccaccagcgcauggccuccaagaucggccgcugguacucccgcaccauguccaagaccaagcgcaugggcaugggccucuacgucaaguacgacggcgaccccuggaccgacuccgaggcccucgcccucuccggcgucauggucuccauggaggagcccggcugguacuccuucggcuucgagaucaaggacaagaagugcgacguccccugcaucggcaucgagaugguccacgacggcggcaagaccaccuggcacuccgccgccaccgccaucuacugccucaugggcuccggccagcuccucugggacaccgucaccggcgucgacauggcccucuga

SEQ ID NO: 124667 - RNA, 1401 nt, Artificial Sequence
  derived and/or modified CDS sequence (opt2) from neuraminidase__InfluenzaB__ABL76687
augcuccccuccaccauccagacccucacccucuuccucaccuccggcggcguccuccucucccucuacgucuccgccucccucuccuaccuccucuacuccgacauccuccucaaguucucccagaccgagaucaccgcccccaucaugccccucgacugcgccaacgccuccaacguccaggccgucaaccgcuccgccaccaagggcgucacccuccuccuccccgagcccgaguggaccuacccccgccucuccugccccggcuccaccuuccagaaggcccuccucaucuccccccaccgcuucggcgagaccaagggcaacuccgccccccucaucauccgcgagcccuucaucgccugcggccccaccgagugcaagcacuucgcccucacccacuacgccgcccagcccggcggcuacuacaacggcacccgcgaggaccgcaacaagcuccgccaccucaucuccgucaagcucggcaagauccccaccgucgagaacuccaucuuccacauggccgccugguccggcuccgccugccacgacggcaaggaguggaccuacaucggcgucgacggccccgacuccaacgcccuccucaagaucaaguacggcgaggccuacaccgacaccuaccacuccuacgccaagaacauccuccgcacccaggaguccgccugcaacugcaucggcggcgacugcuaccucaugaucaccgacggccccgccuccggcaucuccgagugccgcuuccucaagauccgcgagggccgcaucaucaaggagaucuuccccaccggccgcgucaagcacaccgaggagugcaccugcggcuucgccuccaacaagaccaucgagugcgccugccgcgacaacuccuacaccgccaagcgccccuucgucaagcucaacgucgagaccgacaccgccgagauccgccucaugugcaccgagaccuaccucgacaccccccgccccaacgacggcuccaucaccggccccugcgaguucgacggcgacaagggcuccggcggcaucaagggcggcuucguccaccagcgcauggccuccaagaucggccgcugguacucccgcaccauguccaagaccaagcgcaugggcaugggccucuacgucaaguacgacggcgaccccuggaccgacuccgaggcccucgcccucuccggcgucaugguccccauggaggagcccggcugguacuccuucggcuucgagaucaaggacaagaagugcgacguccccugcaucggcaucgagaugguccacgacggcggcaagaccaccuggcacuccgccgccaccgccaucuacugccucaugggcuccggccagcuccucugggacaccgucaccggcgucgacauggcccucuga

SEQ ID NO: 124668 - RNA, 1401 nt, Artificial Sequence
  derived and/or modified CDS sequence (opt2) from neuraminidase__InfluenzaB__ABL76698
augcuccccuccaccauccagacccucacccucuuccucaccuccggcggcguccuccucucccucuacgucuccgccucccucuccuaccuccucuacuccgacauccuccucaaguucucccccaccgagaucaccgcccccaccaugccccucgacugcgccaacgccuccaacguccaggccgucaaccgcuccgccaccaagggcaugacccuccuccuccccgagcccgaguggaccuacccccgccucuccugccccggcuccaccuuccagaaggcccuccucaucuccccccaccgcuucggcgagacccgcggcaacuccgccccccucaccauccgcgagcccuucaucgccugcggccccaaggagugcaagcacuucgcccucacccacuacgccgcccagcccggcggcuacuacaacggcacccgcgaggaccgcaacaagcuccgccaccucaucuccgucaagcucggcaagauccccaccgucgagaacuccaucuuccacauggccgccugguccggcuccgccugccacgacggccgcgaguggaccuacaucggcgucgacggccccgacuccaacgcccucaucaagaucaaguacggcgaggccuacaccgacaccuaccacuccuacgccaacaacauccuccgcacccaggaguccgccugcaacugcaucggcggcgacugcuaccucaugaucaccgacggcuccgccuccggcaucuccaagugccgcuuccucaagauccgcgagggccgcaucaucaaggagaucuuccccaccggccgcgucgagcacaccgaggagugcaccugcggcuucgccuccaacaagaccaucgagugcgccugccgcgacaacuccuacaccgccaagcgccccuucgucaagcucaacgucgagaccgacaccgccgagauccgccucaugugcaccgagaccuaccucgacaccccccgccccgacgacggcuccaucaccggccccugcgaguccaacggcgacaagggccgcggcggcaucaagggcggcuucguccaccagcgcauggccuccaagaucggccgcugguacucccgcaccauguccaagaccgagcgcaugggcauggagcucuacgucaaguacgacggcgaccccuggaccgacuccgaggcccucgcccccuccggcgucauggucuccauggaggagcccggcugguacuccuucggcuucgagaucaaggacaagaagugcgacguccccugcaucggcaucgagaugguccacgacggcggcaagaagaccuggcacuccgccgccaccgccaucuacugccucaugggcuccggccagcuccucugggacaccgucaccggcgucgacauggcccucuga

SEQ ID NO: 124669 - RNA, 1401 nt, Artificial Sequence
  derived and/or modified CDS sequence (opt2) from neuraminidase__InfluenzaB__ABL76720
augcuccccuccaccauccagacccucacccucuuccucaccuccggcggcguccuccucucccucuacgucuccgccucccucuccuaccuccucuacuccgacauccuccucaaguucucccccaccgagaucaccgcccccaccaugccccucgacugcgccaacgccuccaacguccaggccgucaaccgcuccgccaccaagggcgucacccuccuccuccccgagcccgaguggaccuacccccgccucuccugccccggcuccaccuuccagaaggcccuccucaucuccccccaccgcuucggcgagaccaagggcaacuccgccccccucaucauccgcgagcccuucaucgccugcggccccaacgagugcaagcacuucgcccucacccacuacgccgcccagcccggcggcuacuacaacggcacccgcggcgaccgcaacaagcuccgccaccucaucuccgucaagcucggcaagauccccaccgucgagaacuccaucuuccacauggccgccugguccggcuccgccugccacgacggcaaggaguggaccuacaucggcgucgacggccccgacaacaacgcccuccucaagaucaaguacggcgaggccuacaccgacaccuaccacuccuacgccaacaagauccuccgcacccaggaguccgccugcaacugcaucggcggcaacugcuaccucaugaucaccgacggcuccgccuccggcgucuccgagugccgcuuccucaagauccgcgagggccgcaucaucaaggagaucuuccccaccggccgcgucaagcacaccgaggagugcaccugcggcuucgccuccaacaagaccaucgagugcgccugccgcgacaacuccuacaccgccaagcgccccuucgucaagcucaacgucgagaccgacaccgccgagauccgccucaugugcaccgacaccuaccucgacaccccccgccccgacgacggcuccaucaccggccccugcgaguccaacggcgacaagggcuccggcggcaucaagggcggcuucguccaccagcgcauggccuccaagaucggccgcugguacucccgcaccauguccaagaccgagcgcaugggcaugggccucuacgucaaguacgacggcgaccccugggccgacuccgacgcccucgccuucuccggcgucauggucuccaugaaggagcccggcugguacuccuucggcuucgagaucaaggacaagaagugcgacguccccugcaucggcaucgagaugguccacgacggcggcaaggagaccuggcgcuccgccgccaccgccaucuacugccucaugggcuccggccagcuccucugggacaccgucaccggcgucgacauggcccucuga

SEQ ID NO: 124670 - RNA, 1401 nt, Artificial Sequence
  derived and/or modified CDS sequence (opt2) from neuraminidase__InfluenzaB__ABL76731
augcuccccuccaccauccagacccucacccucuuccucaccuccggcggcguccuccucucccucuacgucuccgccucccucuccuaccuccucuacuccgacauccuccucaaguucucccccaccgagaucaccgcccccaccaugccccucgacugcgccaacgccuccaacguccacgccgucaaccgcuccgccaccaagggcgucacccuccuccuccccgagcccgaguggaccuacccccgccucuccugccccggcuccaccuuccagaaggcccuccucaucuccccccaccgcuucggcgagaccaagggcaacuccgccccccucaucauccgcgagcccuucaucgccugcggccccaacgagugcaagcacuucgccaucacccacuacgccgcccagcccggcggcuacuacaacggcacccgcggcgaccgcaacaagcuccgccaccucaucuccgucaagcucggcaagauccccaccgucgagaacuccaucuuccacauggccgccugguccggcuccgccugccacgacggcaaggaguggaccuacaucggcgucgacggccccgacaacaacgcccuccucaagaucaaguacggcgaggccuacaccgacaccuaccacuccuacgccaacaacauccuccgcacccaggaguccgccugcaacugcaucggcggcaacugcuaccucaugaucaccgacggcuccgccuccggcgucuccgagugccgcuuccucaagauccgcgagggccgcaucaucaaggagaucuuccccaccggccgcgucaagcacaccgaggagugcaccugcggcuucgccuccaacaagaccaucgagugcgccugccgcgacaacuccuacaccgccaagcgccccuucgucaagcucaacgucgagaccgacaccgccgagauccgccucaugugcaccgacaccuaccucgacaccccccgccccgacgacggcuccaucaccggccccugcgaguccaacggcgacaagggcuccggcggcaucaagggcggcuucguccaccagcgcauggccuccaagaucggccgcugguacucccgcaccauguccaagaccgagcgcaugggcaugggccucuacgucaaguacgacggcgaccccugggccgacuccgacgcccucgccuucuccggcgucauggucuccaugaaggagcccggcugguacuccuucggcuucgagaucaaggacaagaagugcgacguccccugcaucggcaucgagaugguccacgacggcggcaaggagaccuggcacuccgccgccaccgccaucuacugccucaugggcuccggccagcuccucugggacaccgucaccggcgucgacauggcccucuga

SEQ ID NO: 124671 - RNA, 1401 nt, Artificial Sequence
  derived and/or modified CDS sequence (opt2) from neuraminidase__InfluenzaB__ABL76742
augcuccccuccaccauccagacccucacccucuuccucaccuccggcggcguccuccucucccucuacgucuccgccucccucuccuaccuccucuacuccgacauccuccucaaguucucccccaccgagaucaccgcccccaccaugccccucgacugcgccaacgccuccaacguccaggccgucaaccgcuccgccaccaagggcgucacccuccuccuccccgagcccgaguggaccuacccccgccucuccugccccggcuccaccuuccagaaggcccuccucaucuccccccaccgcuucggcgagaccaagggcaacuccgccccccucaucauccgcgagcccuucaucgccugcggccccaacgagugcaagcacuucgcccucacccacuacgccgcccagcccggcggcuacuacaacggcacccgcggcgaccgcaacaagcuccgccaccucaucuccgucaagcucggcaagauccccaccgucgagaacuccaucuuccacauggccgccugguccggcuccgccugccacgacggcaaggaguggaccuacaucggcgucgacggccccgacaacaacgcccuccucaagaucaaguacggcgaggccuacaccgacaccuaccacuccuacgccaacaagauccuccgcacccaggaguccgccugcaacugcaucggcggcaacugcuaccucaugaucaccgacggcuccgccuccggcgucuccgagugccgcuuccucaagauccgcgagggccgcaucaucaaggagaucuuccccaccggccgcgucaagcacaccgaggagugcaccugcggcuucgccuccaacaagaccaucgagugcgccugccgcgacaacuccuacaccgccaagcgccccuucgucaagcucaacgucgagaccgacaccgccgagauccgccucaugugcaccgacaccuaccucgacaccccccgccccgacgacggcuccaucaccggccccugcgaguccaacggcgacaagggcuccggcggcaucaagggcggcuucguccaccagcgcauggccuccaagaucggccgcugguacucccgcaccauguccaagaccgagcgcaugggcaugggccucuacgucaaguacgacggcgaccccugggccgacuccgacgcccucgccuucuccggcgucauggucuccaugaaggagcccggcugguacuccuucggcuucgagaucaaggacaagaagugcgacguccccugcaucggcaucgagaugguccacgacggcggcaaggagaccuggcacuccgccgccaccgccaucuacugccucaugggcuccggccagcuccucugggacaccgucaccggcgucgacauggcccucuga

SEQ ID NO: 124672 - RNA, 1401 nt, Artificial Sequence
  derived and/or modified CDS sequence (opt2) from neuraminidase__InfluenzaB__ABL76753
augcuccccuccaccauccagacccucacccucuuccucaccuccggcggcguccuccucucccucuacgucuccgccucccucuccuaccuccucuacuccgacauccuccucaaguucucccagaccgagaucaccgcccccaucaugccccucgacugcgccaacgccuccaacguccaggccgucaaccgcuccgccaccaagggcgucacccuccuccuccccgagcccgaguggaccuacccccgccucuccugccccggcuccaccuuccagaaggcccuccucaucuccccccaccgcuucggcgagaccaccggcaacuccgccccccucaucauccgcgagcccuucaucgccugcggccccaaggagugcaagcacuucgcccucacccacuacgccgcccagcccggcggcuacuacaacggcacccgcgaggaccgcaacaagcuccgccaccucaucuccgucaagcucggcaagauccccaccgucgagaacuccaucuuccacauggccgccugguccggcuccgccugccacgacggccgcgaguggaccuacaucggcgucgacggccccgacaacaacgcccuccucaagaucaaguacggcgaggccuacaccgacaccuaccacuccuacgccaagaacauccuccgcacccaggaguccgccugcaacugcaucggcggcgacugcuaccucaugaucaccgacggccccgccuccggcaucuccgagugccgcuuccucaagauccgcgagggccgcaucaucaaggagaucuuccccaccggccgcgucaagcacaccgaggagugcaccugcggcuucgccuccaacaagaccaucgagugcgccugccgcgacaacuccuacaccgccaagcgccccuucgucaagcucaacgucgagaccgacaccgccgagauccgccucaugugcaccgagaccuaccucgacaccccccgccccaacgacggcuccaucaccggccccugcgaguccaacggcgacaagggcuccggcggcaucaagggcggcuucguccaccagcgcauggccuccaagaucggccgcugguacucccgcaccauguccaagaccaagcgcaugggcaugggccucuacgucaaguacgacggcgaccccuggaccgacuccgaggcccucgcccucuccggcgucauggucuccauggaggagcccggcugguacuccuucggcuucgagaucaaggacaagaagugcgacguccccugcaucggcaucgagaugguccacgacggcggcaagaccaccuggcacuccgccgccaccgccaucuacugccucaugggcuccggccagcuccucugggacaccgucaccggcgucgacauggcccucuga

SEQ ID NO: 124673 - RNA, 1401 nt, Artificial Sequence; identical to SEQ ID NO: 124642
  derived and/or modified CDS sequence (opt2) from neuraminidase__InfluenzaB__ABL76764

SEQ ID NO: 124674 - RNA, 1401 nt, Artificial Sequence; identical to SEQ ID NO: 124642
  derived and/or modified CDS sequence (opt2) from neuraminidase__InfluenzaB__ABL76775

SEQ ID NO: 124675 - RNA, 1401 nt, Artificial Sequence
  derived and/or modified CDS sequence (opt2) from neuraminidase__InfluenzaB__ABL76797
augcuccccuccaccauccagacccucacccucuuccucaccuccggcggcguccuccucucccucuacgucuccgccucccucuccuaccuccucuacuccgacauccuccucaaguucucccccaccgagaucaccgcccccaccaugccccucgacugcgccaacgccuccaacguccaggccgucaaccgcuccgccaccaagggcgucacccuccuccuccccgagcccgaguggaccuacccccgccucuccugccccggcuccaccuuccagaaggcccuccucaucuccccccaccgcuucggcgagaccaagggcaacuccgccccccucaucauccgcgagcccuucaucgccugcggccccaaggagugcaagcacuucgcccucacccacuacgccgcccagcccggcggcuacuacaacggcacccgcgaggaccgcaacaagcuccgccaccucaucuccgucaagcucggcaagauccccaccgucgagaacuccaucuuccacauggccgccugguccggcuccgccugccacgacggcaaggaguggaccuacaucggcgucgacggccccgacuccaacgcccuccucaagaucaaguacggcgaggccuacaccgacaccuaccacuccuacgccaacaacauccuccgcacccaggaguccgccugcaacugcaucggcggcaacugcuaccucaugaucaccgacggcuccgccuccggcaucuccgagugccgcuuccucaagauccgcgagggccgcaucaucaaggagaucuuccccaccggccgcgucgagcacaccgaggagugcaccugcggcuucgccuccaacaagaccaucgagugcgccugccgcgacaacuccuacaccgccaagcgccccuucgucaagcucaacgucgagaccgacaccgccgagauccgccucaugugcaccgagaccuaccucgacaccccccgccccgacgacggcuccaucaccggccccugcgaguccaacggcgacaagggcuccggcggcaucaagggcggcuucguccaccagcgcauggccuccaagaucggccgcugguacucccgcaccauguccaagaccaagcgcaugggcaugggccucuacgucaaguacgacggcgaccccuggaccgacuccgacgcccucgcccucuccggcgucauggucuccauggaggagcccggcugguacuccuucggcuucgagaucaaggacaagaagugcgacguccccugcaucggcaucgagaugguccacgacggcggcaaggagaccuggcacuccgccgccaccgccaucuacugccucaugggcuccggccagcuccucugggacaccgucaccggcgucaacauggcccucuga

SEQ ID NO: 124676 - RNA, 1401 nt, Artificial Sequence
  derived and/or modified CDS sequence (opt2) from neuraminidase__InfluenzaB__ABL76819
augcuccccuccaccauccagacccucacccucuuccucaccuccggcggcguccuccucucccucuacgucuccgccucccucuccuaccuccucuacuccgacauccuccucaaguucucccccaccgagaucaccgcccccaccaugccccucgacugcgccaacgccuccaacguccaggccgucaaccgcuccgccaccaagggcgucacccuccuccuccccgagcccgaguggaccuacccccgccucuccugccccggcuccaccuuccagaaggcccuccucaucuccccccaccgcuucggcgagaccaagggcaacuccgccccccucaucauccgcgagcccuucaucgccugcggccccaaggagugcaagcacuucgcccucacccacuacgccgcccagcccggcggcuacuacaacggcacccgcgaggaccgcaacaagcuccgccaccucaucuccgucaagcucggcaagauccccaccgucgagaacuccaucuuccacauggccgccugguccggcuccgccugccacgacggcaaggaguggaccuacaucggcgucgacggccccgacuccaacgcccuccucaagaucaaguacggcgaggccuacaccgacaccuaccacuccuacgccaacaacauccuccgcacccaggaguccgccugcaacugcaucggcggcaacugcuaccucaugaucaccgacggcuccgccuccggcaucuccgagugccgcuuccucaagauccgcgagggccgcaucaucaaggagaucuuccccaccggccgcgucaagcacaccgaggagugcaccugcggcuucgccuccaacaagaccaucgagugcgccugccgcgacaacuccuacaccgccaagcgccccuucgucaagcucaacgucgagaccgacaccgccgagauccgccucaugugcaccgagaccuaccucgacaccccccgccccgacgacggcuccaucaccggccccugcgaguccaacggcgacaagggcuccggcggcaucaagggcggcuucguccaccagcgcauggccuccaagaucggccgcugguacucccgcaccauguccaagaccaagcgcaugggcaugggccucuacgucaaguacgacggcgaccccuggaccgacuccgacgcccucgcccucuccggcgucauggucuccauggaggagcccggcugguacuccuucggcuucgagaucaaggacaagaagugcgacguccccugcaucggcaucgagaugguccacgacggcggcaaggagaccuggcacuccgccgccaccgccaucuacugccucaugggcuccggccagcuccucugggacaccgucaccggcgucgacauggcccucuga

SEQ ID NO: 124677 - RNA, 1401 nt, Artificial Sequence
  derived and/or modified CDS sequence (opt2) from neuraminidase__InfluenzaB__ABL76830
augcuccccuccaccauccagacccucacccucuuccucaccuccggcggcguccuccucucccucuacgucuccgccucccucuccuaccuccucuacuccgacauccuccucaaguucucccccaccaagaucaccgcccccaccaugccccucgacugcgccaacgccuccaacguccaggccgucaaccgcuccgccaccaagggcgucacccuccuccuccccgagcccgaguggaccuacccccgccucuccugccccggcuccaccuuccagaaggcccuccucaucuccccccaccgcuucggcgagaccaagggcaacuccgccccccucaucauccgcgagcccuucaucgccugcggccccaaggagugcaagcacuucgcccucacccacuacgccgcccagcccggcggcuacuacaacggcacccgcggcgaccgcaacaagcuccgccaccucaucuccgucaagcucggcaagauccccaccgucgagaacuccaucuuccacauggccgccugguccggcuccgccugccacgacggcaaggaguggaccuacaucggcgucgacggccccgacaacaacgcccuccucaagaucaaguacggcgaggccuacaccgacaccuaccacuccuacgccaacaacauccuccgcacccaggaguccgccugcaacugcaucggcggcaacugcuaccucaugaucaccgacggcuccgccuccggcgucuccgagugccgcuuccucaagauccgcgagggccgcaucaucaaggagaucuuccccaccggccgcgucaagcacaccgaggagugcaccugcggcuucgccuccaacaagaccaucgagugcgccugccgcgacaacuccuacaccgccaagcgccccuucgucaagcucaacgucgagaccgacaccgccgagauccgccucaugugcaccaagaccuaccucgacaccccccgccccgacgacggcuccaucaccggccccugcgaguccaacggcgacaagggcuccggcggcaucaagggcggcuucguccaccagcgcauggccuccaagaucggccgcugguacucccgcaccauguccaagaccaagcgcaugggcaugggccucuacgucaaguacgacggcgaccccugggccgacuccgacgcccucgcccucuccggcgucauggucuccauggaggagcccggcugguacuccuucggcuucgagaucaaggacaagaagugcgacguccccugcaucggcaucgagaugguccacgacggcggcaaggagaccuggcacuccgccgccaccgccaucuacugccucaugggcuccggccagcuccucugggacaccgucaccggcgucgacauggcccucuga

SEQ ID NO: 124678 - RNA, 1401 nt, Artificial Sequence
  derived and/or modified CDS sequence (opt2) from neuraminidase__InfluenzaB__ABL76852
augcuccccuccaccauccagacccucacccucuuccucaccuccggcggcguccuccucucccucuacgucuccgccucccucuccuaccuccucuacuccgacauccuccucaaguucucccccaccgagaucaccgcccccaccaugccccucgacugcgccaacgccuccaacguccaggccgucaaccgcuccgccaccaagggcgucacccuccuccuccccgagcccgaguggaccuacccccgccucuccugccccggcuccaccuuccagaaggcccuccucaucuccccccaccgcuucggcgagaccaagggcaacuccgccccccucaucauccgcgagcccuucaucgccugcggccccaaggagugcaagcacuucgcccucacccacuacgccgcccagcccggcggcuacuacaacggcacccgcgaggaccgcaacaagcuccgccaccucaucuccgucaagcucggcaagauccccaccgucgagaacuccaucuuccacauggccgccugguccggcuccgccugccacgacggcaaggaguggaccuacaucggcgucgacggccccgacuccaacgcccuccucaagaucaaguacggcgaggccuacaccgacaccuaccacuccuacgccaacaacauccuccgcacccaggaguccgccugcaacugcaucggcggcaacugcuaccucaugaucaccgacggcuccgccuccggcaucuccgagugccgcuuccucaagauccgcgagggccgcaucaucaaggagaucuuccccaccggccgcgucaagcacaccgaggagugcaccugcggcuucgccuccaacaagaccaucgagugcgccugccgcgacaacuccuacaccgccaagcgccccuucgucaagcucaacgucgagaccgacaccgccgagauccgccucaugugcaccgagaccuaccucgacaccccccgccccgacgacggcuccaucaccggccccugcgaguccaacggcgacaagggcuccggcggcaucaagggcggcuucguccaccagcgcauggaguccaagaucggccgcugguacucccgcaccauguccaagaccaagcgcaugggcaugggccucuacgucaaguacgacggcgaccccuggaccgacuccgacgcccucgcccucuccggcgucauggucuccaucgaggagcccggcugguacuccuucggcuucgagaucaaggacaagaagugcgacguccccugcaucggcaucgagaugguccacgacggcggcaaggagaccuggcacuccgccgccaccgccaucuacugccucaugggcuccggccagcuccucugggacaccgucaccggcgucgacauggcccucuga

SEQ ID NO: 124679 - RNA, 1401 nt, Artificial Sequence
  derived and/or modified CDS sequence (opt2) from neuraminidase__InfluenzaB__ABL76863
augcuccccuccaccauccagacccucacccucuuccucaccuccggcggcguccuccucucccucuacgucuccgccucccucuccuaccuccucuacuccgacauccuccucaaguucucccccaccgagaucaccgcccccaccaugccccucgacugcgccaacgccuccaacguccaggccgucaaccgcuccgccaccaagggcgucacccuccuccuccccgagcccgaguggaccuacccccgccucuccugccccggcuccaccuuccagaaggcccuccucaucuccccccaccgcuucggcgagaccaagggcaacuccgccccccucaucauccgcgagcccuucaucgccugcggccccaaggagugcaagcacuucgcccucacccacuacgccgcccagcccggcggcuacuacaacggcacccgcgaggaccgcaacaagcuccgccaccucaucuccgucaagcucggcaagauccccaccgucgagaacuccaucuuccacauggccgccugguccggcuccgccugccacgacggcaaggaguggaccuacaucggcgucgacggccccgacuccaacgcccuccucaagaucaaguacggcgaggccuacaccgacaccuaccacuccuacgccaacaacauccuccgcacccaggaguccgccugcaacugcaucggcggcaacugcuaccucaugaucaccgacggcuccgccuccggcaucuccgagugccgcuuccucaagauccgcgagggccgcaucaucaaggagaucuuccccaccggccgcgucaagcacaccgaggagugcaccugcggcuucgccuccaacaagaccaucgagugcgccugccgcgacaacuccuacaccgccaagcgccccuucgucaagcucaacgucgagaccgacaccgccgagauccgccucaugugcaccgagaccuaccucgacaccccccgccccgacgacggcuccaucaccggccccugcgaguccaacggcgacaagggcuccggcggcaucaagggcggcuucguccaccagcgcauggccuccaagaucggccgcugguacucccgcaccauguccaagaccaagcgcaugggcaugggccucuacgucaaguacgacggcgaccccuggaccgacuccgacgcccucgcccucuccggcgucauggucuccauggaggagcccggcugguacuccuucggcuucgagaucaaggacaagaagugcgacguccccugcaucggcaucgagaugguccacgacggcggcaaggagaccuggcacuccgccgccaccgccaucuacugccucaugggcuccggccagcuccucugggacaccgucaccggcgucgacauggccauguga

SEQ ID NO: 124680 - RNA, 1401 nt, Artificial Sequence
  derived and/or modified CDS sequence (opt2) from neuraminidase__InfluenzaB__ABL76874
augcuccccuccaccauccagacccucacccucuuccucaccuccggcggcguccuccucucccucuacgucuccgccucccucuccuaccuccucuacuccgacauccuccucaaguucucccccaccgagaucaccgcccccaccaugccccucgacugcgccaacgccuccaacguccaggccgucaacuccuccgccaccaagggcgucacccuccuccuccccgagcccgaguggaccuacccccgccucuccugccccggcuccaccuuccagaaggcccuccucaucuccccccaccgcuucggcgagaccaagggcaacuccgccccccucaucauccgcgagcccuucaucgccugcggccccaaggagugcaagcacuucgcccucacccacuacgccgcccagcccggcggcuacuacaacggcacccgcggcgaccgcaacaagcuccgccaccucaucuccgucaagcucggcaagauccccaccgucgagaacuccaucuuccacauggccgccugguccggcuccgccugccacgacggcaaggaguggaccuacaucggcgucgacggccccgacuccaacgcccuccucaagaucaaguacggcgaggccuacaccgacaccuaccacuccuacgccaacaacauccuccgcacccaggaguccgccugcaacugcaucggcggcaacugcuaccucaugaucaccgacggcuccgccuccggcaucuccgagugccgcuuccucaagauccgcgagggccgcaucaucaaggagaucuuccccaccggccgcgucaagcacaccgaggagugcaccugcggcuucgccuccaacaagaccaucgagugcgccugccgcgacaacuccuacaccgccaagcgccccuucgucaagcucaacgucgagaccgacaccgccgagaucaagcucaugugcaccgagaccuaccucgacaccccccgccccgacgacggcuccaucaccggccccugcgaguccaacggcgacaagggcuccggcggcaucaagggcggcuucguccaccagcgcauggccuccaagaucggccgcugguacucccgcaccauguccaagaccaagcgcaugggcaugggccucuacgucaaguacgacggcgaccccuggaccgacuccgacgcccucgcccucuccggcgucauggucuccauggaggagcccggcugguacuccuucggcuucgagaucaaggacaagaagugcgacguccccugcaucggcaucgagaugguccacgacggcggcaaggagaccuggcacuccgccgccaccgccaucuacugccucaugggcuccggccagcuccucugggacaccgucaccggcgucgacauggcccucuga

SEQ ID NO: 124681 - RNA, 1401 nt, Artificial Sequence
  derived and/or modified CDS sequence (opt2) from neuraminidase__InfluenzaB__ABL76885
augcuccccuccaccauccagacccucacccucuuccucaccuccggcggcguccuccucucccucuacgucuccgccucccucuccuaccuccucuacuccgacauccuccucaaguucucccagaccgagaucaccgcccccaccaugccccucgacuacgccaacgccuccaacguccaggccgucaaccgcuccgccaccaagggcgucacccuccuccuccccgagcccgaguggaccuacccccgccucuccugccccggcuccaccuuccagaaggcccuccucaucuccccccaccgcuucggcgagaccaagggcaacuccgccccccucaucauccgcgagcccuucaucgccugcggccccaaggagugcaagcacuucgcccucacccacuacgccgcccagcccggcggcuacuacaacggcacccgcgaggaccgcaacaagcuccgccaccucaucuccgucaagcucggcaagauccccaccgucgagaacuccaucuuccacauggccgccugguccggcuccgccugccacgacggccgcgaguggaccuacaucggcgucgacggccccgacuccaacgcccuccucaagaucaaguacggcgaggccuacaccgacaccuaccacuccuacgccaagaacauccuccgcacccaggaguccgccugcaacugcaucggcggcgacugcuaccucaugaucaccgacggcuccgccuccggcaucuccgagugccgcuuccucaagauccgcgagggccgcaucaucaaggagaucuuccccaccggccgcgucaagcacaccgaggagugcaccugcggcuucgccuccaacaagaccaucgagugcgccugccgcgacaacuccuacaccgccaagcgccccuucgucaagcucaacgucgagaccgacaccgccgagauccgccucaugugcaccgagaccuaccucgacaccccccgccccgacgacggcuccaucaccggccccugcgaguccaacggcgacaagggcuccggcggcaucaagggcggcuucguccaccagcgcauggccuccaagaucggccgcugguacucccgcaccauguccaagaccaagcgcaugggcaugggccucuacgucaaguacgacggcgaccccuggaccgacuccgaggcccucgcccucuccggcgucauggucuccauggaggagcccggcugguacuccuucggcuucgagaucaaggacaagaagugcgacguccccugcaucggcaucgagaugguccacgacggcggcaagaccaccuggcacuccgccgccaccgccaucuacugccucaugggcuccggccagcuccucugggacaccgucaccggcgucgacauggcccucuga

SEQ ID NO: 124682 - RNA, 1401 nt, Artificial Sequence
  derived and/or modified CDS sequence (opt2) from neuraminidase__InfluenzaB__ABL76896
augcuccccuccaccauccagacccucacccucuuccucaccuccggcggcguccuccucucccucuacgucuccgccucccucuccuaccuccucuacuccgacauccuccucaaguucucccagaccgagaucaccgcccccaccaugccccucgacugcgccaacgccuccaacguccaggccgucaaccgcuccgccaccaagggcgucacccuccuccuccccgagcccgaguggauguacccccgccucuccugccccggcuccaccuuccagaaggcccuccucaucuccccccaccgcuucggcgagaccaagggcaacuccgccccccucaucauccgcgagcccuucaucgccugcggccccaaggagugcaagcacuucgcccucacccacuacgccgcccagcccggcggcuacuacaacggcacccgcgaggaccgcaacaagcuccgccaccucaucuccgucaagcucggcaagauccccaccgucgagaacuccaucuuccacauggccgccugguccggcuccgccugccacgacggccgcgaguggaccuacaucggcgucgacggccccgacuccaacgcccuccucaagaucaaguacggcgaggccuacaccgacaccuaccacuccuacgccaagaacauccuccgcacccaggaguccgccugcaacugcaucggcggcgacugcuaccucaugaucaccgacggcuccgccuccggcaucuccgagugccgcuuccucaagauccgcgagggccgcaucaucaaggagaucuuccccaccggccgcgucaagcacaccgaggagugcaccugcggcuucgccuccaacaagaccaucgagugcgccugccgcgacaacuccuacaccgccaagcgccccuucgucaagcucaacgucgagaccgacaccgccgagauccgccucaugugcaccgagaccuaccucgacaccccccgccccgacgacggcuccaucaccggccccugcgaguccaacggcgacaagggcuccggcggcaucaagggcggcuucguccaccagcgcauggccuccaagaucggccgcugguacucccgcaccauguccaagaccaagcgcaugggcaugggccucuacgucaaguacgacggcgaccccuggaccgacuccgaggcccucgcccucuccggcgucauggucuccauggaggagcccggcugguacuccuucggcuucgagaucaaggacaagaagugcgacguccccugcaucggcaucgagaugguccacgacggcggcaagaccaccuggcacuccgccgccaccgccaucuacugccucaugggcuccggccagcuccucugggacgccgucaccggcgucgacauggcccucuga

SEQ ID NO: 124683 - RNA, 1401 nt, Artificial Sequence
  derived and/or modified CDS sequence (opt2) from neuraminidase__InfluenzaB__ABL76918
augcuccccuccaccauccagacccucacccucuuccucaccuccggcggcguccuccucucccucuacgucuccgccucccucuccuaccuccucuacuccgacauccuccucaaguucucccccaccgagaucaccgcccccaccaugccccucgacugcgccaacgccuccaacguccaggccgucaaccgcuccgccaccaagggcgucacccuccuccuccccgagcccgaguggaccuacccccgccucuccugccccggcuccaccuuccagaaggcccuccucaucuccccccaccgcuucggcgagaccaagggcaacuccgccccccucaucauccgcgagcccuucaucgccugcggccccaacgagugcaagcacuucgcccucacccacuacgccgcccagcccggcggcuacuacaacggcacccgcggcgaccgcaacaagcuccgccaccucaucuccgucaagcucggcaagauccccaccgucgagaacuccaucuuccacauggccgccugguccggcuccgccugccacgacggcaaggaguggaccuacaucggcgucgacggccccgacaacaacgcccuccucaagaucaaguacggcgaggccuacaccgacaccuaccacuccuacgccaacaacauccuccgcacccaggaguccgccugcaacugcaucggcggcaacugcuaccucaugaucaccgacggcuccgccuccggcgucuccgagugccgcuuccucaagauccgcgagggccgcaucaucaaggagaucuuccccaccggccgcgucaagcacaccgaggagugcaccugcggcuucgccuccaacaagaccaucgagugcgccugccgcgacaacuccuacaccgccaagcgccccuucgucaagcucaacgucgagaccgacaccgccgagauccgccucaugugcaccgagaccuaccucgacaccccccgccccgacgacggcuccaucaccggccccugcgaguccaacggcgacaagggcuccggcggcaucaagggcggcuucguccaccagcgcauggccuccaagaucggccgcugguacucccgcaccauguccaagaccgagcgcaugggcaugggccucuacgucaaguacgacggcgaccccugggccgacuccgacgcccucgcccucaucggcgucauggucuccauggaggagcccggcugguacuccuucggcuucgagaucaaggacaagaagugcgacguccccugcaucggcaucgagaugguccacgacggcggcaaggagaccuggcacuccgccgccaccgccaucuacugccucaugggcuccggccagcuccucugggacaccgucaccggcgucaacauggcccucuga

SEQ ID NO: 124684 - RNA, 1401 nt, Artificial Sequence
  derived and/or modified CDS sequence (opt2) from neuraminidase__InfluenzaB__ABL76962
augcuccccuccaccauccagacccucacccucuuccucaccuccggcggcguccuccucucccucuacgucuccgcccuccucuccuaccuccucuacuccgacauccuccucaaguucucccccaccaagaucaucgcccccaccaugucccucgacugcgccaacgccuccaacguccaggccgucaaccacuccgccaccgaggagaugaccuuccuccuccccgagcccgaguggaccuacccccgccucuccugccagggcuccaccuuccagaaggcccuccucaucuccccccaccgcuucggcgaggccaagggcaacuccgccccccucaucauccgcgagcccuucaucgccugcggccccaaggagugcaagcacuucgcccucacccacuacgccgcccagcccggcggcuacuacaacggcacccgcgaggaccgcaacaagcuccgccaccucaucuccgucaaccucggcaagauccccaccgucgagaacuccaucuuccacauggccgccugguccggcuccgccugccacgacggccgcgaguggaccuacaucggcgucgacggccccgacuccaacgcccucaucaagaucaaguacggcgaggccuacaccgacaccuaccacuccuacgccaacaacauccuccgcacccaggaguccgccugcaacugcaucggcggcgacugcuaccucaugaucaccgacggcuccgccuccggcaucuccaagugccgcuuccucaagauccgcgagggccgcaucaucaaggagaucuuccccaccggccgcgucgagcacaccgaggagugcaccugcggcuucgccuccaacaagaccaucgagugcgccugccgcgacaacuccuacaccgccaagcgccccuucgucaagcucaacgucgagaccgacaccgccgagauccgccucaugugcaccgagaccuaccucgacaccccccgccccgacgacggcuccaucaccggccccugcgaguccaacggcgacaagggcuccggcggcaucaagggcggcuucguccaccagcgcauggccuccaagaucggccgcugguacucccgcaccauguccaagaccaagcgcaugggcauggagcucuacgucaaguacgacggcgaccccuggaccgacuccgacgcccucgcccccuccggcgucauggucuccauggaggagcccggcugguacuccuucggcuucgagaucaaggacaagaagugcgacguccccugcaucggcaucgagaugguccacgacggcggcaagaagaccuggcacuccgccgccaccgccaucuacugccucaugggcuccggccagcuccucugggacaccgucaccggcgucgacauggcccucuga

SEQ ID NO: 124685 - RNA, 1401 nt, Artificial Sequence; identical to SEQ ID NO: 124615
  derived and/or modified CDS sequence (opt2) from neuraminidase__InfluenzaB__ABL76973

SEQ ID NO: 124686 - RNA, 1401 nt, Artificial Sequence
  derived and/or modified CDS sequence (opt2) from neuraminidase__InfluenzaB__ABL76984
augcuccccuccaccauccagacccucacccucuuccucaccuccggcggcguccuccucucccucuacgucuccgccucccucuccuaccuccucuacuccgacauccuccucaaguucucccagaccgagaucaccgcccccaccaugccccucgacugcgccaacgccuccaacguccaggccgucaaccucuccgccaccaagggcgucacccuccuccuccccgagcccgaguggaccuacccccgccucuccugccccggcuccaccuuccagaaggcccuccucaucuccccccaccgcuucggcgagaccaagggcaacuccgccccccucaucauccgcgagcccuucaucgccugcggccccaaggagugcaagcacuucgcccucacccacuacgccgcccagcccggcggcuacuacaacggcacccgcgaggaccgcaacaagcuccgccaccucaucuccgucaagcucggcaagauccccaccgucgagaacuccaucuuccacauggccgccugguccggcuccgccugccacgacggccgcgaguggaccuacaucggcgucgacggccccgacuccaacgcccuccucaagaucaaguacggcgaggccuacaccgacaccuaccacuccuacgccaacaacauccuccgcacccaggaguccgccugcaacugcaucggcggcaacugcuaccucaugaucaccgacggcuccgccuccggcaucuccgagugccgcuuccucaagauccgcgagggccgcaucaucaaggagaucuuccccaccggccgcgucgagcacaccgaggagugcaccugcggcuucgccuccaacaagaccaucgagugcgccugccgcgacaacuccuacaccgccaagcgccccuucgucaagcucaacgucgagaccgacaccgccgagauccgccucaugugcaccgagaccuaccucgacaccccccgccccgacgacggcuccaucaccggccccugcgaguccaacggcgacaagggcuccggcggcaucaagggcggcuucguccaccagcgcauggccuccaagaucggccgcugguacucccgcaccauguccaagaccaagcgcaugggcaugggccucuacgucaaguacgacggcgaccccuggaccgacuccgacgcccucgcccucuccggcgucauggucuccauggaggagcccggcugguacuccuucggcuucgagaucaaggacaagaagugcgacguccccugcaucggcaucgagaugguccacgacggcggcaagcgcaccuggcacuccgccgccaccgccaucuacugccucaugggcuccggccagcuccucugggacaccgucaccggcgucgacauggcccucuga

SEQ ID NO: 124687 - RNA, 1401 nt, Artificial Sequence; identical to SEQ ID NO: 124642
  derived and/or modified CDS sequence (opt2) from neuraminidase__InfluenzaB__ABL77006

SEQ ID NO: 124688 - RNA, 1401 nt, Artificial Sequence; identical to SEQ ID NO: 124686
  derived and/or modified CDS sequence (opt2) from neuraminidase__InfluenzaB__ABL77017

SEQ ID NO: 124689 - RNA, 1401 nt, Artificial Sequence
  derived and/or modified CDS sequence (opt2) from neuraminidase__InfluenzaB__ABL77028
augcuccccuccaccauccagacccucacccucuuccucaccuccggcggcguccuccucucccucuacgucuccgccucccucuccuaccuccucuacuccgacauccuccucaaguucucccccaccgagaucaccgcccccaccaugccccucgacugcgccaacgccuccaacguccaggccgucaaccgcuccgccaccaagggcgucacccuccuccuccccgagcccgaguggaccuacccccgccucuccugccccggcuccaccuuccagaaggcccuccucaucuccccccaccgcuucggcgagaccaagggcaacuccgccccccucaucauccgcgagcccuucaucgccugcggccccaaggagugcaagcacuucgcccucacccacuacgccgcccagcccggcggcuacuacaacggcacccgcgaggaccgcaacaagcuccgccaccucaucuccgucaagcucggcaagauccccaccgucgagaacuccaucuuccacauggccgccugguccggcuccgccugccacgacggcaaggaguggaccuacaucggcgucgacggccccgacuccaacgcccuccucaagaucaaguacggcgaggccuacaccgacaccuaccacuccuacgccaacaacauccuccgcacccaggaguccgccugcaacugcaucggcggcaacugcuaccucaugaucaccgacggcuccgccuccggcaucuccgagugccgcuuccucaagauccgcgagggccgcaucaucaaggagaucuuccccaccggccgcgucgagcacaccgaggagugcaccugcggcuucgccuccaacaagaccaucgagugcgccugccgcgacaacuccuacaccgccaagcgccccuucgucaagcucaacgucgagaccgacaccgccgagauccgccucaugugcaccgagaccuaccucgacaccccccgccccgacgacggcuccaucaccggccccugcgaguccaacggcgacaagggcuccggcggcaucaagggcggcuucguccaccagcgcauggccuccaagaucggccgcugguacucccgcaccauguccaagaccaagcgcaugggcaugggccucuacgucaaguacgacggcgaccccuggaccgacuccgacgcccucgcccucuccggcgucauggucuccauggaggagcccggcugguacuccuucggcuucgagaucaaggacaagaagugcgacguccccugcaucggcaucgagaugguccacgacggcggcaaggagaccuggcacuccgccgccaccgccaucuacugccucaugggcuccggccagcuccucugggacaccgucaccggcgucgacauggcccucuga

SEQ ID NO: 124690 - RNA, 1401 nt, Artificial Sequence
  derived and/or modified CDS sequence (opt2) from neuraminidase__InfluenzaB__ABL77039
augcuccccuccaccauccagacccucacccucuuccucaccuccggcggcguccuccucucccucuacgucuccgccucccucuccuaccuccucuacuccgacauccuccucaaguucucccccaccgagaccaccgcccccaccaugccccucgacugcgccaacgccuccaacguccaggccgucaacugcuccgccaccaagggcgucacccuccuccuccccgagcccgaguggaccuacccccgccucuccugccccggcuccaccuuccagaaggcccuccucaucuccccccaccgcuucggcgagaccaagggcaacuccgccccccucaucauccgcgagcccuucaucgccugcggccccaaggagugcaagcacuucgcccucacccacuacgccgcccagcccggcggcuacuacaacggcacccgcgaggaccgcaacaagcuccgccaccucaucuccgucaagcucggcaagauccccaccgucgagaacuccaucuuccacauggccgccugguccggcuccgccugccacgacggcaaggaguggaccuacaucggcgucgacggccccgacuccaacgcccuccucaagaucaaguacggcgaggccuacaccgacaccuaccacuccuacgccaacaacauccuccgcacccaggaguccgccugcaacugcaucggcggcaacugcuaccucaugaucaccgacggcuccgccuccggcaucuccgagugccgcuuccucaagauccgcgagggccgcaucaucaaggagaucuuccccaccggccgcgucgagcacaccgaggagugcaccugcggcuucgccuccaacaagaccaucgagugcgccugccgcgacaacuccuacaccgccaagcgccccuucgucaagcucaacgucgagaccgacaccgccgagauccgccucaugugcaccgagaccuaccucgacaccccccgccccgacgacggcuccaucaccggccccugcgaguccaacggcgacaagggcuccggcggcaucaagggcggcuucguccaccagcgcauggccuccaagaucggccgcugguacucccgcaccauguccaagaccaagcgcaugggcaugggccucuacgucaaguacgacggcgaccccuggaccgacuccgacgcccucgcccucuccggcgucauggucuccauggaggagcccggcugguacuccuucggcuucgagaucaaggacaagaagugcgacguccccugcaucggcaucgagaugguccacgacggcggcaaggagaccuggcacuccgccgccaccgccaucuacugccucaugggcuccggccagcuccucugggacaccgucaccggcgucgacauggcccucuga

SEQ ID NO: 124691 - RNA, 1401 nt, Artificial Sequence
  derived and/or modified CDS sequence (opt2) from neuraminidase__InfluenzaB__ABL77050
augcuccccuccaccauccagacccucacccucuuccucaccuccggcggcguccuccucucccucuacgucuccgccucccucuccuaccuccucuacuccgacauccuccucaaguucucccccaccgagaucaccgcccccgccaugccccucgacugcgccaacgccuccaacguccaggccgucaaccgcuccgccaccaagggcgucacccuccuccuccccgagcccgaguggaccuacccccgccucuccugccccggcuccaccuuccagaaggcccuccucaucuccccccaccgcuucggcgagaccaagggcaacuccgccccccucaucauccgcgagcccuucaucgccugcggccccaaggagugcaagcacuucgcccucacccacuacgccgcccagcccggcggcuacuacaacggcacccgcgaggaccgcaacaagcuccgccaccucaucuccgucaagcucggcaagauccccaccgucgagaacuccaucuuccacauggccgccugguccggcuccgccugccacgacggcaaggaguggaccuacaucggcgucgacggccccgacuccaacgcccuccucaagaucaaguacggcgaggccuacaccgacaccuaccacuccuacgccaacaacauccuccgcacccaggaguccgccugcaacugcaucggcggcaacugcuaccucaugaucaccgacggcuccgccuccggcaucuccgagugccgcuuccucaagauccgcgagggccgcaucaucaaggagaucuuccccaccggccgcgucaagcacaccgaggagugcaccugcggcuucgccuccaacaagaccaucgagugcgccugccgcgacaacuccuacaccgccaagcgccccuucgucaagcucaacgucgagaccgacaccgccgagauccgccucaugugcaccgagaccuaccucgacaccccccgccccgacgacggcuccaucaccggccccugcgaguccaacggcgacaagggcuccggcggcaucaagggcggcuucguccaccagcgcauggccuccaagaucggccgcugguacucccgcaccauguccaagaccaagcgcaugggcaugggccucuacgucaaguacgacggcgaccccuggaccgacuccgacgcccucgcccucuccggcgucauggucuccauggaggagcccggcugguacuccuucggcuucgagaucaaggacaagaagugcgacguccccugcaucggcaucgagaugguccacgacggcggcaaggagaccuggcacuccgccgccaccgccaucuacugccucaugggcuccggccagcuccucugggacaccgucaccggcgucgacauggcccucuga

SEQ ID NO: 124692 - RNA, 1401 nt, Artificial Sequence
  derived and/or modified CDS sequence (opt2) from neuraminidase__InfluenzaB__ABL77072
augcuccccuccaccauccagacccucacccucuuccucaccuccggcggcguccuccucucccucuacgucuccgcccuccucuccuaccuccucuacuccgacauccuccucaaguucucccccaccaagaucaucgcccccaccaccucccucgacuccgccaacgccuccaacuuccaggccgucaaccacuccgccaccaaggagaugaccuuccuccuccccgagcccgaguggaccuacccccgccucuccugccagggcuccaccuuccagaaggcccuccucaucuccccccaccgcuucggcgaggccaagggcaacuccgccccccucaucauccgcgagcccuucaucgccugcggccccaaggagugcaagcacuucgcccucacccacuacgccgcccagcccggcggcuacuacaacggcacccgcgaggaccgcaacaagcuccgccaccucaucuccgucaaccucggcaagauccccaccgucgagaacuccaucuuccacauggccgccugguccggcuccgccugccacgacggccgcgaguggaccuacaucggcgucgacggccccgacuccaacgcccucaucaagaucaaguacggcgaggccuacaccgacaccuaccacuccuacgccaacaacauccuccgcacccaggaguccgccugcaacugcaucggcggcgacugcuaccucaugaucaccgacggcuccgccuccggcaucuccaagugccgcuuccucaagauccgcgagggccgcaucaucaaggagaucuuccccaccggccgcgucgagcacaccgaggagugcaccugcggcuucgccuccaacaagaccaucgagugcgccugccgcgacaacuccuacaccgccaagcgccccuucgucaagcucaacgucgagaccgacaccgccgagauccgccucaugugcaccgagaccuaccucgacaccccccgccccgacgacggcuccaucaccggccccugcgaguccaacggcgacaagggcuccggcggcaucaagggcggcuucguccaccagcgcauggccuccaagaucggccgcugguacucccgcaccauguccaagaccaagcgcaugggcauggagcucuacgucaaguacgacggcgaccccuggaccgacuccgacgcccucgcccccuccggcgucauggucuccaucaaggaguccggcugguacuccuucggcuucgagaucaaggacaagaagugcgacguccccugcaucggcaucgagaugguccacgacggcggcaagaccaccuggcacuccgccgccaccgccaucuacugccucaugggcuccggccagcuccucugggacaccgucaccggcgucgacauggcccucuga

SEQ ID NO: 124693 - RNA, 1401 nt, Artificial Sequence; identical to SEQ ID NO: 124620
  derived and/or modified CDS sequence (opt2) from neuraminidase__InfluenzaB__ABL77083

SEQ ID NO: 124694 - RNA, 1401 nt, Artificial Sequence; identical to SEQ ID NO: 124620
  derived and/or modified CDS sequence (opt2) from neuraminidase__InfluenzaB__ABL77094

SEQ ID NO: 124695 - RNA, 1401 nt, Artificial Sequence
  derived and/or modified CDS sequence (opt2) from neuraminidase__InfluenzaB__ABL77105
augcuccccuccaccauccagacccucacccucuuccucaccuccggcggcguccuccucucccucuacgucuccgccucccucuccuaccuccucuacuccgacauccuccucaaguucuccuccaccgagaucaccgcccccaccaugccccucgacugcgccaacgccuccaacguccaggccgucaaccgcuccgccaccgagggcgucacccuccuccuccccgagcccgaguggaccuacccccgccucuccugccccggcuccaccuuccagaaggcccuccucaucuccccccaccgcuucggcgagaccaagggcaacuccgccccccucaucauccgcgagcccuucaucgccugcggccccaaggagugcaagcacuucgcccucacccacuacgccgcccagcccggcggcuacuacaacggcacccgcgaggaccgcaacaagcuccgccaccucaucuccgucaagcucggcaagauccccaccgucgagaacuccaucuuccacauggccgccugguccggcuccgccugccacgacggcaaggaguggaccuacaucggcgucgacggccccgacuccaacgcccuccucaagaucaaguacggcgaggccuacaccgacaccuaccacuccuacgccaacaacauccuccgcacccaggaguccgccugcaacugcaucggcggcaacugcuaccucaugaucaccgacggcuccgccuccggcaucuccgagugccgcuuccucaagauccgcgagggccgcaucaucaaggagaucuuccccaccggccgcgucgagcacaccgaggagugcaccugcggcuucgccuccaacaagaccaucgagugcgccugccgcgacaacuccuacaccgccaagcgccccuucgucaagcucaacgucgagaccgacaccgccgagauccgccucaugugcaccgagaccuaccucgacaccccccgccccgacgacggcuccaucaccggccccugcgaguccaacggcgacaagggcuccggcggcaucaagggcggcuucguccaccagcgcauggccuccaagaucggccgcugguacucccgcaccauguccaagaccaagcgcaugggcaugggccucuacgucaaguacgacggcgaccccuggaccgacuccgacgcccucgcccucuccggcgucauggucuccauggaggagcccggcugguacuccuucggcuucgagaucaaggacaagaagugcgacguccccugcaucggcaucgagaugguccacgacggcggcaaggagaccuggcacuccgccgccaccgccaucuacugccucaugggcuccggccagcuccucugggacaccgucaccggcgucgacauggcccucuga

SEQ ID NO: 124696 - RNA, 1401 nt, Artificial Sequence; identical to SEQ ID NO: 124620
  derived and/or modified CDS sequence (opt2) from neuraminidase__InfluenzaB__ABL77127

SEQ ID NO: 124697 - RNA, 1401 nt, Artificial Sequence
  derived and/or modified CDS sequence (opt2) from neuraminidase__InfluenzaB__ABL77138
augcuccccuccaccauccagacccucacccucuuccucaccuccggcggcguccuccucucccucuacgucuccgcccuccucuccuaccuccucuacuccgacauccuccucaaguucucccccaccaagaucaucgcccccaccaccucccucgacuccgccaacgccuccaacuuccaggccgucaaccacuccgccaccaaggagaugaccuuccuccuccccgagcccgaguggaccuacccccgccucuccugccagggcuccaccuuccagaaggcccuccucaucuccccccaccgcuucggcgaggccaagggcaacuccgccccccucaucauccgcgagcccuucaucgccugcggccccaaggagugcaagcacuucgcccucacccacuacgccgcccagcccggcggcuacuacaacggcacccgcgaggaccgcaacaagcuccgccaccucaucuccgucaaccucggcaagauccccaccgucgagaacuccaucuuccacauggccgccugguccggcuccgccugccacgacggccgcgaguggaccuacaucggcgucgacggccccgacuccaacgcccucaucaagaucaaguacggcgaggccuacaccgacaccuaccacuccuacgccaacaacauccuccgcacccaggaguccgccugcaacugcaucggcggcgacugcuaccucaugaucaccgacggcuccgccuccggcaucuccaagugccgcuuccucaagauccgcgagggccgcaucaucaaggagaucuuccccaccggccgcgucgagcacaccgaggagugcaccugcggcuucgccuccaacaagaccaucgagugcgccugccgcgacaacuccuacaccgccaagcgccccuucgucaagcucaacgucgagaccgacaccgccgagauccgccucaugugcaccgagaccuaccucgacaccccccgccccgacgacggcuccaucaccggccccugcgaguccaacggcgacaagggcuccggcggcaucaagggcggcuucguccaccagcgcauggccuccaagaucggccgcugguacucccgcaccauguccaagaccaagcgcaugggcauggagcucuacgucaaguacgacggcgaccccuggaccgacuccgacgcccucgcccccuccggcgucauggucuccaucgaggagcccggcugguacuccuucggcuucgagaucaaggacaagaagugcgacguccccugcaucggcaucgagaugguccacgacggcggcaagaccaccugguacuccgccgccaccgccaucuacugccucaugggcuccggccagcuccucugggacaccgucaccggcgucgacauggcccucuga

SEQ ID NO: 124698 - RNA, 1401 nt, Artificial Sequence; identical to SEQ ID NO: 124620
  derived and/or modified CDS sequence (opt2) from neuraminidase__InfluenzaB__ABL77149

SEQ ID NO: 124699 - RNA, 1401 nt, Artificial Sequence
  derived and/or modified CDS sequence (opt2) from neuraminidase__InfluenzaB__ABL77160
augcuccccuccaccauccagacccucacccucuuccucaccuccggcggcguccuccucucccucuacgucuccgccucccucuccuaccuccucuacuccgacauccuccucaaguucucccagaccaagaucaccgcccccaccaugccccucgacugcgccaacgccuccaacguccaggccgucaaccgcuccgccaccaagggcgucacccuccuccuccccgagcccgaguggaccuacccccgccucuccugccccggcuccaccuuccagaaggcccuccucaucuccccccaccgcuucggcgagaccaagggcaacuccgccccccucaucauccgcgagcccuucaucgccugcggccccaaggagugcaagcacuucgcccucacccacuacgccgcccagcccggcggcuacuacaacggcacccgcgaggaccgcaacaagcuccgccaccucaucuccgucaagcucggcaagauccccaccgucgagaacuccaucuuccacauggccgccugguccggcuccgccugccacgacggccgcgaguggaccuacaucggcgucgacggccccgacuccaacgcccuccucaagaucaaguacggcgaggccuacaccgacaccuaccacuccuacgccaagaacauccuccgcacccaggaguccgccugcaacugcaucggcggcgacugcuaccucaugaucaccgacggcuccgccuccggcaucuccgagugccgcuuccucaagauccgcgagggccgcaucaucaaggagaucuuccccaccggccgcgucaagcacaccgaggagugcaccugcggcuucgccuccaacaagaccaucgagugcgccugccgcgacaacuccuacaccgccaagcgccccuucgucaagcucaacgucgagaccgacaccgccgagauccgccucaugugcaccgagaccuaccucgacaccccccgccccaacgacggcuccaucaccggccccugcgaguccgacggcgaccgcggcuccggcggcaucaagggcggcuucguccaccagcgcauggaguccaagaucggccgcugguacucccgcaccauguccaagaccaagcgcaugggcaugggccucuacgucaaguacgacggcgaccccuggaccgacuccgaggcccucgcccucuccggcgucauggucuccauggaggagcccggcugguacuccuucggcuucgagaucaaggacaagaagugcgacguccccugcaucggcaucgagaugguccacgacggcggcaagaccaccuggcacuccgccgccaccaccaucuacugccucaugggcuccggccagcuccucugggacaccgucaccggcgucgacauggcccucuga

SEQ ID NO: 124700 - RNA, 1401 nt, Artificial Sequence; identical to SEQ ID NO: 124652
  derived and/or modified CDS sequence (opt2) from neuraminidase__InfluenzaB__ABL77171

SEQ ID NO: 124701 - RNA, 1401 nt, Artificial Sequence
  derived and/or modified CDS sequence (opt2) from neuraminidase__InfluenzaB__ABL77182
augcuccccuccaccauccagacccucacccucuuccucaccuccggcggcguccuccucucccucuacgucuccgcccuccucuccuaccuccucuacuccgacauccuccucaaguucucccccaccaagaucaucgcccccaccaccucccucgacuccgccaacgccuccaacuuccaggccgucaaccacuccgccaccaaggagaugaccuuccuccuccccgagcccgaguggaccuacccccgccucuccugccagggcuccaccuuccagaaggcccuccucaucuccccccaccgcuucggcgaggccaagggcaacuccgccccccucaucauccgcgagcccuucaucgccugcggccccaaggagugcaagcacuucgcccucacccacuacgccgcccagcccggcggcuacuacaacggcacccgcgaggaccgcaacaagcuccgccaccucaucuccgucaaccucggcaagauccccaccgucgagaacuccaucuuccacauggccgccugguccggcuccgccugccacgacggccgcgaguggaccuacaucggcgucgacggccccgacuccaacgcccucaucaagaucaaguacggcgaggccuacaccgacaccuaccacuccuacgccaacaacauccuccgcacccaggaguccgccugcaacugcaucggcggcgacugcuaccucaugaucaccgacggcuccgccuccggcaucuccaagugccgcuuccucaagauccgcgagggccgcaucgucaaggagaucuuccccaccggccgcgucgagcacaccgaggagugcaccugcggcuucgccuccaacaagaccaucgagugcgccugccgcgacaacuccuacaccgccaagcgccccuucgucaagcucaacgucgagaccgacaccgccgagauccgccucaugugcaccgagaccuaccucgacaccccccgccccgacgacggcuccaucaccggccccugcgaguccaacggcgacaagggcuccggcggcaucaagggcggcuucguccaccagcgcauggccuccaagaucggccgcugguacucccgcaccauguccaagaccaagcgcaugggcauggagcucuacgucaaguacgacggcgaccccuggaccgacuccgacgcccucgcccccuccggcgucauggucuccaucgaggagcccggcugguacuccuucggcuucgagaucaaggacaagaagugcgacguccccugcaucggcaucgagaugguccacgacggcggcaagaccaccuggcacuccgccgccaccgccaucuacugccucaugggcuccggccagcuccucugggacaccaucaccggcgucgacauggcccucuga

SEQ ID NO: 124702 - RNA, 1401 nt, Artificial Sequence; identical to SEQ ID NO: 124627
  derived and/or modified CDS sequence (opt2) from neuraminidase__InfluenzaB__ABL77193

SEQ ID NO: 124703 - RNA, 1401 nt, Artificial Sequence
  derived and/or modified CDS sequence (opt2) from neuraminidase__InfluenzaB__ABL77204
augcuccccuccaccauccagacccucacccucuuccucaccuccggcggcguccuccucucccucuacgucuccgccucccucuccuaccuccucuacuccgacauccuccucaaguucucccccaccgagaucaccgcccccaccaugccccucgacugcgccaacgccuccaacguccaggccgucaaccgcuccgccaccaagggcgucacccuccucauccccgagcccgaguggaccuacccccgccucuccugccccggcuccaccuuccagaaggcccuccucaucuccccccaccgcuucggcgagaccaagggcaacuccgccccccucaucauccgcgagcccuucaucgccugcggccccaaggagugcaagcacuucgcccucacccacuacgccgcccagcccggcggcuacuacaacggcacccgcggcgaccgcaacaagcuccgccaccucaucuccgucaagcucggcaagauccccaccgucgagaacuccaucuuccacauggccgccugguccggcuccgccugccacgacggcaaggaguggaccuacaucggcgucgacggccccgacaacuccgcccuccucaagaucaaguacggcgaggccuacaccgacaccuaccacuccuacgccaacaacauccuccgcacccaggaguccgccugcaacugcaucggcggcaacugcuaccucaugaucaccgacggcuccgccuccggcgucuccgagugccgcuuccucaagauccgcgagggccgcaucaucaaggagaucuuccccaccggccgcgucaagcacaccgaggagugcaccugcggcuucgccuccaacaagaccaucgagugcgccugccgcgacaacuccuacaccgccaagcgccccuucgucaagcucaacgucgagaccgacaccgccgagauccgccucaugugcaccgagaccuaccucgacaccccccgccccgacgacggcuccaucaccggccccugcgaguccaacggcgacaagggcuccggcggcaucaagggcggcuucguccaccagcgcauggccuccaagaucggccgcugguacucccgcaccauguccaagaccaagcgcaugggcaugggccucuacgucaaguacgacggcgaccccugggccgacuccgacgcccucgcccucuccggcgucauggucuccauggaggagcccggcugguacuccuucggcuucgagaucaaggacaagaagugcgacguccccugcaucggcaucgagaugguccacgacggcggcaaggagaccuggcacuccgccgccaccgccaucuacugccucaugggcuccggccagcuccucugggacaccgucaccggcgucgacauggcccucuga

SEQ ID NO: 124704 - RNA, 1401 nt, Artificial Sequence
  derived and/or modified CDS sequence (opt2) from neuraminidase__InfluenzaB__ABL77215
augcuccccuccaccauccagacccucacccucuuccucaccuccggcggcguccuccucucccucuacgucuccgccucccucuccuaccuccucuacuccgacauccuccucaaguuccccuccaccgagaucaccgcccccaccaugccccucgacugcgccaacgccuccaacguccaggccgucaaccgcuccgccaccaagggcgucacccuccuccuccccgagcccgaguggaccuacccccgccucuccugccccggcuccaccuuccagaaggcccuccucaucuccccccaccgcuucggcgagaccaagggcaacuccgccccccucaucauccgcgagcccuucaucgccugcggccccaaggagugcaagcacuucgcccucacccacuacgccgcccagcccggcggcuacuacaacggcacccgcggcgaccgcaacaagcuccgccaccucaucuccgucaagcucggcaagauccccaccgucgagaacuccaucuuccacauggccgccugguccggcuccgccugccacgacggcaaggaguggaccuacaucggcgucgacggccccgacaacaacgcccuccucaagaucaaguacggcgaggccuacaccgacaccuaccacuccuacgccaacaacauccuccgcacccaggaguccgccugcaacugcaucggcggcaacugcuaccucaugaucaccgacggcuccgccuccggcgucuccgagugccgcuuccucaagauccgcgagggccgcaucaucaaggagaucuuccccaccggccgcaucaagcacaccgaggagugcaccugcggcuucgccuccaacaagaccaucgagugcgccugccgcgacaacuccuacaccgccaagcgccccuucgucaagcucaacgucgagaccgacaccgccgagauccgccucaugugcaccgagaccuaccucgacaccccccgccccgacgacggcuccaucaccggccccugcgaguccaacggcgacaagggcuccggcggcaucaagggcggcuucguccaccagcgcauggccuccaagaucggccgcugguacucccgcaccauguccaagaccaagcgcaugggcaugggccucuacgucaaguacgacggcgaccccugggccgacuccgacgcccucgccuucuccggcgucauggucuccauggaggagcccggcugguacuccuucggcuucgagaucaaggacaagaagugcgacguccccugcaucggcaucgagaugguccacgacggcggcaaggagaccuggcacuccgccgccaccgccaucuacugccucaugggcuccggccagcuccucugggacaccgucaccggcgucaacauggcccucuga

SEQ ID NO: 124705 - RNA, 1401 nt, Artificial Sequence; identical to SEQ ID NO: 124663
  derived and/or modified CDS sequence (opt2) from neuraminidase__InfluenzaB__ABL77226

SEQ ID NO: 124706 - RNA, 1401 nt, Artificial Sequence
  derived and/or modified CDS sequence (opt2) from neuraminidase__InfluenzaB__ABL77237
augcuccccuccaccauccagacccucacccucuuccucaccuccggcggcguccuccucucccucuacgucuccgccucccucuccuaccuccucuacuccgacauccuccucaaguucucccccaccgagaucaccgcccccaccaugccccucgacugcgccaacgccuccaacguccaggccgucaaccgcuccgccaccaagggcgucacccuccuccuccccgagcccgaguggaccuacccccgccucuccugccccggcuccaccuuccagaaggcccuccucaucuccccccaccgcuucggcgagaccaagggcaacuccgccccccucaucauccgcgagcccuucaucgccugcggccccaacgagugcaagcacuucgcccucacccacuacgccgcccagcccggcggcuacuacaacggcacccgcggcgaccgcaacaagcuccgccaccucaucuccgucaagcucggcaagauccccaccgucgagaacuccaucuuccacauggccgccugguccggcuccgccugccacgacggcaaggaguggaccuacaucggcgucgacggccccgacaacaacgcccuccucaagaucaaguacggcgaggccuacaccgacaccuaccacuccuacgccaacaacauccuccgcacccaggaguccgccugcaacugcaucggcggcaacugcuaccucaugaucaccgacggcuccgccuccggcgucuccgagugccgcuuccucaagauccgcgagggccgcaucaucaaggagaucuuccccaccggccgcgucaagcacaccgaggagugcaccugcggcuucgccuccaacaagaccaucgagugcgccugccgcgacaacuccuacaccgccaagcgccccuucgucaagcucaacgucgagaccgacaccgccgagauccgccucaugugcaccgacaccuaccucgacaccccccgccccgacgacggcuccaucaccggccccugcgaguccaacggcgacaagggcuccggcggcaucaagggcggcuucguccaccagcgcauggccuccaagaucggccgcugguacucccgcaccauguccaagaccgagcgcaugggcaugggccucuacgucaaguacgacggcgaccccugggccgacuccgacgcccucgccuucuccggcgucauggucuccaugaaggagcccggcugguacuccuucggcuucgagaucaaggacaagaagugcgacguccccugcaucggcaucgagaugguccacgacggcggcaaggagaccuggcacuccgccgccaccgccaucuacugccucaugggcuccggccagcuccucugggacaccgucaccggcgucgacauggcccucuga

SEQ ID NO: 124707 - RNA, 1401 nt, Artificial Sequence
  derived and/or modified CDS sequence (opt2) from neuraminidase__InfluenzaB__ABL77248
augcuccccuccaccauccagacccucacccucuuccucaccuccggcggcguccuccucucccucuacgucuccgcccuccucuccuaccuccucuacuccgacauccuccucaaguucucccccaccaagaucaucgcccccaccaugucccucgacugcgccaacgccuccaacguccaggccgccaaccacuccgccaccaaggagaugaccuuccuccuccccgagcccgaguggaccuacccccgccucuccugccagggcuccaccuuccagaaggcccuccucaucuccccccaccgcuucggcgaggccaagggcaacuccgccccccucaucauccgcgagcccuucaucgccugcggccccaaggagugcaagcacuucgcccucacccacuacgccgcccagcccggcggcuacuacaacggcacccgcgaggaccgcaacaagcuccgccaccucaucuccgucaaccucggcaagauccccaccgucgagaacuccaucuuccacauggccgccugguccggcuccgccugccacgacggccgcgaguggaccuacaucggcgucgacggccccgacuccaacgcccucaucaagaucaaguacggcgaggccuacaccgacaccuaccacuccuacgccaacaacauccuccgcacccaggaguccgccugcaacugcaucggcggcgacugcuaccucaugaucaccgacggcuccgccuccggcaucuccaagugccgcuuccucaagauccgcgagggccgcaucaucaaggagaucuuccccaccggccgcgucgagcacaccgaggagugcaccugcggcuucgccuccaacaagaccaucgagugcgccugccgcgacaacuccuacaccgccaagcgccccuucgucaagcucaacgucgagaccgacaccgccgagauccgccucaugugcaccgagaccuaccucgacaccccccgccccgacgacggcuccaucaccggccccugcgaguccaacggcgagaagggccgcggcggcaucaagggcggcuucguccaccagcgcauggccuccaagaucggccgcugguacucccgcaccauguccaagaccgagcgcaugggcauggagcucuacgucaaguacgacggcgaccccuggaccgacuccgacgcccucgcccccuccggcgucauggucuccaugaaggagcccggcugguacuccuucggcuucgagaucaaggacaagaagugcgacguccccugcaucggcaucgagaugguccacgacggcggcaagaagaccuggcacuccgccgccaccgccaucuacugccucaugggcuccggccagcuccucugggacaccgucaccggcgucgacauggcccucuga

SEQ ID NO: 124708 - RNA, 1401 nt, Artificial Sequence
  derived and/or modified CDS sequence (opt2) from neuraminidase__InfluenzaB__ABL77259
augcuccccuccaccauccagacccucacccucuuccucaccuccggcggcguccuccucucccucuacgucuccgccucccucuccuaccuccucuacuccgacauccuccucaaguucucccccaccgagaucaccgcccccaaggucccccucgacugcgccaacgccuccaacguccaggccgucaaccgcuccgccaccaagggcaugacccuccuccucuccgagcccgaguggaccuacccccgccucuccugccagggcuccaccuuccagaaggcccuccucaucuccccccaccgcuucggcgagacccgcggcaacuccgccccccucaucauccgcgagcccuucaucgccugcggccccaaggagugcaagcacuucgcccucacccacuacgccgcccagcccggcggcuacuacaacggcacccgcgaggaccgcaacaagcuccgccaccucaucuccgucaagcucggcaagauccccaccgucgagaacuccaucuuccacauggccgccugguccggcuccgccugccacgacggccgcgaguggaccuacaucggcgucgacggccccgacuccaacgcccucaucaagaucaaguacggcgaggccuacaccgacaccuaccacuccuacgccaacaacauccuccgcacccaggaguccgccugcaacugcaucggcggcgacugcuaccucaugaucaccgacggcuccgccuccggcaucuccaagugccgcuuccucaagauccgcgagggccgcaucaucaaggagaucuuccccaccggccgcgucgagcacaccgaggagugcaccugcggcuucgccuccaacaagaccaucgagugcgccugccgcgacaacuccuacaccgccaagcgccccuucgucaagcucaacgucgagaccgacaccgccgagauccgccucaugugcaccgagaccuaccucgacaccccccgccccgacgacggcuccaucaccggccccugcgaguccaacggcgacaagggccgcggcggcaucaagggcggcuucguccaccagcgcauggccuccaagaucggccgcugguacucccgcaccauguccaagaccgagcgcaugggcauggagcucuacgucaaguacgacggcgaccccuggaccgacuccgacgcccucgcccccuccggcgucauggucuccaugaaggagcccggcugguacuccuucggcuucgagaucaaggacaagaagugcgacguccccugcaucggcaucgagaugguccacgacggcggcaagaagaccuggcacuccgccgccaccgccaucuacugccucaugggcuccggccagcuccucugggacaccgucaccggcgucgacauggcccucuga

SEQ ID NO: 124709 - RNA, 1401 nt, Artificial Sequence
  derived and/or modified CDS sequence (opt2) from neuraminidase__InfluenzaB__ABL77270
augcuccccuccaccauccagacccucacccucuuccucaccuccggcggcguccuccucucccucuacgucuccgccucccucuccuaccuccucuacuccgacauccuccucaaguucucccccaccgagaucaccgcccccaccaugccccucgacugcgccaacgccuccaacguccaggccgucaaccgcuccgccaccaagggcaugacccuccuccuccccgagcccgaguggaccuacccccgccucuccugccccggcuccaccuuccagaaggcccuccucaucuccccccaccgcuucggcgagacccgcggcaacuccgccccccucaucauccgcgagcccuucaucgccugcggccccaaggagugcaagcacuucgcccucacccacuacgccgcccagcccggcggcuacuacaacggcacccgcgaggaccgcaacaagcuccgccaccucaucuccgucaagcucggcaagauccccaccgucgagaacuccaucuuccacauggccgccugguccggcuccgccugccacgacggccgcgaguggaccuacaucggcgucgacggccccgacuccaacgcccucaucaagaucaaguacggcgaggccuacaccgacaccuaccacuccuacgccaacaacauccuccgcacccaggaguccgccugcaacugcaucggcggcgacugcuaccucaugaucaccgacggcuccgccuccggcaucuccaagugccgcuuccucaagauccgcgagggccgcaucaucaaggagaucuuccccaccggccgcgucgagcacaccgaggagugcaccugcggcuucgccuccaacaagaccaucgagugcgccugccgcgacaacuccuacaccgccaagcgccccuucgucaagcucaacgucgagaccgacaccgccgagauccgccucaugugcaccgagaccuaccucgacaccccccgccccgacgacggcuccaucaccggccccugcgaguccaacggcgacaagggccgcggcggcaucaagggcggcuucguccaccagcgcauggccuccaagaucggccgcugguacucccgcaccauguccaagaccgagcgcaugggcauggagcucuacgucaaguacgacggcgaccccuggaccgacuccgaggcccucgcccccuccggcgucauggucuccauggaggagcccggcugguacuccuucggcuucgagaucaaggacaagaagugcgacguccccugcaucggcaucgagaugguccacgacggcggcaagaagaccuggcacuccgccgccaccgccaucuacugccucaugggcuccggccagcuccucugggacaccgucaccggcgucgacauggcccucuga

SEQ ID NO: 124710 - RNA, 1401 nt, Artificial Sequence
  derived and/or modified CDS sequence (opt2) from neuraminidase__InfluenzaB__ABL77281
augcuccccuccaccauccagacccucacccucuuccucaccuccggcggcguccuccucucccucuacgucuccgucucccucuccuaccuccucuacuccgacauccuccuccgcuucucccccaccgagaucaccgcccccaccaugccccucgacugcgccaacgccuccaacguccaggccgucaaccgcuccgccaccaagggcaugacccuccgccuccccgagcccgaguggaccuacccccgccucuccugccccggcuccaccuuccagaaggcccuccucaucuccccccaccgcuucggcgagacccgcggcaacuccgccccccucaucauccgcgagcccuucaucgccugcggccccaaggagugcaagcacuucgcccucacccacuacgccgcccagcccggcggcuacuacaacggcacccgcgaggaccgcaacaagcuccgccaccucaucuccgucaagcucggcaagauccccaccgucgagaacuccaucuuccacauggccgccugguccggcuccgccugccacgacggccgcgaguggaccuacaucggcgucgacggccccgacuccaacgcccucaucaagaucaaguacggcgaggccuacaccgacaccuaccacuccuacgccaacaacauccuccgcacccaggaguccgccugcaacugcaucggcggcgacugcuaccucaugaucaccgacggcuccgccuccgagaucuccaagugccgcuuccucaagauccgcgagggccgcaucaucaaggagaucuuccccaccggccgcgucgagcacaccgaggagugcaccugcggcuucgccuccaacaagaccaucgagugcgccugccgcgacaacuccuacaccgccaagcgccccuucgucaagcucaacgucgagaccgacaccgccgagauccgccucaugugcaccgagaccuaccucgacaccccccgccccgacgacggcuccaucaccggccccugcgaguccaacggcgacaagggccgcggcggcaucaagggcggcuucguccaccagcgcauggccuccaagaucggccgcugguacucccgcaccauguccaagaccgagcgcaugggcauggagcucuacgucaaguacgacggcgaccccuggaccgacuccgaggcccucgcccccuccggcgucauggucuccauggaggagcccggcugguacuccuucggcuucgagaucaaggacaagaagugcgacguccccugcaucggcaucgagaugguccacgacggcggcaagaagaccuggcacuccgccgccaccgccaucuacugccucaugggcuccggccagcuccucugggacaccgucaccggcgucgacauggcccucuga

SEQ ID NO: 124711 - RNA, 1401 nt, Artificial Sequence
  derived and/or modified CDS sequence (opt2) from neuraminidase__InfluenzaB__ABL77292
augcuccccuccaccauccagacccucacccucuuccucaccuccggcggcguccuccucucccucuacgucuccgccucccucuccuaccuccucuacuccggcguccuccucaaguucucccccaccgagaucaccgcccccaccaugccccucgacugcgccaacgccuccaacguccaggccgucaaccgcuccgccaccaagggcgucacccuccuccuccccgagcccgaguggaccuacccccgccucuccugccccggcuccaccuuccagaaggcccuccucaucuccccccaccgcuucggcgagacccgcggcaacuccgccccccucaucauccgcgagcccuucaucgccugcggccccaaggagugcaagcacuucgcccucacccacuacgccgcccagcccggcggcuacuacaacggcacccgcgaggaccgcaacaagaugcgccaccucaucuccgucaagcucggcaagauccccaccgucgagaacuccaucuuccacauggccgccugguccggcuccgccugccacgacggccgcgaguggaccuacaucggcgucgacggccccgacuccaacgcccucaucaagaucaaguacggcgaggccuacaccgacaccuaccacuccuacgccaacaacauccuccgcacccaggaguccgccugcaacugcaucggcggcgacugcuaccucaugaucaccgacggcuccgccuccggcaucuccaagugccgcuuccucaagauccgcgagggccgcaucaucaaggagaucuuccccaccggccgcgucgagcacaccgaggagugcaccugcggcuucgccuccaacaagaccaucgagugcgccugccgcgacaacuccuacaccgccaagcgccccuucgucaagcucaacgucgagaccgacaccgccgagauccgccucaugugcaccgagaccuaccucgacaccccccgccccgacgacggcuccaucaccggccccugcgaguccaacggcgacaagggccucggcggcaucaagggcggcuucguccaccagcgcauggccuccaagaucggccgcugguacucccgcaccauguccaagaccgagcgcaugggcauggagcucuacgucaaguacgacggcgaccccuggaccgacuccgacgcccucgcccucuccggcgucauggucuccauggaggagcccggcugguacuccuucggcuucgagaucaaggacaagaagugcgacguccccugcaucggcaucgagaugguccacgacggcggcaagaagaccuggcacuccgccgccaccgccaucuacugccucaugggcuccggccagcuccucugggacaccgucaccggcgucgacauggcccucuga

SEQ ID NO: 124712 - RNA, 1398 nt, Artificial Sequence
  derived and/or modified CDS sequence (opt2) from neuraminidase__InfluenzaB__ABL77303
augcuccccuccaccauccagacccucacccucuuccucaccuccggcggcguccuccucucccucuacgucuccgcccuccucuccuaccuccucuacuccgacauccuccucaaguucucccccaagaucaucgcccccaccaucucccucgacugcgccaacgccuccaacguccaggccgucaaccacuccgccaccaaggagaugaccuuccuccuccccgagcccgaguggaccuacccccgccucuccugccagggcuccaucuuccagaaggcccuccucaucuccccccaccgcuucggcgaggccaagggcaacuccgccccccucaucauccgcgagcccuucaucgccugcggccccaaggagugcaagcacuucgcccucacccacuacgccgcccagcccggcggcuacuacaacggcacccgcgaggaccgcaacaagcuccgccaccucaucuccgucaaccucggcaagauccccaccgucgagaacuccaucuuccacauggccgccugguccggcuccgccugccacgacggccgcgaguggaccuacaucggcgucgacggccccgacuccaacgcccucaucaagaucaaguacggcgaggccuacaccgacaccuaccacuccuacgccaacaacauccuccgcacccaggaguccgccugcaacugcaucggcggcgacugcuaccucaugaucaccgacggcuccgccuccggcaucuccaagugccgcuuccucaagauccgcgagggccgcaucaucaaggagaucuuccccaccggccgcgucgagcacaccgaggagugcaccugcggcuucgccuccaacaagaccaucgagugcgccugccgcgacaacuccuacaccgccaagcgccccuucgucaagcucaacgucgagaccgacaccgccgagauccgccucaugugcaccgagaccuaccucgacaccccccgccccgacgacggcuccaucaccggccccugcgaguccaacggcgacaagggccgcggcggcgucaagggcggcuucguccaccagcgcaucgccuccaagaucggccgcugguacucccgcaccauguccaagaccgagcgcaugggcauggagcucuacgucaaguacgacggcgaccccuggaccgacuccgacgcccucgcccccuccggcgucauggucuccauggaggagcccggcugguacuccuucggcuucgagaucaaggacaagaagugcgacguccccugcaucggcaucgagaugguccacgacggcggcaagaagaccuggcacuccgccgccaccgccaucuacugccucaugggcuccggccagcuccucugggacaccgucaccggcgucgacauggcccucuga

SEQ ID NO: 124713 - RNA, 1398 nt, Artificial Sequence
  derived and/or modified CDS sequence (opt2) from neuraminidase__InfluenzaB__ABL77314
augcuccccuccaccauccagacccucacccucuuccucaccuccggcggcguccuccucucccucuacgucuccgcccuccucuccuaccuccucuacuccgacguccuccucaaguucucccccaagaucaucgcccccaccaugucccucgacugcgccaacgccuccaacguccaggccgucaaccacuccgccaccgaggagaugaccuuccuccuccccgagcccgaguggaccuacccccgccucuccugccagggcuccaccuuccagaaggcccuccucaucuccccccaccgcuucggcgaggccaagggcaacuccgccccccucaucauccgcgagcccuucaucgccugcggccccaaggagugcaagcacuucgcccucacccacuacgccgcccagcccggcggcuacuacaacggcacccgcgaggaccgcaacaagcuccgccaccucaucuccgucaaccucggcaagauccccaccgucgagaacuccaucuuccacauggccgccugguccggcuccgccugccacgacggccgcgaguggaccuacaucggcgucgacggccccgacuccaacgcccucaucaagaucaaguacggcgaggccuacaccgacaccuaccacuccuacgccaacaacauccuccgcacccaggaguccgccugcaacugcaucggcggcgacugcuaccucaugaucaccgacggcuccgccuccggcaucuccaagugccgcuuccucaagauccgcgagggccgcaucaucaaggagaucuuccccaccggccgcgucgagcacaccgaggagugcaccugcggcuucgccuccaacaagaccaucgagugcgccugccgcgacaacuccuacaccgccaagcgccccuucgucaagcucaacgucgagaccgacaccgccgagauccgccucaugugcaccgagaccuaccucgacaccccccgccccgacgacggcuccaucaccggccccugcgaguccaacggcgacaagggccacggcggcaucaagggcggcuucguccaccagcgcauggccuccaagaucggccgcugguacucccgcaccauguccaagaccaagcgcaugggcauggagcucuacgucaaguacgacggcgaccccuggaccgacuccgacgcccucgcccccuccggcgucauggucuccauggaggagcccggcugguacuccuucggcuucgagauccgcgacaagaagugcgacguccccugcaucggcaucgagaugguccacgacggcggcaagaagaccuggcacuccgccgccaccgccaucuacugccucaugggcuccggccagcuccucugggacaccgucaccggcgucgacauggcccucuga

SEQ ID NO: 124714 - RNA, 1401 nt, Artificial Sequence
  derived and/or modified CDS sequence (opt2) from neuraminidase__InfluenzaB__ABL77325
augcuccccuccaccauccagacccucacccucuuccucaccuccggcggcguccuccucucccucuacgucuccgcccuccucuccuacucccucuacuccgacauccuccucaaguucucccccaccaagaccaucgcccccaccaugucccucgacugcgccaacgccuccaacguccaggccgucaaccacuccgccaccaagggcaugacccuccuccuccccgagcccgaguggaccuacccccgccucuccugccagggcuccaccuuccagaaggcccuccucaucuccccccaccgcuucggcgagaccaagggcaacuccgccccccucaucauccgcgagcccuucaucgccugcggccccaaggagugcaagcacuucgcccucacccacuacgccgcccagcccggcggcuacuacaacggcacccgcgaggaccgcaacaagcuccgccaccucaucuccgucucccucggcaagauccccaccgucgagaacuccaucuuccacauggccgccugguccggcuccgccugccacgacggccgcgaguggaccuacaucggcgucgacggccccgacuccaacgcccucaucaagaucaaguacggcgaggccuacaccgacaccuaccacuccuacgccaacaacauccuccgcacccaggaguccgccugcaacugcaucggcggcgacugcuaccucaugaucaccgacggcuccgccuccggcaucuccaagugccgcuuccucaagauccgcgagggccgcaucaucaaggagaucuuccccaccggccgcgucgaccacaccgaggagugcaccugcggcuucgccuccaacaagaccaucgagugcgccugccgcgacaacuccuacaccgccaagcgccccuucgucaagcucaacgucgagaccgacaccgccgagauccgccucaugugcaccgagaccuaccucgacaccccccgccccgacgacggcuccaucaccggccccugcgaguccaacggcgacaagggccgcggcggcaucaagggcggcuucguccaccagcgcauggccuccaagaucggccgcugguacucccgcaccauguccaagaccgagcgccucggcauggagcucuacgucaaguacgacggcgaccccuggaccgacuccgacgcccucgcccccuccggcgucauggucuccgccgaggagcccggcugguacuccuucggcuucgagaucaaggacaagaagugcgacguccccugcaucggcaucgagaugguccacgacggcggcaagaagaccuggcacuccgccgccaccgccaucuacugccucaugggcuccggccagcuccucugggacaccgucaccggcgucgacauggcccucuga

SEQ ID NO: 124715 - RNA, 1401 nt, Artificial Sequence
  derived and/or modified CDS sequence (opt2) from neuraminidase__InfluenzaB__ABL77336
augcuccccuccaccauccagacccucacccucuuccucaccuccggcggcguccuccucucccucuacgucuccgccucccucuccuaccuccucuacuccgacauccuccucaaguucucccccaccgagaucaccgccccccccaugccccucgacugcgccaacgccuccaacguccaggccgucaaccgcuccgccaccaagggcgucacccuccuccuccccgagcccgaguggaccuacccccgccucuccugccccggcuccaccuuccagaaggcccuccucaucuccccccaccgcuucggcgagacccgcggcaacuccgccccccucaucauccgcgagcccuucaucgccugcggccccaaggagugcaagcacuucgccaucacccacuacgccgcccagcccggcggcuacuacaacggcacccgcgaggaccgcaacaagcuccgccaccucaucuccgucaagcucggcaagauccccaccgucgagaacuccaucuuccacauggccgccugguccggcuccgccugccacgacggccgcgaguggaccuacaucggcgucgacggccccgacuccaacgcccuccucaagaucaaguacggcgaggccuacaccgacaccuaccacuccuacgccaacaacauccuccgcacccaggaguccgccugcaacugcaucggcggcgacugcuaccucaugaucaccgacggcuccgccuccggcaucuccaagugccgcuuccucaagauccgcgagggccgcaucaucaaggagaucuuccccaccggccgcgucgagcacaccgaggagugcaccugcggcuucgccuccaacaagaccaucgagugcgccugccgcgacaacuccuacaccgccaagcgccccuucgucaagcucaacgucgagaccgacaccgccgagauccgccucaugugcaccgagaccuaccucgacaccccccgccccgacgacggcuccaucaccggccccugcgaguccaacggcgacaagggccgcggcggcaucaagggcggcuucguccaccagcgcauggccuccaagaucggccgcugguacucccgcaccauguccaagaccgaccgcaugggcauggagcucuacgucaaguacgacggcgaccccuggaccgacuccgacgcccucgcccucuccggcgucauggucuccauggaggagcccggcugguacuccuucggcuucgagaucaaggacaagaagugcgacguccccugcaucggcaucgagaugguccacgacggcggcaagaagaccuggcacuccgccgccaccaccaucuacugccucaugggcuccggccagcuccucugggacaccgucaccggcgucgacauggcccucuga

SEQ ID NO: 124716 - RNA, 1401 nt, Artificial Sequence
  derived and/or modified CDS sequence (opt2) from neuraminidase__InfluenzaB__ABL77347
augcuccccuccaccauccagacccucacccucuuccucaccuccggcggcguccuccucucccucuacgucuccgccucccucuccuaccuccucuacuccgacauccuccucaaguucucccccaccaagaucaccgcccccaccaugccccucgacugcgccaacgccuccaacguccaggccgucaaccacuccgccaccaagggcgucacccuccuccuccccgagcccgaguggaccuacccccgccucuccugccccggcuccaccuuccagaaggcccuccucaucuccccccaccgcuucggcgagacccgcggcaacuccgccccccucaucauccgcgagcccuucaucgccugcggccccaaggagugcaagcacuucgcccucacccacuacgccgcccagcccggcggcuacuacaacggcacccgcgaggaccgcaacaagcuccgccaccucaucuccgucaagcucggcaagauccccaccgucgagaacuccaucuuccacauggccgccugguccggcuccgccugccacgacggccgcgaguggaccuacaucggcgucgacggccccgacuccaacgcccuccucaagaucaaguacggcgaggccuacaccgacaccuaccacuccuacgccaacaacauccuccgcacccaggaguccgccugcaacugcaucggcggcgacugcuaccucaugaucaccgacggcuccgccuccggcaucuccgagugccgcuuccucaagauccgcgagggccgcaucaucaaggagaucuuccccaccggccgcgucgagcacaccgaggagugcaccugcggcuucgccuccaacaagaccaucgagugcgccugccgcgacaacuccuacaccgccaagcgccccuucgucaagcucaacgucgagaccgacaccgccgagauccgccucaugugcaccgagaccuaccucgacaccccccgccccgacgacggcuccaucaccggccccugcgaguccaacggcgacaagggcuccggcggcaucaagggcggcuucguccaccagcgcauggccuccaagaucggccgcugguacucccgcaccauguccaagaccaagcgcaugggcaugggccucuacgucaaguacgacggcgaccccuggaccgacuccgacgcccucgcccucuccggcgucauggucuccauggaggagcccggcugguacuccuucggcuucgagaucaaggacaagaagugcgacguccccugcaucggcaucgagaugguccacgacggcggcaagaagaccuggcacuccgccgccaccgccaucuacugccucaugggcuccggccagcuccucugggacaccgucaccggcgucgacauggcccucuga

SEQ ID NO: 124717 - RNA, 1398 nt, Artificial Sequence
  derived and/or modified CDS sequence (opt2) from neuraminidase__InfluenzaB__ABL77380
augcuccccuccaccauccagacccucacccucuuccucaccuccggcggcguccuccucucccucuacgucuccgcccuccucuccuaccuccucuacuccgacauccuccucaaguucucccccaagaucaucgcccccaccaccucccucgacugcgccaacgccuccaacguccaggccgucaaccacuccgccaccaaggagaugaaguuccucccccccgagcccgaguggaccuacccccgccucuccugccagggcuccaccuuccagaaggcccuccucaucuccccccaccgcuucggcgaggccaagggcaacuccgccccccucaucauccgcgagcccuucaucgccugcggccccaaggagugcaagcacuucgcccucacccacuacgccgcccagcccggcggcuacuacaacggcacccgcgaggaccgcaacaagcuccgccaccucaucuccgucaaccucggcaagauccccaccgucgagaacuccaucuuccacauggccgccugguccggcuccgccugccacgacggccgcgaguggaccuacaucggcgucgacggccccgacuccaacgcccucaucaagaucaaguacggcgaggccuacaccgacaccuaccacuccuacgccaacaacauccuccgcacccaggaguccgccugcaacugcaucggcggcgacugcuaccucaugaucaccgacggcuccgccuccggcaucuccaagugccgcuuccucaagauccgcgagggccgcaucaucaaggagaucuuccccaccggccgcgucgagcacaccgaggagugcaccugcggcuucgccuccaacaagaccaucgagugcgccugccgcgacaacuccuacaccgccaagcgccccuucgucaagcucaacgucgagaccgacaccgccgagauccgccucaugugcaccgagaccuaccucgacaccccccgccccgacgacggcuccaucaccggccccugcgaguccaacggcgacaagggcuccggcggcgucaagggcggcuucguccaccagcgcauggccuccaagaucggccgcugguacucccgcaccauguccaagaccaagcgcaugggcauggagcucuacgucaaguacgacggcgaccccuggaccgacuccgacgcccucgcccccuccggcgucauggucuccauggaggagcccggcugguacuccuucggcuucgagaucaaggacaagaagugcgacguccccugcaucggcaucgagaugguccacgacggcggcaagcgcaccuggcacuccgccgccaccgccaucuacugccucaugggcuccggccagcuccucugggacaccgucaccggcgucaacauggcccucuga

SEQ ID NO: 124718 - RNA, 1401 nt, Artificial Sequence
  derived and/or modified CDS sequence (opt2) from neuraminidase__InfluenzaB__ABL77391
augcuccccuccaccauccagacccucacccucuuccucaccuccggcggcguccuccucucccucuacgucuccgccucccucuccuaccuccucuacuccgacauccuccucaaguucucccccaccgagaucaccgcccccaccaugccccucgacugcgccaacgccuccaacguccaggccgucaaccgcuccgccaccaagggcgucacccuccuccuccccgagcccgaguggaccuacccccgccucuccugccccggcuccaccuuccagaaggcccuccucaucuccccccaccgcuucggcgagaccaagggcaacuccgccccccucaucauccgcgagcccuucaucgccugcggccccaaggagugcaagcacuucgcccucacccacuacgccgcccagcccggcggcuacuacaacggcacccgcggcgaccgcaacaagcuccgccaccucaucuccgucaagcucggcaagauccccaccgucgagaacuccaucuuccacauggccgccugguccggcuccgccugccacgacggcaaggaguggaccuacaucggcgucgacggccccgacaacaacgcccuccucaagaucaaguacggcgaggccuacaccgacaccuaccacuccuacgccaacaacauccuccgcacccaggaguccgccugcaacugcaucggcggcaacugcuaccucaugaucaccgacggcuccgccuccggcgucuccgagugccgcuuccucaagauccgcgagggccgcaucaucaaggagaucuuccccaccggccgcgucaagcacaccgaggagugcaccugcggcuucgccuccaacaagaccaucgagugcgccugccgcgacaacuccuacaccgccaagcgccccuucgucaagcucaacgucgagaccgacaccgccgagauccgccucaugugcaccgagaccuaccucgacaccccccgccccgacgacggcuccaucaccggccccugcgaguccaacggcgacaagggcuccggcggcaucaagggcggcuucguccaccagcgcauggccuccaagaucggccgcugguacucccgcaccauguccaagaccaagcgcaugggcaugggccucuacgucaaguacgacggcgaccccugggccgacuccgacgcccucgcccucuccggcgucauggucuccauggaggagcccggcugguacuccuucggcuucgagaucaaggacaagaagugcgacguccccugcaucggcaucgagaugguccacgacggcggcaaggagaccuggcacuccgccgccaccgccaucuacugccucaugggcuccggccagcuccucugggacaccgucaccggcgucgacauggcccucuga

SEQ ID NO: 124719 - RNA, 1401 nt, Artificial Sequence
  derived and/or modified CDS sequence (opt2) from neuraminidase__InfluenzaB__ABL84344
augcuccccuccaccauccagacccucacccucuuccucaccuccggcggcguccuccucucccucuacgucuccgccucccucuccuaccuccucuacuccgacauccuccucaaguucuccuccaccgagaucaccgcccccaccaugccccucaacugcgccaacgccuccaacguccaggccgucaaccacuccgccaccaagggcgucacccucccccuccccgagcccgaguggaccuacccccgccucuccugccccggcuccaccuuccagaaggcccuccucaucuccccccaccgcuucggcgagaccaagggcaacuccgccccccucaucauccgcgagcccuucaucgccugcggccccaaggagugcaagcacuucgcccucacccacuacgccgcccagcccggcggcuacuacaacggcacccgcgaggaccgcaacaagcuccgccaccucaucuccgucaagcucggcaagauccccaccgucgagaacuccaucuuccacauggccgccugguccggcuccgccugccacgacggccgcgaguggaccuacaucggcgucgacggccccgacuccaacgcccuccucaagaucaaguacggcgaggccuacaccgacaccuaccacuccuacgccaacaacauccuccgcacccaggaguccgccugcaacugcaucggcggcgacugcuaccucaugaucaccgacggcuccgccuccggcgucuccgagugccgcuuccucaagauccgcgagggccgcaucaucaaggagaucuuccccaccggccgcgucgagcacaccgaggagugcaccugcggcuucgccuccaacaagaccaucgagugcgccugccgcgacaacuccuacaccgccaagcgccccuucgucaagcucaacgucgagaccgacaccgccgagauccgccucaugugcaccgagaccuaccucgacaccccccgccccgacgacggcuccaucaccggccccugcgaguccaacggcgacaagggcuccggcggcaucaagggcggcuucguccaccagcgcauggccuccaagaucggccgcugguacucccgcaccauguccaagaccaagcgcaugggcaugggccucuacgucaaguacgacggcgaccccuggaucgacuccgacgcccucacccucuccggcgucauggucuccauggaggagcccggcugguacuccuucggcuucgagaucaaggacaagaagugcgacguccccugcaucggcaucgagaugguccacgacggcggcaaggagaccuggcacuccgccgccaccgccaucuacugccucaugggcuccggccagcuccucugggacaccgucaccggcgucgacauggcccucuga

SEQ ID NO: 124720 - RNA, 1401 nt, Artificial Sequence
  derived and/or modified CDS sequence (opt2) from neuraminidase__InfluenzaB__ABN50397
augcuccccuccaccauccagacccucacccucuuccucaccuccggcggcguccuccucucccucuacgucuccgccucccucuccuaccuccucuacuccgacauccuccucaaguucucccccaccgagaucaccgcccccaccaugccccucaacugcgccaacgccuccaacguccaggccgucaaccgcuccgccaccaagggcgucacccuccuccuccccgagcccgaguggaccuacccccgccucuccugccccggcuccaccuuccagaaggcccuccucaucuccccccaccgcuucggcgagaccaagggcaacuccgccccccucaucauccgcgagcccuucaucgccugcggccccaaggagugcaagcacuucgcccucacccacuacgccgcccagcccggcggcuacuacaacggcacccgcgaggaccgcaacaagcuccgccaccucaucuccgucaagcucggcaagauccccaccgucgagaacuccaucuuccacauggccgccugguccggcuccgccugccacgacggccgcgaguggaccuacaucggcgucgacggccccgacuccaacgcccuccucaagaucaaguacggcgaggccuacaccgacaccuaccacuccuacgccaacaacauccuccgcacccaggaguccgccugcaacugcaucggcggcgacugcuaccucaugaucaccgacggcuccgccuccggcaucuccgagugccgcuuccucaagauccgcgagggccgcaucaucaaggagaucuuccccaccggccgcgucgagcacaccgaggagugcaccugcggcuucgccuccaacaagaccaucgagugcgccugccgcgacaacuccuacaccgccaagcgccccuucgucaagcucaacgucgagaccgacaccgccgagauccgccucaugugcaccgagaccuaccucgacaccccccgccccgacgacggcuccaucaccggccccugcgaguccaacggcgacaagggcuccggcggcaucaagggcggcuucguccaccagcgcauggccuccaagaucggccgcugguacucccgcaccauguccaagaccaagcgcaugggcaugggccucuacgucaaguacgacggcgaccccuggaucgacuccgacgcccucacccucuccggcgucauggucuccauggaggagcccggcugguacuccuucggcuucgagaucaaggacaagaagugcgacguccccugcaucggcaucgagaugguccacgacggcggcaagaagaccuggcacuccgccgccaccgccaucuacugccucaugggcuccggccagcuccucugggacaccgucaccggcgucgacauggaccucuga

SEQ ID NO: 124721 - RNA, 1401 nt, Artificial Sequence
  derived and/or modified CDS sequence (opt2) from neuraminidase__InfluenzaB__ABN50408
augcuccccuccaccauccagacccucacccucuuccucaccuccggcggcguccuccucucccucuacgucuccgccucccucuccuaccuccucuacuccgacauccuccucaaguucucccccaccgagaucaccgcccccaccaugccccucaacugcgccaacgccuccaacguccaggccgucaaccgcuccgccaccaagggcgucacccucccccuccccgagcccgaguggaccuacccccgccucuccugccccggcuccaccuuccagaaggcccuccucaucuccccccaccgcuucggcgagaccaagggcaacuccgccccccucaucauccgcgagcccuucaucgccugcggccccaaggagugcaagcacuucgcccucacccacuacgccgcccagcccggcggcuacuacaacggcacccgcgaggaccgcaacaagcuccgccaccucaucuccgucaagcucggcaagauccccaccgucgagaacuccaucuuccacauggccgccugguccggcuccgccugccacgacggccgcgaguggaccuacaucggcgucgacggccccgacuccaacgcccuccucaagaucaaguacggcgaggccuacaccgacaccuaccacuccuacgccaacaacauccuccgcacccaggaguccgccugcaacugcaucggcggcgacugcuaccucaugaucaccgacggcuccgccuccggcaucuccgagugccgcuuccucaagauccgcgagggccgcaucaucaaggagaucuuccccaccggccgcgucgagcacaccgaggagugcaccugcggcuucgccuccaacaagaccaucgagugcgccugccgcgacaacuccuacaccgccaagcgccccuucgucaagcucaacgucgagaccgacaccgccgagauccgccucaugugcaccgagaccuaccucgacaccccccgccccgacgacggcuccaucaccggccccugcgaguccaacggcgacaagggcuccggcggcaucaagggcggcuucguccaccagcgcauggccuccaagaucggccgcugguacucccgcaccauguccaagaccaagcgcaugggcaugggccucuacgucaaguacgacggcgaccccuggaucgacuccgacgcccucacccucuccggcgucauggucuccauggaggagcccggcugguacuccuucggcuucgagaucaaggacaagaagugcgacguccccugcaucggcaucgagaugguccacgacggcggcaagaagaccuggcacuccgccgccaccgccaucuacugccucaugggcuccggccagcuccucugggacaccgucaccggcgucgacauggcccucuga

SEQ ID NO: 124722 - RNA, 1401 nt, Artificial Sequence
  derived and/or modified CDS sequence (opt2) from neuraminidase__InfluenzaB__ABN50419
augcuccccuccaccauccagacccucacccucuuccucaccuccggcggcguccuccucucccucuacgucuccgccucccucuccuaccuccucuacuccgacauccuccucaaguucucccccaccgagaucaccgcccccaccaugccccucgacugcgccaacgccuccaacguccaggccgucaaccgcuccgccaccaagggcgucacccuccuccuccccgagcccgaguggaccuacccccgccucuccugccccggcuccaccuuccagaaggcccuccucaucuccccccaccgcuucggcgagaccaagggcaacuccgccccccucaucauccgcgagcccuucaucgccugcggccccaaggagugcaagcacuucgcccucacccacuacgccgcccagcccggcggcuacuacaacggcacccgcggcgaccgcaacaagcuccgccaccucaucuccgucaagcucggcaagauccccaccgucgagaacuccaucuuccacauggccgccugguccggcuccgccugccacgacggcaaggaguggaccuacaucggcgucgacggccccgacuccaacgcccuccucaagaucaaguacggcgaggccuacaccgacaccuaccacuccuacgccaacaacauccuccgcacccaggaguccgccugcaacugcaucggcggcaacugcuaccucaugaucaccgacggcuccgccuccggcaucuccgagugccgcuuccucaagauccgcgagggccgcaucaucaaggagaucuuccccaccggccgcgucaagcacaccgaggagugcaccugcggcuucgccuccaacaagaccaucgagugcgccugccgcgacaacuccuacaccgccaagcgccccuucgucaagcucaacgucgagaccgacaccgccgagauccgccucaugugcaccgagaccuaccucgacaccccccgccccgacgacggcuccaucaccggccucugcgaguccaacggcgacaagggcuccggcggcaucaagggcggcuucguccaccagcgcauggccuccaagaucggccgcugguacucccgcaccauguccaagaccaagcgcaugggcaugggccucuacgucaaguacgacggcgaccccuggaccgacuccgacgcccucgcccucuccggcgucauggucuccauggaggagcccggcugguacuccuucggcuucgagaucaaggacaagaagugcgacguccccugcaucggcaucgagaugguccacgacggcggcaaggagaccuggcacuccgccgccaccgccaucuacugccucaugggcuccggccagcuccucugggacaccgucaccggcgucgacauggcccucuga

SEQ ID NO: 124723 - RNA, 1401 nt, Artificial Sequence
  derived and/or modified CDS sequence (opt2) from neuraminidase__InfluenzaB__ABN50430
augcuccccuccaccauccagacccucacccucuuccucaccuccggcggcguccuccucucccucuacgucuccgccucccucuccuaccuccucuacuccgacauccuccucaaguucucccccaccgagaucaccgcccccaccaugccccucgacugcgccaacgccuccaacguccaggccgucaaccgcuccgccaccaagggcgucacccuccuccuccccgagcccgaguggaccuacccccgccucuccugccccggcuccaccuuccagaaggcccuccucaucuccccccaccgcuucggcgagaccaagggcaacuccgccccccucaucauccgcgagcccuucaucgccugcggccccaaggagugcaagcacuucgcccucacccacuacgccgcccagcccggcggcuacuacaacggcacccgcggcgaccgcaacaagcuccgccaccucaucuccgucaagcucggcaagauccccaccgucgagaacuccaucuuccacauggccgccugguccggcuccgccugccacgacggcaaggaguggaccuacaucggcgucgacggccccgacuccaacgcccuccucaagaucaaguacggcgaggccuacaccgacaccuaccacuccuacgccaacaacauccuccgcacccaggaguccgccugcaacugcaucggcggcaacugcuaccucaugaucaccgacggcuccgccuccggcaucuccgagugccgcuuccucaagauccgcgagggccgcaucaucaaggagaucuuccccaccggccgcgucaagcacaccgaggagugcaccugcggcuucgccuccaacaagaccaucgagugcgccugccgcgacaacuccuacaccgccaagcgccccuucgucaagcucaacgucgagaccgacaccgccgagauccgccucaugugcaccgagaccuaccucgacaccccccgccccgacgacggcuccaucaccggccccugcgaguccaacggcgacaagggcuccggcggcaucaagggcggcuucguccaccagcgcauggccuccaagaucggccgcugguacucccgcaccauguccaagaccaagcgcaugggcaugggccucuacgucaaguacgacggcgaccccuggaccgacuccgacgcccucgcccucuccggcgucauggucuccauggaggagcccggcugguacuccuucggcuucgagaucaaggacaagaagugcgacguccccugcaucggcaucgagaugguccacgacggcggcaaggagaccuggcacuccgccgccaccgccaucuacugccucaugggcuccggccagcuccucugggacaccgucaccggcgucgacauggcccucuga

SEQ ID NO: 124724 - RNA, 1401 nt, Artificial Sequence; identical to SEQ ID NO: 124706
  derived and/or modified CDS sequence (opt2) from neuraminidase__InfluenzaB__ABN50463

SEQ ID NO: 124725 - RNA, 1401 nt, Artificial Sequence; identical to SEQ ID NO: 124620
  derived and/or modified CDS sequence (opt2) from neuraminidase__InfluenzaB__ABN50474

SEQ ID NO: 124726 - RNA, 1401 nt, Artificial Sequence
  derived and/or modified CDS sequence (opt2) from neuraminidase__InfluenzaB__ABN50485
augcuccccuccaccauccagacccucacccucuuccucaccuccggcggcguccuccucucccucuacgucuccgccucccucuccuaccuccucuacuccgacauccuccucaaguucucccccaccgagaucaccgcccccaccaugccccucgacugcgccaacgccuccaacguccaggccgucaaccgcuccgccaccaagggcgucacccuccuccuccccgagcccgaguggaccuacccccgccucuccugccccggcuccaccuuccagaaggcccuccucaucuccccccaccgcuucggcgagaccaagggcaacuccgccccccucaucauccgcgagcccuucaucgccugcggccccaaggagugcaagcacuucgcccucacccacuacgccgcccagcccggcggcuacuacaacggcacccgcggcgaccgcaacaagcuccgccaccucaucuccgucaagcucggcaagauccccaccgucgagaacuccaucuuccacauggccgccugguccggcuccgccugccacgacggcaaggaguggaccuacaucggcgucgacggccccgacuccaacgcccuccucaagaucaaguacggcgaggccuacaccgacaccuaccacuccuacgccaacaacauccuccgcacccaggaguccgccugcaacugcaucggcggcaacugcuaccucaugaucaccgacggcuccgccuccggcaucuccgagugccgcuuccucaagauccgcgagggccgcaucaucaaggagaucuuccccaccggccgcgucaagcacaccgaggagugcaccugcggcuucgccuccaacaagaccaucgagugcgccugccgcgacaacuccuacaccgccaagcgccccuucgucaagcucaacgucgagaccgacaccgccgagauccgccucaugugcaccgagaccuaccucgacaccccccgccccgacgacggcuccaucaccggccccugcgaguucaacggcgacaagggcuccggcggcaucaagggcggcuucguccaccagcgcauggccuccaagaucggccgcugguacucccgcaccauguccaagaccaagcgcaugggcaugggccucuacgucaaguacgacggcgaccccuggaccgacuccgacgcccucgcccucuccggcgucauggucuccauggaggagcccggcugguacuccuucggcuucgagaucaaggacaagaagugcgacguccccugcaucggcaucgagaugguccacgacggcggcaaggagaccuggcacuccgccgccaccgccaucuacugccucaugggcuccggccagcuccucugggacaccgucaccggcgucgacauggcccucuga

SEQ ID NO: 124727 - RNA, 1401 nt, Artificial Sequence
  derived and/or modified CDS sequence (opt2) from neuraminidase__InfluenzaB__ABN50496
augcuccccuccaccauccagacccucacccucuuccucaccuccggcggcguccuccucucccucuacgucuccgccucccucuccuaccuccucuacuccgacauccuccucaaguuccccuccaccgagaucaccgcccccaccaugccccucgacugcgccaacgccuccaacguccaggccgucaaccgcuccgccaccaagcgcgucacccuccuccuccccgagcccgaguggaccuacccccgccucuccugccccggcuccaccuuccagaaggcccuccucaucuccccccaccgcuucggcgagaccaagggcaacuccgccccccucaucauccgcgagcccuucaucgccugcggccccaaggagugcaagcacuucgcccucacccacuacgccgcccagcccggcggcuacuacaacggcacccgcggcgaccgcaacaagcuccgccaccucaucuccgucaagcucggcaagauccccaccgucgagaacuccaucuuccacauggccgccugguccggcuccgccugccacgacggcaaggaguggaccuacaucggcgucgacggccccgacaacaacgcccuccucaagaucaaguacggcgaggccuacaccgacaccuaccacuccuacgccaacaacauccuccgcacccaggaguccgccugcaacugcaucggcggcaacugcuaccucaugaucaccgacggcuccgccuccggcgucuccgagugccgcuuccucaagauccgcgagggccgcaucaucaaggagaucuuccccaccggccgcaucaagcacaccgaggagugcaccugcggcuucgccuccaacaagaccaucgagugcgccugccgcgacaacuccuacaccgccaagcgccccuucgucaagcucaacgucgagaccgacaccgccgagauccgccucaugugcaccgagaccuaccucgacaccccccgccccgacgacggcuccaucaccggccccugcgaguccaacggcgacaagggcuccggcggcaucaagggcggcuucguccaccagcgcauggccuccaagaucggccgcugguacucccgcaccauguccaagaccaagcgcaugggcaugggccucuacgucaaguacgacggcgaccccugggccgacuccgacgcccucgccuucuccggcgucauggucuccauggaggagcccggcugguacuccuucggcuucgagaucaaggacaagaagugcgacguccccugcaucggcaucgagaugguccacgacggcggcaaggagaccuggcacuccgccgccaccgccaucuacugccucaugggcuccggccagcuccucugggacaccgucaccggcgucaacauggcccucuga

SEQ ID NO: 124728 - RNA, 1401 nt, Artificial Sequence
  derived and/or modified CDS sequence (opt2) from neuraminidase__InfluenzaB__ABN50507
augcuccccuccaccauccagacccucacccucuuccucaccuccggcggcguccuccucucccucuacgucuccgccucccucuccuaccuccucuacuccgacauccuccucaaguucucccccaccgagaucaccgcccccaccaugccccucaacugcgccaacgccuccaacguccaggccgucaaccgcuccgccaccaagggcgucacccucccccuccccgagcccgaguggaccuacccccgccucuccugccccggcuccaccuuccagaaggcccuccucaucuccccccaccgcuucggcgagaccaagggcaacuccgccccccucaucauccgcgagcccuucaucgccugcggccccaaggagugccgccacuucgcccucacccacuacgccgcccagcccggcggcuacuacaacggcacccgcgaggaccgcaacaagcuccgccaccucaucuccgucaagcucggcaagauccccaccgucgagaacuccaucuuccacauggccgccugguccggcuccgccugccacgacggccgcgaguggaccuacaucggcgucgacggccccgacuccaacgcccuccucaagaucaaguacggcgaggccuacaccgacaccuaccacuccuacgccaacaacauccuccgcacccaggaguccgccugcaacugcaucggcggcgacugcuaccucaugaucaccgacggcuccgccuccggcaucuccgagugccgcuuccucaagauccgcgagggccgcaucaucaaggagaucuuccccaccggccgcgucgagcacaccgaggagugcaccugcggcuucgccuccaacaagaccaucgagugcgccugccgcgacaacuccuacaccgccaagcgccccuucgucaagcucaacgucgagaccgacaccgccgagauccgccucaugugcaccgagaccuaccucgacaccccccgccccgacgacggcuccaucaccggccccugcgaguccaacggcgacaagggcuccggcggcaucaagggcggcuucguccaccagcgcauggccuccaagaucggccgcugguacucccgcaccauguccaagaccaagcgcaugggcaugggccucuacgucaaguacgacggcgaccccuggaucgacuccgacgcccucacccucuccggcgucauggucuccauggaggagcccggcugguacuccuucggcuucgagaucaaggacaagaagugcgacguccccugcaucggcaucgagaugguccacgacggcggcaagaagaccuggcacuccgccgccaccgccaucuacugccucaugggcuccggccagcuccucugggacaccgucaccggcgucgacauggcccucuga

SEQ ID NO: 124729 - RNA, 1401 nt, Artificial Sequence; identical to SEQ ID NO: 124627
  derived and/or modified CDS sequence (opt2) from neuraminidase__InfluenzaB__ABN50518

SEQ ID NO: 124730 - RNA, 1401 nt, Artificial Sequence; identical to SEQ ID NO: 124627
  derived and/or modified CDS sequence (opt2) from neuraminidase__InfluenzaB__ABN50529

SEQ ID NO: 124731 - RNA, 1401 nt, Artificial Sequence; identical to SEQ ID NO: 124620
  derived and/or modified CDS sequence (opt2) from neuraminidase__InfluenzaB__ABN50540

SEQ ID NO: 124732 - RNA, 1401 nt, Artificial Sequence; identical to SEQ ID NO: 124652
  derived and/or modified CDS sequence (opt2) from neuraminidase__InfluenzaB__ABN50551

SEQ ID NO: 124733 - RNA, 1401 nt, Artificial Sequence
  derived and/or modified CDS sequence (opt2) from neuraminidase__InfluenzaB__ABN50562
augcuccccuccaccauccagacccucacccucuuccucaccuccggcggcgcccuccucucccucuacgucuccgcccuccucuccuaccuccucuacuccgacauccuccucaaguucucccccaccaaggucaucgcccccaccaugucccucgacuacaccaacgccuccaacguccaggccgucaaccacuccgccaccgaggagaugaccuuccuccuccccgagcccgaguggaccuacccccgccucuccugccagggcuccaccuuccagaaggcccuccucaucuccccccaccgcuucggcgaggccaagggcaacuccgccccccucaucauccgcgagcccuucaucgccugcggccccaaggagugcaagcacuucgcccucacccacuacgccgcccagcccggcggcuacuacaacggcacccgcgaggaccgcaacaagcuccgccaccucaucuccgucaaccucggcaagauccccaccgucgagaacuccaucuuccacauggccgccugguccggcuccgccugccacgacggccgcgaguggaccuacaucggcgucgacggccccgacuccaacgcccucaucaagaucaaguacggcgaggccuacaccgacaccuaccacuccuacgccaacaacauccuccgcacccaggaguccgccugcaacugcaucggcggcgacugcuaccucaugaucaccgacggcuccgccuccggcaucucccgcugccgcuuccucaagauccgcgagggccgcaucaucaaggagaucuuccccaccggccgcgucgagcacaccgaggagugcaccugcggcuucgccuccaacaagaccaucgagugcgccugccgcgacaacuccuacaccgccaagcgccccuucgucaagcucaacgucgagaccgacaccgccgagauccgccucaugugcaccgagaccuaccucgacaccccccgccccgacgacggcuccaucaccggccccugcgaguccaacggcgacaagggcaacggcggcaucaagggcggcuucguccaccagcgcauggccucccgcaucggccgcugguacucccgcaccauguccaagaccaagcgcaugggcauggagcucuacgucaaguacgacggcgaccccuggaccgacuccgacgcccucgcccccuccggcgucauggucuccauggaggagcccggcugguacuccuucggcuucgagaucaaggacaagaagugcgacguccccugcaucggcaucgagaugguccacgacggcggcaagaagaccuggcacuccgccgccaccgccaucuacugccucaugggcuccggccagcuccucugggacaccgucaccggcgucgacauggcccucuga

SEQ ID NO: 124734 - RNA, 1401 nt, Artificial Sequence; identical to SEQ ID NO: 124723
  derived and/or modified CDS sequence (opt2) from neuraminidase__InfluenzaB__ABN50573

SEQ ID NO: 124735 - RNA, 1401 nt, Artificial Sequence
  derived and/or modified CDS sequence (opt2) from neuraminidase__InfluenzaB__ABN50584
augcuccccuccaccauccagacccucacccucuuccucaccuccggcggcguccuccucucccucuacgucuccgccucccucuccuaccuccucuacuccgacauccuccucaaguucucccccaccgagaucaccgccuccaccaugccccucgacugcgccaacgccuccaacguccaggccgucaaccgcuccgccaccaagggcgucacccuccuccuccccgagcccgaguggaccuacccccgccucuccugccccggcuccaccuuccagaaggcccuccucaucuccccccaccgcuucggcgagaccaagggcaacuccgccccccucaucauccgcgagcccuucaucgccugcggccccaacgagugcaagcacuucgcccucacccacuacgccgcccagcccggcggcuacuacaacggcacccgcggcgaccgcaacaagcuccgccaccucaucuccgucaagcucggcaagauccccaccgucgagaacuccaucuuccacauggccgccugguccggcuccgccugccacgacggcaaggaguggaccuacaucggcgucgacggccccgacaacaacgcccuccucaagaucaaguacggcgaggccuacaccgacaccuaccacuccuacgccaacaacauccuccgcacccaggaguccgccugcaacugcaucggcggcaacugcuaccucaugaucaccgacggcuccgccuccggcgucuccgagugccgcuuccucaagauccgcgagggccgcaucaucaaggagaucuuccccaccggccgcgucaagcacaccgaggagugcaccugcggcuucgccuccaacaagaccaucgagugcgccugccgcgacaacuccuacaccgccaagcgccccuucgucaagcucaacgucgaguccgacaccgccgagauccgccucaugugcaccgagaccuaccucgacaccccccgccccgacgacggcuccaucaccggccccugcgaguccaacggcgacaagggcuccggcggcaucaagggcggcuucguccaccagcgcauggccuccaagaucggccgcugguacucccgcaccauguccaagaccgagcgcaugggcaugggccucuacgucaaguacgacggcgaccccugggccgacuccgacgcccucgcccucuccggcgucauggucuccauggaggagcccggcugguacuccuucggcuucgagaucaaggacaagaagugcgacguccccugcaucggcaucgagaugguccacgacggcggcaaggagaccuggcacuccgccgccaccgccaucuacugccucaugggcuccggccagcuccucugggacaccgucaccggcgucgacauggcccucuga

SEQ ID NO: 124736 - RNA, 1401 nt, Artificial Sequence; identical to SEQ ID NO: 124620
  derived and/or modified CDS sequence (opt2) from neuraminidase__InfluenzaB__ABN50595

SEQ ID NO: 124737 - RNA, 1398 nt, Artificial Sequence
  derived and/or modified CDS sequence (opt2) from neuraminidase__InfluenzaB__ABN50606
augcuccccuccaccauccagacccucacccucuuccucaccuccggcggcguccuccucucccucuacgucuccgccucccucuccuaccuccucuacuccgacauccuccuccgcuucuccuccaagaucaccgcccccaccaugacccucgacugcgccaacgccuccaacguccaggccgucaaccgcuccgccaccaaggagaugaccuuccuccuccccgagcccgaguggaccuacccccgccucuccugccagggcuccaccuuccagaaggcccuccucaucuccccccaccgcuucggcgaggcccgcggcaacuccgccccccucaucauccgcgagcccuucaucgccugcggccccaaggagugcaagcacuucgcccucacccacuacgccgcccagcccggcggcuacuacaacggcacccgcgaggaccgcaacaagcuccgccaccucaucuccgucaagcucggcaagauccccaccgucgagaacuccaucuuccacauggccgccugguccggcuccgccugccacgacggccgcgaguggaccuacaucggcgucgacggccccgacuccaacgcccucaucaagaucaaguacggcgaggccuacaccgacaccuaccacuccuacgccaacaacauccuccgcacccaggaguccgccugcaacugcaucggcggcgacugcuaccucaugaucaccgacggcuccgccuccggcaucuccgagugccgcuuccucaagauccgcgagggccgcaucaucaaggagaucuuccccaccggccgcgucgagcacaccgaggagugcaccugcggcuucgccuccaacaagaccaucgagugcgccugccgcgacaacuccuacaccgccaagcgccccuucgucaagcucaacgucgagaccgacaccgccgagauccgccucaugugcaccgagaccuaccucgacaccccccgccccgacgacggcuccaucaccggccccugcgaguccgacggcgacaagggccgcggcggcaucaagggcggcuucguccaccagcgcauggccuccaagaucggccgcugguacucccgcaccauguccaagaccgagcgcaugggcauggagcucuacgucaaguacgacggcgaccccuggaccgacuccgacgcccucgcccccuccggcgucauggucuccaugaaggagcccggcugguacuccuucggcuucgagaucaaggacaagaagugcgacguccccugcaucggcaucgagaugguccacgacggcggcaagaagaccuggcacuccgccgccaccgccaucuacugccucaugggcuccggccagcuccucugggacaccgucaccggcgucgacauggcccucuga

SEQ ID NO: 124738 - RNA, 1398 nt, Artificial Sequence
  derived and/or modified CDS sequence (opt2) from neuraminidase__InfluenzaB__ABN50628
augcuccccuccaccauccagacccucacccucuuccucaccuccggcggcguccuccucucccucuacgucuccgcccuccucuccuaccuccucuacuccgacauccuccucaaguucucccccaagaucaucgcccccaccaugucccucgacugcgccaacgccuccaacguccaggccgucaaccacuccgccaccaaggagaugaccuuccuccuccccgagcccgaguggaccuacccccgccucuccugccagggcuccaccuuccagaaggcccuccucaucuccccccaccgcuucggcgaggccaagggcaacuccgccccccucaucauccgcgagcccuucaucgccugcggccccaaggagugcaagcacuucgcccucacccacuacgccgcccagcccggcggcuacuacaacggcacccgcgaggaccgcaacaagcuccgccaccucaucuccgucaaccucggcaagauccccaccgucgagaacuccaucuuccacauggccgccugguccggcuccgccugccacgacggccgcgaguggaccuacaucggcgucgacggccccgacuccaacgcccucaucaagaucaaguacggcgaggccuacaccgacaccuaccacuccuacgccaacaacauccuccgcacccaggaguccgccugcaacugcaucggcggcgacugcuaccucaugaucaccgacggcuccgccuccggcaucuccaagugccgcuuccucaagauccgcgagggccgcaucaucaaggagaucuuccccaccggccgcgucgagcacaccgaggagugcaccugcggcuucgccuccaacaagaccaucgagugcgccugccgcgacaacuccuacaccgccaagcgccccuucgucaagcucaacgucgagaccgacaccgccgagauccgccucaugugcaccgagaccuaccucgacaccccccgccccgacgacggcuccaucaccggccccugcgaguccaacggcgacaagggccgcggcggcgucaagggcggcuucguccaccagcgcauggccuccaagaucggccgcugguacucccgcaccauguccaagaccgagcgcaugggcauggagcucuacgucaaguacgacggcgaccccuggaccgacuccgacgcccucgcccccuccggcgucauggucuccauggaggagcccggcugguacuccuucggcuucgagaucaaggacaagaagugcgacguccccugcaucggcaucgagaugguccacgacggcggcaagaagaccuggcacuccgccgccaccgccaucuacugccucaugggcuccggccagcuccucugggacaccgucaccggcgucgacauggcccucuga

SEQ ID NO: 124739 - RNA, 1398 nt, Artificial Sequence
  derived and/or modified CDS sequence (opt2) from neuraminidase__InfluenzaB__ABN50639
augcuccccuccaccauccagacccucacccucuuccucaccuccggcggcguccuccucucccucuacgucuccgcccuccucuccuaccuccucuacuccgacauccuccucaaguucucccccaagaucaucgcccccaccaugucccucgacugcgccaacgccuccaacguccaggccgucaaccacuccgccaccaaggagaugaccuuccuccuccccgagcccgaguggaccuacccccgccucuccugccagggcuccaccuuccagaaggcccuccucaucuccccccaccgcuucggcgaggccaagggcaacuccgccccccucaucauccgcgagcccuucaucgccugcggccccaaggagugcaagcacuucgcccucacccacuacgccgcccagcccggcggcuacuacaacggcacccgcgaggaccgcaacaagcuccgccaccucaucuccgucaagcucggcaagauccccaccgucgagaacuccaucuuccacauggccgccugguccggcuccgccugccacgacggccgcgaguggaccuacaucggcgucgacggccccgacuccaacgcccucgucaagaucaaguacggcgaggccuacaccgacaccuaccacuccuacgccaacaacauccuccgcacccaggaguccgccugcaacugcaucggcggcgacugcuaccucaugaucaccgacggcuccgccuccggcaucuccaagugccgcuuccucaagauccgcgagggccgcaucaucaaggagaucuuccccaccggccgcgucgagcacaccgaggagugcaccugcggcuucgccuccaacaagaccaucgagugcgccugccgcgacaacuccuacaccgccaagcgccccuucgucaagcucaacgucgagaccgacaccgccgagauccgccucaugugcaccgagaccuaccucgacaccccccgccccgacgacggcuccaucaccggccccugcgaguccaacggcgacaagggccgcggcggcgucaagggcggcuucguccaccagcgcauggccuccaagaucggccgcugguacucccgcaccauguccaagaccgagcgcaugggcauggagcucuacgucaaguacgacggcgaccccuggaccgacuccgacgcccucgcccccuccggcgucauggucuccauggaggagcccggcugguacuccuucggcuucgagaucaaggacaagaagugcgacguccccugcaucggcaucgagaugguccacgacggcggcaagaagaccuggcacuccgccgccaccgccaucuacugccucaugggcuccggccagcuccucugggacaccgucaccggcgucgacauggcccucuga

SEQ ID NO: 124740 - RNA, 1398 nt, Artificial Sequence
  derived and/or modified CDS sequence (opt2) from neuraminidase__InfluenzaB__ABN50650
augcuccccuccaccauccagacccucacccucuuccucaccuccggcggcguccuccucucccucuacgucuccgcccuccucuccuaccuccucuacuccgacguccuccucaaguucucccccaagaucaucgcccccaccaugucccucgacugcgccaacgccuccaacguccaggccgucaaccacuccgccaccgaggagaugaccuuccuccuccccgagcccgaguggaccuacccccgccucuccugccagggcuccaccuuccagaaggcccuccucaucuccccccaccgcuucggcgaggccaagggcaacuccgccccccucaucauccgcgagcccuucaucgccugcggccccaaggagugcaagcacuucgcccucacccacuacgccgcccagcccggcggcuacuacaacggcacccgcgaggaccgcaacaagcuccgccaccucaucuccgucaaccucggcaagauccccaccgucgagaacuccaucuuccacauggccgccugguccggcuccgccugccacgacggccgcgaguggaccuacaucggcgucgacggccccgacuccaacgcccucaucaagaucaaguacggcgaggccuacaccgacaccuaccacuccuacgccaacaacauccuccgcacccaggaguccgccugcaacugcaucggcggcgacugcuaccucaugaucaccgacggcuccgccuccggcaucuccaagugccgcuuccucaagauccgcgagggccgcaucaucaaggagaucuuccccaccggccgcgucgagcacaccgaggagugcaccugcggcuucgccuccaacaagaccaucgagugcgccugccgcgacaacuccuacaccgccaagcgccccuucgucaagcucaacgucgagaccgacaccgccgagauccgccucaugugcaccgagaccuaccucgacaccccccgccccgacgacggcuccaucaccggccccugcgaguccaacggcgacaagggccacggcggcaucaagggcggcuucguccaccagcgcauggccuccaagaucggccgcugguacucccgcaccauguccaagaccaagcgcaugggcauggagcucuacgucaaguacgacggcgaccccuggaccgacuccgacgcccucgcccccuccggcgucauggucuccauggaggagcccggcugguacuccuucggcuucgagaucaaggacaagaagugcgacguccccugcaucggcaucgagaugguccacgacggcggcaagaagaccuggcacuccgccgccaccgccaucuacugccucaugggcuccggccagcuccucugggacaccgucaccggcgucgacauggcccucuga

SEQ ID NO: 124741 - RNA, 1398 nt, Artificial Sequence
  derived and/or modified CDS sequence (opt2) from neuraminidase__InfluenzaB__ABN50661
augcuccccuccaccauccagacccucacccucuuccucaccuccggcggcguccuccucucccucuacgucuccgcccuccucuccuaccuccucuacuccgacguccuccucaaguucucccccaagaugaucgcccccaccaugucccucgacugcgccaacgccuccaacguccaggccgucaaccacuccgccaccgaggagaugaccuuccuccuccccgagcccgaguggaccuacccccgccucuccugccagggcuccaccuuccagaaggcccuccucaucuccccccaccgcuucggcgaggccaagggcaacuccgccccccucaucauccgcgagcccuucaucgccugcggccccaaggagugcaagcacuucgcccucacccacuacgccgcccagcccggcggcuacuacaacggcacccgcgaggaccgcaacaagcuccgccaccucaucuccgucaaccucggcaagauccccaccgucgagaacuccaucuuccacauggccgccugguccggcuccgccugccacgacggccgcgaguggaccuacaucggcgucgacggccccgacuccaacgcccucaucaagaucaaguacggcgaggccuacaccgacaccuaccacuccuacgccaacaacauccuccgcacccaggaguccgccugcaacugcaucggcggcgacugcuaccucaugaucaccgacggcuccgccuccggcaucuccaagugccgcuuccucaagauccgcgagggccgcaucaucaaggagaucuuccccaccggccgcgucgagcacaccgaggagugcaccugcggcuucgccuccaacaagaccaucgagugcgccugccgcgacaacuccuacaccgccaagcgccccuucgucaagcucaacgucgagaccgacaccgccgagauccgccucaugugcaccgagaccuaccucgacaccccccgccccgacgacggcuccaucaccggccccugcgaguccaacggcgacaagggccacggcggcaucaagggcggcuucguccaccagcgcauggccuccaagaucggccgcugguacucccgcaccauguccaagaccaagcgcaugggcauggagcucuacgucaaguacgacggcgaccccuggaccgacuccgacgcccucgcccccuccggcgucauggucuccauggaggagcccggcugguacuccuucggcuucgagaucaaggacaagaagugcgacguccccugcaucggcaucgagaugguccacgacggcggcaagaagaccuggcacuccgccgccaccgccaucuacugccucaugggcuccggccagcuccucugggacaccgucaccggcgucgacauggcccucuga

SEQ ID NO: 124742 - RNA, 1401 nt, Artificial Sequence
  derived and/or modified CDS sequence (opt2) from neuraminidase__InfluenzaB__ABN50683
augcuccccuccaccauccagacccucacccucuuccucaccuccggcggcguccuccucucccucuacgucuccgccucccucuccuaccuccucuacuccgacauccuccucaaguucucccccaccgagaucaccgcccccaccaugccccucgacugcgccaacgccuccaacguccaggccgucaaccgcuccgccaccaagggcgucacccuccuccuccccgagcccgaguggaccuacccccgccucuccugccccggcuccaccuuccagaaggcccuccucaucuccccccaccgcuucggcgagacccgcggcaacuccgccccccucaucauccgcgagcccuucaucgccugcggccccaaggagugcaagcacuucgcccucacccacuacgccgcccagcccggcggcuacuacaacggcacccgcgaggaccgcaacaagcuccgccaccucaucuccgucaagcucggcaagauccccaccgucgagaacuccaucuuccacauggccgccugguccggcuccgccugccacgacggccgcgaguggaccuacaucggcgucgacggccccgacuccaacgcccuccucaagaucaaguacggcgaggccuacaccgacaccuaccacuccuacgccaacaacauccuccgcacccaggaguccgccugcaacugcaucggcggcgacugcuaccucaugaucaccgacggcuccgccuccggcaucuccaagugccgcuuccucaagauccgcgagggccgcaucaucaaggagaucuuccccaccggccgcgucgagcacaccgaggagugcaccugcggcuucgccuccaacaagaccaucgagugcgccugccgcgacaacuccuacaccgccaagcgccccuucgucaagcucaacgucgagaccgacaccgccgagauccgccucaugugcaccgagaccuaccucgacaccccccgccccgacgacggcuccaucaccggccccugcgaguccaacggcgacaagggccucggcggcaucaagggcggcuucguccaccagcgcauggccuccaagaucggccgcugguacucccgcaccauguccaagaccaagcgcaugggcauggagcucuacgucaaguacgacggcgaccccuggaccgacuccgacgcccucgcccucuccggcgucaugguccccauggaggagcccggcugguacuccuucggcuucgagaucaaggacaagaagugcgacguccccugcaucggcaucgagaugguccacgacggcggcaagaagaccuggcacuccgccgccaccgccaucuacugccucaugggcuccggccagcuccucugggacaccgucaccggcgucgacauggcccucuga

SEQ ID NO: 124743 - RNA, 1401 nt, Artificial Sequence
  derived and/or modified CDS sequence (opt2) from neuraminidase__InfluenzaB__ABN50694
augcuccccuccaccauccagacccucacccucuuccucaccuccggcggcguccuccucucccucuacgucuccgccucccucuccuaccuccucuacuccgacauccuccucaaguucucccccaccgagaucaccgcccccaccaugccccucgacugcgccaacgccuccaacguccaggccgucaaccgcuccgccaccaagggcgucacccuccuccuccccgagcccgaguggaccuacccccgccucuccugccccggcuccaccuuccagaaggcccuccucaucuccccccaccgcuucggcgagacccgcggcaacuccgccccccucaucauccgcgagcccuucaucgccugcggccccaaggagugcaagcacuucgcccucacccacuacgccgcccagcccggcggcuacuacaacggcacccgcgaggaccgcaacaagcuccgccaccucaucuccgucaagcucggcaagauccccaccgucgagaacuccaucuuccacauggccgccugguccggcuccgccugccacgacggccgcgaguggaccuacaucggcgucgacggccccgacuccaacgcccuccucaagaucaaguacggcgaggccuacaccgacaccuaccacuccuacgccaacaacauccuccgcacccaggaguccgccugcaacugcaucggcggcgacugcuaccucaugaucaccgacggcuccgccuccggcaucuccaagugccgcuuccucaagauccgcgagggccgcaucaucaaggagaucuuccccaccggccgcgucgagcacaccgaggagugcaccugcggcuucgccuccaacaagaccaucgagugcgccugccgcgacaacuccuacaccgccaagcgccccuucgucaagcucaacgucgagaccgacaccgccgagauccgccucaugugcaccgagaccuaccucgacaccccccgccccgacgacggcuccaucaccggccccugcgaguccaacggcgacaagggcuccggcggcaucaagggcggcuucguccaccagcgcauggccuccaagaucggccgcugguacucccgcaccauguccaagaccaagcgcaugggcaugggccucuacgucaaguacgacggcgaccccuggaccgacuccgacgcccucgcccucuccggcgucauggucuccauggaggagcccggcugguacuccuucggcuucgagaucaaggacaagaagugcgacguccccugcaucggcaucgagaugguccacgacggcggcaagaagaccuggcacuccgccgccaccgccaucuacugccucaugggcuccggccagcuccucugggacaccgucaccggcgucgacauggcccucuga

SEQ ID NO: 124744 - RNA, 1398 nt, Artificial Sequence
  derived and/or modified CDS sequence (opt2) from neuraminidase__InfluenzaB__ABN50705
augcuccccuccaccauccagacccucacccucuuccucacccucggcggcguccuccucucccucuacgucuccgcccuccucuccuaccuccucuacuccgacguccuccucaaguucucccccaagaugaucgcccccaccaugucccucgacugcgccaacgccuccaacguccaggccgucaaccacuccgccaccgaggagaugaccuuccuccuccccgagcccgaguggaccuacccccgccucuccugccagggcuccaccuuccagaaggcccuccucaucuccccccaccgcuucggcgaggccaagggcaacuccgccccccucaucauccgcgagcccuucaucgccugcggccccaaggagugcaagcacuucgcccucacccacuacgccgcccagcccggcggcuacuacaacggcacccgcgaggaccgcaacaagcuccgccaccucaucuccgucaaccucggcaagauccccaccgucgagaacuccaucuuccacauggccgccugguccggcuccgccugccacgacggccgcgaguggaccuacaucggcgucgacggccccgacuccaacgcccucaucaagaucaaguacggcgaggccuacaccgacaccuaccacuccuacgccaacaacauccuccgcacccaggaguccgccugcaacugcaucggcggcgacugcuaccucaugaucaccgacggcuccgccuccggcaucuccaagugccgcuuccucaagauccgcgagggccgcaucaucaaggagaucuuccccaccggccgcgucgagcacaccgaggagugcaccugcggcuucgccuccaacaagaccaucgagugcgccugccgcgacaacuccuacaccgccaagcgccccuucgucaagcucaacgucgagaccgacaccgccgagauccgccucaugugcaccgagaccuaccucgacaccccccgccccgacgacggcuccaucaccggccccugcgaguccaacggcgacaagggccacggcggcaucaagggcggcuucguccaccagcgcauggccuccaagaucggccgcugguacucccgcaccauguccaagaccaagcgcaugggcauggagcucuacgucaaguacgacggcgaccccuggaccgacuccgacgcccucgcccccuccggcgucauggucuccauggaggagcccggcugguacuccuucggcuucgagaucaaggacaagaagugcgacguccccugcaucggcaucgagaugguccacgacggcggcaagaagaccuggcacuccgccgccaccgccaucuacugccucaugggcuccggccagcuccucugggacaccgucaccggcgucgacauggcccucuga

SEQ ID NO: 124745 - RNA, 1401 nt, Artificial Sequence
  derived and/or modified CDS sequence (opt2) from neuraminidase__InfluenzaB__ABN50716
augcuccccuccaccauccagacccucacccucuuccucaccuccggcggcguccuccucucccucuacgucuccgccucccucuccuaccuccucuacuccggcauccuccucaaguucucccccaccgagaucaccgcccccaccaugccccucgacugcgccaacgccuccaacguccaggccgucaaccgcuccgccaccaagggcgucacccuccuccuccccgagcccgaguggaccuacccccgccucuccugccccggcuccaccuuccagaaggcccuccucaucuccccccaccgcuucggcgagacccgcggcaacuccgccccccucaucauccgcgagcccuucaucgccugcggccccaaggagugcaagcacuucgcccucacccacuacgccgcccagcccggcggcuacuacaacggcacccgcgaggaccgcaacaagcuccgccaccucaucuccgucaagcucggcaagauccccaccgucgagaacuccaucuuccacauggccgccugguccggcuccgccugccacgacggccgcgaguggaccuacaucggcgucgacggccccgacuccaacgcccuccucaagaucaaguacggcgaggccuacaccgacaccuaccacuccuacgccaacaacauccuccgcacccaggaguccgccugcaacugcaucggcggcgacugcuaccucaugaucaccgacggcuccgccuccggcaucuccaagugccgcuuccucaagauccgcgagggccgcaucaucaaggagaucuuccccaccggccgcgucgagcacaccgaggagugcaccugcggcuucgccuccaacaagaccaucgagugcgccugccgcgacaacuccuacaccgccaagcgccccuucgucaagcucaacgucgagaccgacaccgccgagauccgccucaugugcaccgagaccuaccucgacaccccccgccccgacgacggcuccaucaccggccccugcgaguccaacggcgacaagggcuccggcggcaucaagggcggcuucguccaccagcgcauggccuccaagaucggccgcugguacucccgcaccauguccaagaccaagcgcaugggcaugggccucuacgucaaguacgacggcgaccccuggaccgacuccgacgcccucgcccucuccggcgucauggucuccauggaggagcccggcugguacuccuucggcuucgagaucaaggacaagaagugcgacguccccugcaucggcaucgagaugguccacgacggcggcaagaagaccuggcacuccgccgccaccgccaucuacugccucaugggcuccggccagcuccucugggacaccgucaccggcgucgacauggcccucuga

SEQ ID NO: 124746 - RNA, 1401 nt, Artificial Sequence
  derived and/or modified CDS sequence (opt2) from neuraminidase__InfluenzaB__ABN50727
augcuccccuccaccauccagacccucacccucuuccucaccuccggcggcguccuccucucccucuacgucuccgccucccucuccuaccuccucuacuccgacauccuccucaaguucucccccaccgagaucaccgcccccaccaugccccucgacugcgccaacgccuccaacguccaggccgucaaccgcuccgccaccaagggcgucacccuccuccuccccgagcccgaguggaccuacccccgccucuccugccccggcuccaccuuccagaaggcccuccucaucuccccccaccgcuucggcgagaccaagggcaacuccgccccccucaucauccgcgagcccuucaucgccugcggccccaaggagugcaagcacuucgcccucacccacuacgccgcccagcccggcggcuacuacaacggcacccgcgaggaccgcaacaagcuccgccaccucaucuccgucaagcucggcaagauccccaccgucgagaacuccaucuuccacauggccgccugguccggcuccgccugccacgacggccgcgaguggaccuacaucggcgucgacggccccgacuccaacgcccuccucaagaucaaguacggcgaggccuacaccgacaccuaccacuccuacgccaacaacauccuccgcacccaggaguccgccugcaacugcaucggcggcgacugcuaccucaugaucaccgacggcuccgccuccggcaucuccgagugccgcuuccucaagauccgcgagggccgcaucaucaaggagaucuuccccaccggccgcgucgagcacaccgaggagugcaccugcggcuucgccuccaacaagaccaucgagugcgccugccgcgacaacuccuacaccgccaagcgccccuucgucaagcucaacgucgagaccgacaccgccgagauccgccucaugugcaccgagaccuaccucgacaccccccgccccgacgacggcuccaucaccggccccugcgaguccaacggcgacaagggcuccggcggcaucaagggcggcuucguccaccagcgcauggccuccaagaucggccgcugguacucccgcaccauguccaagaccaagcgcaugggcaugggccucuacgucaaguacgacggcgaccccuggaccgacuccgacgcccucgcccucuccggcgucauggucuccauggaggagcccggcugguacuccuucggcuucgagaucaaggacaagaagugcgacguccccugcaucggcaucgagaugguccacgacggcggcaagaagaccuggcacuccgccgccaccgccaucuacugccucaugggcuccggccagcuccucugggacaccgucaccggcgucgacauggcccucuga

SEQ ID NO: 124747 - RNA, 1401 nt, Artificial Sequence; identical to SEQ ID NO: 124689
  derived and/or modified CDS sequence (opt2) from neuraminidase__InfluenzaB__ABN50738

SEQ ID NO: 124748 - RNA, 1401 nt, Artificial Sequence
  derived and/or modified CDS sequence (opt2) from neuraminidase__InfluenzaB__ABN50749
augcuccccuccaccauccagacccucacccucuuccucaccuccggcggcguccuccucucccucuacgucuccgccucccucuccuaccuccucuacuccgacauccuccucaaguucucccccaccgagaucaccgcccccaccaugccccucgacugcgccaacgccuccaacguccaggccgucaaccgcuccgccaccaagggcgucacccuccuccuccccgagcccgaguggaccuacccccgccucuccugccccggcuccaccuuccagaaggcccuccucaucuccccccaccgcuucggcgagaccaagggcaacuccgccccccucaucauccgcgagcccuucaucgccugcggccccaaggagugcaagcacuucgcccucacccacuacgccgcccagcccggcggcuacuacaacggcacccgcggcgaccgcaacaagcuccgccaccucaucuccgucaagcucggcaagauccccaccgucgagaacuccaucuuccacauggccgccugguccggcuccgccugccacgacggcaaggaguggaccuacaucggcgucgacggccccgacuccaacgcccuccucaagaucaaguacggcgaggccuacaccgacaccuaccacuccuacgccaacaacauccuccgcacccaggaguccgccugcaacugcaucggcggcaacugcuaccucaugaucaccgacggcuccgccuccggcaucuccgagugccgcuuccucaagauccgcgagggccgcaucaucaaggagaucuuccccaccggccgcgucaagcacaccgaggagugcaccugcggcuucgccuccaacaagaccaucgagugcgccugccgcgacaacuccuacaccgccaagcgccccuucgucaagcucaacgucgagaccgacaccgccgagauccgccucaugugcaccgagaccuaccucgacaccccccgccccgacgacggcuccaucaccggccccugcgaguccaacggcgacaagggcuccggcggcaucaagggcggcuucguccaccagcgcauggccuccaagaucggccgcugguacucccgcaccauguccaagaccaagcgcaugggcaugggccucuacgucaaguacgacggcgaccccugggccgacuccgacgcccucgcccucuccggcgucauggucuccauggaggagcccggcugguacuccuucggcuucgagaucaaggacaagaagugcgacguccccugcaucggcaucgagaugguccacgacggcggcaaggagaccuggcacuccgccgccaccgccaucuacugccucaugggcuccggccagcuccucugggacaccgucaccggcgucgacauggcccucuga

SEQ ID NO: 124749 - RNA, 1398 nt, Artificial Sequence
  derived and/or modified CDS sequence (opt2) from neuraminidase__InfluenzaB__ABN51188
augcuccccuccaccauccagacccucacccucuuccucaccuccggcggcguccuccucucccucuacgucuccgcccuccucuccuaccuccucuacuccgacauccuccucaaguucucccccaagaucaucgcccccaccaugcuccucgacugcgccaacgccuccaacguccaggccgucaaccacuccgccaccaaggagaugaccuuccuccuccccgagcccgaguggaccuacccccgccucuccugccagggcuccaccuuccagaaggcccuccucaucuccccccaccgcuucggcgaggccaagggcaacuccgccccccucaucauccgcgagcccuucaucgccugcggccccaaggagugcaagcacuucgcccucacccacuacgccgcccagcccggcggcuacuacaacggcacccgcgaggaccgcaacaagcuccgccaccucaucuccgucaaccucggcaagauccccaccgucgagaacuccaucuuccacauggccgccugguccggcuccgccugccacgacggccgcgaguggaccuacaucggcgucgacggccccgacuccaacgcccucaucaagaucaaguacggcgaggccuacaccgacaccuaccacuccuacgccaacaacauccuccgcacccaggaguccgccugcaacugcaucggcggcgacugcuaccucaugaucaccgacggcuccgccuccggcaucuccaagugccgcuuccucaagauccgcgagggccgcaucaucaaggagaucuuccccaccggccgcgucgagcacaccgaggagugcaccugcggcuucgccuccaacaagaccaucgagugcgccugccgcgacaacuccuacaccgccaagcgccccuucgucaagcucaacgucgagaccgacaccgccgagauccgccucaugugcaccgagaccuaccucgacaccccccgccccgacgacggcuccaucaccggccccugcgaguccaacggcgacaagggccgcggcggcgucaagggcggcuucguccaccagcgcauggccuccaagaucggccgcugguacucccgcaccauguccaagaccgagcgcaugggcauggagcucuacgucaaguacgacggcgaccccuggaccgacuccgacgcccucgcccccuccggcgucauggucuccauggaggagcccggcugguacuccuucggcuucgagaucaaggacaagaagugcgacguccccugcaucggcaucgagaugguccacgacggcggcaagaagaccuggcacuccgccgccaccgccaucuacugccucaugggcuccggccagcuccucugggacaccgucaccggcgucgacauggcccucuga

SEQ ID NO: 124750 - RNA, 1398 nt, Artificial Sequence; identical to SEQ ID NO: 124738
  derived and/or modified CDS sequence (opt2) from neuraminidase__InfluenzaB__ABN51199

SEQ ID NO: 124751 - RNA, 1401 nt, Artificial Sequence
  derived and/or modified CDS sequence (opt2) from neuraminidase__InfluenzaB__ABN58665
augcuccccuccaccauccagacccucacccucuuccucaccuccggcggcguccuccucucccucuacgucuccgcccuccucuccuaccuccucuacuccgacauccuccucaaguucucccccaccaagaucaucgcccccaccaugucccucgacugcgccaacgccuccaacguccaggccgucaaccacuccgccaccgaggagaugaccuuccuccuccccgagcccgaguggaccuacccccgccucuccugccagggcuccaccuuccagaaggcccuccucaucuccccccaccgcuucggcgaggccaagggcaacuccgccccccucaucauccgcgagcccuucaucgccugcggccccaaggagugcaagcacuucgcccucacccacuacgccgcccagcccggcggcuacuacaacggcacccgcgaggaccgcaacaagcuccgccaccucaucuccgucaaccucggcaagauccccaccgucgagaacuccaucuuccacauggccgccugguccggcuccgccugccacgacggccgcgaguggaccuacaucggcgucgacggccccgacuccaacgcccucaucaagaucaaguacggcgaggccuacaccgacaccuaccacuccuacgccaacaacauccuccgcacccaggaguccgccugcaacugcaucggcggcgacugcuaccucaugaucaccgacggcuccgccuccggcaucuccaagugccgcuuccucaagauccgcgagggccgcaucaucaaggagaucuuccccaccggccgcgucgagcacaccgaggagugcaccugcggcuucgccuccaacaagaccaucgagugcgccugccgcgacaacuccuacaccgccaagcgccccuucgucaagcucaacgucgagaccgacaccgccgagauccgccucaugugcaccgagaccuaccucgacaccccccgccccgacgacggcuccaucaccggccccugcgaguccaacggcggcaagggcuccggcggcaucaagggcggcuucguccaccagcgcauggccuccaagaucggccgcugguacucccgcaccauguccaagaccaagcgcaugggcauggagcucuacgucaaguacgacggcgaccccuggaccgacuccgacgcccucgcccccuccggcgucauggucuccauggaggagcccggcugguacuccuucggcuucgagaucaaggacaagaagugcgacguccccugcaucggcaucgagaugguccacgacggcggcaagaagaccuggcacuccgccgccaccgccaucuacugccucaugggcuccggccagcuccucugggacaccgucaccggcgucgacauggcccucuga

SEQ ID NO: 124752 - RNA, 1401 nt, Artificial Sequence; identical to SEQ ID NO: 124639
  derived and/or modified CDS sequence (opt2) from neuraminidase__InfluenzaB__ABN59449

SEQ ID NO: 124753 - RNA, 1398 nt, Artificial Sequence; identical to SEQ ID NO: 124717
  derived and/or modified CDS sequence (opt2) from neuraminidase__InfluenzaB__ABR15999

SEQ ID NO: 124754 - RNA, 1401 nt, Artificial Sequence; identical to SEQ ID NO: 124746
  derived and/or modified CDS sequence (opt2) from neuraminidase__InfluenzaB__ABR16010

SEQ ID NO: 124755 - RNA, 1401 nt, Artificial Sequence
  derived and/or modified CDS sequence (opt2) from neuraminidase__InfluenzaB__ABR16021
augcuccccuccaccauccagacccucacccucuuccucaccuccggcggcguccuccucucccucuacgucuccgccucccucuccuaccuccucuacuccgacauccuccucaaguucucccccaccgagaucaccgcccccaccaugccccucgacugcgccaacgccuccaacguccaggccgucaaccgcuccgccaccaagggcgucacccuccuccuccccgagcccgaguggaccuacccccgccucuccugccccggcuccaccuuccagaaggcccuccucaucuccccccaccgcuucggcgagaccaagggcaacuccgccccccucaucauccgcgagcccuucaucgccugcggccccaacgagugcaagcacuucgcccucacccacuacgccgcccagcccggcggcuacuacaacggcacccgcggcgaccgcaacaagcuccgccaccucaucuccgucaagcucggcaagauccccaccgucgagaacuccaucuuccacauggccgccugguccggcuccgccugccacgacggcaaggaguggaccuacaucggcgucgacggccccgacaacaacgcccuccucaagaucaaguacggcgaggccuacaccgacaccuaccacuccuacgccaacaagauccuccgcacccaggaguccgccugcaacugcaucggcggcaacugcuaccucaugaucaccgacggcuccgccuccggcgucuccgagugccgcuuccucaagauccgcaagggccgcaucaucaaggagaucuuccccaccggccgcgucaagcacaccgaggagugcaccugcggcuucgccuccaacaagaccaucgagugcgccugccgcgacaacuccuacaccgccaagcgccccuucgucaagcucaacgucgagaccgacaccgccgagauccgccucaugugcaccgacaccuaccucgacaccccccgccccgacgacggcuccaucaccggccccugcgaguccaacggcgacaagggcuccggcggcaucaagggcggcuucguccaccagcgcauggccuccaagaucggccgcugguacucccgcaccauguccaagaccgagcgcaugggcaugggccucuacgucaaguacgacggcgaccccugggccgacuccgacgcccucgccuucuccggcgucauggucuccaugaaggagcccggcugguacuccuucggcuucgagaucaaggacaagaagugcgacguccccugcaucggcaucgagaugguccacgacggcggcaaggagaccuggcacuccgccgccaccgccaucuacugccucaugggcuccggccagcuccucugggacaccgucaccggcgucgacauggcccucuga

SEQ ID NO: 124756 - RNA, 1401 nt, Artificial Sequence; identical to SEQ ID NO: 124671
  derived and/or modified CDS sequence (opt2) from neuraminidase__InfluenzaB__ACA64903

SEQ ID NO: 124757 - RNA, 1401 nt, Artificial Sequence
  derived and/or modified CDS sequence (opt2) from neuraminidase__InfluenzaB__ACA64914
augcuccccuccaccauccagacccucacccucuuccucaccuccggcggcguccuccucucccucuacgucuccgccucccucuccuaccuccucuacuccgacauccuccucaaguucucccagaccgagaucaccgcccccaucaugccccucgacugcgccaacgccuccaacguccaggccgucaaccgcuccgccgccaagggcgucacccuccuccuccccgagcccgaguggaccuacccccgccucuccugccccggcuccaccuuccagaaggcccuccucaucuccccccaccgcuucggcgagaccaagggcaacuccgccccccucaucauccgcgagcccuucaucgccugcggccccaccgagugcaagcacuucgcccucacccacuacgccgcccagcccggcggcuacuacaacggcacccgcgaggaccgcaacaagcuccgccaccucaucuccgucaagcucggcaagauccccaccgucgagaacuccaucuuccacauggccgccugguccggcuccgccugccacgacggcaaggaguggaccuacgucggcgucgacggccccgacuccaacgcccuccucaagaucaaguacggcgaggccuacaccgacaccuaccacuccuacgccaagaacauccuccgcacccaggaguccgccugcaacugcaucggcggcgacugcuaccucaugaucaccgacggccccgccuccggcaucuccgagugccgcuuccucaagauccgcgagggccgcaucaucaaggagaucuuccccaccggccgcgucaagcacaccgaggagugcaccugcggcuucgccuccaacaagaccaucgagugcgccugccgcgacaacuccuacaccgccaagcgccccuucgucaagcucaacgucgagaccgacaccgccgagauccgccucaugugcaccgagaccuaccucgacaccccccgccccaacgacggcuccaucaccggccccugcgaguccgacggcgacaagggcuccggcggcaucaagggcggcuucguccaccagcgcauggccuccaagaucggccgcugguacucccgcaccauguccaagaccaagcgcaugggcaugggccucuacgucaaguacgacggcgaccccuggaccgacuccgaggcccucgcccucuccggcgucauggucuccauggacgagcccggcugguacuccuucggcuucgagaucaaggacaagaagugcgacguccccugcaucggcaucgagaugguccacgacggcggcaagaccaccuggcacuccgccgccaccgccaucuacugccucaugggcuccggccagcuccucugggacaccgucaccggcgucgacauggcccucuga

SEQ ID NO: 124758 - RNA, 1401 nt, Artificial Sequence; identical to SEQ ID NO: 124671
  derived and/or modified CDS sequence (opt2) from neuraminidase__InfluenzaB__ACA64936

SEQ ID NO: 124759 - RNA, 1401 nt, Artificial Sequence
  derived and/or modified CDS sequence (opt2) from neuraminidase__InfluenzaB__ACA64969
augcuccccuccaccauccagacccucacccucuuccucaccuccggcggcguccuccucucccucuacgucuccgccucccucuccuaccuccucuacuccgacauccuccucaaguucucccccaccgagaucaccgcccccaccaugccccucgacugcgccaacgccuccaacguccaggccgucaaccgcuccgccgccaagggcgucacccuccuccuccccgagcccgaguggaccuacccccgccucuccugccccggcuccaccuuccagaaggcccuccucaucuccccccaccgcuucggcgagaccaagggcaacuccgccccccucaucauccgcgagcccuucaucgccugcggccccaacgagugcaagcacuucgcccucacccacuacgccgcccagcccggcggcuacuacaacggcacccgcggcgaccgcaacaagcuccgccaccucaucuccgucaagcucggcaagauccccaccgucgagaacuccaucuuccacauggccgccugguccggcuccgccugccacgacggcaaggaguggaccuacaucggcgucgacggccccgacaacaacgcccuccucaagaucaaguacggcgaggccuacaccgacaccuaccacuccuacgccaacaagauccuccgcacccaggaguccgccugcaacugcaucggcggcaacugcuaccucaugaucaccgacggcuccgccuccggcgucuccgagugccgcuuccucaagauccgcgagggccgcaucaucaaggagaucuuccccaccggccgcgucaagcacaccgaggagugcaccugcggcuucgccuccaacaagaccaucgagugcgccugccgcgacaacuccuacaccgccaagcgccccuucgucaagcucaacgucgagaccgacaccgccgagauccgccucaugugcaccgacaccuaccucgacaccccccgccccgacgacggcuccaucaccggccccugcgaguccaacggcgacaagggcuccggcggcaucaagggcggcuucguccaccagcgcauggccuccaagaucggccgcugguacucccgcaccauguccaagaccgagcgcaugggcaugggccucuacgucaaguacgacggcgaccccugggccgacuccgacgcccucgccuucuccggcgucauggucuccaugaaggagcccggcugguacuccuucggcuucgagaucaaggacaagaagugcgacguccccugcaucggcaucgagaugguccacgacggcggcaaggagaccuggcacuccgccgccaccgccaucuacugccucaugggcuccggccagcuccucugggacaccgucaccggcgucgacauggcccucuga

SEQ ID NO: 124760 - RNA, 1401 nt, Artificial Sequence
  derived and/or modified CDS sequence (opt2) from neuraminidase__InfluenzaB__ACA64980
augcuccccuccaccauccagacccucacccucuuccucaccuccggcggcguccuccucucccucuacgucuccgccucccucuccuaccuccucuacuccgacauccuccucaaguucucccccaccgagaucaccgcccccaccaugucccucgacugcgccaacgccuccaacguccaggccgucaaccgcuccgccaccaagggcgucacccuccuccuccccgagcccgaguggaccuacccccgccucuccugccccggcuccaccuuccagaaggcccuccucaucuccccccaccgcuucggcgagaccaagggcaacuccgccccccucaucauccgcgagcccuucaucgccugcggccccaacgagugcaagcacuucgcccucacccacuacgccgcccagcccggcggcuacuacaacggcacccgcggcgaccgcaacaagcuccgccaccucaucuccgucaagcucggcaagauccccaccgucgagaacuccaucuuccacauggccgccugguccggcuccgccugccacgacggcaaggaguggaccuacaucggcgucgacggccccgacaacaacgcccuccucaagaucaaguacggcgaggccuacaccgacaccuaccacuccuacgccuccaagauccuccgcacccaggaguccgccugcaacugcaucggcggcaacugcuaccucaugaucaccgacggcuccgccuccggcgucuccgagugccgcuuccucaagauccgcgagggccgcaucaucaaggagaucuuccccaccggccgcgucaagcacaccgaggagugcaccugcggcuucgccuccaacaagaccaucgagugcgccugccgcgacaacuccuacaccgccaagcgccccuucgucaagcucaacgucgagaccgacaccgccgagauccgccucaugugcaccgacaccuaccucgacaccccccgccccgacgacggcuccaucaccggccccugcgaguccaacggcgacaagggcuccggcggcaucaagggcggcuucguccaccagcgcauggccuccaagaucggccgcugguacucccgcaccauguccaagaccgagcgcaugggcaugggccucuacgucaaguacgacggcgaccccugggccgacuccgacgcccucgccuucuccggcgucauggucuccaugaaggagcccggcugguacuccuucggcuucgagaucaaggacaagaagugcgacguccccugcaucggcaucgagaugguccacgacggcggcaaggagaccuggcacuccgccgccaccgccaucuacugccucaugggcuccggccagcuccucugggacaccgucaccggcgucgacauggcccucuga

SEQ ID NO: 124761 - RNA, 1401 nt, Artificial Sequence
  derived and/or modified CDS sequence (opt2) from neuraminidase__InfluenzaB__ACA64991
augcuccccuccaccauccagacccucacccucuuccucaccuccggcggcguccuccucucccucuacgucuccgccucccucuccuaccuccucuacuccgacauccuccucaaguucucccccaccgagaucaccgcccccaccaugccccucgacugcgccaacgccuccaacguccacgccgucaaccgcuccgccaccaagggcgucacccuccuccuccccgagcccgaguggaccuacccccgccucuccugccccggcuccaccuuccagaaggcccuccucaucuccccccaccgcuucggcgagaccaagggcaacuccgccccccucaucauccgcgagcccuucaucgccugcggccccaacgagugcaagcacuucgcccucacccacuacgccgcccagcccggcggcuacuacaacggcacccgcggcgaccgcaacaagcuccgccaccucaucuccgucaagcucggcaagauccccaccgucgagaacuccaucuuccacauggccgccugguccggcuccgccugccacgacggcaaggaguggaccuacaucggcgucgacggccccgacaacaacgcccuccucaagaucaaguacggcgaggccuacaccgacaccuaccacuccuacgccaacaacauccuccgcacccaggaguccgccugcaacugcaucggcggcaacugcuaccucaugaucaccgacggcuccgccuccggcgucuccgagugccgcuuccucaagauccgcgagggccgcaucaucaaggagaucuuccccaccggccgcgucaagcacaccgaggagugcaccugcggcuucgccuccaacaagaccaucgagugcgccugccgcgacaacuccuacaccgccaagcgccccuucgucaagcucaacgucgagaccgacaccgccgagauccgccucaugugcaccgacaccuaccucgacaccccccgccccgacgacggcuccaucaccggccccugcgaguccaacggcgacaagggcuccggcggcaucaagggcggcuucguccaccagcgcauggccuccaagaucggccgcugguacucccgcaccauguccaagaccgagcgcaugggcaugggccucuacgucaaguacgacggcgaccccugggccgacuccgacgcccucgccuucggcggcgucauggucuccaugaaggagcccggcugguacuccuucggcuucgagaucaaggacaagaagugcgacguccccugcaucggcaucgagaugguccacgacggcggcaaggagaccuggcacuccgccgccaccgccaucuacugccucaugggcuccggccagcuccucugggacaccgucaccggcgucgacauggcccucuga

SEQ ID NO: 124762 - RNA, 1401 nt, Artificial Sequence; identical to SEQ ID NO: 124671
  derived and/or modified CDS sequence (opt2) from neuraminidase__InfluenzaB__ACA65013

SEQ ID NO: 124763 - RNA, 1401 nt, Artificial Sequence; identical to SEQ ID NO: 124671
  derived and/or modified CDS sequence (opt2) from neuraminidase__InfluenzaB__ACA65024

SEQ ID NO: 124764 - RNA, 1401 nt, Artificial Sequence
  derived and/or modified CDS sequence (opt2) from neuraminidase__InfluenzaB__ACA65035
augcuccccuccaccauccagacccucacccucuuccucaccuccggcggcguccuccucucccucuacgucuccgccucccucuccuaccuccucuacuccgacauccuccucaaguucucccccaccgagaucaccgcccccaccaugccccucgacugcgccaacgccuccaacguccaggccgucaaccgcuccgccaccaagggcgucacccuccuccuccccgagcccgaguggaccuacccccgccucuccugccccggcuccaccuuccagaaggcccuccucaucuccccccaccgcuucggcgagaccaagggcaacuccgccccccucaucauccgcgagcccuucaucgccugcggccccaacgagugcaagcacuucgcccucacccacuacgccgcccagcccggcggcuacuacaacggcacccgcggcgaccgcaacaagcuccgccaccucaucuccgucaagcucggcaagauccccaccgucgagaacuccaucuuccacauggccgccugguccggcuccgccugccacgacggcaaggaguggaccuacaucggcgucgacggccccgacaacaacgcccuccucaagaucaaguacggcgaggccuacaccgacaccuaccacuccuacgccuccaagauccuccgcacccaggaguccgccugcaacugcaucggcggcaacugcuaccucaugaucaccgacggcuccgccuccggcgucuccgagugccgcuuccucaagauccgcgagggccgcaucaucaaggagaucuuccccaccggccgcgucaagcacaccgaggagugcaccugcggcuucgccuccaacaagaccaucgagugcgccugccgcgacaacuccuacaccgccaagcgccccuucgucaagcucaacgucgagaccgacaccgccgagauccgccucaugugcaccgacaccuaccucgacaccccccgccccgacgacggcuccaucaccggccccugcgaguccaacggcgacaagggcuccggcggcaucaagggcggcuucguccaccagcgcauggccuccaagaucggccgcugguacucccgcaccauguccaagaccgagcgcaugggcaugggccucuacgucaaguacgacggcgaccccugggccgacuccgacgcccucgccuucuccggcgucauggucuccaugaaggagcccggcugguacuccuucggcuucgagaucaaggacaagaagugcgacguccccugcaucggcaucgagaugguccacgacggcggcaaggagaccuggcacuccgccgccaccgccaucuacugccucaugggcuccggccagcuccucugggacaccgucaccggcgucgacauggcccucuga

SEQ ID NO: 124765 - RNA, 1401 nt, Artificial Sequence; identical to SEQ ID NO: 124671
  derived and/or modified CDS sequence (opt2) from neuraminidase__InfluenzaB__ACA65046

SEQ ID NO: 124766 - RNA, 1401 nt, Artificial Sequence
  derived and/or modified CDS sequence (opt2) from neuraminidase__InfluenzaB__ACA65057
augcuccccuccaccauccagacccucacccucuuccucaccuccggcggcguccuccucucccucuacgucuccgccucccucuccuaccuccucuacuccgacauccuccucaaguucucccccaccgagaucaccgcccccaccaugccccucgacugcgccaacgccuccaacguccaggccgucaaccgcuccgccaccaagggcgucacccuccuccuccccgagcccgaguggaccuacccccgccucuccugccccggcuccaccuuccagaaggcccuccucaucuccccccaccgcuucggcgagaccaagggcaacuccgccccccucaucauccgcgagcccuucaucgccugcggccccaacgagugcaagcacuucgcccucacccacuacgccgcccagcccggcggcuacuacaacggcacccgcggcgaccgcaacaagcuccgccaccucaucuccgucaagcucggcaagauccccaccgucgagaacuccaucuuccacauggccgccugguccggcuccgccugccacgacggcaaggaguggaccuacaucggcgucgacggccccgacaacaacgcccuccucaagaucaaguacggcgaggccuacaccgacaccuaccacuccuacgccaacaagauccuccgcacccaggaguccgccugcaacugcaucggcggcaacugcuaccucaugaucaccgacggcuccgccuccggcgucuccgagugccgcuuccucaagauccgcgagggccgcaucaucaaggagaucuuccccaccggccgcgucaagcacaccgaggagugcaccugcggcuucgccuccaacaagaccaucgagugcgccugccgcgacaacuccuacaccgccaagcgccccuucgucaagcucaacgucgaggccgacaccgccgagauccgccucaugugcaccgacaccuaccucgacaccccccgccccgacgacggcuccaucaccggccccugcgaguucaacggcgacaagggcuccggcggcaucaagggcggcuucguccaccagcgcauggccuccaagaucggccgcugguacucccgcaccauguccaagaccgagcgcaugggcaugggccucuacgucaaguacgacggcgaccccugggccgacuccgacgcccucgccuucuccggcgucauggucuccaugaaggagcccggcugguacuccuucggcuucgagaucaaggacaagaagugcgacguccccugcaucggcaucgagaugguccacgacggcggcaaggagaccuggcacuccgccgccaccgccaucuacugccucaugggcuccggccagcuccucugggacaccgucaccggcgucgacauggcccucuga

SEQ ID NO: 124767 - RNA, 1401 nt, Artificial Sequence; identical to SEQ ID NO: 124671
  derived and/or modified CDS sequence (opt2) from neuraminidase__InfluenzaB__ACA65068

SEQ ID NO: 124768 - RNA, 1401 nt, Artificial Sequence; identical to SEQ ID NO: 124671
  derived and/or modified CDS sequence (opt2) from neuraminidase__InfluenzaB__ACA65079

SEQ ID NO: 124769 - RNA, 1401 nt, Artificial Sequence; identical to SEQ ID NO: 124671
  derived and/or modified CDS sequence (opt2) from neuraminidase__InfluenzaB__ACA65090

SEQ ID NO: 124770 - RNA, 1401 nt, Artificial Sequence; identical to SEQ ID NO: 124671
  derived and/or modified CDS sequence (opt2) from neuraminidase__InfluenzaB__ACA65101

SEQ ID NO: 124771 - RNA, 1401 nt, Artificial Sequence
  derived and/or modified CDS sequence (opt2) from neuraminidase__InfluenzaB__ACA96567
augcuccccuccaccauccagacccucacccucuuccucaccuccggcggcguccuccucucccucuacgucuccgccucccucuccuaccuccucuacuccgacauccuccucaaguucucccccaccgagaucaccgcccccaccaugccccucgacugcgccaacgccuccaacguccacgccgucaaccgcuccgccaccaagggcgucacccuccuccuccccgagcccgagugggccuacccccgccucuccugccccggcuccaccuuccagaaggcccuccucaucuccccccaccgcuucggcgagaccaagggcaacuccgccccccucaucauccgcgagcccuucaucgccugcggccccaacgagugcaagcacuucgcccucacccacuacgccgcccagcccggcggcuacuacaacggcacccgcggcgaccgcaacaagcuccgccaccucaucuccgucaagcucggcaagauccccaccgucgagaacuccaucuuccacauggccgccugguccggcuccgccugccacgacggcaaggaguggaccuacaucggcgucgacggccccgacaacaacgcccuccucaagaucaaguacggcgaggccuacaccgacaccuaccacuccuacgccaacaacauccuccgcacccaggaguccgccugcaacugcaucggcggcaacugcuaccucaugaucaccgacggcuccgccuccggcgucuccgagugccgcuuccucaagauccgcgagggccgcaucaucaaggagaucuuccccaccggccgcgucaagcacaccgaggagugcaccugcggcuucgccuccaacaagaccaucgagugcgccugccgcgacaacuccuacaccgccaagcgccccuucgucaagcucaacgucgagaccgacaccgccgagauccgccucaugugcaccgacaccuaccucgacaccccccgccccgacgacggcuccaucaccggccccugcgaguccaacggcgacaagggcuccggcggcaucaagggcggcuucguccaccagcgcauggccuccaagaucggccgcugguacucccgcaccauguccaagaccgagcgcaugggcaugggccucuacgucaaguacgacggcgaccccugggccgacuccgacgcccucgccuucuccggcaucauggucuccaugaaggagcccggcugguacuccuucggcuucgagaucaaggacaagaagugcgacguccccugcaucggcaucgagaugguccacgacggcggcaaggagaccuggcacuccgccgccaccgccaucuacugccucaugggcuccggccagcuccucugggacaccgucaccggcgucgacauggcccucuga

SEQ ID NO: 124772 - RNA, 1401 nt, Artificial Sequence; identical to SEQ ID NO: 124671
  derived and/or modified CDS sequence (opt2) from neuraminidase__InfluenzaB__ACA96578

SEQ ID NO: 124773 - RNA, 1401 nt, Artificial Sequence; identical to SEQ ID NO: 124759
  derived and/or modified CDS sequence (opt2) from neuraminidase__InfluenzaB__ACA96589

SEQ ID NO: 124774 - RNA, 1401 nt, Artificial Sequence; identical to SEQ ID NO: 124671
  derived and/or modified CDS sequence (opt2) from neuraminidase__InfluenzaB__ACA96600

SEQ ID NO: 124775 - RNA, 1401 nt, Artificial Sequence
  derived and/or modified CDS sequence (opt2) from neuraminidase__InfluenzaB__ACA96611
augcuccccuccaccauccagacccucacccucuuccucaccuccggcggcguccuccucucccucuacgucuccgccucccucuccuaccuccucuacuccgacauccuccucaaguucucccccaccgagaucaccgcccccaccaugccccucgacuacgccaacgccuccaacguccacgccgucaaccacuccgccaccaagggcgucacccuccuccuccccgagcccgaguggaccuacccccgccucuccugccccggcuccaccuuccagaaggcccuccucaucuccccccaccgcuucggcgagaccaagggcaacuccgccccccucaucauccgcgagcccuucaucgccugcggccccaacgagugcaagcacuucgcccucacccacuacgccgcccagcccggcggcuacuacaacggcacccgcggcgaccgcaacaagcuccgccaccucaucuccgucaagcucggcaagauccccaccgucgagaacuccaucuuccacauggccgccugguccggcuccgccugccacgacggcaaggaguggaccuacaucggcgucgacggccccgacaacaacgcccuccucaagaucaaguacggcgaggccuacaccgacaccuaccacuccuacgccaacaacauccuccgcacccaggaguccgccugcaacugcaucggcggcaacugcuaccucaugaucaccgacggcuccgccuccggcgucuccgagugccgcuuccucaagauccgcgagggccgcaucaucaaggagaucuuccccaccggccgcgucaagcacaccgaggagugcaccugcggcuucgccuccaacaagaccaucgagugcgccugccgcgacaacuccuacaccgccaagcgccccuucgucaagcucaacgucgagaccgacaccgccgagauccgccucaugugcaccgacaccuaccucgacaccccccgccccgacgacggcuccaucaccggccccugcgaguccaacggcgacaagggcuccggcggcaucaagggcggcuucguccaccagcgcauggccuccaagaucggccgcugguacucccgcaccauguccaagaccgagcgcaugggcaugggccucuacgucaaguacgacggcgaccccugggccgacuccgacgcccucgccuucuccggcgucauggucuccaugaaggagcccggcugguacuccuucggcuucgagaucaaggacaagaagugcgacguccccugcaucggcaucgagaugguccacgacggcggcaaggagaccuggcacuccgccgccaccgccaucuacugccucaugggcuccggccgccuccucugggacaccgucaccggcgucgacauggcccucuga

SEQ ID NO: 124776 - RNA, 1401 nt, Artificial Sequence
  derived and/or modified CDS sequence (opt2) from neuraminidase__InfluenzaB__ACA96622
augcuccccuccaccauccagacccucacccucuuccucaccuccggcggcguccuccucucccucuacgucuccgccucccucuccuaccuccucuacuccgacauccuccucaaguucucccccaccgagaucaccgcccccaccaugccccucgacugcgccaacgccuccaacguccacgccgucaaccgcuccgccaccaagggcgucacccuccuccuccccgagcccgaguggaccuacccccgccucuccugccccggcuccaccuuccagaaggcccuccucaucuccccccaccgcuucggcgagaccaagggcaacuccgccccccucaucauccgcgagcccuucaucgccugcggccccaacgagugcaagcacuucgcccucacccacuacgccgcccagcccggcggcuacuacaacggcacccgcggcgaccgcaacaagcuccgccaccucaucuccgucaagcucggcaagauccccaccgucgagaacuccaucuuccacauggccgccugguccggcuccgccugccacgacggcaaggaguggaccuacaucggcgucgacggccccgacaacaacgcccuccucaagaucaaguacggcgaggccuacaccgacaccuaccacuccuacgccaacaacauccuccgcacccaggaguccgccugcaacugcaucggcggcaacugcuaccucaugaucaccgacggcuccgccuccggcgucuccgagugccgcuuccucaagauccgcgagggccgcaucaucaaggagaucuuccccaccggccgcgucaagcacaccgaggagugcaccugcggcuucgccuccaacaagaccaucgagugcgccugccgcgacaacuccuacaccgccaagcgccccuucgucaagcucaacgucgagaccgacaccgccgagauccgccucaugugcaccgacaccuaccucgacaccccccgccccgacgacggcuccaucaucggccccugcgaguccaacggcgacaagggcuccggcggcaucaagggcggcuucguccaccagcgcauggccuccaagaucggccgcugguacucccgcaccauguccaagaccgagcgcaugggcaugggccucuacgucaaguacgacggcgaccccugggccgacuccgacgcccucgccuucuccggcgucauggucuccaugaaggagcccggcugguacuccuucggcuucgagaucaaggacaagaagugcgacguccccugcaucggcaucgagaugguccacgacggcggcaaggagaccuggcacuccgccgccaccgccaucuacugccucaugggcuccggccagcuccucugggacaccgucaccggcgucgacauggcccucuga

SEQ ID NO: 124777 - RNA, 1401 nt, Artificial Sequence; identical to SEQ ID NO: 124759
  derived and/or modified CDS sequence (opt2) from neuraminidase__InfluenzaB__ACA96633

SEQ ID NO: 124778 - RNA, 1401 nt, Artificial Sequence
  derived and/or modified CDS sequence (opt2) from neuraminidase__InfluenzaB__ACA96644
augcuccccuccaccauccagacccucacccucuuccucaccuccggcggcguccuccucucccucuacgucuccgccucccucuccuaccuccucuacuccgacauccuccucaaguucucccccaccgagaucaccgcccccaccaugccccucgacugcgccaacgccuccaacguccaggccgucaaccgcuccgccaccaagggcgucacccuccuccuccccgagcccgaguggaccuacccccgccucuccugccccggcuccaccuuccagaaggcccuccucaucuccccccaccgcuucggcgagaccaagggcaacuccgccccccucaucauccgcgagcccuucaucgccugcggccccaacgagugcaagcacuucgcccucacccacuacgccgcccagcccggcggcuacuacaacggcacccgcggcgaccgcaacaagcuccgccaccucaucuccaucaagcucggcaagauccccaccgucgagaacuccaucuuccacauggccgccugguccggcuccgccugccacgacggcaaggaguggaccuacaucggcgucgacggccccgacaacaacgcccuccucaagaucaaguacggcgaggccuacaccgacaccuaccacuccuacgccaacaagauccuccgcacccaggaguccgccugcaacugcaucggcggcaacugcuaccucaugaucaccgacggcuccgccuccggcgucuccgagugccgcuuccucaagauccgcgagggccgcaucaucaaggagaucuuccccaccggccgcgucaagcacaccgaggagugcaccugcggcuucgccuccaacaagaccaucgagugcgccugccgcgacaacuccuacaccgccaagcgccccuucgucaagcucaacgucgagaccgacaccgccgagauccgccucaugugcaccgacaccuaccucgacaccccccgccccgacgacggcuccaucaccggccccugcgaguccaacggcgacaagggcuccggcggcaucaagggcggcuucguccaccagcgcauggccuccaagaucggccgcugguacucccgcaccauguccaagaccgagcgcaugggcaugggccucuacgucaaguacgacggcgaccccugggccgacuccgacgcccucgccuucuccggcgucaugaucuccaugaaggagcccggcugguacuccuucggcuucgagaucaaggacaagaagugcgacguccccugcaucggcaucgagaugguccacgacggcggcaaggagaccuggcacuccgccgccaccgccaucuacugccucaugggcuccggccagcuccucugggacaccgucaccggcgucgacauggcccucuga

SEQ ID NO: 124779 - RNA, 1401 nt, Artificial Sequence
  derived and/or modified CDS sequence (opt2) from neuraminidase__InfluenzaB__ACA96655
augcuccccuccaccauccagacccucacccucuuccucaccuccggcggcguccuccucucccucuacgucuccgccucccucuccuaccuccucuacuccgacauccuccucaaguucucccagaccgagaucaccgcccccaucaugccccucgacugcgccaacgccuccaacguccaggccgucaaccgcuccgccaccaagggcgucacccuccuccuccccgagcccgaguggaccuacccccgccucuccugccccggcuccaccuuccagaaggcccuccucaucuccccccaccgcuucggcgagaccaagggcaacuccgccccccucaucauccgcgagcccuucaucgccugcggccccaaggagugcaagcacuucgcccucacccacuacgccgcccagcccggcggcuacuacaacggcacccgcgaggaccgcaacaagcuccgccaccucaucuccgucaagcucggcaagauccccaccgucgagaacuccaucuuccacauggccgccugguccggcuccgccugccacgacggccgcgaguggaccuacaucggcgucgacggccccgacuccaacgcccuccucaagaucaaguacggcgaggccuacaccgacaccuaccacuccuacgccaagaacauccuccgcacccaggaguccgccugcaacugcaucggcggcgacugcuaccucaugaucaccgacggccccgccuccggcaucuccgagugccgcuuccucaagauccgcgagggccgcaucaucaaggagaucuuccccaccggccgcgucaagcacaccgaggagugcaccugcggcuucgccuccaacaagaccaucgagugcgccugccgcgacaacuccuacaccgccaagcgccccuucgucaagcucaacgucgagaccgacaccgccgagauccgccucaugugcaccgagaccuaccucgacaccccccgccccaacgacggcuccaucaccggccccugcgaguccaacggcgacaagggcuccggcggcaucaagggcggcuucguccaccagcgcauggccuccaagaucggccgcugguacucccgcaccauguccaagaccaagcgcaugggcaugggccucuacgucaaguacgacggcgaccccuggaccgacuccgaggcccucgcccucuccggcgucauggucuccauggaggagcccggcugguacuccuucggcuucgagaucaaggacaagaagugcgacguccccugcaucggcaucgagaugguccacgacggcggcaagaccaccuggcacuccgccgccaccgccaucuacugccucaugggcuccggccagcuccucugggacaccgucaccggcgucgacauggcccucuga

SEQ ID NO: 124780 - RNA, 1401 nt, Artificial Sequence
  derived and/or modified CDS sequence (opt2) from neuraminidase__InfluenzaB__ACA96666
augcuccccuccaccauccagacccucacccucuuccucaccuccggcggcguccuccucucccucuacgucuccgccucccucuccuaccuccucuacuccgacauccuccucaaguucucccccaccgagaucaccgcccccaccaugccccucgacugcgccaacgccuccaacguccaggccgucaaccgcuccgccaccaagggcgucacccuccuccuccccgagcccgaguggaccuacccccgccucuccugccccggcuccaccuuccagaaggcccuccucaucuccccccaccgcuucggcgagaccaagggcaacuccgccccccucaucauccgcgagcccuucaucgccugcggccccaacgagugcaagcacuucgcccucacccacuacgccgcccagcccggcggcuacuacaacggcacccgcgaggaccgcaacaagcuccgccaccucaucuccgucaagcucggcaagauccccaccgucgagaacuccaucuuccacauggccgccugguccggcuccgccugccacgacggcaaggaguggaccuacaucggcgucgacggccccgacaacaacgcccuccucaagaucaaguacggcgaggccuacaccgacaccuaccacuccuacgccaacaagauccuccgcacccaggaguccgccugcaacugcaucggcggcaacugcuaccucaugaucaccgacggcuccgccuccggcgucuccgagugccgcuuccucaagauccgcgagggccgcaucaucaaggagaucuuccccaccggccgcgucaagcacaccgaggagugcaccugcggcuucgccuccaacaagaccaucgagugcgccugccgcgacaacuccuacaccgccaagcgccccuucgucaagcucaacgucgagaccgacaccgccgagauccgccucaugugcaccgacaccuaccucgacaccccccgccccgacgacggcuccaucaccggccccugcgaguccaacggcgaccgcggcuccggcggcaucaagggcggcuucguccaccagcgcauggccuccaagaucggccgcugguacucccgcaccauguccaagaccgagcgcaugggcaugggccucuacgucaaguacgacggcgaccccugggccgacuccgacgcccucgccuucuccggcgucauggucuccaugaaggagcccggcugguacuccuucggcuucgagaucaaggacaagaagugcgacguccccugcaucggcaucgagaugguccacgacgacggcaaggagaccuggcacuccgccgccaccgccaucuacugccucaugggcuccggccagcuccucugggacaccgucaccggcgucgacauggcccucuga

SEQ ID NO: 124781 - RNA, 1401 nt, Artificial Sequence
  derived and/or modified CDS sequence (opt2) from neuraminidase__InfluenzaB__ACD56581
augcuccccuccaccauccagacccucacccucuuccucaccuccggcggcguccuccucucccucuacgucuccgccucccucuccuaccuccucuacuccgacauccuccucaaguucuccaccaccgagaucaccgcccccaccaugccccucgacugcgccaacgccuccaacguccaggccgucaaccgcuccgccaccaagggcgucacccuccuccuccccgagcccgaguggaccuacccccgccucuccugccccggcuccaccuuccagaaggcccuccucaucuccccccaccgcuucggcgagaccaagggcaacuccgccccccucaucauccgcgagcccuucaucgccugcggccccaaggagugcaagcacuucgcccucacccacuacgccgcccagcccggcggcuacuacaacggcacccgcgaggaccgcaacaagcuccgccaccucaucuccgucaagcucggcaagauccccaccgucgagaacuccaucuuccacauggccgccugguccggcuccgccugccacgacggcaaggaguggaccuacaucggcgucgacggccccgacuccaacgcccuccucaagaucaaguacggcgaggccuacaccgacaccuaccacuccuacgccaacaacauccuccgcacccaggaguccgccugcaacugcaucggcggcaacugcuaccucaugaucaccgacggcuccgccuccggcaucuccgagugccgcuuccucaagauccgcgagggccgcaucaucaaggagaucuuccccaccggccgcgucaagcacaccgaggagugcaccugcggcuucgccuccaacaagaccaucgagugcgccugccgcgacaacuccuacaccgccaagcgccccuucgucaagcucaacgucgagaccgacaccgccgagauccgccucaugugcaccgagaccuaccucgacaccccccgccccgacgacggcuccaucaccggccccugcgaguccaacggcaacaagggcuccggcggcaucaagggcggcuucguccaccagcgcauggccuccaagaucggccgcugguacucccgcaccauguccaagaccaagcgcaugggcaugggccucuacgucaaguacgacggcgaccccuggaccgacuccgacgcccucgcccucuccggcgucauggucuccauggaggagcccggcugguacuccuucggcuucgagaucaaggacaagaagugcgacguccccugcaucggcaucgagaugguccacgacggcggcaaggagaccuggcacuccgccgccaccgccaucuacugccucaugggcuccggccagcuccucugggacaccgucaccggcgucgacauggcccucuga

SEQ ID NO: 124782 - RNA, 1401 nt, Artificial Sequence
  derived and/or modified CDS sequence (opt2) from neuraminidase__InfluenzaB__ACF33793
augcuccccuccaccauccagacccucacccucuuccucaccuccggcggcguccuccucucccucuacgucuccgccucccucuccuaccuccucuacuccgacauccuccucaaguucucccccaccgagaucaccgcccccaccaugccccucgacugcgccaacgccuccaacguccaggccgucaaccgcuccgccaccaagggcgucacccuccuccuccccgagcccgaguggaccuacccccgccucuccugccccggcuccaccuuccagaaggcccuccucaucuccccccaccgcuucggcgagaccaagggcaacuccgccccccucaucauccgcgagcccuucaucgccugcggccccaacgagugcaagcacuucgcccucacccacuacgccgcccagcccggcggcuacuacaacggcacccgcggcgaccgcaacaagcuccgccaccucaucuccgucaagcucggcaagauccccaccgucgagaacuccaucuuccacauggccgccugguccggcuccgccugccacgacggcaaggaguggaccuacaucggcgucgacggccccgacaacaacgcccuccucaagaucaaguacggcgaggccuacaccgacaccuaccacuccuacgccaacaacauccuccgcacccaggaguccgccugcaacugcaucggcggcaacugcuaccucaugaucaccgacggcuccgccuccggcgucuccgagugccgcuuccucaagauccgcgagggccgcaucaucaaggagaucuuccccaccggccgcgucaagcacaccgaggagugcaccugcggcuucgccuccaacaagaccaucgagugcgccugccgcgacaacuccuacaccgccaagcgccccuucgucaagcucaacgucgagaccgacaccgccgagauccgccucaugugcaccgacaccuaccucgacaucccccgccccgacgacggcuccaucaccggccccugcgaguccaacggcgacaagggcuccggcggcaucaagggcggcuucguccaccagcgcauggccuccaagaucggccgcugguacucccgcaccauguccaagaccgagcgcaugggcaugggccucuacgucaaguacgacggcgaccccugggccgacuccgacgcccucgccuucuccggcgucauggucuccaugaaggagcccggcugguacuccuucggcuucgagaucaaggacaagaagugcgacguccccugcaucggcaucgagaugguccacgacggcggcaaggagaccuggcacuccgccgccaccgccaucuacugccucaugggcuccggccagcuccucugggacaccgucaccggcgucgacauggcccucuga

SEQ ID NO: 124783 - RNA, 1401 nt, Artificial Sequence
  derived and/or modified CDS sequence (opt2) from neuraminidase__InfluenzaB__ACF33795
augcuccccuccaccauccagacccucacccucuuccucaccuccggcggcguccuccucucccucuacgucuccgccucccucuccuaccuccucuacuccgacauccuccucaaguuccccuccaccgagaucaccgcccccaccaugccccucgacugcgccaacgccuccaacguccaggccgucaaccgcuccgccaccaagggcgucacccuccuccuccccgagcccgaguggaccuacccccgccucuccugccccggcuccaccuuccagaaggcccuccucaucuccccccaccgcuucggcgagaccaagggcaacuccgccccccucaucauccgcgagcccuucaucgccugcggccccaaggagugcaagcacuucgcccucacccacuacgccgcccagcccggcggcuacuacaacggcacccgcggcgaccgcaacaagcuccgccaccucaucuccgucaagcucggcaagauccccaccgucgagaacuccaucuuccacauggccgccugguccggcuccgccugccacgacggcaaggaguggaccuacaucggcgucgacggccccgacaacaacgcccuccucaagaucaaguacggcgaggccuacaccgacaccuaccacuccuacgccaacaacauccuccgcacccaggaguccgccugcaacugcaucggcggcaacugcuaccucaugaucaccgacggcuccgccuccggcgucuccgagugccgcuuccucaagauccgcgagggccgcaucaucaaggagaucuuccccaccggccgcaucaagcacaccgaggagugcaccugcggcuucgccuccaacaagaccaucgagugcgccugccgcgacaacuccuacaccgccaagcgccccuucgucaagcucaacgucgagaccgacaccgccgagauccgccucaugugcaccgagaccuaccucgacaccccccgccccgacgacggcuccaucaccggccccugcgaguccaacggcgacaagggcuccggcggcaucaagggcggcuucguccaccagcgcauggccuccaagaucggccgcugguacucccgcaccauguccaagaccgagaagaugggcaugggccucuacgucaaguacgacggcgagcccugggccgacuccgacgcccucaccuucuccggcgucauggucuccauggaggagcccggcugguacuccuucggcuucgagaucaaggacaagaagugcgacguccccugcaucggcaucgagaugguccacgacggcggcaaggagaccuggcacuccgccgccaccgccaucuacugccucaugggcuccggccagcuccucugggacaccgucaccggcgucaacauggcccucuga

SEQ ID NO: 124784 - RNA, 1401 nt, Artificial Sequence
  derived and/or modified CDS sequence (opt2) from neuraminidase__InfluenzaB__ACF33797
augcuccccuccaccauccagacccucacccucuuccucaccuccggcggcguccuccucucccucuacgucuccgccucccucuccuaccuccucuacuccgacauccuccucaaguucucccccaccgagaucaccgcccccaccaugccccucgacugcgccaacgccuccaacguccaggccgucaaccgcuccgccaccaagggcgucacccuccuccuccccgagcccgaguggaccuacccccgccucuccugccccggcuccaccuuccagaaggcccuccucaucuccccccaccgcuucggcgagaccaagggcaacuccgccccccucaucauccgcgagcccuucaucgccugcggccccaacgagugcaagcacuucgcccucacccacuacgccgcccagcccggcggcuacuacaacggcacccgcggcgaccgcaacaagcuccgccaccucaucuccgucaagcucggcaagauccccaccgucgagaacuccaucuuccacauggccgccugguccggcuccgccugccacgacggcaaggaguggaccuacaucggcgucgacggccccgacaacaacgcccuccucaagaucaaguacggcgaggccuacaccgacaccuaccacuccuacgccaacaacacccuccgcacccaggaguccgccugcaacugcaucggcggcaacugcuaccucaugaucaccgacggcuccgccuccggcgucuccgagugccgcuuccucaagauccgcgagggccgcaucaucaaggagaucuuccccaccggccgcgucaagcacaccgaggagugcaccugcggcuucgccuccaacaagaccaucgagugcgccugccgcgacaacuccuacaccgccaagcgccccuucgucaagcucaacgucgagaccgacaccgccgagauccgccucaugugcaccgagaccuaccucgacaccccccgccccgacgacggcuccaucaccggccccugcgaguccaacggcgacaagggcuccggcggcaucaagggcggcuucguccaccagcgcauggccuccaagaucggccgcugguacucccgcaccauguccaagaccgagcgcaugggcaugggccucuacgucaaguacgacggcgaccccugggccgacuccgacgcccucgcccucaucggcgucauggucuccauggaggagcccggcugguacuccuucggcuucgagaucaaggacaagaagugcgacguccccugcaucggcaucgagaugguccacgacggcggcaaggagaccuggcacuccgccgccaccgccaucuacugccucaugggcuccggccagcuccucugggacaccgucaccggcgucaacauggcccucuga

SEQ ID NO: 124785 - RNA, 1401 nt, Artificial Sequence; identical to SEQ ID NO: 124764
  derived and/or modified CDS sequence (opt2) from neuraminidase__InfluenzaB__ACF41662

SEQ ID NO: 124786 - RNA, 1401 nt, Artificial Sequence
  derived and/or modified CDS sequence (opt2) from neuraminidase__InfluenzaB__ACF54140
augcuccccuccaccauccagacccucacccucuuccucaccuccggcggcguccuccucucccucuacgucuccgccucccucuccuaccuccucuacuccgacauccuccucaaguucucccccaccgagaucaccgcccccaccaugccccucgacugcgccaacgccuccaacguccaggccgucaaccgcuccgccaccaagggcgucacccuccuccuccccgagcccgaguggaccuacccccgccucuccugccccggcuccaccuuccagaaggcccuccucaucuccccccaccgcuucggcgagaccaagggcaacuccgccccccucaucauccgcgagcccuucaucgccugcggccccaacgagugcaagcacuucgcccucacccacuacgccgcccagcccggcggcuacuacaacggcaccaagggcgaccgcaacaagcuccgccaccucaucuccgucaagcucggcaagauccccaccgucgagaacuccaucuuccacauggccgccugguccggcuccgccugccacgacggcaaggaguggaccuacaucggcgucgacggccccgacaacaacgcccuccucaagaucaaguacggcgaggccuacaccgacaccuaccacuccuacgccaacaagauccuccgcacccaggaguccgccugcaacugcaucggcggcaacugcuaccucaugaucaccgacggcuccgccuccggcgucuccgagugccgcuuccucaagauccgcgagggccgcaucaucaaggagaucuuccccaccggccgcgucaagcacaccgaggagugcaccugcggcuucgccuccaacaagaccaucgagugcgccugccgcgacaacuccuacaccgccaagcgccccuucgucaagcucaacgucgagaccgacaccgccgagauccgccucaugugcaccgacaccuaccucgacaccccccgccccgacgacggcuccaucaccggccccugcgaguccaacggcgaccgcggcuccggcggcaucaagggcggcuucguccaccagcgcauggccuccaagaucggccgcugguacucccgcaccauguccaagaccgagcgcaugggcaugggccucuacgucaaguacgacggcgaccccugggccgacuccgacgcccucgccuucuccggcgucauggucuccaugaaggagcccggcugguacuccuucggcuucgagaucaaggacaagaagugcgacguccccugcaucggcaucgagaugguccacgacggcggcaaggagaccuggcacuccgccgccaccgccaucuacugccucaugggcuccggccagcuccucugggacaccgucaccggcgucgacauggcccucuga

SEQ ID NO: 124787 - RNA, 1401 nt, Artificial Sequence
  derived and/or modified CDS sequence (opt2) from neuraminidase__InfluenzaB__ACF54151
augcuccccuccaccauccagacccucacccucuuccucaccuccggcggcguccuccucucccucuacgucuccgccucccucuccuaccuccucuacuccgacauccuccucaaguuccccuccaccgagaucaccgcccccaccaugccccucgacugcgccaacgccuccaacguccaggccgucaaccgcuccgccaccaagggcgucacccuccuccuccccgagcccgaguggaccuacccccgccucuccugccccggcuccaccuuccagaaggcccuccucaucuccccccaccgcuucggcgagaccaagggcaacuccgccccccucaucauccgcgagcccuucaucgccugcggccccaaggagugcaagcacuucgcccucacccacuacgccgcccagcccggcggcuacuacaacggcacccgcggcaaccgcaacaagcuccgccaccucaucuccgucaagcucggcaagauccccaccgucgagaacuccaucuuccacauggccgccugguccggcuccgccugccacgacggcaaggaguggaccuacaucggcgucgacggccccgacaacaacgcccuccucaagaucaaguacggcgaggccuacaccgacaccuaccacuccuacgccaacaacauccuccgcacccaggaguccgccugcaacugcaucggcggcaacugcuaccucaugaucaccgacggcuccgccuccggcgucuccgagugccgcuuccucaagauccgcgagggccgcaucaucaaggagaucuuccccaccggccgcaucaagcacaccgaggagugcaccugcggcuucgccuccaacaagaccaucgagugcgccugccgcgacaacuccuacaccgccaagcgccccuucgucaagcucaacgucgagaccgacaccgccgagauccgccucaugugcaccgagaccuaccucgacaccccccgccccgacgacggcuccaucaccggccccugcgaguccaacggcgacaagggcuccggcggcaucaagggcggcuucguccaccagcgcauggccuccaagaucggccgcugguacucccgcaccauguccaagaccaagcgcaugggcaugggccucuacgucaaguacgacggcgaccccugggccgacuccgacgcccucgccuucuccggcgucauggucuccauggaggagcccggcugguacuccuucggcuucgagaucaaggacaagaagugcgacguccccugcaucggcaucgagaugguccacgacggcggcaaggagaccuggcacuccgccgccaccgccaucuacugccucaugggcuccggccagcuccucugggacaccgucaccggcgucaacauggcccucuga

SEQ ID NO: 124788 - RNA, 1401 nt, Artificial Sequence
  derived and/or modified CDS sequence (opt2) from neuraminidase__InfluenzaB__ACF54162
augcuccccuccaccauccagacccucacccucuuccucaccuccggcggcguccuccucucccucuacgucuccgccucccucuccuaccuccucuacuccgacauccuccucaaguucucccagaccgagaucaccgcccccaucaugccccucgacugcgccaacgccuccaacguccaggccgucaaccgcuccgccaccaagggcgucacccuccuccuccccgagcccgaguggaccuacccccgccucuccugccccggcuccaccuuccagaaggcccuccucaucuccccccaccgcuucggcgagaccaagggcaacuccgccccccucaucauccgcgagcccuucaucgccugcggccccaaggagugcaagcacuucgcccucacccacuacgccgcccagcccggcggcuacuacaacggcacccgcgaggaccgcaacaagcuccgccaccucaucuccgucaagcucggcaagauccccaccgucgagaacuccaucuuccacauggccgccugguccggcuccgccugccacgacggcaaggaguggaccuacaucggcgucgacggccccgacuccaacgcccuccucaagaucaaguacggcgaggccuacaccgacaccuaccacuccuacgccaagaacauccuccgcacccaggaguccgccugcaacugcaucggcggcgacugcuaccucaugaucaccgacggccccgccuccggcaucuccgagugccgcuuccucaagauccgcgagggccgcaucaucaaggagaucuuccccaccggccgcgucaagcacaccgaggagugcaccugcggcuucgccuccaacaagaccaucgagugcgccugccgcgacaacaacuacaccgccaagcgccccuucgucaagcucaacgucgagaccgacaccgccgagauccgccucaugugcaccgagaccuaccucgacaccccccgccccaacgacggcuccaucaccggccccugcgaguccgacggcgacaagggcuccggcggcaucaagggcggcuucguccaccagcgcauggccuccaagaucggccgcugguacucccgcaccauguccaagaccaagcgcaugggcauggagcucuacgucaaguacgacggcgaccccuggaccgacuccgaggcccucgcccucuccggcgucauggucuccauggaggagcccggcugguacuccuucggcuucgagaucaaggacaagaagugcgacguccccugcaucggcaucgagaugguccacgacggcggcaagaccaccuggcacuccgccgccaccgccaucuacugccucaugggcuccggccagcuccucugggacaccgucaccggcgucgacauggcccucuga

SEQ ID NO: 124789 - RNA, 1401 nt, Artificial Sequence
  derived and/or modified CDS sequence (opt2) from neuraminidase__InfluenzaB__ACF54184
augcuccccuccaccauccagacccucacccucuuccucaccuccggcggcguccuccucucccucuacgucuccgccucccucuccuaccuccucuacuccgacauccuccucaaguucuccaccaccgagaucaccgcccccaccaugccccucgacugcgccaacgccuccaacguccaggccgucaaccgcuccgccaccaagggcgucacccuccuccuccccgagcccgaguggaccuacccccgccucuccugccccggcuccaccuuccagaaggcccuccucaucuccccccaccgcuucggcgagaccaagggcaacuccgccccccucaucauccgcgagcccuucaucgccugcggccccaaggagugcaagcacuucgcccucacccacuacgccgcccagcccggcggcuacuacaacggcaccaaggaggaccgcaacaagcuccgccaccucaucuccgucaagcucggcaagauccccaccgucgagaacuccaucuuccacauggccgccugguccggcuccgccugccacgacggcaaggaguggaccuacaucggcgucgacggccccgacuccaacgcccuccucaagaucaaguacggcgaggccuacaccgacaccuaccacuccuacgccaacaacauccuccgcacccaggaguccgccugcaacugcaucggcggcaacugcuaccucaugaucaccgacggcuccgccuccggcaucuccgagugccgcuuccucaagauccgcgagggccgcaucaucaaggagaucuuccccaccggccgcgucaagcacaccgaggagugcaccugcggcuucgccuccaacaagaccaucgagugcgccugccgcgacaacuccuacaccgccaagcgccccuucgucaagcucaacgucgagaccgacaccgccgagauccgccucaugugcaccgagaccuaccucgacaccccccgccccgacgacggcuccaucaccggccccugcgaguccaacggcaacaagggcuccggcggcaucaagggcggcuucguccaccagcgcauggccuccaagaucggccgcugguacucccgcaccauguccaagaccaagcgcaugggcaugggccucuacgucaaguacgacggcgaccccuggaccgacuccgacgcccucgcccucuccggcgucauggucuccauggaggagcccggcugguacuccuucggcuucgagaucaaggacaagaagugcgacguccccugcaucggcaucgagaugguccacgacggcggcaaggagaccuggcacuccgccgccaccgccaucuacugccucaugggcuccggccagcuccucugggacaccgucaccggcgucgacauggcccucuga

SEQ ID NO: 124790 - RNA, 1401 nt, Artificial Sequence
  derived and/or modified CDS sequence (opt2) from neuraminidase__InfluenzaB__ACF54206
augcuccccuccaccauccagacccucacccucuuccucaccuccggcggcguccuccucucccucuacgucuccgccucccucuccuaccuccucuacuccgacauccuccucaaguucuccaccaccgagaccaccgcccccaccaugccccucgacugcgccaacgccuccaacguccaggccgucaaccgcuccgccaccaagggcgucacccuccuccuccccgagcccgaguggaccuacccccgccucuccugccccggcuccaccuuccagaaggcccuccucaucuccccccaccgcuucggcgagaccaagggcaacuccgccccccucaucauccgcgagcccuucaucgccugcggccccaaggagugcaagcacuucgcccucacccacuacgccgcccagcccggcggcuacuacaacggcacccgcgaggaccgcaacaagcuccgccaccucaucuccgucaagcucggcaagauccccaccgucgagaacuccaucuuccacauggccgccugguccggcuccgccugccacgacggcaaggaguggaccuacaucggcgucgacggccccgacuccaacgcccuccucaagaucaaguacggcgaggccuacaccgacaccuaccacuccuacgccaacaacauccuccgcacccaggaguccgccugcaacugcaucggcggcaacugcuaccucaugaucaccgacggcuccgccuccggcaucuccgagugccgcuuccucaagauccgcgagggccgcaucaucaaggagaucuuccccaccggccgcgucaagcacaccgaggagugcaccugcggcuucgccuccaacaagaccaucgagugcgccugccgcgacaacuccuacaccgccaagcgccccuucgucaagcucaacgucgagaccgacaccgccgagauccgccucaugugcaccgagaccuaccucgacaccccccgccccgacgacggcuccaucaccggccccugcgaguccaacggcaacaagggcuccggcggcaucaagggcggcuucguccaccagcgcauggccuccaagaucggccgcugguacucccgcaccauguccaagaccaagcgcaugggcaugggccucuacgucaaguacgacggcgaccccuggaccgacuccgacgcccucgcccucuccggcgucauggucuccauggaggagcccggcugguacuccuucggcuucgagaucaaggacaagaagugcgacguccccugcaucggcaucgagaugguccacgacggcggcaaggagaccuggcacuccgccgccaccgccaucuacugccucaugggcuccggccagcuccucugggacaccgucaccggcgucgacauggcccucuga

SEQ ID NO: 124791 - RNA, 1401 nt, Artificial Sequence
  derived and/or modified CDS sequence (opt2) from neuraminidase__InfluenzaB__ACF54217
augcuccccuccaccauccagacccucacccucuuccucaccuccggcggcguccuccucucccucuacgucuccgccucccucuccuaccuccucuacuccgacauccuccucaaguucucccagaccgagaucaccgcccccaucaugccccucgacugcgccaacgccuccaacguccaggccgucaaccacuccgccaccaagggcgucacccuccuccuccccgagcccgaguggaccuacccccgccucuccugccccggcuccaccuuccagaaggcccuccucaucuccccccaccgcuucggcgagaccaagggcaacuccgccccccucaucauccgcgagcccuucaucgccugcggccccaaggagugcaagcacuucgcccucacccacuacgccgcccagcccggcggcuacuacaacggcacccgcgaggaccgcaacaagcuccgccaccucaucuccgucaagcucggcaagauccccaccgucgagaacuccaucuuccacauggccgccugguccggcuccgccugccacgacggccgcgaguggaccuacaucggcgucgacggccccgacuccaacgcccuccucaagaucaaguacggcgaggccuacaccgacaccuaccacuccuacgccaagaacauccuccgcacccaggaguccgccugcaacugcaucggcggcgacugcuaccucaugaucaccgacggccccgccuccggcaucuccgagugccgcuuccucaagauccgcgagggccgcaucaucaaggagaucuuccccaccggccgcgucaagcacaccgaggagugcaccugcggcuucgccuccaacaagaccaucgagugcgccugccgcgacaacuccuacaccgccaagcgccccuucgucaagcucaacgucgagaccgacaccgccgagauccgccucaugugcaccgagaccuaccucgacaccccccgccccaacgacggcuccaucaccggccccugcgaguccaacggcgacaagggcuccggcggcaucaagggcggcuucguccaccagcgcauggccuccaagaucggccgcugguacucccgcaccauguccaagaccaagcgcaugggcaugggccucuacgucaaguacgacggcgaccccuggaccgacuccgaggcccucgcccucuccggcgucauggucuccauggaggagcccggcugguacuccuucggcuucgagaucaaggacaagaagugcgacguccccugcaucggcaucgagaugguccacgacggcggcaagaccaccuggcacuccgccgccaccgccaucuacugccucaugggcuccggccagcuccucugggacaccgucaccggcgucgacauggcccucuga

SEQ ID NO: 124792 - RNA, 1401 nt, Artificial Sequence; identical to SEQ ID NO: 124683
  derived and/or modified CDS sequence (opt2) from neuraminidase__InfluenzaB__ACF54228

SEQ ID NO: 124793 - RNA, 1401 nt, Artificial Sequence; identical to SEQ ID NO: 124704
  derived and/or modified CDS sequence (opt2) from neuraminidase__InfluenzaB__ACF54239

SEQ ID NO: 124794 - RNA, 1401 nt, Artificial Sequence
  derived and/or modified CDS sequence (opt2) from neuraminidase__InfluenzaB__ACF54261
augcuccccuccaccauccagacccucacccucuuccucaccuccggcggcguccuccucucccucuacgucuccgccucccucuccuaccuccucuacuccgacauccuccucaaguucucccccaccgagaucaccgcccccaccaugccccucgacugcgccaacgccuccaacguccaggccgucaaccgcuccgccaccaagggcgucacccuccuccuccccgagcccgaguggaccuacccccgccucuccugccccggcuccaccuuccagaaggcccuccucaucuccccccaccgcuucggcgagaccaagggcaacuccgccccccucaucauccgcgagcccuucaucgccugcggccccaaggagugcaagcacuucgcccucacccacuacgccgcccagcccggcggcuacuacaacggcacccgcgaggaccgcaacaagcuccgccaccucgucuccgucaagcucggcaagauccccaccgucgagaacuccaucuuccacauggccgccugguccggcuccgccugccacgacggcaaggaguggaccuacaucggcgucgacggccccgacuccaacgcccuccucaagaucaaguacggcgaggccuacaccgacaccuaccacuccuacgccaacaacauccuccgcacccaggaguccgccugcaacugcaucggcggcaacugcuaccucaugaucaccgacggcuccgccuccggcaucuccgagugccgcuuccucaagauccgcgagggccgcaucaucaaggagaucuuccccaccggccgcgucaagcacaccgaggagugcaccugcggcuucgccuccaacaagaccaucgagugcgccugccgcgacaacuccuacaccgccaagcgccccuucgucaagcucaacgucgagaccgacaccgccgagauccgccucaugugcaccgagaccuaccucgacaccccccgccccgacgacggcuccaucaccggccccugcgaguccaacggcgacaagggcuccggcggcaucaagggcggcuucguccaccagcgcauggccuccaagaucggccgcugguacucccgcaccauguccaagaccaagcgcaugggcaugggccucuacgucaaguacgacggcgaccccuggaccgacuccgacgcccucgcccucuccggcgucauggucuccauggaggagcccggcugguacuccuucggcuucgagaucaaggacaagaagugcgacguccccugcaucggcaucgagaugguccacgacggcggcaaggagaccuggcacuccgccgccaccgccaucuacugccucaugggcuccggccagcuccucugggacaccgucaccggcgucgacauggcccucuga

SEQ ID NO: 124795 - RNA, 1401 nt, Artificial Sequence
  derived and/or modified CDS sequence (opt2) from neuraminidase__InfluenzaB__ACF54272
augcuccccuccaccauccagacccucacccucuuccucaccuccggcggcguccuccucucccucuacgucuccgccucccucuccuaccuccucuacuccgacauccuccucaaguucuccaccaccgagaucaccgcccccaccaugccccucgacugcgccaacgccuccaacguccaggccgucaaccgcuccgccaccaagggcgucacccuccuccuccccgagcccgaguggaccuacccccgccucuccugccccggcuccaccuuccagaaggcccuccucaucuccccccaccgcuucggcgagaccaagggcaacuccgccccccucaucauccgcgagcccuucaucgccugcggccccaaggagugcaagcacuucgcccucacccacuacgccgcccagcccggcggcuacuacaacggcacccgcgaggaccgcaacaagcuccgccaccucaucuccgucaagcucggcaagauccccaccgucgagaacuccaucuuccacauggccgccugguccggcuccgccugccacgacggcaaggaguggaccuacaucggcgucgacggccccgacuccaacgcccuccucaagaucaaguacggcgaggccuacaccgacaccuaccacuccuacgccaacaacauccuccgcacccaggaguccgccugcaacugcaucggcggcaacugcuaccucaugaucaccgacggcuccgccuccggcaucuccgagugccgcuuccucaagauccgcgagggccgcaucaucaaggagaucuuccccaccggccgcgucaagcacaccgaggagugcaccugcggcuucgccuccaacaagaccaucgagugcgccugccgcgacaacuccuacaccgccaagcgccccuucgucaagcucaacgucgagaccgacaccgccgagauccgccucaugugcaccgagaccuaccucgacaccccccgccccgacgacggcuccaucaccggccccugcgaguccaacggcgacaagggcuccggcggcaucaagggcggcuucguccaccagcgcauggccuccaagaucggccgcugguacucccgcaccauguccaagaccaagcgcaugggcaugggccucuacgucaaguacgacggcgaccccuggaccgacuccgacgcccucgcccucuccggcgucauggucuccauggaggagcccggcugguacuccuucggcuucgagaucaaggacaagaagugcgacguccccugcaucggcaucgagaugguccacgacggcggcaaggagaccuggcacuccgccgccaccgccaucuacugccucaugggcuccggccagcuccucugggacaccgucaccggcgucgacauggcccucuga

SEQ ID NO: 124796 - RNA, 1401 nt, Artificial Sequence
  derived and/or modified CDS sequence (opt2) from neuraminidase__InfluenzaB__ACF54283
augcuccccuccaccauccagacccucacccucuuccucaccuccggcggcguccuccucucccucuacgucuccgccucccucuccuaccuccucuacuccgacauccuccucaaguucuccaccaccgagaucaccgcccccaccaugccccucgacugcgccaacgccuccaacguccaggccgucaaccgcuccgccaccaagggcgucacccuccuccuccccgagcccgaguggaccuacccccgccucuccugccccggcuccaccuuccagaaggcccuccucaucuccccccaccgcuucggcgagaccaagggcaacuccgccccccucaucauccgcgagcccuucaucgccugcggccccaaggagugcaagcacuucgcccucacccacuacgccgcccagcccggcggcuacuacaacggcacccgcgaggaccgcaacaagcuccgccaccucgucuccgucaagcucggcaagauccccaccgucgagaacuccaucuuccacauggccgccugguccggcuccgccugccacgacggcaaggaguggaccuacaucggcgucgacggccccgacuccaacgcccuccucaagaucaaguacggcgaggccuacaccgacaccuaccacuccuacgccaacaacauccuccgcacccaggaguccgccugcaacugcaucggcggcaacugcuaccucaugaucaccgacggcuccgccuccggcaucuccgagugccgcuuccucaagauccgcgagggccgcaucaucaaggagaucuuccccaccggccgcgucaagcacaccgaggagugcaccugcggcuucgccuccaacaagaccaucgagugcgccugccgcgacaacuccuacaccgccaagcgccccuucgucaagcucaacgucgagaccgacaccgccgagauccgccucaugugcaccgagaccuaccucgacaccccccgccccgacgacggcuccaucaccggccccugcgaguccaacggcgacaagggcuccggcggcaucaagggcggcuucguccaccagcgcauggccuccaagaucggccgcugguacucccgcaccauguccaagaccaagcgcaugggcaugggccucuacgucaaguacgacggcgaccccuggaccgacuccgacgcccucgcccucuccggcgucauggucuccauggaggagcccggcugguacuccuucggcuucgagaucaaggacaagaagugcgacguccccugcaucggcaucgagaugguccacgacggcggcaaggagaccuggcacuccgccgccaccgccaucuacugccucaugggcuccggccagcuccucugggacaccgucaccggcgucgacauggcccucuga

SEQ ID NO: 124797 - RNA, 1401 nt, Artificial Sequence
  derived and/or modified CDS sequence (opt2) from neuraminidase__InfluenzaB__ACF54294
augcuccccuccaccauccagacccucacccucuuccucaccuccggcggcguccuccucucccucuacgucuccgccucccucuccuaccuccucuacuccgacauccuccucaaguucuccaccaccgagaucaccgcccccaccaucccccucgacugcgccaacgccuccaacguccaggccgucaaccgcuccgccaccaagggcgucaccuuccuccuccccgagcccgaguggaccuacccccgccucuccugccccggcuccaccuuccagaaggcccuccucaucuccccccaccgcuucggcgagaccaagggcaacuccgccccccucaucauccgcgagcccuucaucgccugcggccccaaggagugcaagcacuucgcccucacccacuacgccgcccagcccggcggcuacuacaacggcacccgcgaggaccgcaacaagcuccgccaccucaucuccgucaagcucggcaagauccccaccgucgagaacuccaucuuccacauggccgccugguccggcuccgccugccacgacggcaaggaguggaccuacaucggcgucgacggccccgacuccaacgcccuccucaagaucaaguacggcgaggccuacaccgacaccuaccacuccuacgccaacaacauccuccgcacccaggaguccgccugcaacugcaucggcggcaacugcuaccucaugaucaccgacggcuccgccuccggcaucuccgagugccgcuuccucaagauccgcgagggccgcaucaucaaggagaucuuccccaccggccgcgucaagcacaccgaggagugcaccugcggcuucgccuccaacaagaccaucgagugcgccugccgcgacaacuccuacaccgccaagcgccccuucgucaagcucaacgucgagaccgacaccgccgagauccgccucaugugcaccgagaccuaccucgacaccccccgccccgacgacggcuccaucaccggccccugcgaguccaacggcaacaagggcuccggcggcaucaagggcggcuucguccaccagcgcauggccuccaagaucggccgcugguacucccgcaccauguccaagaccaagcgcaugggcaugggccucuacgucaaguacgacggcgaccccuggaccgacuccgacgcccucgcccucuccggcgucauggucuccauggaggagcccggcugguacuccuucggcuucgagaucaaggacaagaagugcgacguccccugcaucggcaucgagaugguccacgacggcggcaaggagaccuggcacuccgccgccaccgccaucuacugccucaugggcuccggccagcuccucugggacaccgucaccggcgucgacauggcccucuga

SEQ ID NO: 124798 - RNA, 1401 nt, Artificial Sequence
  derived and/or modified CDS sequence (opt2) from neuraminidase__InfluenzaB__ACF54305
augcuccccuccaccauccagacccucacccucuuccucaccuccggcggcguccuccucucccucuacgucuccgccucccucuccuaccuccucuacuccgacauccuccucaaguucuccaccaccgagaucaccgcccccaccaugccccucgacugcgccaacgccuccaacguccaggccgucaaccgcuccgccaccaagggcgucaccuuccuccuccccgagcccgaguggaccuacccccgccucuccugccccggcuccaccuuccagaaggcccuccucaucuccccccaccgcuucggcgagaccaagggcaacuccgccccccucaucauccgcgagcccuucaucgccugcggccccaaggagugcaagcacuucgcccucacccacuacgccgcccagcccggcggcuacuacaacggcacccgcgaggaccgcaacaagcuccgccaccucaucuccgucgagcucggcaagauccccaccgucgagaacuccaucuuccacauggccgccugguccggcuccgccugccacgacggcaaggaguggaccuacaucggcgucgacggccccgacuccaacgcccuccucaagaucaaguacggcgaggccuacaccgacaccuaccacuccuacgccaacaacauccuccgcacccaggaguccgccugcaacugcaucggcggcaacugcuaccucaugaucaccgacggcuccgccuccggcaucuccgagugccgcuuccucaagauccgcgagggccgcaucaucaaggagaucuuccccaccggccgcgucaagcacaccgaggagugcaccugcggcuucgccuccaacaagaccaucgagugcgccugccgcgacaacuccuacaccgccaagcgccccuucgucaagcucaacgucgagaccgacaccgccgagauccgccucaugugcaccgagaccuaccucgacaccccccgccccgacgacggcuccaucaccggccccugcgaguccaacggcaacaagggcuccggcggcaucaagggcggcuucguccaccagcgcauggccuccaagaucggccgcugguacucccgcaccauguccaagaccaagcgcaugggcaugggccucuacgucaaguacgacggcgaccccuggaccgacuccgacgcccucgcccucuccggcgucauggucuccauggaggagcccggcugguacuccuucggcuucgagaucaaggacaagaagugcgacguccccugcaucggcaucgagaugguccacgacggcggcaaggagaccuggcacuccgccgccaccgccaucuacugccucaugggcuccggccagcuccucugggacaccgucaccggcgucgacauggcccucuga

SEQ ID NO: 124799 - RNA, 1401 nt, Artificial Sequence
  derived and/or modified CDS sequence (opt2) from neuraminidase__InfluenzaB__ACF54316
augcuccccuccaccauccagacccucacccucuuccucaccuccggcggcguccuccucucccucuacgucuccgccucccucuccuaccuccucuacuccgacauccuccucaaguucucccccaccgagaucaccgcccccaccaugccccucgacugcgccaacgccuccaacguccaggccgucaaccgcuccgccaccaagggcgucacccuccuccuccccgagcccgaguggaccuacccccgccucuccugccccggcuccaccuuccagaaggcccuccucaucuccccccaccgcuucggcgagaccaagggcaacuccgccccccucaucauccgcgagcccuucaucgccugcggccccaacgagugcaagcacuucgcccucacccacuacgccgcccagcccggcggcuacuacaacggcacccgcggcgaccgcaacaagcuccgccaccucaucuccgucaagcucggcaagauccccaccgucgagaacuccaucuuccacauggccgccugguccggcuccgccugccacgacggcaaggaguggaccuacaucggcgucgacggccccgacaacaacgcccuccucaagaucaaguacggcgaggccuacaccgacaccuaccacuccuacgccaacaacauccuccgcacccaggaguccgccugcaacugcaucggcggcaacugcuaccucaugaucaccgacggcuccgccuccggcgucuccgagugccgcuuccucaagauccgcgagggccgcaucaucaaggagaucuuccccaccggccgcgucaagcacaccgaggagugcaccugcggcuucgccuccaacaagaccaucgagugcgccugccgcgacaacuccuacaccgccaagcgccccuucgucaagcucaacgucgagaccgacaccgccgagauccgccucaugugcaccgagaccuaccucgacaccccccgccccgacgacggcuccaucaccggccccugcgaguccaacggcgacaagggcuccggcggcaucaagggcggcuucguccaccagcgcauggccuccaagaucggccgcugguacucccgcaccauguccaagaccgagcgcaugggcaugggccucuacgucaaguacgacggcgaccccugggccgacuccgacgcccucgcccucaucggcgucauggucuccauggaggagcccggcugguacuccuucggcuucgagaucaaggacaagaacugcgacguccccugcaucggcaucgagaugguccacgacggcggcaaggagaccuggcacuccgccgccaccgccaucuacugccucaugggcuccggccagcuccucugggacaccgucaccggcgucaacauggcccucuga

SEQ ID NO: 124800 - RNA, 1404 nt, Artificial Sequence
  derived and/or modified CDS sequence (opt2) from neuraminidase__InfluenzaB__ACF54338
augcuccccuccaccauccagacccucacccucuuccucaccuccggcggcguccuccucucccucuacgucuccgccucccucuccuaccuccucuacuccgacauccuccucaaguuccccuccaccgagaucaccgcccccaccaugccccucgacugcgccaacgccuccaacguccaggccgucaaccgcuccgccaccaagggcgucacccuccuccuccuccccgagcccgaguggaccuacccccgccucuccugccccggcuccaccuuccagaaggcccuccucaucuccccccaccgcuucggcgagaccaagggcaacuccgccccccucaucauccgcgagcccuucaucgccugcggccccaaggagugcaagcacuucgcccucacccacuacgccgcccagcccggcggcuacuacaacggcacccgcggcgaccgcaacaagcuccgccaccucaucuccgucaagcucggcaagauccccaccgucgagaacuccaucuuccacauggccgccugguccggcuccgccugccacgacggcaaggaguggaccuacaucggcgucgacggccccgacaacaacgcccuccucaagaucaaguacggcgaggccuacaccgacaccuaccacuccuacgccaacaacauccuccgcacccaggaguccgccugcaacugcaucggcggcaacugcuaccucaugaucaccgacggcuccgccuccggcgucuccgagugccgcuuccucaagauccgcgagggccgcaucaucaaggagaucuuccccaccggccgcaucaagcacaccgaggagugcaccugcggcuucgccuccaacaagaccaucgagugcgccugccgcgacaacuccuacaccgccaagcgccccuucgucaagcucaacgucgagaccgacaccgccgagauccgccucaugugcaccgagaccuaccucgacaccccccgccccgacgacggcuccaucaccggccccugcgaguccaacggcggcaagggcuccggcggcaucaagggcggcuucguccaccagcgcauggccuccaagaucggccgcugguacucccgcaccauguccaagaccgagcgcaagggcaugggccucuacgucaaguacgacggcgaccccugggccgacuccgacgcccucgucuucuccggcgucauggucuccauggaggagcccggcugguacuccuucggcuucgagaucaaggacaagaagugcgacguccccugcaucggcaucgagaugguccacgacggcggcaaggagaccuggcacuccgccgccaccgccaucuacugccucaugggcuccggccagcuccucugggacaccgucaccggcgucaacauggcccucuga

SEQ ID NO: 124801 - RNA, 1401 nt, Artificial Sequence
  derived and/or modified CDS sequence (opt2) from neuraminidase__InfluenzaB__ACF54349
augcuccccuccaccauccagacccucacccucuuccucaccuccggcggcguccuccucucccucuacgucuccgccucccucuccuaccuccucuacuccgacauccuccucaaguucucccagaccgagaucaccgcccccaucaugccccucgacugcgccaacgccuccaacguccaggccgucaaccgcuccgccgccaagggcgucacccuccuccuccccgagcccgaguggaccuacccccgccucuccugccccggcuccaccuuccagaaggcccuccucaucaacccccaccgcuucggcgagaccaagggcaacuccgccccccucaucauccgcgagcccuucaucgccugcggccccaccgagugcaagcacuucgcccucacccacuacgccgcccagcccggcggcuacuacaacggcacccgcgaggaccgcaacaagcuccgccaccucaucuccgucaagcucggcaagauccccaccgucgagaacuccaucuuccacauggccgccugguccggcuccgccugccacgacggcaaggaguggaccuacaucggcgucgacggccccgacuccaacgcccuccucaagaucaaguacggcgaggccuacaccgacaccuaccacuccuacgccaagaacauccuccgcacccaggaguccgccugcaacugcaucggcggcgacugcuaccucaugaucaccgacggcuccgccuccggcaucuccgagugccgcuuccucaagauccgcgagggccgcaucaucaaggagaucuuccccaccggccgcgucaagcacaccgaggagugcaccugcggcuucgccuccaacaagaccaucgagugcgccugccgcgacaacuccuacaccgccaagcgccccuucgucaagcucaacgucgagaccgacaccgccgagauccgccucaugugcaccgagaccuaccucgacaccccccgccccaacgacggcuccaucaccggccccugcgaguccgacggcgacaagggcuccggcggcaucaagggcggcuucguccaccagcgcauggccuccaagaucggccgcugguacucccgcaccauguccaagaccaagcgcaugggcaugggccucuacgucaaguacgacggcgaccccuggaccgacuccgaggcccucgcccucuccggcgucauggucuccauggaggagcccggcugguacuccuucggcuucgagaucaaggacaagaagugcgacguccccugcaucggcaucgagaugguccacgacggcggcaagaccaccuggcacuccgccgccaccgccaucuacugccucaugggcuccggccagcuccucugggacaccgucaccggcgucgacauggcccucuga

SEQ ID NO: 124802 - RNA, 1401 nt, Artificial Sequence
  derived and/or modified CDS sequence (opt2) from neuraminidase__InfluenzaB__ACF54371
augcuccccuccaccauccagacccucacccucuuccucaccuccggcggcguccuccucucccucuacgucuccgccucccucuccuaccuccucuacuccgacauccuccucaaguucucccagaccgagaucaccgcccccaucaugccccucgacugcgccaacgccuccaacguccaggccgucaaccgcuccgccgccaagggcgucacccuccuccuccccgagcccgaguggaccuacccccgccucuccugccccggcuccaccuuccagaaggcccuccucaucuccccccaccgcuucggcgagaccaagggcaacuccgccccccucaucauccgcgagcccuucaucgccugcggccccaccgagugcaagcacuucgcccucacccacuacgccgcccagcccggcggcuacuacaacggcacccgcgaggaccgcaacaagcuccgccaccucaucuccgucaagcucggcaagauccccaccgucgagaacuccaucuuccacauggccgccugguccggcuccgccugccacgacggcaaggaguggaccuacaucggcgucgacggccccgacuccaacgcccuccucaagaucaaguacggcgaggccuacaccgacaccuaccacuccuacgccaagaacauccuccgcacccaggaguccgccugcaacugcaucggcggcgacugcuaccucaugaucaccgacggccccgccuccggcaucuccgagugccgcuuccucaagauccgcgagggccgcaucaucaaggagaucuuccccaccggccgcgucaagcacaccgaggagugcaccugcggcuucgccuccaacaagaccaucgagugcgccugccgcgacaacuccuacaccgccaagcgccccuucgucaagcucaacgucgagaccgacaccgccgagauccgccucaugugcaccgagaccuaccucgacaccccccgccccaacgacggcuccaucaccggccccugcgaguccgacggcgacaagggcuccggcggcaucaagggcggcuucguccaccagcgcauggccuccaagaucggccgcugguacucccgcaccauguccaagaccaagcgcaugggcaugggccucuacgucaaguacgacggcgaccccuggaccgacuccgaggcccucgcccucuccggcgucauggucuccauggaggagcccggcugguacuccuucggcuucgagaucaaggacaagaagugcgacguccccugcaucggcaucgagaugguccacgacggcggcaagaccaccuggcacuccgccgccaccgccaucuacugccucaccggcuccggccagcuccucugggacaccgucaccggcgucgacauggcccucuga

SEQ ID NO: 124803 - RNA, 1401 nt, Artificial Sequence
  derived and/or modified CDS sequence (opt2) from neuraminidase__InfluenzaB__ACI22549
augcuccccuccaccauccagacccucacccucuuccucaccuccggcggcguccuccucucccucuacgucuccgccucccucuccuaccuccucuacuccgacauccuccucaaguucucccccaccgagaucaccgcccgcaccaugccccucgacugcgccaacgccuccaacguccaggccgucaaccgcuccgccaccaagggcgucacccuccuccuccccgagcccgaguggaccuacccccgccucuccugccccggcuccaccuuccagaaggcccuccucaucuccccccaccgcuucggcgagaccaagggcaacuccgccccccucaucauccgcgagcccuucaucgccugcggccccaacgagugcaagcacuucgcccucacccacuacgccgcccagcccggcggcuacuacaacggcacccgcggcgaccgcaacaagcuccgccaccucaucuccgucaagcucggcaagauccccaccgucgaggacuccaucuuccacauggccgccugguccggcuccgccugccacgacggcaaggaguggaccuacaucggcgucgacggccccgacaacaacgcccuccucaagaucaaguacggcgaggccuacaccgacaccuaccacuccuacgccaacaacauccuccgcacccaggaguccgccugcaacugcaucggcggcaacugcuaccucaugaucaccgacggcuccgccuccggcgucuccgagugccgcuuccucaagauccgcgagggccgcaucaucaaggagaucuuccccaccggccgcgucaagcacaccgaggagugcaccugcggcuucgccuccaacaagaccaucgagugcgccugccgcgacaacuccuacaccgccaagcgccccuucgucaagcucaacgucgagaccgacaccgccgagauccgccucaugugcaccgagaccuaccucgacaccccccgccccgacgacggcuccaucaccggccccugcgaguccaacggcgacaagggcuccggcggcaucaagggcggcuucguccaccagcgcauggccuccaagaucggccgcugguacucccgcaccauguccaagaccgagcgcaugggcaugggccucuacgucaaguacgacggcgaccccugggccgacuccgacgcccucgcccucaucggcgucauggucuccauggaggagcccggcugguacuccuucggcuucgagaucaaggacaagaacugcgacguccccugcaucggcaucgagaugguccacgacggcggcaaggagaccuggcacuccgccgccaccgccaucuacugccucaugggcuccggccagcuccucugggacaccgucaccggcgucaacauggcccucuga

SEQ ID NO: 124804 - RNA, 1401 nt, Artificial Sequence
  derived and/or modified CDS sequence (opt2) from neuraminidase__InfluenzaB__ACI22551
augcuccccuccaccauccagacccucacccucuuccucaccuccggcggcguccuccucucccucuacgucuccgccucccucuccuaccuccucuacuccgacauccuccucaaguucucccccaccgagaucaccgcccucaccaugccccucgacugcgccaacgccuccaacguccaggccgucaaccgcuccgccaccaagggcgucacccuccuccuccccgagcccgaguggaccuacccccgccucuccugccccggcuccaccuuccagaaggcccuccucaucuccccccaccgcuucggcgagaccaagggcaacuccgccccccucaucauccgcgagcccuucaucgccugcggccccaacgagugcaagcacuucgcccucacccacuacgccgcccagcccggcggcuacuacaacggcacccgcggcgaccgcaacaagcuccgccaccucaucuccgucaagcucggcaagauccccaccgucgagaacuccaucuuccacauggccgccugguccggcuccgccugccacgacggcaaggaguggaccuacaucggcgucgacggccccgacaacaacgcccuccucaagaucaaguacggcgaggccuacaccgacaccuaccacuccuacgccaacaacauccuccgcacccaggaguccgccugcaacugcaucggcggcaacugcuaccucaugaucaccgacggcuccgccuccggcgucuccgagugccgcuuccucaagauccgcgagggccgcaucaucaaggagaucuuccccaccggccgcgucaagcacaccgaggagugcaccugcggcuucgccuccaacaagaccaucgagugcgccugccgcgacaacuccuacaccgccaagcgccccuucgucaagcucaacgucgagaccgacaccgccgagauccgccucaugugcaccgagaccuaccucgacaccccccgccccgacgacggcuccaucaccggccccugcgaguccaacggcgacaagggcuccggcggcaucaagggcggcuucguccaccagcgcauggccuccaagaucggccgcugguacucccgcaccauguccaagaccgagcgcaugggcaugggccucuacgucaaguacgacggcgaccccugggccgacuccgacgcccucgcccucaucggcgucauggucuccauggaggagcccggcugguacuccuucggcuucgagaucaaggacaagaacugcgacguccccugcaucggcaucgagaugguccacgacggcggcaaggagaccuggcacuccgccgccaccgccaucuacugccucaugggcuccggccagcuccucugggacaccgucaccggcgucaacauggcccucuga

SEQ ID NO: 124805 - RNA, 1401 nt, Artificial Sequence; identical to SEQ ID NO: 124804
  derived and/or modified CDS sequence (opt2) from neuraminidase__InfluenzaB__ACI22555

SEQ ID NO: 124806 - RNA, 1401 nt, Artificial Sequence; identical to SEQ ID NO: 124671
  derived and/or modified CDS sequence (opt2) from neuraminidase__InfluenzaB__ACI22557

SEQ ID NO: 124807 - RNA, 1401 nt, Artificial Sequence
  derived and/or modified CDS sequence (opt2) from neuraminidase__InfluenzaB__ACI22559
augcuccccuccaccauccagacccucacccucuuccucaccuccggcggcguccuccucucccucuacgucuccgccucccucuccuaccuccucuacuccgacauccuccucaaguuccccuccaccgagaucaccgcccccaccaugccccucgacugcgccaacgccuccaacguccaggccgucaaccucuccgccaccaagggcgucacccuccuccuccccgagcccgaguggaccuacccccgccucuccugccccggcuccaccuuccagaaggcccuccucaucuccccccaccgcuucggcgagaccaagggcaacuccgccccccucaucauccgcgagcccuucaucgccugcggccccaaggagugcaagcacuucgcccucacccacuacgccgcccagcccggcggcuacuacaacggcacccgcggcgaccgcaacaagcuccgccaccucaucuccgucaagcucggcaagauccccaccgucgagaacuccaucuuccacauggccgccugguccggcuccgccugccacgacggcaaggaguggaccuacaucggcgucgacggccccgacaacaacgcccuccucaagaucaaguacggcgaggccuacaccgacaccuaccacuccuacgccaacaacauccuccgcacccaggaguccgccugcaacugcaucggcggcaacugcuaccucaugaucaccgacggcuccgccuccggcgucuccgagugccgcuuccucaagauccgcgagggccgcaucaucaaggagaucuuccccaccggccgcaucaagcacaccgaggagugcaccugcggcuucgccuccaacaagaccaucgagugcgccugccgcgacaacuccuacaccgccaagcgccccuucgucaagcucaacgucgagaccgacaccgccgagauccgccucaugugcaccgagaccuaccucgacaccccccgccccgacgacggcuccaucaccggccccugcgaguccaacggcggcaagggcuccggcggcaucaagggcggcuucguccaccagcgcauggccuccaagaucggccgcugguacucccgcaccauguccaagaccgagcgcaagggcaugggccucuacgucaaguacgacggcgaccccugggccgacuccgacgcccucgccuucuccggcgucauggucuccauggaggagcccggcugguacuccuucggcuucgagaucaaggacaagaagugcgacguccccugcaucggcaucgagaugguccacgacggcggcaaggagaccuggcacuccgccgccaccgccaucuacugccucaugggcuccggccagcuccucugggacaccgucaccggcgucaacauggcccucuga

SEQ ID NO: 124808 - RNA, 1401 nt, Artificial Sequence
  derived and/or modified CDS sequence (opt2) from neuraminidase__InfluenzaB__ACI22561
augcuccccuccaccauccagacccucacccucuuccucaccuccggcggcguccuccucucccucuacgucuccgccucccucuccuaccuccucuacuccgacauccuccucaaguucucccccaccgagaucaccgcccccaccaugccccucgacugcgccaacgccuccaacguccaggccgucaaccgcuccgccaccaagggcggcacccuccuccuccccgagcccgaguggaccuacccccgccucuccugccccggcuccaccuuccagaaggcccuccucaucuccccccaccgcuucggcgagaccaagggcaacuccgccccccucaucauccgcgagcccuucaucgccugcggccccaacgagugcaagcacuucgcccucacccacuacgccgcccagcccggcggcuacuacaacggcacccgcggcgaccgcaacaagcuccgccaccucaucuccgucaagcucggcaagauccccaccgucgagaacuccaucuuccacauggccgccugguccggcuccgccugccacgacggcaaggaguggaccuacaucggcgucgacggccccgacaacaacgcccuccucaagaucaaguacggcgaggccuacaccgacaccuaccacuccuacgccaacaagauccuccgcacccaggaguccgccugcaacugcaucggcggcaacugcuaccucaugaucaccgacggcuccgccuccggcgucuccgagugccgcuuccucaagauccgcgagggccgcaucaucaaggagaucuuccccaccggccgcgucaagcacaccgaggagugcaccugcggcuucgccuccaacaagaccaucgagugcgccugccgcgacaacuccuacaccgccaagcgccccuucgucaagcucaacgucgagaccgacaccgccgagauccgccucaugugcaccgacaccuaccucgacaccccccgccccgacgacggcuccaucaccggccccugcgaguccaacggcgacaagggcuccggcggcaucaagggcggcuucguccaccagcgcauggccuccaagaucggccgcugguacucccgcaccauguccaagaccgagcgcaugggcaugggccucuacgucaaguacgacggcgaccccugggccgacuccgacgcccucgccuucuccggcgucauggucuccaugaaggagcccggcugguacuccuucggcuucgagaucaaggacaagaagugcgacguccccugcaucggcaucgagaugguccacgacggcggcaaggagaccuggcacuccgccgccaccgccaucuacugccucaugggcuccggccagcuccucugggacaccgucaccggcgucgacauggcccucuga

SEQ ID NO: 124809 - RNA, 1401 nt, Artificial Sequence; identical to SEQ ID NO: 124671
  derived and/or modified CDS sequence (opt2) from neuraminidase__InfluenzaB__ACI22563

SEQ ID NO: 124810 - RNA, 1401 nt, Artificial Sequence
  derived and/or modified CDS sequence (opt2) from neuraminidase__InfluenzaB__ACI22565
augcuccccuccaccauccagacccucacccucuuccucaccuccggcggcguccuccucucccucuacgucuccgccucccucuccuaccuccucuacuccgacauccuccucaaguuccccuccaccgagaucaccgcccccaccaugccccucgacugcgccaacgccuccaacguccaggccgucaaccacuccgccaccaagggcgucacccuccuccuccccgagcccgaguggaccuacccccgccucuccugccccggcuccaccuuccagaaggcccuccucaucuccccccaccgcuucggcgagaccaagggcaacuccgccccccucaucauccgcgagcccuucaucgccugcggccccaaggagugcaagcacuucgcccucacccacuacgccgcccagcccggcggcuacuacaacggcacccgcggcgaccgcaacaagcuccgccaccucaucuccgucaagcucggcaagauccccaccgucgagaacuccaucuuccacauggccgccugguccggcuccgccugccacgacggcaaggaguggaccuacaucggcgucgacggccccgacaacaacgcccuccucaagaucaaguacggcgaggccuacaccgacaccuaccacuccuacgccaacaacauccuccgcacccaggaguccgccugcaacugcaucggcggcaacugcuaccucaugaucaccgacggcuccgccuccggcgucuccgagugccgcuuccucaagauccgcgagggccgcaucaucaaggagaucuuccccaccggccgcaucaagcacaccgaggagugcaccugcggcuucgccuccaacaagaccaucgagugcgccugccgcgacaacuccuacaccgccaagcgccccuucgucaagcucaacgucgagaccgacaccgccgagauccgccucaugugcaccgagaccuaccucgacaccccccgccccgacgacggcuccaucaccggccccugcgaguccaacggcggcaagggcuccggcggcaucaagggcggcuucguccaccagcgcauggccuccaagaucggccgcugguacucccgcaccauguccaagaucgagcgcaagggcaugggccucuacgucaaguacgacggcgaccccugggccgacuccgacgcccucgccuucuccggcgucauggucuccauggaggagcccggcugguacuccuucggcuucgagauccgcgacaagaagugcgacguccccugcaucggcaucgagaugguccacgacggcggcaaggagaccuggcacuccgccgccaccgccaucuacugccucaugggcuccggccagcuccucugggacaccgucaccggcgucaacauggcccucuga

SEQ ID NO: 124811 - RNA, 1401 nt, Artificial Sequence; identical to SEQ ID NO: 124671
  derived and/or modified CDS sequence (opt2) from neuraminidase__InfluenzaB__ACI22567

SEQ ID NO: 124812 - RNA, 1401 nt, Artificial Sequence; identical to SEQ ID NO: 124671
  derived and/or modified CDS sequence (opt2) from neuraminidase__InfluenzaB__ACI22569

SEQ ID NO: 124813 - RNA, 1401 nt, Artificial Sequence
  derived and/or modified CDS sequence (opt2) from neuraminidase__InfluenzaB__ACJ53908
augcuccacuccaccauccagacccucacccucuuccucaccuccggcggcguccuccucucccucuacgucuccgccucccucuccuaccuccucuacuccgacauccuccucaaguucucccagaccgagaucaccgcccccaucaugccccucgacugcgccaacgccuccuccguccaggccgucaaccgcuccgccgccaagggcgucacccuccuccuccccgagcccgaguggaccuacccccgccucuccugccccggcuccaccuuccagaaggcccuccucaucuccccccaccgcuucggcgagaccaagggcaacuccgccccccucaucauccgcgagcccuucaucgccugcggccccaccgagugcaagcacuucgcccucacccacuacgccgcccagcccggcggcuacuacaacggcacccgcgaggaccgcaacaagcuccgccaccucaucuccgucaagcucggcaagauccccaccgucgagaacuccaucuuccacauggccgccugguccggcuccgccugccacgacggcaaggaguggaccuacaucggcgucgacggccccgacuccaacgcccuccucaagaucaaguacggcgaggccuacaccgacaccuaccacuccuacgccaagaacauccuccgcacccaggaguccgccugcaacugcaucggcggcgacugcuaccucaugaucaccgacggccccgccuccggcaucuccgagugccgcuuccucaagauccgcgagggccgcaucaucaaggagaucuuccccaccggccgcgucaagcacaccgaggagugcaccugcggcuucgccuccaacaagaccaucgagugcgccugccgcgacaacuccuacaccgccaagcgccccuucgucaagcucaacgucgagaccgacaccgccgagauccgccucaugugcaccgagaccuaccucgacaccccccgccccaacgacggcuccaucaccggccccugcgaguccgacggcgacaagggcuccggcggcaucaagggcggcuucguccaccagcgcauggccuccaagaucggccgcugguacucccgcaccauguccaagaccaagcgcaugggcaugggccucuacgucaaguacgacggcgaccccuggaccgacuccgaggcccucgcccucuccggcgucauggucuccauggaggagcccggcugguacuccuucggcuucgagaucaaggacaagaagugcgacguccccugcaucggcaucgagaugguccacgacggcggcaagaccaccuggcacuccgccgccaccgccaucuacugccucaugggcuccggccagcuccucugggacaccgucaccggcgucgacauggcccucuga

SEQ ID NO: 124814 - RNA, 1401 nt, Artificial Sequence; identical to SEQ ID NO: 124689
  derived and/or modified CDS sequence (opt2) from neuraminidase__InfluenzaB__ACN32560

SEQ ID NO: 124815 - RNA, 1401 nt, Artificial Sequence; identical to SEQ ID NO: 124759
  derived and/or modified CDS sequence (opt2) from neuraminidase__InfluenzaB__ACN32582

SEQ ID NO: 124816 - RNA, 1401 nt, Artificial Sequence; identical to SEQ ID NO: 124671
  derived and/or modified CDS sequence (opt2) from neuraminidase__InfluenzaB__ACN32593

SEQ ID NO: 124817 - RNA, 1401 nt, Artificial Sequence
  derived and/or modified CDS sequence (opt2) from neuraminidase__InfluenzaB__ACN32604
augcuccccuccaccauccagacccucacccucuuccucaccuccggcggcguccuccucucccucuacgucuccgccucccucuccuaccuccucuacuccgacauccuccucaaguucucccccaccgagaucaccgcccccaccaugccccucgacugcgccaacgccuccaacguccacgccgucaaccgcuccgccaccaagggcgucacccuccuccuccccgagcccgaguggaccuacccccgccucuccugccccggcuccaccuuccagaaggcccuccucaucuccccccaccgcuucggcgagaccaagggcaacuccgccccccucaucauccgcgagcccuucaucgccugcggccccaacgagugcaagcacuucgcccucacccacuacgccgcccagcccggcggcuacuacaacggcacccgcggcgaccgcaacaagcuccgccaccucaucuccgucaagcucggcaagauccccaccgucgagaacuccaucuuccacauggccgccugguccggcuccgccugccacgacggcaaggaguggaccuacaucggcgucgacggccccgacaacaacgcccuccucaagaucaaguacggcgaggccuacaccgacaccuaccacuccuacgccaacaacauccuccgcacccaggaguccgccugcaacugcaucggcggcaacugcuaccucaugaucaccgacggcuccgccuccggcgucuccgagugccgcuuccucaagauccgcgagggccgcaucaucaaggagaucuuccccaccggccgcgucaagcacaccgaggagugcaccugcggcuucgccuccaacaagaccaucgagugcgccugccgcgacaacuccuacaccgccaagcgccccuucgucaagcucaacgucgagaccgacaccgccgagauccgccucaugugcaccgacaccuaccucgacaccccccgccccgacgacggcuccaucaccggccccugcgaguucaacggcgacaagggcuccggcggcaucaagggcggcuucguccaccagcgcauggccuccaagaucggccgcugguacucccgcaccauguccaagaccgagcgcaugggcaugggccucuacgucaaguacgacggcgaccccugggccgacuccgacgcccucgccuucuccggcgucauggucuccaugaaggagcccggcugguacuccuucggcuucgagaucaaggacaagaagugcgacguccccugcaucggcaucgagaugguccacgacggcggcaaggagaccuggcacuccgccgccaccgccaucuacugccucaugggcuccggccagcuccucugggacaccgucaccggcgucgacauggcccucuga

SEQ ID NO: 124818 - RNA, 1401 nt, Artificial Sequence; identical to SEQ ID NO: 124671
  derived and/or modified CDS sequence (opt2) from neuraminidase__InfluenzaB__ACN32615

SEQ ID NO: 124819 - RNA, 1401 nt, Artificial Sequence
  derived and/or modified CDS sequence (opt2) from neuraminidase__InfluenzaB__ACN32775
augcuccccuccaccauccagacccucacccucuuccucaccuccggcggcguccuccucucccucuacgucuccgccucccucuccuaccuccucuacuccgacauccuccucaaguucucccccaccgagaucaacgcccccaccaugccccucgacugcgccaacgccuccaacguccacgccgucaaccgcuccgccaccaagggcgucacccuccuccuccccgagcccgaguggaccuacccccgccucuccugccccggcuccaccuuccagaaggcccuccucaucuccccccaccgcuucggcgagaccaagggcaacuccgccccccucaucauccgcgagcccuucaucgccugcggccccaacgagugcaagcacuucgcccucacccacuacgccgcccagcccggcggcuacuacaacggcacccgcggcgaccgcaacaagcuccgccaccucaucuccgucaagcucggcaagauccccaccgucgagaacuccaucuuccacauggccgccugguccggcuccgccugccacgacggcaaggaguggaccuacaucggcgucgacggccccgacaacaacgcccuccucaagaucaaguacggcgaggccuacaccgacaccuaccacuccuacgccaacaacauccuccgcacccaggaguccgccugcaacugcaucggcggcaacugcuaccucaugaucaccgacggcuccgccuccggcaucuccgagugccgcuuccucaagauccgcgagggccgcaucaucaaggagaucuuccccaccggccgcgucaagcacaccgaggagugcaccugcggcuucgccuccaacaaguccaucgagugcgccugccgcgacaacuccuacaccgccaagcgccccuucgucaagcucaacgucgagaccgacaccgccgagauccgccucaugugcaccgacaccuaccucgacaccccccgccccgacgacggcuccaucaccggccccugcgaguccaacggcgacaagggcuccggcggcaucaagggcggcuucguccaccagcgcauggccuccaagaucggccgcugguacucccgcaccauguccaagaccgagcgcaugggcaugggccucuacgucaaguacgacggcgaccccugggccgacuccgacgcccucgccuucuccggcgucauggucuccaugaaggagcccggcugguacuccuucggcuucgagaucaaggacaagaagugcgacguccccugcaucggcaucgagaugguccacgacggcggcaaggagaccuggcacuccgccgccaccgccaucuacugccucaugggcuccggccagcuccucugggacaccgucaccggcgucgacauggcccucuga

SEQ ID NO: 124820 - RNA, 1401 nt, Artificial Sequence; identical to SEQ ID NO: 124671
  derived and/or modified CDS sequence (opt2) from neuraminidase__InfluenzaB__ACN32786

SEQ ID NO: 124821 - RNA, 1401 nt, Artificial Sequence
  derived and/or modified CDS sequence (opt2) from neuraminidase__InfluenzaB__ACO05928
augcuccccuccaccauccagacccucacccucuuccucaccuccggcggcguccuccucucccucuacgucuccgccucccucuccuaccuccucuacuccgacauccuccucaaguuccccuccaccgagaucaccgcccccaccaugccccucgacugcgccaacgccuccaacguccaggccgucaaccgcuccgccaccaagggcgucacccuccuccuccccgagcccgaguggaccuacccccgccucuccugccccggcuccaccuuccagaaggcccuccucaucuccccccaccgcuucggcgagaccaagggcaacuccgccccccucaucauccgcgagcccuucaucgccugcggccccaaggagugcaagcacuucgcccucacccacuacgccgcccagcccggcggcuacuacaacggcacccgcggcgaccgcaacaagcuccgccaccucaucuccgucaagcucggcaagauccccaccgucgagaacuccaucuuccacauggccgccugguccggcuccgccugccacgacggcaaggaguggaccuacaucggcgucgacggccccgacaacaacgcccuccucaagaucaaguacggcgaggccuacaccgacaccuaccacuccuacgccaacaacauccuccgcacccaggaguccgccugcaacugcaucggcggcaacugcuaccucaugaucaccgacggcuccgccuccggcgucuccgagugccgcuuccucaagauccgcgagggccgcaucaucaaggagaucuuccccaccggccgcaucaagcacaccgaggagugcaccugcggcuucgccuccaacaagaccaucgagugcgccugccgcgacaacuccuacaccgccaagcgccccuucgucaagcucaacgucgagaccgacaccgccgagauccgccucaugugcaccgagaccuaccucgacaccccccgccccgacgacggcuccaucaccggccccugcgaguccaacggcgacaagggcuccggcggcaucaagggcggcuucguccaccagcgcauggccuccaagaucggccgcugguacucccgcaccauguccaagaccaagcgcaugggcaugggccucuacgucaaguacgacggcgaccccugggccgacuccgacgcccucgccuucuccggcgucaugguccccauggaggagcccggcugguacuccuucggcuucgagaucaaggacaagaagugcgacguccccugcaucggcaucgagaugguccacgacggcggcaaggagaccuggcacuccgccgccaccgccaucuacugccucaugggcuccggccagcuccucugggacaccgucaccggcgucaacauggcccucuga

SEQ ID NO: 124822 - RNA, 1401 nt, Artificial Sequence; identical to SEQ ID NO: 124683
  derived and/or modified CDS sequence (opt2) from neuraminidase__InfluenzaB__ACO05950

SEQ ID NO: 124823 - RNA, 1401 nt, Artificial Sequence
  derived and/or modified CDS sequence (opt2) from neuraminidase__InfluenzaB__ACO05961
augcuccccuccaccauccagacccucacccucuuccucaccuccggcggcguccuccucucccucuacgucuccgccucccucuccuaccuccccuacuccgacauccuccucaaguuccccuccaccgagaucaccgcccccaccaugccccucgacugcgccaacgccuccaacguccaggccgucaaccgcuccgccaccaagggcgucacccuccuccuccccgagcccgaguggaccuacccccgccucuccugccccggcuccaccuuccagaaggcccuccucaucuccccccaccgcuucggcgagaccaagggcaacuccgccccccucaucauccgcgagcccuucaucgccugcggccccaaggagugcaagcacuucgcccucacccacuacgccgcccagcccggcggcuacuacaacggcacccgcggcgaccgcaacaagcuccgccaccucaucuccgucaagcucggcaagauccccaccgucgagaacuccaucuuccacauggccgccugguccggcuccgccugccacgacggcaaggaguggaccuacaucggcgucgacggccccgacaacaacgcccuccucaagaucaaguacggcgaggccuacaccgacaccuaccacuccuacgccaacaacauccuccgcacccaggaguccgccugcaacugcaucggcggcaacugcuaccucaugaucaccgacggcuccgccuccggcgucuccgagugccgcuuccucaagauccgcgagggccgcaucaucaaggagaucuuccccaccggccgcaucaagcacaccgaggagugcaccugcggcuucgccuccaacaagaccaucgagugcgccugccgcgacaacuccuacaccgccaagcgccccuucgucaagcucaacgucgagaccgacaccgccgagauccgccucaugugcaccgagaccuaccucgacaccccccgccccgacgacggcuccaucaccggccccugcgaguccaacggcgacaagggcuccggcggcaucaagggcggcuucguccaccagcgcauggccuccaagaucggccgcugguacucccgcaccauguccaagaccaagcgcaugggcaugggccucuacgucaaguacgacggcgaccccugggccgacuccgacgcccucgccuucuccggcgucauggucuccauggaggagcccggcugguacuccuucggcuucgagaucaaggacaagaagugcgacguccccugcaucggcaucgagaugguccacgacggcggcaaggagaccuggcacuccgccgccaccgccaucuacugccucaugggcuccggccagcuccucugggacaccgucaccggcgucaacauggcccucuga

SEQ ID NO: 124824 - RNA, 1401 nt, Artificial Sequence
  derived and/or modified CDS sequence (opt2) from neuraminidase__InfluenzaB__ACO05972
augcuccccuccaccauccagacccucacccucuuccucaccuccggcggcguccuccucucccucuacgucuccgccucccucuccuaccuccucuacuccgacauccuccucaaguucucccagaccgagaucaccgcccccaucaugccccucgacugcgccaacgccuccaacguccaggccgucaaccgcuccgccgccaagggcgucacccuccuccuccccgagcccgaguggaccuacccccgccucuccugccccggcuccaccuuccagaaggcccuccucaucuccccccaccgcuucggcgagaccaagggcaacuccgccccccucaucauccgcgagcccuucaucgccugcggccccaccgagugcaagcacuucgcccucacccacuacgccgcccagcccggcggcuacuacaacggcacccgcgaggaccgcaacaagcuccgccaccucaucuccgucaagcucggcaagauccccaccgucgagaacuccaucuuccacauggccgccugguccggcuccgccugccacgacggcaaggaguggaccuacaucggcgucgacggccccgacuccaacgcccuccucaagaucaaguacggcgaggccuacaccgacaccuaccacuccuacgccaagaacauccuccgcacccaggaguccgccugcaacugcaucggcggcgacugcuaccucaugaucaccgacggccccgccuccggcaucuccgagugccgcuuccucaagauccgcgagggccgcaucaucaaggagaucuuccccaccggccgcgucaagcacaccgaggagugcaccugcggcuucgccuccaacaagaccaucgagugcgccugccgcgacaacuccuacaccgccaagcgccccuucgucaagcucaacgucgagaccgacaccgccgagauccgccucaugugcaccgagaccuaccucgacaccccccgccccaacgacggcuccaucaccggccccugcgaguccgacggcgacaagggcuccggcggcaucaagggcggcuucguccaccagcgcauggccuccaagaucggccgcugguacucccgcaccauguccaagaccaagcgcaugggcaugggccucuacgucaaguacgacggcgaccccuggaccgacuccgaggcccucgcccucuccggcgucauggucuccauggaggagcccggcugguacuccuucggcuucgagaucaaggacaagaagugcgacguccccugcaucggcaucgagaugguccacgacggcggcaagaccaccuggcacuccgccgccaccgccaucuacugccucaugggcuccggccagcuccucugggacaccgucaccggcgucgacauggcccucuga

SEQ ID NO: 124825 - RNA, 1401 nt, Artificial Sequence; identical to SEQ ID NO: 124824
  derived and/or modified CDS sequence (opt2) from neuraminidase__InfluenzaB__ACO05983

SEQ ID NO: 124826 - RNA, 1401 nt, Artificial Sequence; identical to SEQ ID NO: 124824
  derived and/or modified CDS sequence (opt2) from neuraminidase__InfluenzaB__ACO05994

SEQ ID NO: 124827 - RNA, 1401 nt, Artificial Sequence
  derived and/or modified CDS sequence (opt2) from neuraminidase__InfluenzaB__ACO06005
augcuccccuccaccauccagacccucacccucuuccucaccuccggcggcguccuccucucccucuacgucuccgccucccucuccuaccuccucuacuccgacauccuccucaaguucucccccaccgagaucaccgcccccaccaugccccucgacugcgccaacgccuccaacguccaggccgucaaccgcuccgccaccaagggcgucacccuccuccuccccgagcccgaguggaccuacccccgccucuccugccccggcuccaccuuccagaaggcccuccucaucuccccccaccgcuucggcgagaccaagggcaacuccgccccccucaucauccgcgagcccuucaucgccugcggccccaacgagugcaagcacuucgcccucacccacuacgccgcccagcccggcggcuacuacaacggcacccgcggcgaccgcaacaagcuccgccaccucaucuccgucaagcucggcaagauccccaccgucgagaacuccaucuuccacauggccgccugguccggcuccgccugccacgacggcaaggaguggaccuacaucggcgucgacggccccgacaacaacgcccuccucaagaucaaguacggcgaggccuacaccgacaccuaccacuccuacgccaacaagauccuccgcacccaggaguccgccugcaacugcaucggcggcaacugcuaccucaugaucaccgacggcuccgccuccggcgucuccgagugccgcuuccucaagauccgcgagggccgcaucaucaaggagaucuuccccaccggccgcgucaagcacaccgaggagugcaccugcggcuucgccuccaacaagaccaucgagugcgccugccgcgacaacuccuacaccgccaagcgccccuucgucaagcucaacgucgagaccgacaccgccgagauccgccucaugugcaccgacaccuaccucgacaccccccgccccgacgacggcuccaucaccggccccugcgaguccaacggcgaccgcggcuccggcggcaucaagggcggcuucguccaccagcgcauggccuccaagaucggccgcugguacucccgcaccauguccaagaccgagcgcaugggcaugggccucuacgucaaguacgacggcgaccccugggccgacuccgacgcccucgccuucuccggcgucauggucuccaugaaggagcccggcugguacuccuucggcuucgagaucaaggacaagaagugcgacguccccugcaucggcaucgagaugguccacgacggcggcaaggagaccuggcacuccgccgccaccgccaucuacugccucaugggcuccggccagcuccucugggacaccgucaccggcgucgacauggcccucuga

SEQ ID NO: 124828 - RNA, 1401 nt, Artificial Sequence
  derived and/or modified CDS sequence (opt2) from neuraminidase__InfluenzaB__ACO06027
augcuccccuccaccauccagacccucacccucuuccucaccuccggcggcguccuccucucccucuacgucuccgccucccucuccuaccuccucuacuccgacauccuccucaaguucucccagaccgagaucaccgcccccaucaugccccucgacugcgccaacgccuccaacguccaggccgucaaccgcuccgccgccaagggcgucacccuccuccuccccgagcccgaguggaccuacccccgccucuccugccccggcuccaccuuccagaaggcccuccucaucuccccccaccgcuucggcgagaccaagggcaacuccgccccccucaucauccgcgagcccuucaucgccugcggccccaccgagugcaagcacuucgcccucacccacuacgccgcccagcccggcggcuacuacaacggcacccgcgaggaccgcaacaagcuccgccaccucaucuccgucaagcucggcaagauccccaccgucgagaacuccaucuuccacauggccgccugguccggcuccgccugccacgacggcaaggaguggaccuacaucggcgucgacggccccgacuccaacgcccuccucaagaucaaguacggcgaggccuacaccgacaccuaccacuccuacgccaagaacauccuccgcacccaggaguccgccugcaacugcaucggcggcgacugcuaccucaugaucaccgacggccccgccuccggcaucuccgagugccgcuuccucaagauccgcgagggccgcaucaucaaggagaucuuccccaccggccgcgucaagcacaccgaggagugcaccugcggcuucgccuccaacaagaccaucgagugcgccugccgcgacaacuccuacaccgccaagcgccccuucgucaagcucaacgucgagaccgacaccgccgagauccgccucaugugcaccgagaccuaccucgacaccccccgccccaacgacggcuccaucaccggccccugcgaguccgacggcgacaagggcuccggcggcaucaagggcggcuucguccaccagcgcauggccuccaagaucggccgcugguacucccgcaccauguccaagaccaagcgcaugggcaugggccucuacgucaaguacgacggcgaccccuggaccgacuccgaggcccucgcccucuccggcgucauggucuccauggaggagcccggcugguacuccuucggcuucgagaucaaggacaagaagugcgacguccccugcaucggcaucgagaugguccacgacggcggcaagaccaccuggcacuccgccgccaccgccaucuacugccucaugggcuccggccagcuccucugggacaccgucaccggcgucgacaugacccucuga

SEQ ID NO: 124829 - RNA, 1401 nt, Artificial Sequence
  derived and/or modified CDS sequence (opt2) from neuraminidase__InfluenzaB__ACO06066
augcuccccuccaccauccagacccucacccucuuccucaccuccggcggcguccuccucucccucuacgucuccgccucccucuccuaccuccucuacuccgacauccuccucaaguucucccagaccgagaucaccgcccccaucaugccccucgacugcgccaacgccuccaacguccaggccgucaaccgcuccgucgccaagggcgucacccuccuccuccccgagcccgaguggaccuacccccgccucuccugccccggcuccaccuuccagaaggcccuccucaucuccccccaccgcuucggcgagaccaagggcaacuccgccccccucaucauccgcgagcccuucaucgccugcggccccaccgagugcaagcacuucgcccucacccacuacgccgcccagcccggcggcuacuacaacggcacccgcgaggaccgcaacaagcuccgccaccucaucuccgucaagcucggcaagauccccaccgucgagaacuccaucuuccacauggccgccugguccggcuccgccugccacgacggcaaggaguggaccuacaucggcgucgacggccccgacuccaacgcccuccucaagaucaaguacggcgaggccuacaccgacaccuaccacuccuacgccaagaacauccuccgcacccaggaguccgccugcaacugcaucggcggcgacugcuaccucaugaucaccgacggccccgccuccggcaucuccgagugccgcuuccucaagauccgcgagggccgcaucaucaaggagaucuuccccaccggccgcgucaagcacaccgaggagugcaccugcggcuucgccuccaacaagaccaucgagugcgccugccgcgacaacuccuacaccgccaagcgccccuucgucaagcucaacgucgagaccgacaccgccgagauccgccucaugugcaccgagaccuaccucgacaccccccgccccaacgacggcuccaucaccggccccugcgaguccgacggcgacaagggcuccggcggcaucaagggcggcuucguccaccagcgcauggccuccaagaucggccgcugguacucccgcaccauguccaagaccaagcgcaugggcaugggccucuacgucaaguacgacggcgaccccuggaccgacuccgaggcccucgcccucuccggcgucauggucuccauggaggagcccggcugguacuccuucggcuucgagaucaaggacaagaagugcgacguccccugcaucggcaucgagaugguccacgacggcggcaagaccaccuggcacuccgccgccaccgccaucuacugccucaugggcuccggccagcuccucugggacaccgucaccggcgucgacaugacccucuga

SEQ ID NO: 124830 - RNA, 1401 nt, Artificial Sequence
  derived and/or modified CDS sequence (opt2) from neuraminidase__InfluenzaB__ACO94665
augcuccccuccaccauccagacccucacccucuuccucaccuccggcggcguccuccucucccucuacgucuccgccucccucuccuaccuccucuacuccgacauccuccucaaguucucccccaccgagaucaccgccuccaccaugccccucgacugcgccaacgccuccaacguccaggccgucaaccgcuccgccaccaagggcgucacccuccuccuccccgagcccgaguggaccuacccccgccucuccugccccggcuccaccuuccagaaggcccuccucaucuccccccaccgcuucggcgagaccaagggcaacuccgccccccucaucauccgcgagcccuucaucgccugcggccccaacgagugcaagcacuucgcccucacccacuacgccgcccagcccggcggcuacuacaacggcacccgcggcgaccgcaacaagcuccgccaccucaucuccgucaagcucggcaagauccccaccgucgagaacuccaucuuccacauggccgccugguccggcuccgccugccacgacggcaaggaguggaccuacaucggcgucgacggccccgacaacaacgcccuccucaagaucaaguacggcgaggccuacaccgacaccuaccacuccuacgccaacaagauccuccgcacccaggaguccgccugcaacugcaucggcggcaacugcuaccucaugaucaccgacggcuccgccuccggcgucuccgagugccgcuuccucaagauccgcgagggccgcaucaucaaggagaucuuccccaccggccgcgucaagcacaccgaggagugcaccugcggcuucgccuccaacaagaccaucgagugcgccugccgcgacaacuccuacaccgccaagcgccccuucgucaagcucaacgucgagaccgacaccgccgagauccgccucaugugcaccgacaccuaccucgacaccccccgccccgacgacggcuccaucaccggccccugcgaguccaacggcgacaagggcuccggcggcaucaagggcggcuucguccaccagcgcauggccuccaagaucggccgcugguacucccgcaccauguccaagaccgagcgcaugggcaugggccucuacgucaaguacgacggcgaccccugggccgacuccgacgcccucgccuucuccggcgucauggucuccaugaaggagcccggcugguacuccuucggcuucgagaucaaggacaagaagugcgacguccccugcaucggcaucgagaugguccacgacggcggcaaggagaccuggcacuccgccgccaccgccaucuacugccucaugggcuccggccagcuccucugggacaccgucaccggcgucgacauggcccucuga

SEQ ID NO: 124831 - RNA, 1401 nt, Artificial Sequence; identical to SEQ ID NO: 124671
  derived and/or modified CDS sequence (opt2) from neuraminidase__InfluenzaB__ACQ45607

SEQ ID NO: 124832 - RNA, 1401 nt, Artificial Sequence
  derived and/or modified CDS sequence (opt2) from neuraminidase__InfluenzaB__ACQ45610
augcuccccuccaccauccagacccucacccucuuccucaccuccggcggcguccuccucucccucuacgucuccgccucccucuccuaccuccucuacuccgacauccuccucaaguucucccccaccgagaucaccgcccccaccgucccccucgacugcgccaacgccuccaacguccaggccgucaaccgcuccgccaccaagggcgucacccuccuccuccccgagcccgaguggaccuacccccgccucuccugccccggcuccaccuuccagaaggcccuccucaucuccccccaccgcuucggcgagaccaagggcaacuccgccccccucaucauccgcgagcccuucaucgccugcggccccaacgagugcaagcacuucgcccucacccacuacgccgcccagcccggcggcuacuacaacggcacccgcggcgaccgcaacaagcuccgccaccucaucuccgucaagcucggcaagauccccaccgucgagaacuccaucuuccacauggccgccugguccggcuccgccugccacgacggcaaggaguggaccuacaucggcgucgacggccccgacaacaacgcccuccucaagaucaaguacggcgaggccuacaccgacaccuaccacuccuacgccaacaagauccuccgcacccaggaguccgccugcaacugcaucggcggcaacugcuaccucaugaucaccgacggcuccgccuccggcgucuccgagugccgcuuccucaagauccgcgagggccgcaucaucaaggagaucuuccccaccggccgcgucaaguacaccgaggagugcaccugcggcuucgccuccaacaagaccaucgagugcgccugccgcgacaacuccuacaccgccaagcgccccuucgucaagcucaacgucgagaccgacaccgccgagauccgccucaugugcaccgacaccuaccucgacaccccccgccccgacgacggcuccaucaccggccccugcgaguccaacggcgacaagggcuccggcggcaucaagggcggcuucguccaccagcgcauggccuccaagaucggccgcugguacucccgcaccauguccaagaccgagcgcaugggcaugggccucuacgucaaguacgacggcgaccccugggccgacuccgacgcccucgccuucuccggcgucauggucuccaugaaggagcccggcugguacuccuucggcuucgagaucaaggacaagaagugcgacguccccugcaucggcaucgagaugguccacgacggcggcaaggagaccuggcacuccgccgccaccgccaucuacugccucaugggcuccggccagcuccucugggacaccgucaccggcgucgacauggcccucuga

SEQ ID NO: 124833 - RNA, 1401 nt, Artificial Sequence; identical to SEQ ID NO: 124671
  derived and/or modified CDS sequence (opt2) from neuraminidase__InfluenzaB__ACQ45613

SEQ ID NO: 124834 - RNA, 1401 nt, Artificial Sequence; identical to SEQ ID NO: 124827
  derived and/or modified CDS sequence (opt2) from neuraminidase__InfluenzaB__ACR15626

SEQ ID NO: 124835 - RNA, 1401 nt, Artificial Sequence; identical to SEQ ID NO: 124827
  derived and/or modified CDS sequence (opt2) from neuraminidase__InfluenzaB__ACR15637

SEQ ID NO: 124836 - RNA, 1401 nt, Artificial Sequence; identical to SEQ ID NO: 124798
  derived and/or modified CDS sequence (opt2) from neuraminidase__InfluenzaB__ACR15648

SEQ ID NO: 124837 - RNA, 1401 nt, Artificial Sequence; identical to SEQ ID NO: 124827
  derived and/or modified CDS sequence (opt2) from neuraminidase__InfluenzaB__ACR15659

SEQ ID NO: 124838 - RNA, 1401 nt, Artificial Sequence; identical to SEQ ID NO: 124827
  derived and/or modified CDS sequence (opt2) from neuraminidase__InfluenzaB__ACR15670

SEQ ID NO: 124839 - RNA, 1401 nt, Artificial Sequence; identical to SEQ ID NO: 124652
  derived and/or modified CDS sequence (opt2) from neuraminidase__InfluenzaB__ACR15681

SEQ ID NO: 124840 - RNA, 1401 nt, Artificial Sequence
  derived and/or modified CDS sequence (opt2) from neuraminidase__InfluenzaB__ACR15692
augcuccccuccaccauccagacccucacccucuuccucaccuccggcggcguccuccucucccucuacgucuccgccucccucuccuaccuccucuacuccgacauccuccucaaguucucccccaccgagaucaccgcccccaccaugccccucggcugcgccaacgccuccaacguccaggccgucaaccgcuccgccaccaagggcgucacccuccuccuccccgagcccgaguggaccuacccccgccucuccugccccggcuccaccuuccagaaggcccuccucaucuccccccaccgcuucggcgagaccaagggcaacuccgccccccucaucauccgcgagcccuucaucgccugcggccccaaggagugcaagcacuucgcccucacccacuacgccgcccagcccggcggcuacuacaacggcacccgcggcgaccgcaacaagcuccgccaccucaucuccgucaagcucggcaagauccccaccgucgagaacuccaucuuccacauggccgccugguccggcuccgccugccacgacggcaaggaguggaccuacaucggcgucgacggccccgacaacaacgcccuccucaagaucaaguacggcgaggccuacaccgacaccuaccacuccuacgccaacaacauccuccgcacccaggaguccgccugcaacugcaucggcggcaacugcuaccucaugaucaccgacggcuccgccuccggcaucuccgagugccgcuuccucaagauccgcgagggccgcaucaucaaggagaucuuccccaccggccgcgucaagcacaccgaggagugcaccugcggcuucgccuccaacaagaccaucgagugcgccugccgcgacaacuccuacaccgccaagcgccccuucgucaagcucaacgucgagaccgacaccgccgagauccgccucaugugcaccgagaccuaccucgacaccccccgccccgacgacggcuccaucaccggccccugcgaguccaacggcgacaagggcuccggcggcaucaagggcggcuucguccaccagcgcauggccuccaagaucggccgcugguacucccgcaccauguccaagaccaagcgcaugggcaugggccucuacgucaaguacgacggcgaccccugggccgacaacgacgcccucgcccucuccggcgucauggucuccauggaggagcccggcugguacuccuucggcuucgagaucaaggacaagaagugcgacguccccugcaucggcaucgagaugguccacgacggcggcaaggagaccuggcacuccgccgccaccgccaucuacugccucaugggcuccggccagcuccucugggacaccgucaccggcgucgacauggcccucuga

SEQ ID NO: 124841 - RNA, 1401 nt, Artificial Sequence; identical to SEQ ID NO: 124828
  derived and/or modified CDS sequence (opt2) from neuraminidase__InfluenzaB__ACR15703

SEQ ID NO: 124842 - RNA, 1401 nt, Artificial Sequence; identical to SEQ ID NO: 124828
  derived and/or modified CDS sequence (opt2) from neuraminidase__InfluenzaB__ACR15714

SEQ ID NO: 124843 - RNA, 1401 nt, Artificial Sequence; identical to SEQ ID NO: 124743
  derived and/or modified CDS sequence (opt2) from neuraminidase__InfluenzaB__ACR15725

SEQ ID NO: 124844 - RNA, 1401 nt, Artificial Sequence; identical to SEQ ID NO: 124704
  derived and/or modified CDS sequence (opt2) from neuraminidase__InfluenzaB__ACR15736

SEQ ID NO: 124845 - RNA, 1401 nt, Artificial Sequence; identical to SEQ ID NO: 124827
  derived and/or modified CDS sequence (opt2) from neuraminidase__InfluenzaB__ACR39340

SEQ ID NO: 124846 - RNA, 1401 nt, Artificial Sequence
  derived and/or modified CDS sequence (opt2) from neuraminidase__InfluenzaB__ADL28399
augcuccccuccaccauccagacccucacccucuuccucaccuccggcggcguccuccucucccucuacgucuccgccucccucuccuaccuccucuacuccgacauccuccucaaguucucccccaccgagaucaccgcccccaccaugccccucgacugcgccaacgccuccaacguccaggccgucaaccgcuccgccaccaagggcgucacccuccuccuccccgagcccgaguggaccuacccccgccucuccugccccggcuccaccuuccagaaggcccuccucaucuccccccaccgcuucggcgagaccaagggcaacuccgccccccucaucauccgcgagcccuucaucgccugcggccccaacgagugcaagcacuucgcccucacccacuacgccgcccagcccggcggcuacuacaacggcacccgcggcgaccgcaacaagcuccgccaccucaucuccgucaagcucggcaagauccccaccgucgagaacuccaucuuccacauggccgccugguccggcuccgccugccacgacggcaaggaguggaccuacaucggcgucgacggccccgacaacaacgcccuccucaagaucaaguacggcgaggccuacaccgacaccuaccacuccuacgccaacaacauccuccgcacccaggaguccgccugcaacugcaucggcggcaacugcuaccucaugaucaccgacggcuccgccuccggcgucuccgagugccgcuuccucaagauccgcgagggccgcaucaucaaggagaucuuccccaccggccgcgucaagcacaccgaggagugcaccugcggcuucgccuccaacaagaucaucgagugcgccugccgcgacuccuccuacaccgccaagcgccccuucgucaagcucaacgucgagaccgacaccgccgagauccgccucaugugcaccgagaccuaccucgacaccccccgccccaacgacggcuccaucaccggccccugcgaguccaacggcgacaagggcuccggcggcaucaagggcggcuucguccaccagcgcauggccuccaagaucggccgcugguacucccgcaccauguccaagaccgagcgcaugggcaugggccucuacgucaaguacgacggcgaccccugggccgacuccgacgcccucgcccucuccggcgucauggucuccauggaggagcccggcugguacuccuucggcuucgagaucaaggacaagaagugcgacguccccugcaucggcaucgagaugguccacgacggcggcaaggagaccuggcacuccgccgccaccgccaucuacugccucaugggcuccggccagcuccucugggacaccgucaccggcgucgacauggcccucuga

SEQ ID NO: 124847 - RNA, 1401 nt, Artificial Sequence; identical to SEQ ID NO: 124824
  derived and/or modified CDS sequence (opt2) from neuraminidase__InfluenzaB__ADN32822

SEQ ID NO: 124848 - RNA, 1401 nt, Artificial Sequence
  derived and/or modified CDS sequence (opt2) from neuraminidase__InfluenzaB__ADR02756
augcuccccuccaccauccagacccucacccucuuccucaccuccggcggcguccuccucucccucuacgucuccgccucccucuccuaccuccucuacuccgacauccuccucaaguucucccagaccgagaucaccgcccccaucaucccccucgacugcgccaacgccuccaacguccaggccgucaaccgcuccgccgccaagggcgucacccuccuccuccccgagcccgaguggaccuacccccgccucuccugccccggcuccaccuuccagaaggcccuccucaucuccccccaccgcuucggcgagaccaagggcaacuccgccccccucaucauccgcgagcccuucaucgccugcggccccaccgagugcaagcacuucgcccucacccacuacgccgcccagcccggcggcuacuacaacggcacccgcgaggaccgcaacaagcuccgccaccucaucuccgucaagcucggcaagauccccaccgucgagaacuccaucuuccacauggccgccugguccggcuccgccugccacgacggcaaggaguggaccuacaucggcgucgacggccccgacuccaacgcccuccucaagaucaaguacggcgaggccuacaccgacaccuaccacuccuacgccaagaacauccuccgcacccaggaguccgccugcaacugcaucggcggcgacugcuaccucaugaucaccgacggccccgccuccggcaucuccgagugccgcuuccucaagauccgcgagggccgcaucaucaaggagaucuuccccaccggccgcgucaagcacaccgaggagugcaccugcggcuucgccuccaacaagaccaucgagugcgccugccgcgacaacuccuacaccgccaagcgccccuucgucaagcucaacgucgagaccgacaccgccgagauccgccucaugugcaccgagaccuaccucgacaccccccgccccaacgacggcuccaucaccggccccugcgaguccgacggcgacaagggcuccggcggcaucaagggcggcuucguccaccagcgcauggccuccaagaucggccgcugguacucccgcaccauguccaagaccaagcgcaugggcaugggccucuacgucaaguacgacggcgaccccuggaccgacuccgaggcccucgcccucuccggcgucauggucuccauggaggagcccggcugguacuccuucggcuucgagaucaaggacaagaagugcgacguccccugcaucggcaucgagaugguccacgacggcggcaagaccaccuggcacuccgccgccaccgccaucuacugccucaugggcuccggccagcuccucugggacaccgucaccggcgucgacauggcccucuga

SEQ ID NO: 124849 - RNA, 1401 nt, Artificial Sequence
  derived and/or modified CDS sequence (opt2) from neuraminidase__InfluenzaB__AEA51353
augcuccccuccaccauccagacccucacccucuuccucaccuccggcggcguccuccucucccucuacgucuccgccucccucuccuaccuccucuacuccgacauccuccucaaguucucccgcaccgagaucaccgcccccaucaugccccucgacugcgccaacgccuccaacguccaggccgucaaccgcuccgccaccaagggcgucacccuccuccuccccgagcccgaguggaccuacccccgccucuccugccccggcuccaccuuccagaaggcccuccucaucuccccccaccgcuucggcgagaccaagggcaacuccgccccccucaucauccgcgagcccuucaucgccugcggccccaaggagugcaagcacuucgcccucacccacuacgccgcccagcccggcggcuacuacaacggcacccgcgaggaccgcaacaagcuccgccaccucaucuccgucaagcucggcaagauccccaccgucgagaacuccaucuuccacauggccgccugguccggcuccgccugccacgacggccgcgaguggaccuacaucggcgucgacggccccgacuccaacgcccuccucaagaucaaguacggcggcgccuucaccgacaccuaccacuccuacgccaagaacauccucuccccccaggaguccgccugcaacugcaucggcggcgacugcuaccucaugaucaccgacggccccgccuccggcaucuccgagugccgcuuccucaagauccgcgagggccgcaucaucaaggagaucuuccccaccggccgcgucaagcacaccgaggagugcaccugcggcuucgccuccaacaagaccaucgagugcgccugccgcgacaacuccuacaccgccaagcgccccuucgucaagcucaacgucgagaccgacaccgccgagauccgccucaugugcaccgagaccuaccucgacaccccccgccccaacgacggcuccaucaccggccccugcgaguccaacggcgacaagggcuccggcggcaucaagggcggcuucguccaccagcgcauggccuccaagaucggccgcugguacucccgcaccauguccaagaccaagcgcaugggcaugggccucuacgucaaguacgacggcgaccccuggaccgacuccgaggcccucgcccucuccggcgucauggucuccauggaggagcccggcugguacuccuucggcuucgagaucaaggacaagaagugcgacguccccugcaucggcaucgagaugguccacgacggcggcaagaccaccuggcacuccgccgccaccgccaucuacugccucaugggcuccggccagcuccucugggacaccgucaccggcgucaacaugacccucuga

SEQ ID NO: 124850 - RNA, 1401 nt, Artificial Sequence
  derived and/or modified CDS sequence (opt2) from neuraminidase__InfluenzaB__AEA51355
augcuccccuccaccauccagacccucacccucuuccucaccuccggcggcguccuccucucccucuacgucuccgccucccucuccuaccuccucuacuccgacauccuccucaaguucucccccaccgagaucaccgcccccaccaugccccucgacugcgccaacaccuccaacguccaggccgucaaccgcuccgccaccaagggcgucacccuccuccuccccgagcccgaguggaccuacccccgccucuccugccccggcuccaccuuccagaaggcccuccucaucuccccccaccgcuucggcgagaccaagggcaacuccgccccccucaucauccgcgagcccuucaucgccugcggccccaacgagugcaagcacuucgcccucacccacuacgccgcccagcccggcggcuacuacaacggcacccgcggcgaccgcaacaagcuccgccaccucaucuccgucaagcucggcaagauccccaccgucgagaacuccaucuuccacauggccgccugguccggcuccgccugccacgacggcaaggaguggaccuacaucggcgucgacggccccgacaacaacgcccuccucaagaucaccuacggcgaggccuaccccggcaccuaccacuccuacgccaucaagaacccccgcacccaggaguccgcccccaacugcuucggcggccacuccuuccccaucaucacccacgccccccccuccggcgucugggagccccgcuuccucaagauccgcgagggccgcaucaucaacgagaucuuccccaccggccgcgucaagccccccgaggagugcaccugcggcuucgccuccaacaacaccaucgagugcgccugccgcgacaacaacugcaccgccaagcgccccuucgucaaguuccacgucgaguccgaccccgccgagauccgcgccaugugcaccgacaccuaccucgacuccccccgccccgacgacggcuccaucaccggccccugcgacuccaacggcgacaagggcuccggcggcaucaagggcggcuucguccaccagcgcauggaguccaagaucggccgcugguacucccgcaccauguccaagaccgagcgcaugggcaugggccucuacgucaaguacgacggcgaccccugggccgacuccgacgcccucgccaacuccggcgucauggucuccaugaacgagcccggcuccuccuccuucggcuucgagaucaaggacaagaagugcgacguccccugcaucggcaucgagaugguccacgacggcggcaaggagaccuggcacuccgccgccaccgccaucuacugccucaugggcuccggccagcuccucugggacaccgucaccggcgucgacauggcccucuga

SEQ ID NO: 124851 - RNA, 1401 nt, Artificial Sequence
  derived and/or modified CDS sequence (opt2) from neuraminidase__InfluenzaB__AEA51357
augcuccccuccaccauccagacccucacccucuuccucaccuccggcggcguccuccucucccucuacgucuccgccucccucuccuaccuccucuacuccgacauccuccucaaguucucccgcaccgagaucaccgcccccaucaugccccucgacugcgccaacgccuccaacguccaggccgucaaccgcuccgccaccaagggcgucacccuccuccuccccgagcccgaguggaccuacccccgccucuccugccccggcuccaccuuccagaaggcccuccucaucuccccccaccgcuucggcgagaccaagggcaacuccgccccccucaucauccgcgagcccuucaucgccugcggccccaaggagugcaagcacuucgcccucacccacuacgccgcccagcccggcggcuacuacaacggcacccgcgaggaccgcaacaagcuccgccaccucaucuccgucaagcucggcaagauccccaccgucgagaacuccaucuuccacauggccgccugguccggcuccgccugccacgacggccgcgaguggaccuacaucggcgucgacggccccgacuccaacgcccuccucaagaucaaguucggcgaggccuacaccgacaccuaccacuccuacgccaagaacauccucggcacccaggaguccgccugcaacugcaucggcggcgacugcaaccucaugaucaccgacggccccgccuccggcaucuccgagucccgcuuccucaagaucggcgagggccgcaucaucaaggagaucuuccccaccggccgcgucaagcacaccgaggagugcaccugcggcuucgccuccaacaagaccaucgagugcgccugccgcgacaacuccuacaccgccaagcgccccuucgucaagcucaacgucgagaccgacaccgccgagauccgccucaugugcaccgagaccuaccucgacaccccccgccccaacgacggcuccaucaccggccccugcgaguccaacggcgacaagggcuccggcggcaucaagggcggcuucguccaccagcgcauggccuccaagaucggccgcugguacucccgcaccauguccaagaccgagcgcaugggcaugggccucuacgucaaguacgacggcgaccccugggccgacuccgacgcccucgccuucuccggcgucauggucuccaugaaggagcccggcugguacuccuucggcuucgagaucaaggacaagaagugcgacguccccugcaucggcaucgagaugguccacgacggcggcaaggagaccuggcacuccgccgccaccgccaucuacugccucaugggcuccggccagcuccucugggacaccgucaccggcgucaacauggcccucuga

SEQ ID NO: 124852 - RNA, 1401 nt, Artificial Sequence
  derived and/or modified CDS sequence (opt2) from neuraminidase__InfluenzaB__AEA51359
augcuccccuccaccauccagacccucacccucuuccucaccuccggcggcguccuccucucccucuacgucuccgccucccucuccuaccuccucuacuccgacauccuccucaaguucucccgcaccgagaucaccgcccccaucaugccccucgacugcgccaacgccuccaacguccaggccgucaaccgcuccgccaccaagggcgucacccuccuccuccccgagcccgaguggaccuacccccgccucuccugccccggcuccaccuuccagaaggcccuccucaucuccccccaccgcuucggcgagaccaagggcaacuccgccccccucaucauccgcgagcccuucaucgccugcggccccaaggagugcaagcacuucgcccucacccacuacgccgcccagcccggcggcuacuacaacggcacccgcgaggaccgcaacaagcuccgccaccucaucuccgucaagcucggcaagauccccaccgucgagaacuccaucuuccacauggccgccugguccggcuccgccugccacgacggccgcgaguggaccuacaucggcgucgacggccccgacuccaacgcccuccucaagaucaaguacggcgaggccuacaccgacaccuaccacuccuacgccaagaacauccuccgcacccaggaguccgccugcaacugcaucggcggcgacugcuaccucaugaucaccgacggccccgccuccggcaucuccgagugccgcuuccucaagauccgcgagggccgcaucaucaaggagaucuuccccaccggccgcgucaagcacaccgaggagugcaccugcggcuucgccuccaacaagaccaucgagugcgccugccgcgacaacuccuacaccgccaagcgccccuucgucaagcucaacgucgagaccgacaccgccgagauccgccucaugugcaccgagaccuaccucgacaccccccgccccaacgacggcuccaucaccggccccugcgaguccgacggcgacaagggcuccggcggcaucaagggcggcuucguccaccagcgcauggccuccaagaucggccgcugguacucccgcaccauguccaagaccaagcgcaugggcaugggccucuacgucaaguacgacggcgaccccuggaccgacuccgaggcccucgcccucuccggcgucauggucuccauggaggagcccggcugguacuccuucggcuucgagaucaaggacaagaagugcgacguccccugcaucggcaucgagaugguccacgacggcggcaagaccaccuggcacuccgccgccaccgccaucuacugccucaugggcuccggccagcuccucugggacaccgucaccggcgucgacauggcccucuga

SEQ ID NO: 124853 - RNA, 1401 nt, Artificial Sequence
  derived and/or modified CDS sequence (opt2) from neuraminidase__InfluenzaB__AEA51365
augcuccccuccaccauccagacccucacccucuuccucaccuccggcggcguccuccucucccucuacgucuccgccucccucuccuaccuccucuacuccgacauccuccucaaguucucccgcaccgagaucaccgcccccaucaugccccucgacugcgccaacgccuccaacguccaggccgucaaccgcuccgccaccaagggcgucacccuccuccuccccgagcccgaguggaccuacccccgccucuccugccccggcuccaccuuccagaaggcccuccucaucuccccccaccgcuucggcgagaccaagggcaacuccgccccccucaucauccgcgagcccuucaucgccugcggccccaaggagugcaagcacuucgcccucacccacuacgccgcccagcccggcggcuacuacaacggcacccgcgaggaccgcaacaagcuccgccaccucaucuccgucaagcucggcaagauccccaccgucgagaacuccaucuuccacauggccgccugguccggcuccgccugccacgacggccgcgaguggaccuacaucggcgucgacggccccgacuccaacgcccuccucaagaucaaguacggcgaggccuacaccgacaccuaccacuccuacgccaagaacauccuccgcacccaggaguccgccugcaacugcaucggcggcgacugcuaccucaugaucaccgacggccccgccuccggcaucuccgagugccgcuuccucaagauccgcgagggccgcaucaucaaggagaucuuccccaccggccgcgucaagcacaccgaggagugcaccugcggcuucgccuccaacaagaccaucgagugcgccugccgcgacaacuccuacaccgccaagcgccccuucgucaagcucaacgucgagaccgacaccgccgagauccgccucaugugcaccgagaccuaccucgacaccccccgccccaacgacggcuccaucaccggccccugcgaguccaacggcgacaagggcuccggcggcaucaagggcggcuucguccaccagcgcauggccuccaagaucggccgcugguacucccgcaccauguccaagaccaagcgcaugggcaugggccucuacgucaaguacgacggcgaccccuggaccgacuccgaggcccucgcccucuccggcgucauggucuccauggaggagcccggcugguacuccuucggcuucgagaucaaggacaagaagugcgacguccccugcaucggcaucgagaugguccacgacggcggcaagaccaccuggcacuccgccgccaccgccaucuacugccucaugggcuccggccagcuccucugggacaccgucaccggcgucaacaugacccucuga

SEQ ID NO: 124854 - RNA, 1401 nt, Artificial Sequence; identical to SEQ ID NO: 124853
  derived and/or modified CDS sequence (opt2) from neuraminidase__InfluenzaB__AEA51367

SEQ ID NO: 124855 - RNA, 1401 nt, Artificial Sequence; identical to SEQ ID NO: 124853
  derived and/or modified CDS sequence (opt2) from neuraminidase__InfluenzaB__AEA51371

SEQ ID NO: 124856 - RNA, 1401 nt, Artificial Sequence
  derived and/or modified CDS sequence (opt2) from neuraminidase__InfluenzaB__AEA51373
augcuccccuccaccauccagacccucacccucuuccucaccuccggcggcguccuccucucccucuacgucuccgccucccucuccuaccuccucuacuccgacauccuccucaaguucucccccaccgagaucaccgcccccaccaugccccucgacugcgccaacgccuccaacguccaggccgucaaccgcuccgccaccaagggcgucacccuccuccuccccgagcccgaguggaccuacccccgccucuccugccccggcuccaccuuccagaaggcccuccucaucuccccccaccgcuucggcgagaccaagggcaacuccgccccccucaucauccgcgagcccuucaucgccugcggccccaacgagugcaagcacuucgcccucacccacuacgccgcccagcccggcggcuacuacaacggcacccgcggcgaccgcaacaagcuccgccaccucaucuccgucaagcucggcaagauccccaccgucgagaacuccaucuuccacauggccgccugguccggcuccgccugccacgacggcaaggaguggaccuacaucggcgucgacggccccgacaacaacgcccuccucaaggucaaguacggcgaggccuacaccgacaccuaccacuccuacgccaacaagauccuccgcacccaggaguccgccugcaacugcaucggcggcaacugcuaccucaugaucaccgacggcuccgccuccggcgucuccgagugccgcuuccucaagauccgcgagggccgcaucaucaaggagaucuuccccaccggccgcgucaagcacaccgaggagugcaccugcggcuucgccuccaacaagaccaucgagugcgccugccgcgacaacuccuacaccgccaagcgccccuucgucaagcucaacgucgagaccgacaccgccgagauccgccucaugugcaccgacaccuaccucgacaccccccgccccgacgacggcuccaucaccggccccugcgaguccaacggcgacaagggcuccggcggcaucaagggcggcuucguccaccagcgcauggccuccaagaucggccgcugguacucccgcaccauguccaagaccaagcgcaugggcaugggccucuacgucaaguacgacggcgaccccuggaccgacuccgaggcccucgcccucuccggcgucauggucuccauggaggagcccggcugguacuccuucggcuucgagaucaaggacaagaagugcgacguccccugcaucggcaucgagaugguccacgacggcggcaaggagaccuggcacuccgccgccaccgccaucuacugccucaugggcuccggccagcuccucugggacaccgucaccggcgucaacaugacccucuga

SEQ ID NO: 124857 - RNA, 1401 nt, Artificial Sequence
  derived and/or modified CDS sequence (opt2) from neuraminidase__InfluenzaB__AEA51377
augcuccccuccaccauccagacccucacccucuuccucaccuccggcggcguccuccucucccucuacgucuccgccucccucuccuaccuccucuacuccgacauccuccucaaguucucccccaccgagaucaccgcccccaccaugccccucgacugcgccaacgccuccaacguccaggccgucaaccgcuccgccaccaagggcgucacccuccuccuccccgagcccgaguggaccuacccccgccucuccugccccggcuccaccuuccagaaggcccuccucaucuccccccaccgcuucggcgagaccaagggcaacuccgccccccucaucauccgcgagcccuucaucgccugcggccccaacgagugcaagcacuucgcccucacccacuacgccgcccagcccggcggcuacuacaacggcacccgcggcgaccgcaacaagcuccgccaccucaucuccgucaagcucggcaagauccccaccgucgagaacuccaucuuccacauggccgccugguccggcuccgccugccacgacggcaaggaguggaccuacaucggcgucgacggccccgacaacaacgcccuccucaaggucaaguacggcgaggccuacaccgacaccuaccacuccuacgccaacaagauccuccgcacccaggaguccgccugcaacugcaucggcggcaacugcuaccucaugaucaccgacggcuccgccuccggcgucuccgagugccgcuuccucaagauccgcgagggccgcaucaucaaggagaucuuccccaccggccgcgucaagcacaccgaggagugcaccugcggcuucgccuccaacaagaccaucgagugcgccugccgcgacaacuccuacaccgccaagcgccccuucgucaagcucaacgucgagaccgacaccgccgagauccgccucaugugcaccgacaccuaccucgacaccccccgccccgacgacggcuccaucaccggccccugcgaguccaacggcgacaagggcuccggcggcaucaagggcggcuucguccaccagcgcauggaguccaagaucggccgcugguacucccgcaccauguccaagaccgagcgcaugggcaugggccucuacgucaaguacgacggcgaccccugggccgacuccgacgcccucgccuucuccggcgucauggucuccaugaaggagcccggcugguacuccuucggcuucgagaucaaggacaagaagugcgacguccccugcaucggcaucgagaugguccacgacggcggcaaggagaccuggcacuccgccgccaccgccaucuacugccucaugggcuccggccagcuccucugggacaccgucaccggcgucgacauggcccucuga

SEQ ID NO: 124858 - RNA, 1401 nt, Artificial Sequence; identical to SEQ ID NO: 124857
  derived and/or modified CDS sequence (opt2) from neuraminidase__InfluenzaB__AEA51379

SEQ ID NO: 124859 - RNA, 1401 nt, Artificial Sequence
  derived and/or modified CDS sequence (opt2) from neuraminidase__InfluenzaB__AEA51381
augcuccccuccaccauccagacccucacccucuuccucaccuccggcggcguccuccucucccucuacgucuccgccucccucuccuaccuccucuacuccgacauccuccucaaguucucccccaccgagaucaccgcccccaccaugccccucgacugcgccaacgccuccaacguccaggccgucaaccgcuccgccaccaagggcgucacccuccuccuccccgagcccgaguggaccuacccccgccucuccugccccggcuccaccuuccagaaggcccuccucaucuccccccaccgcuucggcgagaccaagggcaacuccgccccccucaucauccgcgagcccuucaucgccugcggccccaacgagugcaagcacuucgcccucacccacuacgccgcccagcccggcggcuacuacaacggcacccgcggcgaccgcaacaagcuccgccaccucaucuccgucaagcucggcaagauccccaccgucgagaacuccaucuuccacauggccgccugguccggcuccgccugccacgacggcaaggaguggaccuacaucggcgucgacggccccgacaacaacgcccuccucaaggucaaguacggcgaggccuacaccgacaccuaccacuccuacgccaacaagauccuccgcacccaggaguccgccugcaacugcaucggcggcaacugcuaccucaugaucaccgacggcuccgccuccggcgucuccgagugccgcuuccucaagauccgcgagggccgcaucaucaaggagaucuuccccaccggccgcgucaagcacaccgaggagugcaccugcggcuucgccuccaacaagaccaucgagugcgccugccgcgacaacuccuacaccgccaagcgccccuucgucaagcucaacgucgagaccgacaccgccgagauccgccucaugugcaccgacaccuaccucgacaccccccgccccaacgacggcuccaucaccggccccugcgaguccgacggcgacaagggcuccggcggcaucaagggcggcuucguccaccagcgcaugaaguccaagaucggccgcugguacucccgcaccauguccaagaccgagcgcaugggcaugggccucuacgucaaguacgacggcgaccccugggccgacuccgacgcccucgccuucuccggcgucauggucuccgucaaggagcccggcugguacuccuucggcuucgagaucaaggacaagaagugcgacguccccugcaucggcaucgagaugguccacgacggcggcaaggagaccuggcacuccgccgccaccgccaucuacugccucaugggcuccggccagcuccucugggacaccgucaccggcgucgacauggcccucuga

SEQ ID NO: 124860 - RNA, 1401 nt, Artificial Sequence; identical to SEQ ID NO: 124857
  derived and/or modified CDS sequence (opt2) from neuraminidase__InfluenzaB__AEA51383

SEQ ID NO: 124861 - RNA, 1401 nt, Artificial Sequence
  derived and/or modified CDS sequence (opt2) from neuraminidase__InfluenzaB__AEG20998
augcuccccuccaccauccagacccucacccucuuccucaccuccggcggcguccuccucucccucuacgucuccgccucccucuccuaccuccucuacuccgacauccuccucaaguucucccgcaccgagaucaccgcccccauccuccgccucgccugcgccaacgccuccaacguccaggccgucaaccgcuccgccaccaagggcgucacccuccuccuccccgagcccgaguggaccuacccccgccucuccugccccggcuccaccuuccagaaggcccuccucaucuccccccaccgcuucggcgagaccaagggcaacuccgccccccucaucauccgcgagcccuucaucgccugcggccccaaggagugcaagcacuucgcccucacccacuacgccgcccagcccggcggcuacuacaacggcacccgcgaggaccgcaacaagcuccgccaccucaucuccgucaagcucggcaagauccccaccgucgagaacuccaucuuccacauggccgccugguccggcuccgccugccacgacggccgcgaguggaccuacaucggcgucgacggccccgacuccaacgcccuccucaagaucaaguacggcggcgccuucaccgacaccuaccacuccuacgccaagaacauccucuccccccaggaguccgccugcaacugcaucggcggcgacugcuaccucaugaucaccgacggccccgccuccggcaucuccgagugccgcuuccucaagauccgcgagggccgcaucaucaaggagaucuuccccaccggccgcgucaagcacaccgaggagugcaccugcggcuucgccuccaacaagaccaucgagugcgccugccgcgacaacuccuacaccgccaagcgccccuucgucaagcucaacgucgagaccgacaccgccgagauccgccucaugugcaccgagaccuaccucgacaccccccgccccaacgacggcuccaucaccggccccugcgaguccaacggcgacaagggcuccggcggcaucaagggcggcuucguccaccagcgcauggccuccaagaucggccgcugguacucccgcaccauguccaagaccaagcgcaugggcaugggccucuacgucaaguacgacggcgaccccuggaccgacuccgaggcccucgcccucuccggcgucauggucuccauggaggagcccggcugguacuccuucggcuucgagaucaaggacaagaagugcgacguccccugcaucggcaucgagaugguccacgacggcggcaagaccaccuggcacuccgccgccaccgccaucuacugccucaugggcuccggccagcuccucugggacaccgucaccggcgucaacaugacccucuga

SEQ ID NO: 124862 - RNA, 1401 nt, Artificial Sequence
  derived and/or modified CDS sequence (opt2) from neuraminidase__InfluenzaB__AEG20999
augcuccccuccaccauccagacccucacccucuuccucaccuccggcggcguccuccucucccucuccgucuccgccucccucuccuaccuccucuacuccgacauccuccucaaguucucccgcaccgagaucaccgcccccaucaugccccucgacugcgccaacgccuccaacguccaggccgucaaccgcuccgccaccaagggcgucacccuccuccuccccgagcccgaguggaccuacccccgccucuccugccccggcuccaccuuccagaaggcccuccucaucuccccccaccgcuucggcgagaccaagggcaacuccgccccccucaucauccgcgagcccuucaucgccugcggccccaaggagugcaagcacuucgcccucacccacuacgccgcccagcccggcggcuacuacaacggcacccgcgaggaccgcaacaagcuccgccaccucaucuccgucaagcucggcaagauccccaccgucgagaacuccaucuuccacauggccgccugguccggcuccgccugccacgacggccgcgaguggaccuacaucggcgucgacggccccgacuccaacgcccuccucaagaucaaguacggcggcgccuucaccgacaccuaccacuccuacgccaagaacauccucuccccccaggaguccgccugcaacugcaucggcggcgacugcuaccucaugaucaccgacggccccgccuccggcaucuccgagugccgcuuccucaagauccgcgagggccgcaucaucaaggagaucuuccccaccggccgcgucaagcacaccgaggagugcaccugcggcuucgccuccaacaagaccaucgagugcgccugccgcgacaacuccuacaccgccaagcgccccuucgucaagcucaacgucgagaccgacaccgccgagauccgccucaugugcaccgagaccuaccucgacaccccccgccccaacgacggcuccaucaccggccccugcgaguccaacggcgacaagggcuccggcggcaucaagggcggcuucguccaccagcgcauggccuccaagaucggccgcugguacucccgcaccauguccaagaccaagcgcaugggcaugggccucuacgucaaguacgacggcgaccccuggaccgacuccgaggcccucgcccucuccggcgucauggucuccauggaggagcccggcugguacuccuucggcuucgagaucaaggacaagaagugcgacguccccugcaucggcaucgagaugguccacgacggcggcaagaccaccuggcacuccgccgccaccgccaucuacugccucaugggcuccggccagcuccucugggacaccgucaccggcgucaacaugacccucuga

SEQ ID NO: 124863 - RNA, 1401 nt, Artificial Sequence
  derived and/or modified CDS sequence (opt2) from neuraminidase__InfluenzaB__AEG21000
augcuccccuccaccauccagacccucacccucuuccucaccuccggcggcguccuccucucccucuacgucuccgccucccucuccuaccuccucuacuccgacauccuccucaaguucucccgcaccgagaucaccgccgccauccucauccucgacugcgccaacgccuccaacguccaggccgucaaccgcuccgccaccaagggcgucacccuccuccuccccgagcccgaguggaccuacccccgccucuccugccccggcuccaccuuccagaaggcccuccucaucuccccccaccgcuucggcgagaccaagggcaacuccgccccccucaucauccgcgagcccuucaucgccugcggccccaaggagugcaagcacuucgcccucacccacuacgccgcccagcccggcggcuacuacaacggcacccgcgaggaccgcaacaagcuccgccaccucaucuccgucaagcucggcaagauccccaccgucgagaacuccaucuuccacauggccgccugguccggcuccgccugccacgacggccgcgaguggaccuacaucggcgucgacggccccgacuccaacgcccuccucaagaucaaguacggcggcgccuucaccgacaccuaccacuccuacgccaagaacauccucuccccccaggaguccgccugcaacugcaucggcggcgacugcuaccucaugaucaccgacggccccgccuccggcaucuccgagugccgcuuccucaagauccgcgagggccgcaucaucaaggagaucuuccccaccggccgcgucaagcacaccgaggagugcaccugcggcuucgccuccaacaagaccaucgagugcgccugccgcgacaacuccuacaccgccaagcgccccuucgucaagcucaacgucgagaccgacaccgccgagauccgccucaugugcaccgagaccuaccucgacaccccccgccccaacgacggcuccaucaccggccccugcgaguccaacggcgacaagggcuccggcggcaucaagggcggcuucguccaccagcgcauggccuccaagaucggccgcugguacucccgcaccauguccaagaccaagcgcaugggcaugggccucuacgucaaguacgacggcgaccccuggaccgacuccgaggcccucgcccucuccggcgucauggucuccauggaggagcccggcugguacuccuucggcuucgagaucaaggacaagaagugcgacguccccugcaucggcaucgagaugguccacgacggcggcaagaccaccuggcacuccgccgccaccgccaucuacugccucaugggcuccggccagcuccucugggacaccgucaccggcgucaacaugacccucuga

SEQ ID NO: 124864 - RNA, 1401 nt, Artificial Sequence
  derived and/or modified CDS sequence (opt2) from neuraminidase__InfluenzaB__AEG21002
augcuccccuccaccauccagacccucacccucuuccucaccuccggcggcguccuccucucccucuacgucuccgccucccucuccuaccuccucuacuccgacauccuccucaaguucucccgcaccgagaucaccgcccccaucaugccccucgacugcgccaacgccuccaacguccaggccgucaaccgcuccgccaccaagggcgucacccuccuccuccccgagcccgaguggaccuacccccgccucuccugccccggcuccaccuuccagaaggcccuccucaucuccccccaccgcuucggcgagaccaagggcaacuccgccccccucaucauccgcgagcccuucaucgccugcggccccaaggagugcaagcacuucgcccucacccacuacgccgcccagcccggcggcuacuacaacggcacccgcgaggaccgcaacaagcuccgccaccucaucuccgucaagcucggcaagauccccaccgucgagaacuccaucuuccacauggccgccugguccggcuccgccugccacgacggccgcgaguggaccuacaucggcgucgacggccccgacuccaacgcccuccucaagaucaaguacggcgaggccuacaccgacaccuaccacuccuacgccaagaacauccuccgcacccaggaguccgccugcaacugcaucggcggcgacugcuaccucaugaucaccgacggccccgccuccggcaucuccgagugccgcuuccucaagauccgcgagggccgcaucaucaaggagaucuuccccaccggccgcguccgccacaccgaggagugcaccugcggcuucgccuccaacaagaccaucgagugcgccugccgcgacaacuccuacaccgccaagcgccccuucgucaagcucaacgucgagaccgacaccgccgagauccgccucaugugcaccgagaccuaccucgacaccccccgccccaacgacggcuccaucaccggccccugcgaguccaacggcgacaagggcuccggcggcaucaagggcggcuucguccaccagcgcauggccuccaagaucggccgcugguacucccgcaccauguccaagaccaagcgcaugggcaugggccucuacgucaaguacgacggcgaccccuggaccgacuccgaggcccucgcccucuccggcgucauggucuccauggaggagcccggcugguacuccuucggcuucgagaucaaggacaagaagugcgacguccccugcaucggcaucgagaugguccacgacggcggcaagaccaccuggcacuccgccgccaccgccaucuacugccucaugggcuccggccagcuccucugggacaccgucaccggcgucaacaugacccucuga

SEQ ID NO: 124865 - RNA, 1401 nt, Artificial Sequence
  derived and/or modified CDS sequence (opt2) from neuraminidase__InfluenzaB__AEG21003
augcuccccuccaccauccagacccucacccucuuccucaccuccggcggcguccuccucucccucuacgucuccgccucccucuccuaccuccucuacuccgacauccuccucaaguucucccgcaccgagaucaccgcccccaucaugccccucgacugcgccaacgccuccaacguccaggccgucaaccgcuccgccaccaagggcgucacccuccuccuccccgagcccgaguggaccuacccccgccucuccugccccggcuccaccuuccagaaggcccuccucaucuccccccaccgcuucggcgagaccaagggcaacuccgccccccucaucauccgcgagcccuucaucgccugcggccccaaggagugcaagcacuucgcccucacccacuacgccgcccagcccggcggcuacuacaacggcacccgcgaggaccgcaacaagcuccgccaccucaucuccgucaagcucggcaagauccccaccgucgagaacuccaucuuccacauggccgccugguccggcuccgccugccacgacggccgcgaguggaccuacaucggcgucgacggccccgacuccaacgcccuccucaagaucaaguacggcgaggccuacaccgacaccuaccacuccuacgccaagaacauccuccgcacccaggaguccgccugcaacugcaucggcggcgacugcuaccucaugaucaccgacggccccgccuccggcaucuccgagugccgcuuccucaagauccgcgagggccgcaucaucaaggagaucuuccccaccggccgcgucaagcacaccgaggagugcaccugcggcuucgccuccaacaagaccaucgagugcgccugccgcgacaacuccuacaccgccaagcgccccuucgucaagcucaacgucgagaccgacaccgccgagauccgccucaugugcaccgagaccuaccucgacaccccccgccccaacgacggcuccaucaccggccccugcgaguccgacggcgacaagggcuccggcggcaucaagggcggcuucguccaccagcgcauggccuccaagaucggccgcugguacucccgcaccauguccaagaccaagcgcaugggcaugggccucuacgucaaguacgacggcgaccccuggaccgacuccgaggcccucgcccucuccggcgucauggucuccauggaggagcccggcugguacuccuucggcuucgagaucaaggacaagaagugcgacguccccugcaucggcaucgagaugguccacgacggcggcaagaccaccuggcacuccgccgccaccgccaucuacugccucaugggcuccggccagcuccucugggacaccgucaccggcgucaacaugacccucuga

SEQ ID NO: 124866 - RNA, 1401 nt, Artificial Sequence
  derived and/or modified CDS sequence (opt2) from neuraminidase__InfluenzaB__AEG21004
augcuccccuccaccauccagacccucacccucuuccucaccuccggcggcguccuccucucccucuacgucuccgccucccucuccuaccuccucuacuccgacauccuccucaaguucucccccaccgagaucaccgcccccaccaugccccucgacugcgccaacgccuccaacguccaggccgucaaccgcuccgccaccaagggcgucacccuccuccuccccgagcccgaguggaccuacccccgccucuccugccccggcuccaccuuccagaaggcccuccucaucuccccccaccgcuucggcgagaccaagggcaacuccgccccccucaucauccgcgagcccuucaucgccugcggccccaacgagugcaagcacuucgcccucacccacuacgccgcccagcccggcggcuacuacaacggcacccgcggcgaccgcaacaagcuccgccaccucaucuccgucaagcucggcaagauccccaccgucgagaacuccaucuuccacauggccgccugguccggcuccgccugccacgacggcaaggaguggaccuacaucggcgucgacggccccgacaacaacgcccuccucaaggucaaguacggcgaggccuacaccgacaccuaccacuccuacgccaacaagauccuccgcacccaggaguccgccugcaacugcaucggcggcaacugcuaccucaugaucaccgacggcuccgccuccggcgucuccgagugccgcuuccucaagauccgcgagggccgcaucaucaaggagaucuuccccaccggccgcgucaagcacaccgaggagugcaccugcggcuucgccuccaacaagaccaucgagugcgccugccgcgacaacuccuacaccgccaagcgccccuucgucaagcucaacgucgagaccgacaccgccgagauccgccucaugugcaccgacaccuaccucgacaccccccgccccgacgacggcuccaucaccggccccugcgaguccaacggcgacaagggcggcggcggcaucaagggcggcuucguccaccagcgcauggaguccaagaucggccgcugguacucccgcaccauguccaagaccgagcgcaugggcaugggccucuacgucaaguacgacggcgaccccugggccgacuccgacgcccucgccuucuccggcgucauggucuccaugaaggagcccggcugguacuccuucggcuucgagaucaaggacaagaagugcgacguccccugcaucggcaucgagaugguccacgacggcggcaaggagaccuggcacuccgccgccaccgccaucuacugccucaugggcuccggccagcuccucugggacaccgucaccggcgucgacauggcccucuga

SEQ ID NO: 124867 - RNA, 1401 nt, Artificial Sequence
  derived and/or modified CDS sequence (opt2) from neuraminidase__InfluenzaB__AEG21005
augcuccccuccaccauccagacccucacccucuuccucaccuccggcggcguccuccucucccucuacgucuccgccucccucuccuaccuccucuacuccgacauccuccucaaguucucccccaccgagaucaccgcccccaccaugccccucgacugcgccaacgccuccaacguccaggccgucaaccgcuccgccaccaagggcgucacccuccuccuccccgagcccgaguggaccuacccccgccucuccugccccggcuccaccuuccagaaggcccuccucaucuccccccaccgcuucggcgagaccaagggcaacuccgccccccucaucauccgcgagcccuucaucgccugcggccccaacgagugcaagcacuucgcccucacccacuacgccgcccagcccggcggcuacuacaacggcacccgcggcgaccgcaacaagcuccgccaccucaucuccgucaagcucggcaagauccccaccgucgagaacuccaucuuccacauggccgccugguccggcuccgccugccacgacggcaaggaguggaccuacaucggcgucgacggccccgacaacaacgcccuccucaaggucaaguacggcgaggccuacaccgacaccuaccacuccuacgccaacaagauccuccgcacccaggaguccgccugcaacugcaucggcggcaacugcuaccucaugaucaccgacggcuccgccuccggcgucuccgagugccgcuuccucaagauccgcgagggccgcaucaucaaggagaucuuccccaccggccgcgucaagcacaccgaggagugcaccugcggcuucgccuccaacaagaccaucgagugcgccugccgcgacaacuccuacaccgccaagcgccccuucgucaagcucaacgucgagaccgacaccgccgagauccgccucaugugcaccgacaccuaccucgacaccccccgccccgacgacggcuccaucaccggccccugcgaguccaacggcgacaagggcggcggcggcaucaagggcggcuucguccaccagcgcauggaguccaagaucggccgcugguacucccgcaccauguccaagaccgagcgcaugggcaugggccucuacgucaaguacgacggcgaccccugggccgacuccgacgcccucgccuucuccggcgucauggucuccaugaaggagcccggcugguacuccuucggcuucgagaucaaggacaagaagugcgacguccccugcaucggcaucgagaugguccacgacggcggcaaggagaccuggcacuccgccgccaccgccaucuacugccucaugggcuccggccagcuccucugggacaccgucaccggcgucaacaugacccucuga

SEQ ID NO: 124868 - RNA, 1401 nt, Artificial Sequence; identical to SEQ ID NO: 124853
  derived and/or modified CDS sequence (opt2) from neuraminidase__InfluenzaB__AEG21006

SEQ ID NO: 124869 - RNA, 1401 nt, Artificial Sequence; identical to SEQ ID NO: 124857
  derived and/or modified CDS sequence (opt2) from neuraminidase__InfluenzaB__AEG21007

SEQ ID NO: 124870 - RNA, 1401 nt, Artificial Sequence
  derived and/or modified CDS sequence (opt2) from neuraminidase__InfluenzaB__AEG21008
augcuccccuccaccauccagacccucacccucuuccucaccuccggcggcguccuccucucccucuacgucuccgccucccucuccuaccuccucuacuccgacauccuccucaaguucucccccaccgagaucaccgcccccaccaugccccucgacugcgccaacgccuccaacguccaggccgucaaccgcuccgccaccaagggcgucacccuccuccuccccgagcccgaguggaccuacccccgccucuccugccccggcuccaccuuccagaaggcccuccucaucuccccccaccgcuucggcgagaccaagggcaacuccgccccccucaucauccgcgagcccuucaucgccugcggccccaacgagugcaagcacuucgcccucacccacuacgccgcccagcccggcggcuacuacaacggcacccgcggcgaccgcaacaagcuccgccaccucaucuccgucaagcucggcaagauccccaccgucgagaacuccaucuuccacauggccgccugguccggcuccgccugccacgacggcaaggaguggaccuacaucggcgucgacggccccgacaacaacgcccuccucaaggucaaguacggcgaggccuacaccgacaccuaccacuccuacgccaacaagauccuccgcacccaggaguccgccugcaacugcaucggcggcaacugcuaccucaugaucaccgacggcuccgccuccggcgucuccgagugccgcuuccucaagauccgcgagggccgcaucaucaaggagaucuuccccaccggccgcgucaagcacaccgaggagugcaccugcggcuucgccuccaacaagaccaucgagugcgccugccgcgacaacuccuacaccgccaagcgccccuucgucaagcucaacgucgagaccgacaccgccgagauccgccucaugugcaccgacaccuaccucgacaccccccgccccgacgacggcuccaucaccggccccugcgaguccaacggcgacaagggcuccggcggcaucaagggcggcuucguccaccagcgcauggccuccaagaucggccgcugguacucccgcaccauguccaagaccaagcgcaugggcaugggccucuacgucaaguacgacggcgaccccugggccgacuccgacgcccucgccuucuccggcgucauggucuccaugaaggagcccggcugguacuccuucggcuucgagaucaaggacaagaagugcgacguccccugcaucggcaucgagaugguccacgacggcggcaaggagaccuggcacuccgccgccaccgccaucuacugccucaugggcuccggccagcuccucugggacaccgucaccggcgucgacauggcccucuga

SEQ ID NO: 124871 - RNA, 1401 nt, Artificial Sequence; identical to SEQ ID NO: 124857
  derived and/or modified CDS sequence (opt2) from neuraminidase__InfluenzaB__AEG21009

SEQ ID NO: 124872 - RNA, 1401 nt, Artificial Sequence; identical to SEQ ID NO: 124857
  derived and/or modified CDS sequence (opt2) from neuraminidase__InfluenzaB__AEG21010

SEQ ID NO: 124873 - RNA, 1401 nt, Artificial Sequence; identical to SEQ ID NO: 124857
  derived and/or modified CDS sequence (opt2) from neuraminidase__InfluenzaB__AEG21011

SEQ ID NO: 124874 - RNA, 1401 nt, Artificial Sequence; identical to SEQ ID NO: 124857
  derived and/or modified CDS sequence (opt2) from neuraminidase__InfluenzaB__AEG21012

SEQ ID NO: 124875 - RNA, 1401 nt, Artificial Sequence
  derived and/or modified CDS sequence (opt2) from neuraminidase__InfluenzaB__AEG21013
augcuccccuccaccauccagacccucacccucuuccucaccuccggcggcguccuccucucccucuacgucuccgccucccucuccuaccuccucuacuccgacauccuccucaaguucucccccaccgagaucaccgcccccaccaugccccucgacugcgccaacgccuccaacguccaggccgucaaccgcuccgccaccaagggcgucacccuccuccuccccgagcccgaguggaccuacccccgccucuccugccccggcuccaccuuccagaaggcccuccucaucuccccccaccgcuucggcgagaccaagggcaacuccgccccccucaucauccgcgagcccuucaucgccugcggccccaacgagugcaagcacuucgcccucacccacuacgccgcccagcccggcggcuacuacaacggcacccgcggcgaccgcaacaagcuccgccaccucaucuccgucaagcucggcaagauccccaccgucgagaacuccaucuuccacauggccgccugguccggcuccgccugccacgacggcaaggaguggaccuacaucggcgucgacggccccgacaacaacgcccuccucaaggucaaguacggcgaggccuacaccgacaccuaccacuccuacgccaacaagauccuccgcacccaggaguccgccugcaacugcaucggcggcaacugcuaccucaugaucaccgacggcuccgccuccggcgucuccgagugccgcuuccucaagauccgcgagggccgcaucaucaaggagaucuuccccaccggccgcgucaagcacaccgaggagugcaccugcggcuucgccuccaacaagaccaucgagugcgccugccgcgacaacuccuacaccgccaagcgccccuucgucaagcucaacgucgagaccgacaccgccgagauccgccucaugugcaccgacaccuaccucgacaccccccgccccaacgacggcuccaucaccggccccugcgaguccgacggcgacaagggcuccggcggcaucaagggcggcuucguccaccagcgcaugaaguccaagaucggccgcugguacucccgcaccauguccaagaccgagcgcaugggcaugggccucuacgucaaguacgacggcgaccccugggccgacuccgacgcccucgccuucuccggcgucauggucuccaugaaggagcccggcugguacuccuucggcuucgagaucaaggacaagaagugcgacguccccugcaucggcaucgagaugguccacgacggcggcaaggagaccuggcacuccgccgccaccgccaucuacugccucaugggcuccggccagcuccucugggacaccgucaccggcgucgacauggcccucuga

SEQ ID NO: 124876 - RNA, 1401 nt, Artificial Sequence
  derived and/or modified CDS sequence (opt2) from neuraminidase__InfluenzaB__AEN68957
augcuccccuccaccauccagacccucacccucuuccucaccuccggcggcguccuccucucccucuacgucuccgccucccucuccuaccuccucuacuccgacauccuccucaaguucucccgcaccgagauccccgcccccaucaugccccucgacugcgccaacgccuccaacguccaggccgucaaccgcuccgccaccaagggcgucacccuccuccuccccgagcccgaguggaccuacccccgccucuccugccccggcuccaccuuccagaaggcccuccucaucuccccccaccgcuucggcgagaccaagggcaacuccgccccccucaucauccgcgagcccuucaucgccugcggccccaaggagugcaagcacuucgcccucacccacuacgccgcccagcccggcggcuacuacaacggcacccgcgaggaccgcaacaagaugcgccaccucaucuccgucaagcucggcaagauccccaccgucgagaacuccaucuuccacauggccgccugguccggcuccgccugccacgacggccgcgaguggaccuacaucggcgucgacggccccgacuccaacgcccuccucaagaucaaguacggcgaggccuacaccgacaccuaccacuccuacgccaagaacauccuccgcacccaggaguccgccugcaacugcaucggcggcgacugcuaccucaugaucaccgacggccccgccuccggcaucuccgagugccgcuuccucaagauccgcgagggccgcaucaucaaggagaucuuccccaccggccgcgucaaguacaccgaggagugcaccugcggcuucgccuccaacaagaccaucggcugcgccugccgcgacaacuccuacaccgccaagcgccccuucgucaagcucaacgucgagaccgacaccgccgagauccgccucaugugcaccgagaccuaccucgacaccccccgccccaacgacggcuccaucaccggccccugcgaguccaacggcgacaagggcuccggcggcaucaagggcggcuucguccaccagcgcauggccuccaagaucggccgcugguacucccgcaccauguccaagaccaagcgcaugggcaugggccucuacgucaaguacgacggcgaccccuggaccgacuccgaggcccucgcccucuccggcgucauggucuccauggaggagcccggcugguacuccuucggcuucgagaucaaggacaagaagugcgacguccccugcaucggcaucgagaugguccacgacggcggcaagaccaccuggcacuccgccgccaccgccaucuacugccucaugggcuccggccagcucaugugggacaccgucaccggcgucaacaugacccucuga

SEQ ID NO: 124877 - RNA, 1401 nt, Artificial Sequence
  derived and/or modified CDS sequence (opt2) from neuraminidase__InfluenzaB__AEO80071
augcuccccuccaccauccagacccucacccucuuccucaccuccggcggcguccuccucucccucuacgucuccgccucccucuccuaccuccucuacuccgacauccuccucaaguucucccccaccgagaucaccgcccccaccaugccccucgacugcgccaacgccuccaacguccacgccgucaaccgcuccgccaccaagggcgucacccuccuccuccccgagcccgaguggaccuacccccgccucuccugccccggcuccaccuuccagaaggcccuccucaucuccccccaccgcuucggcgagaccaagggcaacuccgccccccucaucauccgcgagcccuucaucgccugcggccccaacgagugcaagcacuucgcccucacccacuacgccgcccagcccggcggcuacuacaacggcacccgcggcgaccgcaacaagcuccgccaccucaucuccgucaagcucggcaagauccccaccgucgagaacuccaucuuccacauggccgccugguccggcuccgccugccacgacggcaaggaguggaccuacaucggcgucgacggccccgacaacaacgcccuccucaagaucaaguacggcgaggccuacaccgacaccuaccacuccuacgccaacaacauccuccgcacccaggaguccgccugcaacugcaucggcggcaacugcuaccucaugaucaccgacggcuccgccuccggcgucuccgagugccgcuuccucaagauccgcgagggccgcaucaucaaggagaucuuccccaccggccgcgucaagcacaccgaggagugcaccugcggcuucgccuccaacaagaccaucgagugcgccugccgcgacaacuccuacaccgccaagcgccccuucgucaagcucaacgucgagaccgacaccgccgagauccgccucaugugcaccgacaccuaccucgacaccccccgccccgacgacggcuccaucaccggccccugcgaguccaacggcgacaagggcuccggcggcaucaagggcggcuucguccaccagcgcauggccuccaagaucggccgcugguacucccgcaccauguccaagaccgagcgcaugggcaugggccucuacgucaaguacgacggcgaccccugggccgacuccgacgcccucgccuucuccggcgucauggucuccaugaaggagcccggcugguacuccuucggcuucgagaucaaggacaagaagugcgacguccccugcaucggcaucgagaugguccacgacggcggcaaggagaccuggcacuccgccgccaccgccaucuacugccucaugggcuccggccagcuccucugggacaccgucaccggcgucgacauggcccucuga

SEQ ID NO: 124878 - RNA, 1401 nt, Artificial Sequence
  derived and/or modified CDS sequence (opt2) from neuraminidase__InfluenzaB__AEO80082
augcuccccuccaccauccagacccucacccucuuccucaccuccggcggcguccuccucucccucuacgucuccgccucccucuccuaccuccucuacuccgacauccuccucaaguucucccagaccggcaucaccgcccccaucaugccccucgacugcgccaacgccuccaacguccaggccgucaaccgcuccgccaccaagggcgucacccuccuccuccccgagcccgaguggaccuacccccgccucuccugccccggcuccaccuuccagaaggcccuccucaucuccccccaccgcuucggcgagaccaagggcaacuccgccccccucaucauccgcgagcccuucaucgccugcggccccaccgagugcaaguacuucgcccucacccacuacgccgcccagcccggcggcuacuacaacggcacccgcgaggaccgcaacaagcuccgccaccucaucuccgucaagcucggcaagauccccaccgucgagaacuccaucuuccacauggccgccugguccggcuccgccugccacgacggcaaggaguggaccuacaucggcgucgacggccccgacuccaacgcccuccucaagaucaaguacggcgaggccuacaccgacaccuaccacuccuacgccaagaacauccuccgcacccaggaguccgccugcaacugcaucggcggcgacugcuaccucaugaucaccgacggccccgccuccggcaucuccgagugccgcuuccucaagauccgcgagggccgcaucaucaaggagaucuuccccaccggccgcgucaagcacaccgaggagugcaccugcggcuucgccuccaacaagaccaucgagugcgccugccgcgacaacuccuacaccgccaagcgccccuucgucaagcucaacgucgagaccgacaccgccgagauccgccucaugugcaccgagaccuaccucgacaccccccgccccaacgacggcuccaucaccggccccugcgaguccgacggcgacaagggcuccggcggcaucaagggcggcuucguccaccagcgcauggccuccaagaucggccgcugguacucccgcaccauguccaagaccaagcgcaugggcaugggccucuacgucaaguacgacggcgaccccuggaccgacuccgaggcccucgcccucuccggcgucauggucuccauggaggagcccggcugguacuccuucggcuucgagaucaaggacaagaagugcgacguccccugcaucggcaucgagaugguccacgacggcggcaagaccaccuggcacuccgccgccaccgccaucuacugccucaugggcuccggccagcuccucugggacaccgucaccggcgucgacauggcccucuga

SEQ ID NO: 124879 - RNA, 1401 nt, Artificial Sequence; identical to SEQ ID NO: 124718
  derived and/or modified CDS sequence (opt2) from neuraminidase__InfluenzaB__AEO80090

SEQ ID NO: 124880 - RNA, 1401 nt, Artificial Sequence; identical to SEQ ID NO: 124663
  derived and/or modified CDS sequence (opt2) from neuraminidase__InfluenzaB__AEO80101

SEQ ID NO: 124881 - RNA, 1401 nt, Artificial Sequence; identical to SEQ ID NO: 124759
  derived and/or modified CDS sequence (opt2) from neuraminidase__InfluenzaB__AEO80149

SEQ ID NO: 124882 - RNA, 1401 nt, Artificial Sequence; identical to SEQ ID NO: 124671
  derived and/or modified CDS sequence (opt2) from neuraminidase__InfluenzaB__AEO80158

SEQ ID NO: 124883 - RNA, 1401 nt, Artificial Sequence; identical to SEQ ID NO: 124671
  derived and/or modified CDS sequence (opt2) from neuraminidase__InfluenzaB__AEO80167

SEQ ID NO: 124884 - RNA, 1401 nt, Artificial Sequence; identical to SEQ ID NO: 124759
  derived and/or modified CDS sequence (opt2) from neuraminidase__InfluenzaB__AEO80176

SEQ ID NO: 124885 - RNA, 1401 nt, Artificial Sequence
  derived and/or modified CDS sequence (opt2) from neuraminidase__InfluenzaB__AEO80187
augcuccccuccaccauccagacccucacccucuuccucaccuccggcggcguccuccucucccucuacgucuccgccucccucuccuaccuccucuacuccgacauccuccucaaguucucccccaccgagaucaccgcccccaccaugccccucggcugcgccaacgccuccaacguccaggccgucaaccgcuccgccaccaagggcgucacccuccuccuccccgagcccgaguggaccuacccccgccucuccugccccggcuccaccuuccagaaggcccuccucaucuccccccaccgcuucggcgagaccaagggcaacuccgccccccucaucauccgcgagcccuucaucgccugcggccccaacgagugcaagcacuucgcccucacccacuacgccgcccagcccggcggcuacuacaacggcacccgcggcgaccgcaacaagcuccgccaccucaucuccgucaagcucggcaagauccccaccgucgagaacuccaucuuccacauggccgccugguccggcuccgccugccacgacggcaaggaguggaccuacaucggcgucgacggccccgacaacaacgcccuccucaagaucaaguacggcgaggccuacaccgacaccuaccacuccuacgccaacaagauccuccgcacccaggaguccgccugcaacugcaucggcggcaacugcuaccucaugaucaccgacggcuccgccuccggcgucuccgagugccgcuuccucaagauccgcgagggccgcaucaucaaggagaucuuccccaccggccgcgucaagcacaccgaggagugcaccugcggcuucgccuccaacaagaccaucgagugcgccugccgcgacaacuccuacaccgccaagcgccccuucgucaagcucaacgucgagaccgacaccgccgagauccgccucaugugcaccgacaccuaccucgacaccccccgccccgacgacggcuccaucaccggccccugcgaguccaacggcgaccgcggcuccggcggcaucaagggcggcuucguccaccagcgcauggccuccaagaucggccgcugguacucccgcaccauguccaagaccgagcgcaugggcaugggccucuacgucaaguacgacggcgaccccugggccgacuccgacgcccucgccuucuccggcgucauggucuccaugaaggagcccggcugguacuccuucggcuucgagaucaaggacaagaagugcgacguccccugcaucggcaucgagaugguccacgacggcggcaaggagaccuggcacuccgccgccaccgccaucuacugccucaugggcuccggccagcuccucugggacaccgucaccggcgucgacauggcccucuga

SEQ ID NO: 124886 - RNA, 1401 nt, Artificial Sequence
  derived and/or modified CDS sequence (opt2) from neuraminidase__InfluenzaB__AEO80198
augcuccccuccaccauccagacccucacccucuuccucaccuccggcggcguccuccucucccucuacgucuccgccucccucuccuaccuccucuacuccgacauccuccucaaguucucccccaccgagaucaccgcccccaccaugccccucgacugcgccaacgccuccaacguccaggccgucaaccgcuccgccaccaagggcgucacccuccuccuccccgagcccgaguggaccuacccccgccucuccugccccggcuccaccuuccagaaggcccuccucaucuccccccaccgcuucggcgagaccaagggcaacuccgccccccucaucauccgcgagcccuucaucgccugcggccccaacgagugcaagcacuucgcccucacccacuacgccgcccagcccggcggcuacuacaacggcacccgcggcgaccgcaacaagcuccgccaccucaucuccgucaagcucggcaagauccccaccgucgagaacuccaucuuccacauggccgccugguccggcuccgccugccacgacggcaaggaguggaccuacaucggcgucgacggccccgacaacaacgcccuccucaagaucaaguacggcgaggccuacaccgacaccuaccacuccuacgccaacaagauccuccgcacccaggaguccgccugcaacugcaucggcggcaacugcuaccucaugaucaccgacggcuccgccuccggcgucuccgagugccgcuuccucaagauccgcgagggccgcaucaucaaggagaucuuccccaccggccgcgucaagcacaccgaggagugcaccugcggcuucgccuccaacaagaccaucgagugcgccugccgcgacaacuccuacaccgccaagcgccccuucgucaagcucaacgucgagaccgacaccgccgagauccgccucaugugcaccgacaccuaccucgacaccccccgccccgacgacggcuccaucaccggccccugcgaguccaacggcgaccgcggcuccggcggcaucaagggcggcuucguccaccagcgcauggccuccaagaucggccgcugguacucccgcaccauguccaagaccgagcgcaugggcaugggccucuacgucaaguacgacggcgaccccugggccgacuccgacgcccucgccuuccgcggcgucauggucuccaugaaggagcccggcugguacuccuucggcuucgagaucaaggacaagaagugcgacguccccugcaucggcaucgagaugguccacgacggcggcaaggagaccuggcacuccgccgccaccgccaucuacugccucaugggcuccggccagcuccucugggacaccgucaccggcgucgacauggcccucuga

SEQ ID NO: 124887 - RNA, 1401 nt, Artificial Sequence; identical to SEQ ID NO: 124827
  derived and/or modified CDS sequence (opt2) from neuraminidase__InfluenzaB__AEO80209

SEQ ID NO: 124888 - RNA, 1401 nt, Artificial Sequence
  derived and/or modified CDS sequence (opt2) from neuraminidase__InfluenzaB__AEO80220
augcuccccuccaccauccagacccucacccucuuccucaccuccggcggcguccuccucucccucuacgucuccgccucccucuccuaccuccucuacuccgacauccuccucaaguucucccccaccgagaucaccgcccccaccaugccccucgacugcgccaacgccuccaacguccaggccgucaaccgcuccgccaccaagggccucacccuccuccuccccgagcccgaguggaccuacccccgccucuccugccccggcuccaccuuccagaaggcccuccucaucuccccccaccgcuucggcgagaccaagggcaacuccgccccccucaucauccgcgagcccuucaucgccugcggccccaacgagugcaagcacuucgcccucacccacuacgccgcccagcccggcggcuacuacaacggcacccgcggcgaccgcaacaagcuccgccaccucaucuccgucaagcucggcaagauccccaccgucgagaccuccaucuuccacauggccgccugguccggcuccgccugccacgacggcaaggaguggaccuacaucggcgucgacggccccgacaacaacgcccuccucaagaucaaguacggcgaggccuacaccgacaccuaccacuccuacgccaacaagauccuccgcacccaggaguccgccugcaacugcaucggcggcaacugcuaccucaugaucaccgacggcuccgccuccggcgucuccgagugccgcuuccucaagauccgcgagggccgcaucaucaaggagaucuuccccaccggccgcgucaagcacaccgaggagugcaccugcggcuucgccuccaacaagaccaucgagugcgccugccgcgacaacuccuacaccgccaagcgccccuucgucaagcucaacgucgagaccgacaccgccgagauccgccucaugugcaccgacaccuaccucgacaccccccgccccgacgacggcuccaucaccggccccugcgaguccaacggcgaccgcggcuccggcggcaucaagggcggcuucguccaccagcgcauggccuccaagaucggccgcugguacucccgcaccauguccaagaccgagcgcaugggcaugggccucuacgucaaguacgacggcgaccccugggccgacuccgacgcccucgccuucuccggcgucauggucuccaugaaggagcccggcugguacuccuucggcuucgagaucaaggacaagaagugcgacguccccugcaucggcaucgagaugguccacgacggcggcaaggagaccuggcacuccgccgccaccgccaucuacugccucaugggcuccggccagcuccucugggacaccgucaccggcgucgacauggcccucuga

SEQ ID NO: 124889 - RNA, 1401 nt, Artificial Sequence; identical to SEQ ID NO: 124824
  derived and/or modified CDS sequence (opt2) from neuraminidase__InfluenzaB__AEO80231

SEQ ID NO: 124890 - RNA, 1401 nt, Artificial Sequence; identical to SEQ ID NO: 124827
  derived and/or modified CDS sequence (opt2) from neuraminidase__InfluenzaB__AEO80242

SEQ ID NO: 124891 - RNA, 1401 nt, Artificial Sequence; identical to SEQ ID NO: 124671
  derived and/or modified CDS sequence (opt2) from neuraminidase__InfluenzaB__AEP20182

SEQ ID NO: 124892 - RNA, 1401 nt, Artificial Sequence
  derived and/or modified CDS sequence (opt2) from neuraminidase__InfluenzaB__AEP20193
augcuccccuccaccauccagacccucacccucuuccucaccuccggcggcguccuccucucccucuacgucuccgccucccucuccuaccuccucuacuccgacauccuccucaaguucucccccaccgagaucaccgcccccaccaugccccucgacugcgccaacgccuccaacguccacgccgucaaccgcuccgccaccaagggcgucacccuccuccuccccgagcccgaguggaccuacccccgccucuccugccccggcuccaccuuccagaaggcccuccucaucuccccccaccgcuucggcgagaccaagggcaacuccgccccccucaucauccgcgagcccuucaucgccugcggccccaacgagugcaagcacuucgcccucacccacuacgccgcccagcccggcggcuacuacaacggcacccgcggcgaccgcaacaagcuccgccaccucaucuccgucaagcucggcaagauccccaccgucgagaacuccaucuuccacauggccgccugguccggcuccgccugccacgacggcaaggaguggaccuacaucggcgucgacggccccgacaacaacgcccuccucaagaucaaguacggcgaggccuacaccgacaccuaccacuccuacgccaacaacauccuccgcacccaggaguccgccugcaacugcaucggcggcaacugcuaccucaugaucaccgacggcuccgccuccggcgucuccgagugccgcuuccucaagauccgcgagggccgcaucaucaaggagaucuuccccaccggccgcgucaagcacaccgaggagugcaccugcggcuucgccuccaacaagaccaucgagugcgccugccgcgacaacuccuacaccgccaagcgccccuucgucaagcucaacgucgagaccgacaccgccgagauccgccucaugugcaccgacaccuaccucgacaccccccgccccgacgacggcuccaucaccggccccugcgaguccaacggcgacaagggcuccggcggcaucaagggcggcuucguccaccagcgcauggccuccaagaucggccgcugguacucccgcaccauguccaagaccgagcgcaugggcaugggccucuacgucaaguacgacggcgaccccugggccgacuccgacgcccucgccuucuccggcgucauggucuccgucaaggagcccggcugguacuccuucggcuucgagaucaaggacaagaagugcgacguccccugcaucggcaucgagaugguccacgacggcggcaaggagaccuggcacuccgccgccaccgccaucuacugccucaugggcuccggccagcuccucugggacaccgucaccggcgucgacauggcccucuga

SEQ ID NO: 124893 - RNA, 1401 nt, Artificial Sequence
  derived and/or modified CDS sequence (opt2) from neuraminidase__InfluenzaB__AEP20204
augcuccccuccaccauccagacccucacccucuuccucaccuccggcggcguccuccucucccucuacgucuccgccucccucuccuaccuccucuacuccgacauccuccucaaguucucccccaccgagaucaccgcccccaccaugccccucgacugcgccaacgccuccaacguccaggccgucaaccgcuccgccaccaagggcgucacccuccuccuccccgagcccgaguggaccuacccccgccucuccugccccggcuccaccuuccagaaggcccuccucaucuccccccaccgcuucggcgagaccaagggcaacuccgccccccucaucauccgcgagcccuucaucgccugcggccccaacgagugcaagcacuucgcccucacccacuacgccgcccagcccggcggcuacuacaacggcacccgcggcgaccgcaacaagcuccgccaccucaucuccgucaagcucggcaagauccccaccgucgagaacuccaucuuccacauggccgccugguccggcuccgccugccacgacggcaaggaguggaccuacaucggcgucgacggccccgacaacaacgcccuccucaagaucaaguacggcgaggccuacaccgacaccuaccacuccuacgccaacaagauccuccgcacccaggaguccgccugcaacugcaucggcggcaacugcuaccucaugaucaccgacggcuccgccuccggcgucuccgagugccgcuuccucaagauccgcgagggccgcaucaucaaggagaucuuccccaccggccgcgucaagcacaccgaggagugcaccugcggcuucgccuccaacaagaccaucgagugcgccugccgcgacaacuccuacaccgccaagcgccccuucgucaagcucaacgucgagaccgacaccgccgagauccgccucaugugcaccgacaccuaccucgacaccccccgccccgacgacggcuccaucaccggccccugcgaguccaacggcgacaagggcuccggcggcaucaagggcggcuucguccaccagcgcauggccuccaagaucggccgcugguacucccgcaccauguccaagaccgagcgcaugggcaugggccucuacgucaaguacgacggcgaccccugggccgacuccgacgcccucgccuucuccggcgucauggucuccaucaaggagcccggcugguacuccuucggcuucgagaucaaggacaagaagugcgacguccccugcaucggcaucgagaugguccacgacggcggcaaggagaccuggcacuccgccgccaccgccaucuacugccucaugggcuccggccagcuccucugggacaccgucaccggcgucgacauggcccucuga

SEQ ID NO: 124894 - RNA, 1401 nt, Artificial Sequence; identical to SEQ ID NO: 124723
  derived and/or modified CDS sequence (opt2) from neuraminidase__InfluenzaB__AEP20215

SEQ ID NO: 124895 - RNA, 1401 nt, Artificial Sequence
  derived and/or modified CDS sequence (opt2) from neuraminidase__InfluenzaB__AEP20237
augcuccccuccaccauccagacccucacccucuuccucaccuccggcggcguccuccucucccucuacgucuccgccucccucuccuaccuccucuacuccgacauccuccucaaguucucccccaccgagaucaccgcccccaccaugccccucgacugcgccaacgccuccaacguccaggccgucaaccgcuccgccaccaagggcgucacccuccuccuccccgagcccgaguggaccuacccccgccucuccugccccggcuccaccuuccagaaggcccuccucaucuccccccaccgcuucggcgagaccaagggcaacuccgccccccucaucauccgcgagcccuucaucgccugcggccccaaggagugcaagcacuucgcccucacccacuacgccgcccagcccggcggcuacuacaacggcacccgcggcgaccgcaacaagcuccgccaccucaucuccgucaagcucggcaagauccccaccgucgagaacuccaucuuccacauggccgccugguccggcuccgccugccacgacggcaaggaguggaccuacaucggcgucgacggccccgacuccaacgcccuccucaagaucaaguacggcgaggccuacaccgacaccuaccacuccuacgccaacaacauccuccgcacccaggaguccgccugcaacugcaucggcggcaacugcuaccucaugaucaccgacggcuccgccuccggcaucuccgagugccgcuuccucaagauccgcgagggccgcaucaucaaggagaucuuccccaccggccgcgucaagcacaccgaggagugcaccugcggcuucgccuccaacaagaccaucgagugcgccugccgcgacaacuccuacaccgccaagcgccccuucgucaagcucaacgucgagaccgacgccgccgagauccgccucaugugcaccgagaccuaccucgacaccccccgccccgacgacggcuccaucaccggccccugcgaguccaacggcgacaagggcuccggcggcaucaagggcggcuucguccaccagcgcauggccuccaagaucggccgcugguacucccgcaccauguccaagaccaagcgcaugggcaugggccucuacgucaaguacgacggcgaccccuggaccgacuccgacgcccucgcccucuccggcgucauggucuccauggaggagcccggcugguacuccuucggcuucgagaucaaggacaagaagugcgacguccccugcaucggcaucgagaugguccacgacggcggcaaggagaccuggcacuccgccgccaccgccaucuacugccucaugggcuccggccagcuccucugggacaccgucaccggcgucgacauggcccucuga

SEQ ID NO: 124896 - RNA, 1401 nt, Artificial Sequence; identical to SEQ ID NO: 124723
  derived and/or modified CDS sequence (opt2) from neuraminidase__InfluenzaB__AEP20248

SEQ ID NO: 124897 - RNA, 1401 nt, Artificial Sequence
  derived and/or modified CDS sequence (opt2) from neuraminidase__InfluenzaB__AEP20259
augcuccccuccaccauccagacccucacccucuuccucaccuccggcggcguccuccucucccucuacgucuccgccucccucuccuaccuccucuacuccgacauccuccucaaguucucccccaccgagaucaccgcccccaccaugccccucgacugcgccaacgccuccaacguccaggccgucaaccgcuccgccaccaagggcgucacccuccuccuccccgagcccgaguggaccuacccccgccucuccugccccggcuccaccuuccagaaggcccuccucaucuccccccaccgcuucggcgagaccaagggcaacuccgccccccucaucauccgcgagcccuucaucgccugcggccccaacgagugcaagcacuucgcccucacccacuacgccgcccagcccggcggcuacuacaacggcacccgcggcgaccgcaacaagcuccgccaccucaucuccgucaagcucggcaagauccccaccgucgagaacuccaucuuccacauggccgccugguccggcuccgccugccacgacggcaaggaguggaccuacaucggcgucgacggccccgacaacaacgcccuccucaagaucaaguacggcgaggccuacaccgacaccuaccacuccuacgccaacaacauccuccgcacccaggaguccgccugcaacugcaucggcggcaacugcuaccucaugaucaccgacggcuccgccuccggcgucuccgagugccgcuuccucaagauccgcgagggccgcaucaucaaggagaucuuccccaccggccgcgucaagcacaccgaggagugcaccugcggcuucgccuccaacaagaucaucgagugcgccugccgcgacaacuccuacaccgccaagcgccccuucgucaagcucaacgucgagaccgacaccgccgagauccgccucaugugcaccgagaccuaccucgacaccccccgccccgacgacggcuccaucaccggccccugcgaguccaacggcgacaagggcuccggcggcaucaagggcggcuucguccaccagcgcauggccuccaagaucggccgcugguacucccgcaccauguccaagaccgagcgcaugggcaugggccucuacgucaaguacgacggcgaccccugggccgacuccgacgcccucgcccucuccggcgucauggucuccauggaggagcccggcugguacuccuucggcuucgagaucaaggacaagaagugcgacguccccugcaucggcaucgagaugguccacgacggcggcaaggagaccuggcacuccgccgccaccgccaucuacugccucaugggcuccggccagcuccucugggacaccgucaccggcgucgacauggcccucuga

SEQ ID NO: 124898 - RNA, 1401 nt, Artificial Sequence
  derived and/or modified CDS sequence (opt2) from neuraminidase__InfluenzaB__AEP20281
augcuccccuccaccauccagacccucacccucuuccucaccuccggcggcguccuccucucccucuacgucuccgccucccucuccuaccuccucuacuccgacauccuccucaaguucucccccaccgagaucaccgcccccaccaugccccucgacugcgccaacgccuccaacguccaggccgucaaccgcuccaccaccaagggcgucacccuccuccuccccgagcccgaguggaccuacccccgccucuccugccccggcuccaccuuccagaaggcccuccucaucuccccccaccgcuucggcgagaccaagggcaacuccgccccccucaucauccgcgagcccuucaucgccugcggccccaacgagugcaagcacuucgcccucacccacuacgccgcccagcccggcggcuacuacaacggcacccgcggcgaccgcaacaagcuccgccaccucaucuccgucaagcucggcaagauccccaccgucgagaacuccaucuuccacauggccgccugguccggcuccgccugccacgacggcaaggaguggaccuacaucggcgucgacggccccgacaacaacgcccuccucaagaucaaguacggcgaggccuacaccgacaccuaccacuccuacgccaacaacauccuccgcacccaggaguccgccugcaacugcaucggcggcaacugcuaccucaugaucaccgacggcuccgccuccggcgucuccgagugccgcuuccucaagauccgcgagggccgcaucaucaaggagaucuuccccaccggccgcgucaagcacaccgaggagugcaccugcggcuucgccuccaacaagaccaucgagugcgccugccgcgacaacuccuacaccgccaagcgccccuucgucaagcucaacgucgagaccgacaccgccgagauccgccucaugugcaccgagaccuaccucgacaccccccgccccgacgacggcuccaucaccggccccugcgaguccaacggcgacaagggcuccggcggcaucaagggcggcuucguccaccagcgcauggccuccaagaucggccgcugguacucccgcaccauguccaagaccgagcgcaugggcaugggccucuacgucaaguacgacggcgaccccugggccgacuccgacgcccucgcccucuccggcgucauggucuccauggaggagcccggcugguacuccuucggcuucgagaucaaggacaagaagugcgacguccccugcaucggcaucgagaugguccacgacggcggcaaggagaccuggcacuccgccgccaccgccaucuacugccucaugggcuccggccagcuccucugggacaccgucaccggcgucgacauggcccucuga

SEQ ID NO: 124899 - RNA, 1401 nt, Artificial Sequence; identical to SEQ ID NO: 124671
  derived and/or modified CDS sequence (opt2) from neuraminidase__InfluenzaB__AEP20292

SEQ ID NO: 124900 - RNA, 1401 nt, Artificial Sequence; identical to SEQ ID NO: 124663
  derived and/or modified CDS sequence (opt2) from neuraminidase__InfluenzaB__AEP20303

SEQ ID NO: 124901 - RNA, 1401 nt, Artificial Sequence
  derived and/or modified CDS sequence (opt2) from neuraminidase__InfluenzaB__AEP20314
augcuccccuccaccauccagacccucacccucuuccucaccuccggcggcguccuccucucccucuacgucuccgccucccucuccuaccuccucuacuccgacauccuccucaaguucucccagaccggcaucaccgcccccaucaugccccucgacugcgccaacgccuccaacguccaggccgucaaccgcuccgccaccaagggcgucacccuccuccuccccgagcccgaguggaccuacccccgccucuccugccccggcuccaccuuccagaaggcccuccucaucuccccccaccgcuucggcgagaccaagggcaacuccgccccccucaucauccgcgagcccuucaucgccugcggccccaaggagugcaagcacuucgcccucacccacuacgccgcccagcccggcggcuacuacaacggcacccgcgaggaccgcaacaagcuccgccaccucaucuccgucaagcucggcaagauccccaccgucgagaacuccaucuuccacauggccgccugguccggcuccgccugccacgacggccgcgaguggaccuacaucggcgucgacggccccgacuccaacgcccuccucaagaucaaguacggcgaggccuacaccgacaccuaccacuccuacgccaagaacauccuccgcacccaggaguccgccugcaacugcaucggcggcgacugcuaccucaugaucaccgacggccccgccuccggcaucuccgagugccgcuuccucaagauccgcgagggccgcaucaucaaggagaucuuccccaccggccgcgucaagcacaccgaggagugcaccugcggcuucgccuccaacaagaccaucgagugcgccugccgcgacaacuccuacaccgccaagcgccccuucgucaagcucaacgucgagaccgacaccgccgagauccgccucaugugcaccgagaccuaccucgacaccccccgccccaacgacggcuccaucaccggccccugcgaguccaacggcgacaagggcuccggcggcaucaagggcggcuucguccaccagcgcauggccuccaagaucggccgcugguacucccgcaccauguccaagaccaagcgcaugggcaugggccucuacgucaaguacgacggcgaccccuggaccgacuccgaggcccucgcccucuccggcgucaugaucuccauggaggagcccggcugguacuccuucggcuucgagaucaaggacaagaagugcgacguccccugcaucggcaucgagaugguccacgacggcggcaagaccaccuggcacuccgccgccaccgccaucuacugccucaugggcuccggccagcuccucugggacaccgucaccggcgucgacauggcccucuga

SEQ ID NO: 124902 - RNA, 1401 nt, Artificial Sequence
  derived and/or modified CDS sequence (opt2) from neuraminidase__InfluenzaB__AEP20336
augcuccccuccaccauccagacccucacccucuuccucaccuccggcggcguccuccucucccucuacgucuccgccucccucuccuaccuccucuacuccgacauccuccucaaguucucccccaccgagaucaccgcccccaccaugccccucgacugcgccaacgccuccaacguccaggccgucaaccgcuccgccaccaagggcgucacccuccuccuccccgagcccgaguggaccuacccccgccucuccugccccggcuccaccuuccagaaggcccuccucaucuccccccaccgcuucggcgagaccaagggcaacuccgccccccucaucauccgcgagcccuucaucgccugcggccccaacgagugcaagcacuucgcccucacccacuacgccgcccagcccggcggcuacuacaacggcacccgcggcgaccgcaacaagcuccgccaccucaucuccgucaagcucggcaagauccccaccgucgagaacuccaucuuccacauggccgccugguccggcuccgccugccacgacggcaaggaguggaccuacaucggcgucgacggccccgacaacaacgcccuccucaagaucaaguacggcgaggccuacaccgacaccuaccacuccuacgccaacaacauccuccgcacccaggaguccgccugcaacugcaucggcggcaacugcuaccucaugaucaccgacggcuccgccuccggcgucuccgagugccgcuuccucaagauccgcgagggccgcaucaucaaggagaucuuccccaccggccgcgucaagcacaccgaggagugcaccugcggcuucgccuccaacaagaccaucgagugcgccugccgcgacaacuccuacaccgccaagcgccccuucgucaagcucaacgucgagaccgacaccgccgagauccgccucaugugcaccgagaccuaccucgacaccccccgccccgacgacggcuccaucaccggccccugcgaguccaacggcgacaagggcuccggcggcaucaagggcggcuucguccaccagcgcauggccuccaagaucggccgcugguacucccgcaccauguccaagaccgagcgcaugggcaugggccucuacgucaaguacgacggcgaccccugggccgacuccgacgcccucacccucuccggcgucauggucuccauggaggagcccggcugguacuccuucggcuucgagaucaaggacaagaagugcgacguccccugcaucggcaucgagaugguccacgacggcggcaaggagaccuggcacuccgccgccaccuccaucuacugccucaugggcuccggccagcuccucugggacaccgucaccggcgucgacauggcccucuga

SEQ ID NO: 124903 - RNA, 1401 nt, Artificial Sequence
  derived and/or modified CDS sequence (opt2) from neuraminidase__InfluenzaB__AEP20347
augcuccccuccaccauccagacccucacccucuuccucaccuccggcggcguccuccucucccucuacgucuccgccucccucuccuaccuccucuacuccgacauccuccucaaguucucccagaccgagaucaccgcccccaucaugccccucgacugcgccaacgccuccaacguccaggccgucaaccgcuccgccaccaagggcgucacccuccuccuccccgagcccgaguggaccuacccccgccucuccugccccggcuccaccuuccagaaggcccuccucaucuccccccaccgcuucggcgagaccaagggcaacuccgccccccucaucauccgcgagcccuucaucgccugcggccccaccgagugcaagcacuucgcccucacccacuacgccgcccagcccggcggcuacuacaacggcacccgcgaggaccgcaacaagcuccgccaccucaucuccgucaagcucggcaagauccccaccgucgagaacuccaucuuccacauggccgccugguccggcuccgccugccacgacggcaaggaguggaccuacaucggcgucgacggccccgacuccaacgcccuccucaagaucaaguacggcgaggccuacaccgacaccuaccacuccuacgccaagaacauccuccgcacccaggaguccgccugcaacugcaucggcggcgacugcuaccucaugaucaccgacggccccgccuccggcaucuccgagugccgcuuccucaagauccgcgagggccgcaucaucaaggagaucuuccccaccggccgcgucaagcacaccgaggagugcaccugcggcuucgccuccaacaagaccaucgagugcgccugccgcgacaacuccuacaccgccaagcgccccuucgucaagcucaacgucgagaccgacaccgccgagauccgccucaugugcaccgagaccuaccucgacaccccccgccccaacgacggcuccaucaccggccccugcgaguccgacggcgacaagggcuccggcggcaucaagggcggcuucguccaccagcgcauggccuccaagaucggccgcugguacucccgcaccauguccaagaccaagcgcaugggcaugggccucuacgucaaguacgacggcgaccccuggaccgacuccgaggcccucgcccucuccggcgucaugguccccauggaggagcccggcugguacuccuucggcuucgagaucaaggacaagaagugcgacguccccugcaucggcaucgagaugguccacgacggcggcaagaccaccuggcacuccgccgccaccgccaucuacugccucaugggcuccggccagcuccucugggacaccgucaccggcgucgacauggcccucuga

SEQ ID NO: 124904 - RNA, 1401 nt, Artificial Sequence; identical to SEQ ID NO: 124903
  derived and/or modified CDS sequence (opt2) from neuraminidase__InfluenzaB__AEP20358

SEQ ID NO: 124905 - RNA, 1401 nt, Artificial Sequence; identical to SEQ ID NO: 124903
  derived and/or modified CDS sequence (opt2) from neuraminidase__InfluenzaB__AEP20369

SEQ ID NO: 124906 - RNA, 1401 nt, Artificial Sequence; identical to SEQ ID NO: 124903
  derived and/or modified CDS sequence (opt2) from neuraminidase__InfluenzaB__AEP20380

SEQ ID NO: 124907 - RNA, 1401 nt, Artificial Sequence
  derived and/or modified CDS sequence (opt2) from neuraminidase__InfluenzaB__AEP20391
augcuccccuccaccauccagacccucacccucuuccucaccuccggcggcguccuccucucccucuacgucuccgccucccucuccuaccuccucuacuccgacauccuccucaaguucucccccaccgagaucaccgcccccaccaugccccucgacugcgccaacgccuccaacguccaggccgucaaccgcuccgccaccaagggcgucacccuccuccuccccgagcccgaguggaccuacccccgccucuccugccccggcuccaccuuccagaaggcccuccucaucuccccccaccgcuucggcgagaccaagggcaacuccgccccccucaucauccgcgagcccuucaucgccugcggccccaacgagugcaagcacuucgcccucacccacuacgccgcccagcccggcggcuacuacaacggcacccgcggcgaccgcaaccgccuccgccaccucaucuccgucaagcucggcaagauccccaccgucgagaacuccaucuuccacauggccgccugguccggcuccgccugccacgacggcaaggaguggaccuacaucggcgucgacggccccgacaacaacgcccuccucaagaucaaguacggcgaggccuacaccgacaccuaccacuccuacgccaacaacauccuccgcacccaggaguccgccugcaacugcaucggcggcaacugcuaccucaugaucaccgacggcuccgccuccggcgucuccgagugccgcuuccucaagauccgcgagggccgcaucaucaaggagaucuuccccaccggccgcgucaagcacaccgaggagugcaccugcggcuucgccuccaacaagaccaucgagugcgccugccgcgacaacuccuacaccgccaagcgccccuucgucaagcucaacgucgagaccgacaccgccgagauccgccucaugugcaccgacaccuaccucgacaccccccgccccgacgacggcuccaucaccggccccugcgaguccaacggcgacaagggcuccggcggcaucaagggcggcuucguccaccagcgcauggccuccaaggucggccgcugguacucccgcaccauguccaagaccgagcgcaugggcaugggccucuacgucaaguacgacggcgaccccugggccgacuccgacgcccucgccuucuccggcgucauggucuccaugaaggagcccggcugguacuccuucggcuucgagaucaaggacaagaagugcgacguccccugcaucggcaucgagaugguccacgacggcggcaaggagaccuggcacuccgccgccaccgccaucuacugccucaugggcuccggccagcuccucugggacaccgucaccggcgucgacauggcccucuga

SEQ ID NO: 124908 - RNA, 1401 nt, Artificial Sequence
  derived and/or modified CDS sequence (opt2) from neuraminidase__InfluenzaB__AEP20413
augcuccccuccaccauccagacccucacccucuuccucaccuccggcggcguccuccucucccucuacgucuccgcccuccucuccuaccuccucuacuccgacauccuccucaaguucucccccaccgagaucaucgcccccaccaugucccucgacugcgccaacgccuccaacguccaggccgucaaccgcuccgccaccaagggcgucaccuuccuccuccccgagcccgaguggaccuacccccgccucuccugccccggcuccaccuuccagaaggcccuccucaucuccccccaccgcuucggcgagaccaagggcaacuccgccccccucaucauccgcgagcccuucaucgccugcggccccaacgagugcaagcacuucgcccucacccacuacgccgcccagcccggcggcuacuacaacggcacccgcggcgaccgcaacaagcuccgccaccucaucuccgucaagcucggcaagauccccaccgucgagaacuccaucuuccacauggccgccugguccggcuccgccugccacgacggcaaggaguggaccuacaucggcgucgacggccccgacaacgacgcccuccucaaggucaaguacggcgaggccuacaccgacaccuaccacuccuacgccaacaagauccuccgcacccaggaguccgccugcaacugcaucggcggcaacugcuaccucaugaucaccgacggcuccgccuccggcgucuccgagugccgcuuccucaagauccgcgagggccgcaucaucaaggagaucuuccccaccggccgcgucaagcacaccgaggagugcaccugcggcuucgccuccaacaagaccaucgagugcgccugccgcgacaacuccuacaccgccaagcgccccuucgucaagcucaacgucgagaccgacaccgccgagauccgccucaugugcaccgacaccuaccucgacaccccccgccccgacgacggcuccaucaccggccccugcgaguccaacggcgacaagggcuccggcggcaucaagggcggcuucguccaccagcgcauggaguccaagaucggccgcugguacucccgcaccauguccaagaccgagcgcaugggcaugggccucuacgucaaguacaacggcgaccccugggccgacuccgacgcccucgccuucuccggcgucauggucuccaugaaggagcccggcugguacuccuucggcuucgagaucaaggacaagaagugcgacguccccugcaucggcaucgagaugguccacgacggcggcaaggagaccuggcacuccgccgccaccgccaucuacugccucaugggcuccggccagcuccucugggacaccgucaccggcgucgacauggcccucuga

SEQ ID NO: 124909 - RNA, 1401 nt, Artificial Sequence; identical to SEQ ID NO: 124908
  derived and/or modified CDS sequence (opt2) from neuraminidase__InfluenzaB__AEP20435

SEQ ID NO: 124910 - RNA, 1401 nt, Artificial Sequence; identical to SEQ ID NO: 124903
  derived and/or modified CDS sequence (opt2) from neuraminidase__InfluenzaB__AEQ39031

SEQ ID NO: 124911 - RNA, 1401 nt, Artificial Sequence
  derived and/or modified CDS sequence (opt2) from neuraminidase__InfluenzaB__AEQ39275
augcuccccuccaccauccagacccucacccucuuccucaccuccggcggcguccuccucucccucuacgucuccgccucccucuccuaccuccucuacuccgacauccuccucaaguucucccccaaggagaucaccgcccccaccaugccccucgacugcgccaacgccuccaacguccaggccgucaaccacuccgccaccaagggcgucacccuccuccuccccgagcccgaguggaccuacccccgccucuccugccccggcuccaccuuccagaaggcccuccucaucuccccccaccgcuucggcgagaccaagggcaacuccgccccccucaucauccgcgagcccuucaucgccugcggccccaacgagugcaagcacuucgcccucacccacuacgccgcccagcccggcggcuacuacaacggcacccgcggcgaccgcaacaagcuccgccaccucaucuccgucaagcucggcaagauccccaccgucgagaacuccaucuuccacauggccgccugguccggcuccgccugccacgacggcaaggaguggaccuacaucggcgucgacggccccgacaacaacgcccuccucaaggucaaguacggcgaggccuacaccgacaccuaccacuccuacgccaacaagauccuccgcacccaggaguccgccugcaacugcaucggcggcaacugcuaccucaugaucaccgacggcuccgccuccggcgucuccgagugccgcuuccucaagauccgcgagggccgcaucaucaaggagaucuuccccaccggccgcgucaagcacaccgaggagugcaccugcggcuucgccuccaacaagaccaucgagugcgccugccgcgacaacuccuacaccgccaagcgccccuucgucaagcucaacgucgagaccgacaccgccgagauccgccucaugugcaccgacaccuaccucgacaccccccgccccgacgacggcuccaucaccggccccugcgaguccaacggcgacaagggcuccggcggcaucaagggcggcuucguccaccagcgcauggaguccaagaucggccgcugguacucccgcaccauguccaagaccgagcgcaugggcaugggccucuacgucaaguacgacggcgaccccugggccgacuccgacgcccucgccuucuccggcgucauggucuccaugaaggagcccggcugguacuccuucggcuucgagaucaaggacaagaagugcgacguccccugcaucggcaucgagaugguccacgacggcggcaaggagaccuggcacuccgccgccaccgccaucuacugccucaugggcuccggccagcuccucugggacaccgucaccggcgucgacauggcccucuga

SEQ ID NO: 124912 - RNA, 1401 nt, Artificial Sequence; identical to SEQ ID NO: 124911
  derived and/or modified CDS sequence (opt2) from neuraminidase__InfluenzaB__AEQ39286

SEQ ID NO: 124913 - RNA, 1401 nt, Artificial Sequence; identical to SEQ ID NO: 124911
  derived and/or modified CDS sequence (opt2) from neuraminidase__InfluenzaB__AEQ39297

SEQ ID NO: 124914 - RNA, 1401 nt, Artificial Sequence; identical to SEQ ID NO: 124911
  derived and/or modified CDS sequence (opt2) from neuraminidase__InfluenzaB__AEQ39308

SEQ ID NO: 124915 - RNA, 1401 nt, Artificial Sequence; identical to SEQ ID NO: 124911
  derived and/or modified CDS sequence (opt2) from neuraminidase__InfluenzaB__AEQ39319

SEQ ID NO: 124916 - RNA, 1401 nt, Artificial Sequence
  derived and/or modified CDS sequence (opt2) from neuraminidase__InfluenzaB__AEQ39330
augcuccccuccaccauccagacccucacccucuuccucaccuccggcggcguccuccucucccucuacgucuccgccucccucuccuaccuccucuacuccgacauccuccucaaguucucccccaaggagaucaccgcccccaccaugccccucgacugcgccaacgccuccaacguccaggccgucaaccacuccgccaccaagggcgucacccuccuccuccccgagcccgaguggaccuacccccgccucuccugccccggcuccaccuuccagaaggcccuccucaucuccccccaccgcuucggcgagaccaagggcaacuccgccccccucaucauccgcgagcccuucaucgccugcggccccaacgagugcaagcacuucgcccucacccacuacgccgcccagcccggcggcuacuacaacggcacccgcggcgaccgcaacaagcuccgccaccucaucuccgucaagcucggcaagauccccaccgucgagaacuccaucuuccacauggccgccugguccggcuccgccugccacgacggcaaggaguggaccuacaucggcgucgacggccccgacaacaacgcccuccucaaggucaaguacggcgaggccuacaccgacaccuaccacuccuacgccaacaagauccuccgcacccaggaguccgccugcaacugcaucggcggcaacugcuaccucaugaucaccgacggcuccgccuccggcgucuccgagugccgcuuccucaagauccgcgagggccgcaucaucaaggagaucuuccccaccggccgcgucaagcacaccgaggagugcaccugcggcuucgccuccaacaagaccaucgagugcgccugccgcgacaacuccuacaccgccaagcgccccuucgucaagcucaacgucgagaccgacaccgccgagauccgccucaugugcaccgacaccuaccucgacaccccccgccccgacgacggcuccaucaccggccccugcgaguccaacggcgacaagggcuccggcggcaucaagggcggcuucguccaccagcgcauggaguccaagaucggccgcugguacucccgcaccauguccaagaccgagcgcaugggcaugggccucuacgucaaguacgacggcgaccccugggccgacuccgacgcccucgccuucuccggcgucauggucuccaugaaggagcccggcugguacuccuucggcuucgagaucaaggacaagaagugcgacguccccugcaucggcaucgagaugguccacgacggcggcaaggagaccuggcacuccgccgccaccgccaucuacugccucaugggcuccggccagcuccucugggacaccgucaccggcgucgacaucgcccucuga

SEQ ID NO: 124917 - RNA, 1401 nt, Artificial Sequence; identical to SEQ ID NO: 124911
  derived and/or modified CDS sequence (opt2) from neuraminidase__InfluenzaB__AEQ39341

SEQ ID NO: 124918 - RNA, 1401 nt, Artificial Sequence; identical to SEQ ID NO: 124911
  derived and/or modified CDS sequence (opt2) from neuraminidase__InfluenzaB__AEQ39352

SEQ ID NO: 124919 - RNA, 1401 nt, Artificial Sequence; identical to SEQ ID NO: 124911
  derived and/or modified CDS sequence (opt2) from neuraminidase__InfluenzaB__AEQ39363

SEQ ID NO: 124920 - RNA, 1401 nt, Artificial Sequence; identical to SEQ ID NO: 124877
  derived and/or modified CDS sequence (opt2) from neuraminidase__InfluenzaB__AEQ39374

SEQ ID NO: 124921 - RNA, 1401 nt, Artificial Sequence
  derived and/or modified CDS sequence (opt2) from neuraminidase__InfluenzaB__AEQ39385
augcuccccuccaccauccagacccucacccucuuccucaccuccggcggcguccuccucucccucuacgucuccgccucccucuccuaccuccucuacuccgacauccuccucaaguucucccccaccgagaucaccgcccccaccaugccccucgacugcgccaacgccuccaacguccaggccgucaaccgcuccgccaccaagggcgucacccuccuccuccccgagcccgaguggaccuacccccgccucuccugccccggcuccaccuuccagaaggcccuccucaucuccccccaccgcuucggcgagaccaagggcaacuccgccccccucaucauccgcgagcccuucaucgccugcggccccaaggagugcaagcacuucgcccucacccacuacgccgcccagcccggcggcuacuacaacggcacccgcggcgaccgcaacaagcuccgccaccucaucuccgucaagcucggcaagauccccaccgucgagaacuccaucuuccacauggccgccugguccggcuccgccugccacgacggcaaggaguggaccuacaucggcgucgacggccccgacuccaacgcccuccucaagaucaaguacggcgaggccuacaccgacaccuaccacuccuacgccaacaacauccuccgcacccaggaguccgccugcaacugcaucggcggcaacugcuaccucaugaucaccgacggcuccgccuccggcaucuccgagugccgcuuccucaagauccgcgagggccgcaucaucaaggagaucuuccccaccggccgcgucaagcacaccgaggagugcaccugcggcuucgccuccaacaagaccaucgagugcgccugccgcgacaacuccuacaccgccaagcgccccuucgucaagcucaacgucgagaccgacaccgccgagauccgccucaugugcaccgagaccuaccucgacaccccccgccccgacgacggcuccaucaccggccccugcgaguccaacggcgacaagggcuccggcggcaucaagggcggcuucguccaccagcgcaugaccuccaagaucggccgcugguacucccgcaccauguccaagaccaagcgcaugggcaugggccucuacgucaaguacgacggcgaccccuggaccgacuccgacgcccucgcccucuccggcgucauggucuccauggaggagcccggcugguacuccuucggcuucgagaucaaggacaagaagugcgacguccccugcaucggcaucgagaugguccacgacggcggcaaggagaccuggcacuccgccgccaccgccaucuacugccucaugggcuccggccagcuccucugggacaccgucaccggcgucgacauggcccucuga

SEQ ID NO: 124922 - RNA, 1401 nt, Artificial Sequence
  derived and/or modified CDS sequence (opt2) from neuraminidase__InfluenzaB__AEQ39444
augcuccccuccaccauccagacccucacccucuuccucaccuccggcggcguccuccucucccucuacgucuccgccucccucuccuaccuccucuacuccgacauccuccucaaguucucccagaccgagaucaucgcccccaucaugccccucgacugcgccaacgccuccaacguccaggccgucaaccgcuccgccaccaagggcgucacccuccuccuccccgagcccgaguggaccuacccccgccucuccugccccggcuccaccuuccagaaggcccuccucaucuccccccaccgcuucggcgagaccaagggcaacuccgccccccucaucauccgcgagcccuucaucgccugcggccccaccgagugcaagcacuucgcccucacccacuacgccgcccagcccggcggcuacuacaacggcacccgcgaggaccgcaacaagcuccgccaccucaucuccgucaagcucggcaagauccccaccgucgagaacuccaucuuccacauggccgccugguccggcuccgccugccacgacggcaaggaguggaccuacaucggcgucgacggccccgacuccaacgcccuccucaagaucaaguacggcgaggccuacaccgacaccuaccacuccuacgccaagaacauccuccgcacccaggaguccgccugcaacugcaucggcggcgacugcuaccucaugaucaccgacggccccgccuccggcaucuccgagugccgcuuccucaagauccgcgagggccgcaucaucaaggagaucuuccccaccggccgcgucaagcacaccgaggagugcaccugcggcuucgccuccaacaagaccaucgagugcgccugccgcgacaacuccuacaccgccaagcgccccuucgucaagcucaacgucgagaccgacaccgccgagauccgccucaugugcaccgagaccuaccucgacaccccccgccccaacgacggcuccaucaccggccccugcgaguccgacggcgacaagggcuccggcggcaucaagggcggcuucguccaccagcgcauggccuccaagaucggccgcugguacucccgcaccauguccaagaccaagcgcaugggcaugggccucuacgucaaguacgacggcgaccccuggaccgacuccgaggcccucgcccucuccggcgucauggucuccauggaggagcccggcugguacuccuucggcuucgagaucaaggacaagaagugcgacguccccugcaucggcaucgagaugguccacgacggcggcaagaccaccuggcacuccgccgccaccgccaucuacugccucaugggcuccggccagcuccucugggacaccgucaccggcgucgacauggcccucuga

SEQ ID NO: 124923 - RNA, 1401 nt, Artificial Sequence; identical to SEQ ID NO: 124824
  derived and/or modified CDS sequence (opt2) from neuraminidase__InfluenzaB__AEQ39455

SEQ ID NO: 124924 - RNA, 1401 nt, Artificial Sequence
  derived and/or modified CDS sequence (opt2) from neuraminidase__InfluenzaB__AEQ39466
augcuccccuccaccauccagacccucacccucuuccucaccuccggcggcguccuccucucccucuacgucuccgccucccucuccuaccuccucuacuccgacauccuccucaaguucucccccaccgagaucaccgcccccaccaugccccucgacugcgccaacgccuccaacguccaggccgucaaccgcuccgccaccaagggcgucacccuccuccuccccgagcccgaguggaccuacccccgccucuccugccccggcuccaccuuccagaaggcccuccucaucuccccccaccgcuucggcgagaccaagggcaacuccgccccccucaucauccgcgagcccuucaucgccugcggccccaacgagugcaagcacuucgcccucacccacuacgccgcccagcccggcggcuacuacaacggcacccgcggcgaccgcaacaagcuccgccaccucaucuccgucaagcucggcaagauccccaccgucgagaacuccaucuuccacauggccgccugguccggcuccgccugccacgacggcaaggaguggaccuacaucggcgucgacggccccgacaacaacgcccuccucaagaucaaguacggcgaggccuacaccgacaccuaccacuccuacgccaacaacauccuccgcacccaggaguccgccugcaacugcaucggcggcaacugcuaccucaugaucaccgacggcuccgccuccggcgucuccgagugccgcuuccucaagauccgcgagggccgcaucaucaaggagaucuuccccaccggccgcgucaagcacaccgaggagugcaccugcggcuucgccuccaacaagaccaucgagugcgccugccgcgacaacuccuacaccgccaagcgccccuucgucaagcucaacgucgagaccgacaccgccgagauccgccucaugugcaccgacaccuaccucgacaccccccgccccgacgacggcuccaucaccggccccugcgaguccaacggcgacaagggcuccggcggcaucaagggcggcuucguccaccagcgcauggccuccaaggucggccgcugguacucccgcaccauguccaagaccgagcgcaugggcaugggccucuacgucaaguacgacggcgaccccugggccgacuccgacgcccucgccuucuccggcgucauggucuccaugaaggagcccggcugguacuccuucggcuucgagaucaaggacaagaagugcgacguccccugcaucggcaucgagaugguccacgacggcggcaaggagaccuggcacuccgccgccaccgccaucuacugccucaugggcuccggccagcuccucugggacaccgucaccggcgucgacauggcccucuga

SEQ ID NO: 124925 - RNA, 1401 nt, Artificial Sequence; identical to SEQ ID NO: 124911
  derived and/or modified CDS sequence (opt2) from neuraminidase__InfluenzaB__AEQ39477

SEQ ID NO: 124926 - RNA, 1401 nt, Artificial Sequence
  derived and/or modified CDS sequence (opt2) from neuraminidase__InfluenzaB__AEQ39488
augcuccccuccaccauccagacccucacccucuuccucaccuccggcggcguccuccucucccucuacgucuccgccucccucuccuaccuccucuacuccgacauccuccucaaguucucccccaccgagaucaccgcccccaccaugccccucgacugcgccaacgccuccaacguccaggccgucaaccgcuccgccaccaagggcgucacccuccuccuccccgagcccgaguggaccuacccccgccucuccugccccggcuccaccuuccagaaggcccuccucaucuccccccaccgcuucggcgagaccaagggcaacuccgccccccucaucauccgcgagcccuucaucgccugcggccccaacgagugcaagcacuucgcccucacccacuacgccgcccagcccggcggcuacuacaacggcacccgcggcgaccgcaacaagcuccgccaccucaucuccgucaagcucggcaagauccccaccgucgagaacuccaucuuccacauggccgccugguccggcuccgccugccacgacggcaaggaguggaccuacaucggcgucgacggccccgacaacaacgcccuccucaaggucaaguacggcgaggccuacaccgacaccuaccacuccuacgccaacaagauccuccgcacccaggaguccgccugcaacugcaucggcggcaacugcuaccucaugaucaccgacggcuccgccuccggcgucuccgagugccgcuuccucaagauccgcgagggccgcaucaucaaggagaucuuccccaccggccgcgucaagcacaccgaggagugcaccugcggcuucgccuccaacaagaccaucgagugcgccugccgcgacaacuccuacaccgccaagcgccccuucgucaagcucaacgucgagaccgacaccgccgagauccgccucaugugcaccgacaccuaccucgacaccccccgccccaacgacggcuccaucaccggccccugcgaguccaacggcgacaagggcuccggcggcaucaagggcggcuucguccaccagcgcauggagucccgcaucggccgcugguacucccgcaccauguccaagaccgagcgcaugggcaugggccucuacgucaaguacgacggcgaccccuggaccgacuccgacgcccucgccuucuccggcgucauggucuccaugaaggagcccggcugguacuccuucggcuucgagaucaaggacaagaagugcgacguccccugcaucggcaucgagaugguccacgacggcggcaaggagaccuggcacuccgccgccaccgccaucuacugccucaugggcuccggccagcuccucugggacaccgucaccggcgucgacauggcccucuga

SEQ ID NO: 124927 - RNA, 1401 nt, Artificial Sequence; identical to SEQ ID NO: 124877
  derived and/or modified CDS sequence (opt2) from neuraminidase__InfluenzaB__AEQ39499

SEQ ID NO: 124928 - RNA, 1401 nt, Artificial Sequence; identical to SEQ ID NO: 124723
  derived and/or modified CDS sequence (opt2) from neuraminidase__InfluenzaB__AEQ39510

SEQ ID NO: 124929 - RNA, 1401 nt, Artificial Sequence
  derived and/or modified CDS sequence (opt2) from neuraminidase__InfluenzaB__AEQ49685
augcuccccuccaccauccagacccucacccucuuccucaccuccggcggcguccuccucucccucuacgucuccgccucccucuccuaccuccucuacuccgacauccuccucaaguucucccccaccgagaucaccgcccccaccaugccccucgacugcgccaacgccuccaacguccaggccgucaaccgcuccgccaccaagggcgucacccuccuccuccccgagcccgaguggaccuacccccgccucuccugccccggcuccaccuuccagaaggcccuccucaucuccccccaccgcuucggcgagaccaagggcaacuccgccccccucaucauccgcgagcccuucaucgccugcggccccaacgagugcaagcacuucgcccucacccacuacgccgcccagcccggcggcuacuacaacggcacccgcggcgaccgcaacaagcuccgccaccucaucuccgucaagcucggcaagauccccaccgucgagaacuccaucuuccacauggccgccugguccggcuccgccugccacgacggcaaggaguggaccuacaucggcgucgacggccccgacaacaacgcccuccucaaggucaaguacggcgaggccuacaccgacaccuaccacuccuacgccaacaagauccuccgcacccaggaguccgccugcaacugcaucggcggcaacugcuaccucaugaucaccgacggcuccgccuccggcgucuccgagugccgcuuccucaagauccgcgagggccgcaucaucaaggagaucuuccccaccggccgcgucaagcacaccgaggagugcaccugcggcuucgccuccaacaagaccaucgagugcgccugccgcgacaacuccuacaccgccaagcgccccuucgucaagcucaacgucgagaccgacaccgccgagauccgccucaugugcaccgacaccuaccucgacaccccccgccccaacgacggcuccaucaccggccccugcgaguccgacggcgacaagggcuccggcggcaucaagggcggcuucguccaccagcgcauggaguccaagaucggccgcugguacucccgcaccauguccaagaccgagcgcaugggcaugggccucuacgucaaguacgacggcgaccccugggccgacuccgacgcccucgccuucuccggcgucauggucuccaugaaggagcccggcugguacuccuucggcuucgagaucaaggacaagaagugcgacguccccugcaucggcaucgagaugguccacgacggcggcaaggagaccuggcacuccgccgccaccgccaucuacugccucaugggcuccggccagcuccucugggacaccgucaccggcgucgacauggaccucuga

SEQ ID NO: 124930 - RNA, 1401 nt, Artificial Sequence
  derived and/or modified CDS sequence (opt2) from neuraminidase__InfluenzaB__AEQ49686
augcuccccuccaccauccagacccucacccucuuccucaccuccggcggcguccuccucucccucuacgucuccgccucccucuccuaccuccucuacuccgacauccuccucaaguucucccccaccgagaucaccgcccccaccaugccccucgacugcgccaacgccuccaacguccaggccgucaaccgcuccgccaccaagggcgucacccuccuccuccccgagcccgaguggaccuacccccgccucuccugccccggcuccaccuuccagaaggcccuccucaucuccccccaccgcuucggcgagaccaagggcaacuccgccccccucaucauccgcgagcccuucaucgccugcggccccaacgagugcaagcacuucgcccucacccacuacgccgcccagcccggcggcuacuacaacggcacccgcggcgaccgcaacaagcuccgccaccucaucuccgucaagcucggcaagauccccaccgucgagaacuccaucuuccacauggccgccugguccggcuccgccugccacgacggcaaggaguggaccuacaucggcgucgacggccccgacaacgacgcccuccucaaggucaaguacggcgaggccuacaccgacaccuaccacuccuacgccaacaagauccuccgcacccaggaguccgccugcaacugcaucggcggcaacugcuaccucaugaucaccgacggcuccgccuccggcgucuccgagugccgcuuccucaagauccgcgagggccgcaucaucaaggagaucuuccccaccggccgcgucaagcacaccgaggagugcaccugcggcuucgccuccaacaagaccaucgagugcgccugccgcgacaacuccuacaccgccaagcgccccuucgucaagcucaacgucgagaccgacaccgccgagauccgccucaugugcaccgacaccuaccucgacaccccccgccccgacgacggcuccaucaccggccccugcgaguccaacggcgacaagggcuccggcggcaucaagggcggcuucguccaccagcgcauggaguccaagaucggccgcugguacucccgcaccauguccaagaccgagcgcaugggcaugggccucuacgucaaguacgacggcgaccccugggccgacuccgacgcccucgccuucuccggcgucauggucuccaugaaggagcccggcugguacuccuucggcuucgagaucaaggacaagaagugcgacguccccugcaucggcaucgagaugguccacgacggcggcaaggagaccuggcacuccgccgccaccgccaucuacugccucaugggcuccggccagcuccucugggacaccgucaccggcgucgacauggcccucuga

SEQ ID NO: 124931 - RNA, 1401 nt, Artificial Sequence
  derived and/or modified CDS sequence (opt2) from neuraminidase__InfluenzaB__AEQ49687
augcuccccuccaccauccagacccucacccucuuccucaccuccggcggcguccuccucucccucuacgucuccgcccuccucuccuaccuccucuacuccgacauccuccucaaguucucccccaccgagaucaccgcccccaccaugucccucgacugcgccaacgccuccaacguccaggccgucaaccgcuccgccaccaagggcgucaccuuccuccuccccgagcccgaguggaccuacccccgccucuccugccccggcuccaccuuccagaaggcccuccucaucuccccccaccgcuucggcgagaccaagggcaacuccgccccccucaucauccgcgagcccuucaucgccugcggccccaacgagugcaagcacuucgcccucacccacuacgccgcccagcccggcggcuacuacaacggcacccgcggcgaccgcaacaagcuccgccaccucaucuccgucaagcucggcaagauccccaccgucgagaacuccaucuuccacauggccgccugguccggcuccgccugccacgacggcaaggaguggaccuacaucggcgucgacggccccgacaacgacgcccuccucaaggucaaguacggcgaggccuacaccgacaccuaccacuccuacgccaacaagauccuccgcacccaggaguccgccugcaacugcaucggcggcaacugcuaccucaugaucaccgacggcuccgccuccggcgucuccgagugccgcuuccucaagauccgcgagggccgcaucaucaaggagaucuuccccaccggccgcgucaagcacaccgaggagugcaccugcggcuucgccuccaacaagaccaucgagugcgccugccgcgacaacuccuacaccgccaagcgccccuucgucaagcucaacgucgagaccgacaccgccgagauccgccucaugugcaccgacaccuaccucgacaccccccgccccgacgacggcuccaucaccggccccugcgaguccaacggcgacaagggcuccggcggcaucaagggcggcuucguccaccagcgcauggaguccaagaucggccgcugguacucccgcaccauguccaagaccgagcgcaugggcaugggccucuacgucaaguacgacggcgaccccugggccgacuccgacgcccucgccuucuccggcgucauggucuccaugaaggagcccggcugguacuccuucggcuucgagaucaaggacaagaagugcgacguccccugcaucggcaucgagaugguccacgacggcggcaaggagaccuggcacuccgccgccaccgccaucuacugccucaugggcuccggccagcuccucugggacaccgucaccggcgucgacauggcccucuga

SEQ ID NO: 124932 - RNA, 1401 nt, Artificial Sequence
  derived and/or modified CDS sequence (opt2) from neuraminidase__InfluenzaB__AEQ49688
augcuccccuccaccauccagacccucacccucuuccucaccuccggcggcguccuccucucccucuacgucuccgccucccucuccuaccuccucuacuccgacauccuccucaaguucucccgcaccgagaucaccgcccccaucaugccccucggcugcgccaacgccuccaacguccaggccgucaaccgcuccgccaccaagggcgucacccuccuccuccccgagcccgaguggaccuacccccgccucuccugccccggcuccaccuuccagaaggcccuccucaucuccccccaccgcuucggcgagaccaagggcaacuccgccccccucaucauccgcgagcccuucaucgccugcggccccaaggagugcaagcacuucgcccucacccacuacgccgcccagcccggcggcuacuacaacggcacccgcgaggaccgcaacaagcuccgccaccucaucuccgucaagcucggcaagauccccaccgucgagaacuccaucuuccacauggccgccugguccggcuccgccugccacgacggccgcgaguggaccuacaucggcgucgacggccccgacuccaacgcccuccucaagaucaaguacggcgaggccuacaccgacaccuaccacuccuacgccaagaacauccuccgcacccaggaguccgccugcaacugcaucggcggcgacugcuaccucaugaucaccgacggccccgccuccggcaucuccgagugccgcuuccucaagauccgcgagggccgcaucaucaaggagaucuuccccaccggccgcgucaagcacaccgaggagugcaccugcggcuucgccuccaacaagaccaucgagugcgccugccgcgacaacuccuacaccgccaagcgccccuucgucaagcucaacgucgagaccgacaccgccgagauccgccucaugugcaccgagaccuaccucgacaccccccgccccaacgacggcuccaucaccggccccugcgaguccaacggcgacaagggcuccggcggcaucaagggcggcuucguccaccagcgcauggccuccaagaucggccgcugguacucccgcaccauguccaagaccaagcgcaugggcaugggccucuacgucaaguacgacggcgaccccuggaccgacuccgaggcccucgcccucuccggcgucauggucuccauggaggagcccggcugguacuccuucggcuucgagaucaaggacaagaagugcgacguccccugcaucggcaucgagaugguccacgacggcggcaagaccaccuggcacuccgccgccaccgccaucuacugccucaugggcuccggccagcuccucugggacaccgucaccggcgucaacaugacccucuga

SEQ ID NO: 124933 - RNA, 1401 nt, Artificial Sequence
  derived and/or modified CDS sequence (opt2) from neuraminidase__InfluenzaB__AEQ49691
augcuccccuccaccauccagacccucacccucuuccucaccuccggcggcguccuccucucccucuacgucuccgcccuccucuccuaccuccucuacuccgacauccuccucaaguucucccccaccgagaucaccgcccccaccaugucccucgacugcgccaacgccuccaacguccaggccgucaaccgcuccgccaccaagggcgucaccuuccuccuccccgagcccgaguggaccuacccccgccucuccugccccggcuccaccuuccagaaggcccuccucaucuccccccaccgcuucggcgagaccaagggcaacuccgccccccucaucauccgcgagcccuucaucgccugcggccccaacgagugcaagcacuucgcccucacccacuacgccgcccagcccggcggcuacuacaacggcacccgcggcgaccgcaacaagcuccgccaccucaucuccgucaagcucggcaagauccccaccgucgagaacuccaucuuccacauggccgccugguccggcuccgccugccacgacggcaaggaguggaccuacaucggcgucgacggccccgacaacgacgcccuccucaaggucaaguacggcgaggccuacaccgacaccuaccacuccuacgccaacaagauccuccgcacccaggaguccgccugcaacugcaucggcggcaacugcuaccucaugaucaccgacggcuccgccuccggcgucuccgagugccgcuuccucaagauccgcgagggccgcaucaucaaggagaucuuccccaccggccgcgucaagcacaccgaggagugcaccugcggcuucgccuccaacaagaccaucgagugcgccugccgcgacaacuccuacaccgccaagcgccccuucgucaagcucaacgucgagaccgacaccgccgagauccgccucaugugcaccgacaccuaccucgacaccccccgccccgacgacggcuccaucaccggccccugcgaguccaacggcgaccgcggcuccggcggcaucaagggcggcuucguccaccagcgcauggaguccaagaucggccgcugguacucccgcaccauguccaagaccgagcgcaugggcaugggccucuacgucaaguacgacggcgaccccugggccgacuccgacgcccucgccuucuccggcgucauggucuccaugaaggagcccggcugguacuccuucggcuucgagaucaaggacaagaagugcgacguccccugcaucggcaucgagaugguccacgacggcggcaaggagaccuggcacuccgccgccaccgccaucuacugccucaugggcuccggccagcuccucugggacaccgucaccggcgucgacauggcccucuga

SEQ ID NO: 124934 - RNA, 1401 nt, Artificial Sequence
  derived and/or modified CDS sequence (opt2) from neuraminidase__InfluenzaB__AEQ49692
augcuccccuccaccauccagacccucacccucuuccucaccuccggcggcguccuccucucccucuacgucuccgccucccucuccuaccuccucuacuccgacauccuccucaaguucucccccaccgagaccaccgcccccaccaugucccucgacugcgccaacgccuccaacguccaggccgucaaccgcuccgccaccaagggcgucaccuuccuccuccccgagcccgaguggaccuacccccgccucuccugccccggcuccaccuuccagaaggcccuccucaucuccccccaccgcuucggcgagaccaagggcaacuccgccccccucaucauccgcgagcccuucaucgccugcggccccaacgagugcaagcacuucgcccucacccacuacgccgcccagcccggcggcuacuacaacggcacccgcggcgaccgcaacaagcuccgccaccucaucuccgucaagcucggcaagauccccaccgucgagaacuccaucuuccacauggccgccugguccggcuccgccugccacgacggcaaggaguggaccuacaucggcgucgacggccccgacaacgacgcccuccucaaggucaaguacggcgaggccuacaccgacaccuaccacuccuacgccaacaagauccuccgcacccaggaguccgccugcaacugcaucggcggcaacugcuaccucaugaucaccgacggcuccgccuccggcgucuccgagugccgcuuccucaagauccgcgagggccgcaucaucaaggagaucuuccccaccggccgcgucaagcacaccgaggagugcaccugcggcuucgccuccaacaagaccaucgagugcgccugccgcgacaacuccuacaccgccaagcgccccuucgucaagcucaacgucgagaccgacaccgccgagauccgccucaugugcaccgacaccuaccucgacaccccccgccccgacgacggcuccaucaccggccccugcgaguccaacggcgacaagggcuccggcggcaucaagggcggcuucguccaccagcgcauggaguccaagaucggccgcugguacucccgcaccauguccaagaccgagcgcaugggcaugggccucuacgucaaguacgacggcgaccccugggccgacuccgacgcccucgccuucuccggcgucauggucuccaugaaggagcccggcugguacuccuucggcuucgagaucaaggacaagaagugcgacguccccugcaucggcaucgagaugguccacgacggcggcaaggagaccuggcacuccgccgccaccgccaucuacugccucaugggcuccggccagcuccucugggacaccgucaccggcgucgacauggcccucuga

SEQ ID NO: 124935 - RNA, 1401 nt, Artificial Sequence
  derived and/or modified CDS sequence (opt2) from neuraminidase__InfluenzaB__AEQ49693
augcuccccuccaccauccagacccucacccucuuccucaccuccggcggcguccuccucucccucuacgucuccgccucccucuccuaccuccucuacuccgacauccuccucaaguucucccccaccgagaucaccgcccccaccaugccccucgacugcgccaacgccuccaacguccaggccgucaaccgcuccgccaccaagggcgucacccuccuccuccccgagcccgaguggaccuacccccgccucuccugccccggcuccaccuuccagaaggcccuccucaucuccccccaccgcuucggcgagaccaagggcaacuccgccccccucaucauccgcgagcccuucaucgccugcggccccaacgagugcaagcacuucgcccucacccacuacgccgcccagcccggcggcuacuacaacggcacccgcggcgaccgcaacaagcuccgccaccucaucuccgucaagcucggcaagauccccaccgucgagaacuccaucuuccacauggccgccugguccggcuccgccugccacgacggcaaggaguggaccuacaucggcgucgacggccccgacaacaacgcccuccucaaggucaaguacggcgaggccuacaccgacaccuaccacuccuacgccaacaagauccuccgcacccaggaguccgccugcaacugcaucggcggcaacugcuaccucaugaucaccgacggcuccgccuccggcgucuccgagugccgcuuccucaagauccgcgagggccgcaucaucaaggagaucuuccccaccggccgcgucaagcacaccgaggagugcaccugcggcuucgccuccaaccgcaccaucgagugcgccugccgcgacaacuccuacaccgccaagcgccccuucgucaagcucaacgucgagaccgacaccgccgagauccgccucaugugcaccgacaccuaccucgacaccccccgccccaacgacggcuccaucaccggccccugcgaguccgacggcgacaagggcuccggcggcaucaagggcggcuucguccaccagcgcauggaguccaagaucggccgcugguacucccgcaccauguccaagaccgagcgcaugggcaugggccucuacgucaaguacgacggcgaccccugggccgacuccgacgcccucgccuucuccggcgucauggucuccaugaaggagcccggcugguacuccuucggcuucgagaucaaggacaagaagugcgacguccccugcaucggcaucgagaugguccacgacggcggcaaggagaccuggcacuccgccgccaccgccaucuacugccucaugggcuccggccagcuccucugggacaccgucaccggcgucgacauggcccucuga

SEQ ID NO: 124936 - RNA, 1401 nt, Artificial Sequence
  derived and/or modified CDS sequence (opt2) from neuraminidase__InfluenzaB__AEQ49695
augcuccccuccaccauccagacccucacccucuuccucaccuccggcggcguccuccucucccucuacgucuccgccucccucuccuaccuccucuacuccgacauccuccucaaguucucccccaccgagaucaccgcccccaccaugccccucgacugcgccaacgccuccaacguccaggccgucaaccgcuccgccaccaagggcgucacccuccuccuccccgagcccgaguggaccuacccccgccucuccugccccggcuccaccuuccagaaggcccuccucaucuccccccaccgcuucggcgagaccaagggcaacuccgccccccucaucauccgcgagcccuucaucgccugcggccccaacgagugcaagcacuucgcccucacccacuacgccgcccagcccggcggcuacuacaacggcacccgcggcgaccgcaacaagcuccgccaccucaucuccgucaagcucggcaagauccccaccgucgagaacuccaucuuccacauggccgccugguccggcuccgccugccacgacggcaaggaguggaccuacaucggcgucgacggccccgacaacaacgcccuccucaaggucaaguacggcgaggccuacaccgacaccuaccacuccuacgccaacaagauccuccgcacccaggaguccgccugcaacugcaucggcggcaacugcuaccucaugaucaccgacggcuccgccuccggcgucuccgagugccgcuuccucaagauccgcgagggccgcaucaucaaggagaucuuccccaccggccgcgucaagcacaccgaggagugcaccugcggcuucgccuccaacaagaccaucgagugcgccugccgcgacaacuccuacaccgccaagcgccccuucgucaagcucaacgucgagaccgacaccgccgagauccgccucaugugcaccgacaccuaccucgacaccccccgccccaacgacggcuccaucaccggccccugcgaguccgacggcgacaagggcuccggcggcaucaagggcggcuucguccaccagcgcauggaguccaagaucggccgcugguacucccgcaccauguccaagaccgagcgcaugggcaugggccucuacgucaaguacgacggcgaccccugggccgacuccgacgcccucgccuucuccggcgucauggucuccaugaaggagcccggcugguacuccuucggcuucgagaucaaggacaagaagugcgacguccccugcaucggcaucgagaugguccacgacggcggcaaggagaccuggcacuccgccgccaccgccaucuacugccucaugggcuccggccagcuccucugggacaccgucaccggcgucgacauggcccucuga

SEQ ID NO: 124937 - RNA, 1401 nt, Artificial Sequence
  derived and/or modified CDS sequence (opt2) from neuraminidase__InfluenzaB__AEQ49697
augcuccccuccaccauccagacccucacccucuuccucaccuccggcggcguccuccucucccucuacgucuccgccucccucuccuaccuccucuacuccgacauccuccucaaguucucccccaccgagaucaccgcccccaccaugucccucgacugcgccaacgccuccaacguccaggccgucaaccgcuccgccaccaagggcgucaccuuccuccuccccgagcccgaguggaccuacccccgccucuccugccccggcuccaccuuccagaaggcccuccucaucuccccccaccgcuucggcgagaccaagggcaacuccgccccccucaucauccgcgagcccuucaucgccugcggccccaacgagugcaagcacuucgcccucacccacuacgccgcccagcccggcggcuacuacaacggcacccgcggcgaccgcaacaagcuccgccaccucaucuccgucaagcucggcaagauccccaccgucgagaacuccaucuuccacauggccgccugguccggcuccgccugccacgacggcaaggaguggaccuacaucggcgucgacggccccgacaacgacgcccuccucaaggucaaguacggcgaggccuacaccgacaccuaccacuccuacgccaacaagauccuccgcacccaggaguccgccugcaacugcaucggcggcaacugcuaccucaugaucaccgacggcuccgccuccggcgucuccgagugccgcuuccucaagauccgcgagggccgcaucaucaaggagaucuuccccaccggccgcgucaagcacaccgaggagugcaccugcggcuucgccuccaacaagaccaucgagugcgccugccgcgacaacuccuacaccgccaagcgccccuucgucaagcucaacgucgagaccgacaccgccgagauccgccucaugugcaccgacaccuaccucgacaccccccgccccgacgacggcuccaucaccggccccugcgaguccaacggcgacaagggcuccggcggcaucaagggcggcuucguccaccagcgcauggaguccaagaucggccgcugguacucccgcaccauguccaagaccgagcgcaugggcaugggccucuacgucaaguacgacggcgaccccugggccgacuccgacgcccucgccuucuccggcgucauggucuccaugaaggagcccggcugguacuccuucggcuucgagaucaaggacaagaagugcgacguccccugcaucggcaucgagaugguccacgacggcggcaaggagaccuggcacuccgccgccaccgccaucuacugccucaugggcuccggccagcuccucugggacaccgucaccggcgucgacauggcccucuga

SEQ ID NO: 124938 - RNA, 1401 nt, Artificial Sequence; identical to SEQ ID NO: 124937
  derived and/or modified CDS sequence (opt2) from neuraminidase__InfluenzaB__AEQ49698

SEQ ID NO: 124939 - RNA, 1401 nt, Artificial Sequence; identical to SEQ ID NO: 124937
  derived and/or modified CDS sequence (opt2) from neuraminidase__InfluenzaB__AEQ49699

SEQ ID NO: 124940 - RNA, 1401 nt, Artificial Sequence; identical to SEQ ID NO: 124937
  derived and/or modified CDS sequence (opt2) from neuraminidase__InfluenzaB__AEQ49700

SEQ ID NO: 124941 - RNA, 1401 nt, Artificial Sequence; identical to SEQ ID NO: 124934
  derived and/or modified CDS sequence (opt2) from neuraminidase__InfluenzaB__AEQ49701

SEQ ID NO: 124942 - RNA, 1401 nt, Artificial Sequence; identical to SEQ ID NO: 124937
  derived and/or modified CDS sequence (opt2) from neuraminidase__InfluenzaB__AEQ49702

SEQ ID NO: 124943 - RNA, 1401 nt, Artificial Sequence; identical to SEQ ID NO: 124934
  derived and/or modified CDS sequence (opt2) from neuraminidase__InfluenzaB__AEQ49703

SEQ ID NO: 124944 - RNA, 1401 nt, Artificial Sequence; identical to SEQ ID NO: 124937
  derived and/or modified CDS sequence (opt2) from neuraminidase__InfluenzaB__AEQ49705

SEQ ID NO: 124945 - RNA, 1401 nt, Artificial Sequence
  derived and/or modified CDS sequence (opt2) from neuraminidase__InfluenzaB__AEQ49706
augcuccccuccaccauccagaugcucacccucuuccucacccucggcggcguccuccucucccucuacgucuccgccucccucuccuaccuccucuaccucgacauccuccucaaguucccccccaccgagaucaccgcccccaccaugccccucgacugcgccaacgccuccaacguccaggccgucaaccgcuccgccaccaagggcgucaccuuccuccuccccgagcccgaguggaccuacccccgccucuccugccccggcuccaccuuccagaaggcccuccucaucuccccccaccgcuucggcgagaccaagggcaacuccgccccccucaucauccgcgagcccuucaucgccugcggccccaaggagugcaagcacuucgcccucacccacuacgccgcccagcccggcggcuacuacaacggcacccgcggcgaccgcaacaagcuccgccaccucaucuccgucaagcucggcaagauccccaccgucgagaacuccaucuuccacauggccgccugguccggcuccgccugccacgacggcaaggaguggaccuacaucggcgucgacggccccgacaacaacgcccuccucaagaucaaguacggcgaggccuucaccgacaccuaccacuccuacgccaacaacauccuccgcacccaggaguccgccugcaacugcaucggcggcaacugcuaccucaugaucaccgacggcuccgccuccggcgucuccgagugccgcuuccucaagauccgcgagggccgcaucaucaaggagaucuuccccaccggccgcgucaagcacaccgaggagugcaccugcggcuucgccuccaacaagaccaucgagugcgccugccgcgacaacuccuacaccgccaagcgccccuucgucaagcucaacgucgagaccgacaccgccgagauccgccucaugugcaccgacaccuaccucgacaccccccgccccgacgacggcuccaucaccggccccugcgaguccaacggcgacaagggcuccggcggcaucaagggcggcuucguccaccagcgcauggccuccaagaucggccgcugguacucccgcaccauguccaagaccgagcgcaugggcaugggccucuacgucaaguacgacggcgaccccugggccgacuccgacgcccucgccuucuccggcgucauggucuccaugaaggagcccggcugguacuccuucggcuucgagaucaaggacaagaagugcgacguccccugcaucggcaucgagaugguccacgacggcggcaaggagaccuggcacuccgccgccaccgccaucuacugccucaugggcuccggccagcuccucugggacaccgucaccggcgucaacauggcccucuga

SEQ ID NO: 124946 - RNA, 1401 nt, Artificial Sequence; identical to SEQ ID NO: 124937
  derived and/or modified CDS sequence (opt2) from neuraminidase__InfluenzaB__AEQ49707

SEQ ID NO: 124947 - RNA, 1401 nt, Artificial Sequence; identical to SEQ ID NO: 124937
  derived and/or modified CDS sequence (opt2) from neuraminidase__InfluenzaB__AEQ49708

SEQ ID NO: 124948 - RNA, 1401 nt, Artificial Sequence
  derived and/or modified CDS sequence (opt2) from neuraminidase__InfluenzaB__AEQ49709
augcuccccuccaccauccagacccucacccucuuccucaccuccggcggcguccuccucucccucuacgucuccgcccuccucuccuaccuccucuacuccgacauccuccucaaguucucccccaccgagaucaccgcccccaccaugucccucgacugcgccaacgccuccaacguccaggccgucaaccgcuccgccaccaagggcgucaccuuccuccuccccgagcccgaguggaccuacccccgccucuccugccccggcuccaccuuccagaaggcccuccucaucuccccccaccgcuucggcgagaccaagggcaacuccgccccccucaucauccgcgagcccuucaucgccugcggccccaacgagugcaagcacuucgcccucacccacuacgccgcccagcccggcggcuacuacaacggcacccgcggcgaccgcaacaagcuccgccaccucaucuccgucaagcucggcaagauccccaccgucgagaacuccaucuuccacauggccgccugguccggcuccgccugccacgacggcaaggaguggaccuacaucggcgucgacggccccgacaacgacgcccuccucaaggucaaguacggcgaggccuacaccgacaccuaccacuccuacgccaacaagauccuccgcacccaggaguccgccugcaacugcaucggcggcaacugcuaccucaugaucaccgacggcuccgccuccggcgucuccgagugccgcuuccucaagauccgcgagggccgcaucaucaaggagaucuuccccaccggccgcgucaagcacaccgaggagugcaccugcggcuucgccuccaacaagaccaucgagugcgccugccgcgacaacuccuacaccgccaagcgccccuucgucaagcucaacgucgagaccgacaccgccgagauccgccucaugugcaccgacaccuaccucgacaccccccgccccgacgacggcuccaucaccggccccugcgaguccaacggcgacaagggcuccggcggcaucaagggcggcuucguccaccagcgcauggaguccaagaucggccgcugguacucccgcaccauguccaagaccgagcgcaugggcaugggccucuacgucaaguacgacggcgaccccugggccgacuccgacgcccucgccuucuccggcgucauggucuccaugaaggagcccggcugguacuccuucggcuucgagaucaaggacaagaagugcgacguccccugcaucggcaucgagaugguccacgacggcggcaaggagaccuggcacuccgccgccaccgccaucuacugccucaugggcuccggccaccuccucugggacaccgucaccggcgucgacauggcccucuga

SEQ ID NO: 124949 - RNA, 1401 nt, Artificial Sequence; identical to SEQ ID NO: 124911
  derived and/or modified CDS sequence (opt2) from neuraminidase__InfluenzaB__AEQ49710

SEQ ID NO: 124950 - RNA, 1401 nt, Artificial Sequence; identical to SEQ ID NO: 124908
  derived and/or modified CDS sequence (opt2) from neuraminidase__InfluenzaB__AER27042

SEQ ID NO: 124951 - RNA, 1401 nt, Artificial Sequence; identical to SEQ ID NO: 124936
  derived and/or modified CDS sequence (opt2) from neuraminidase__InfluenzaB__AER27053

SEQ ID NO: 124952 - RNA, 1401 nt, Artificial Sequence; identical to SEQ ID NO: 124908
  derived and/or modified CDS sequence (opt2) from neuraminidase__InfluenzaB__AER27064

SEQ ID NO: 124953 - RNA, 1401 nt, Artificial Sequence; identical to SEQ ID NO: 124911
  derived and/or modified CDS sequence (opt2) from neuraminidase__InfluenzaB__AET43128

SEQ ID NO: 124954 - RNA, 1401 nt, Artificial Sequence; identical to SEQ ID NO: 124911
  derived and/or modified CDS sequence (opt2) from neuraminidase__InfluenzaB__AET43139

SEQ ID NO: 124955 - RNA, 1401 nt, Artificial Sequence
  derived and/or modified CDS sequence (opt2) from neuraminidase__InfluenzaB__AET43150
augcuccccuccaccauccagacccucacccucuuccucaccuccggcggcguccuccucucccucuacgucuccgccucccucuccuaccuccucuacuccgacauccuccucaaguucucccccaaggagaucaccgcccccaccaugccccucgacugcgccaacgccuccaacguccaggccgucaaccacuccgccaccaagggcgucacccuccuccuccccgagcccgaguggaccuacccccgccucuccugccccggcuccaccuuccagaaggcccuccucaucuccccccaccgcuucggcgagaccaagggcaacuccgccccccucaucauccgcgagcccuucaucgccugcggccccaacgagugcaagcacuucgcccucacccacuacgccgcccagcccggcggcuacuacaacggcacccgcggcgaccgcaacaagcuccgccaccucaucuccgucaagcucggcaagauccccaccgucgagaacuccaucuuccacauggccgccugguccggcuccgccugccacgacggcaaggaguggaccuacaucggcgucgacggccccgacaacaacgcccuccucaaggucaaguacggcgaggccuacaccgacaccuaccacuccuacgccaacaagauccuccgcacccaggaguccgccugcaacugcaucggcggcaacugcuaccucaugaucaccgacggcuccgccuccggcgucuccgagugccgcuuccucaagauccgcgagggccgcaucaucaaggagaucuuccccaccggccgcgucaagcacaccgaggagugcaccugcggcuucgccuccaacaagaccaucgagugcgccugccgcgacaacuccuacaccgccaagcgccccuucgucaagcucaacgucgagaccgacaccgccgagauccgccucaugugcaccgacaccuaccucgacaccccccgccccgacgacggcuccaucaccggccccugcgaguccaacggcgacaagggcuccggcggcaucaagggcggcuucguccaccagcgcauggaguccaagaucggccgcugguacucccgcaccauguccaagaccgagcgcaugggcaugggccucuacgucaaguacgacggcgaccccugggccgacuccgacgcccucaccuucuccggcgucauggucuccaugaaggagcccggcugguacuccuucggcuucgagaucaaggacaagaagugcgacguccccugcaucggcaucgagaugguccacgacggcggcaaggagaccuggcacuccgccgccaccgccaucuacugccucaugggcuccggccagcuccucugggacaccgucaccggcgucgacauggcccucuga

SEQ ID NO: 124956 - RNA, 1401 nt, Artificial Sequence; identical to SEQ ID NO: 124911
  derived and/or modified CDS sequence (opt2) from neuraminidase__InfluenzaB__AET43161

SEQ ID NO: 124957 - RNA, 1401 nt, Artificial Sequence; identical to SEQ ID NO: 124911
  derived and/or modified CDS sequence (opt2) from neuraminidase__InfluenzaB__AET43172

SEQ ID NO: 124958 - RNA, 1401 nt, Artificial Sequence; identical to SEQ ID NO: 124911
  derived and/or modified CDS sequence (opt2) from neuraminidase__InfluenzaB__AET43183

SEQ ID NO: 124959 - RNA, 1401 nt, Artificial Sequence; identical to SEQ ID NO: 124911
  derived and/or modified CDS sequence (opt2) from neuraminidase__InfluenzaB__AET43194

SEQ ID NO: 124960 - RNA, 1401 nt, Artificial Sequence; identical to SEQ ID NO: 124911
  derived and/or modified CDS sequence (opt2) from neuraminidase__InfluenzaB__AET43216

SEQ ID NO: 124961 - RNA, 1401 nt, Artificial Sequence; identical to SEQ ID NO: 124911
  derived and/or modified CDS sequence (opt2) from neuraminidase__InfluenzaB__AET43227

SEQ ID NO: 124962 - RNA, 1401 nt, Artificial Sequence
  derived and/or modified CDS sequence (opt2) from neuraminidase__InfluenzaB__AET50947
augcuccccuccaccauccagacccucacccucuuccucaccuccggcggcguccuccucucccucuacgucuccgccucccucuccuaccuccucuacuccgacauccuccucaaguucucccccaaggagaucaccgcccccaccaugccccucgacugcgccaacgccuccaacguccaggccgucaaccacuccgccaccaagggcgucacccuccuccuccccgagcccgaguggaccuacccccgccucuccugccccggcuccaccuuccagaaggcccuccucaucuccccccaccgcuucggcgagaccaagggcaacuccgccccccucaucauccgcgagcccuucaucgccugcggccccaacgagugcaagcacuucgcccucacccacuacgccgcccagcccggcggcuacuacaacggcacccgcggcgaccgcaacaagcuccgccaccucaucuccgucaagcucggcaagauccccaccgucgagaacuccaucuuccacauggccgccugguccggcuccgccugccacgacggcaaggaguggaccuacaucggcgucgacggccccgacaacaacgcccuccucaaggucaaguacggcgaggccuacaccgacaccuaccacuccuacgccaacaagauccuccgcacccaggaguccgccugcaacugcaucggcggcaacugcuaccucaugaucaccgacggcuccgccuccggcgucuccgagugccgcuuccucaagauccgcgagggccgcaucaucaaggagaucuuccccaccggccgcgucaagcacaccgaggagugcaccugcggcuucgccuccaacaagaccaucgagugcgccugccgcgacaacuccuacaccgccaagcgccccuucgucaagcucaacgucgagaccgacaccgccgagauccgccucaugugcaccgacaccuaccucgacaccccccgccccgacgacggcuccaucaccggccccugcgaguccaacggcgacaagggcuccggcggcaucaagggcggcuucguccaccagcgcauggaguccaagaucggccgcugguacucccgcaccauguccaagaccgagcgcaugggcaugggccucuacgucaaguacgacggcgaccccugggccgacuccgacgcccucgccuucuccggcgucaugaucuccaugaaggagcccggcugguacuccuucggcuucgagaucaaggacaagaagugcgacguccccugcaucggcaucgagaugguccacgacggcggcaaggagaccuggcacuccgccgccaccgccaucuacugccucaugggcuccggccagcuccucugggacaccgucaccggcgucgacauggcccucuga

SEQ ID NO: 124963 - RNA, 1401 nt, Artificial Sequence
  derived and/or modified CDS sequence (opt2) from neuraminidase__InfluenzaB__AET50958
augcuccccuccaccauccagacccucacccucuuccucaccuccggcggcguccuccucucccucuacgucuccgccucccucuccuaccuccucuacuccgacauccuccucaaguucucccccaaggagaucaccgcccccaccaugccccucgacugcgccaacgccuccaacguccaggccgucaaccacuccgccaccaagggcgucacccuccuccuccccgagcucgaguggaccuacccccgccucuccugccccggcuccaccuuccagaaggcccuccucaucuccccccaccgcuucggcgagaccaagggcaacuccgccccccucaucauccgcgagcccuucaucgccugcggccccaacgagugcaagcacuucgcccucacccacuacgccgcccagcccggcggcuacuacaacggcacccgcggcgaccgcaacaagcuccgccaccucaucuccgucaagcucggcaagauccccaccgucgagaacuccaucuuccacauggccgccugguccggcuccgccugccacgacggcaaggaguggaccuacaucggcgucgacggccccgacaacaacgcccuccucaaggucaaguacggcgaggccuacaccgacaccuaccacuccuacgccaacaagauccuccgcacccaggaguccgccugcaacugcaucggcggcaacugcuaccucaugaucaccgacggcuccgccuccggcgucuccgagugccgcuuccucaagauccgcgagggccgcaucaucaaggagaucuuccccaccggccgcgucaagcacaccgaggagugcaccugcggcuucgccuccaacaagaccaucgagugcgccugccgcgacaacuccuacaccgccaagcgccccuucgucaagcucaacgucgagaccgacaccgccgagauccgccucaugugcaccgacaccuaccucgacaccccccgccccgacgacggcuccaucaccggccccugcgaguccaacggcgacaagggcuccggcggcaucaagggcggcuucguccaccagcgcauggaguccaagaucggccgcugguacucccgcaccauguccaagaccgagcgcaugggcaugggccucuacgucaaguacgacggcgaccccugggccgacuccgacgcccucgccuucuccggcgucauggucuccaugaaggagcccggcugguacuccuucggcuucgagaucaaggacaagaagugcgacguccccugcaucggcaucgagaugguccacgacggcggcaaggagaccuggcacuccgccgccaccgccaucuacugccucaugggcuccggccagcuccucugggacaccgucaccggcgucgacauggcccucuga

SEQ ID NO: 124964 - RNA, 1401 nt, Artificial Sequence; identical to SEQ ID NO: 124911
  derived and/or modified CDS sequence (opt2) from neuraminidase__InfluenzaB__AET50969

SEQ ID NO: 124965 - RNA, 1401 nt, Artificial Sequence; identical to SEQ ID NO: 124911
  derived and/or modified CDS sequence (opt2) from neuraminidase__InfluenzaB__AET50980

SEQ ID NO: 124966 - RNA, 1401 nt, Artificial Sequence; identical to SEQ ID NO: 124911
  derived and/or modified CDS sequence (opt2) from neuraminidase__InfluenzaB__AET74259

SEQ ID NO: 124967 - RNA, 1401 nt, Artificial Sequence; identical to SEQ ID NO: 124911
  derived and/or modified CDS sequence (opt2) from neuraminidase__InfluenzaB__AET74270

SEQ ID NO: 124968 - RNA, 1401 nt, Artificial Sequence; identical to SEQ ID NO: 124962
  derived and/or modified CDS sequence (opt2) from neuraminidase__InfluenzaB__AET74281

SEQ ID NO: 124969 - RNA, 1401 nt, Artificial Sequence; identical to SEQ ID NO: 124911
  derived and/or modified CDS sequence (opt2) from neuraminidase__InfluenzaB__AET74292

SEQ ID NO: 124970 - RNA, 1401 nt, Artificial Sequence; identical to SEQ ID NO: 124911
  derived and/or modified CDS sequence (opt2) from neuraminidase__InfluenzaB__AET74303

SEQ ID NO: 124971 - RNA, 1401 nt, Artificial Sequence; identical to SEQ ID NO: 124911
  derived and/or modified CDS sequence (opt2) from neuraminidase__InfluenzaB__AET74314

SEQ ID NO: 124972 - RNA, 1401 nt, Artificial Sequence; identical to SEQ ID NO: 124911
  derived and/or modified CDS sequence (opt2) from neuraminidase__InfluenzaB__AET74333

SEQ ID NO: 124973 - RNA, 1401 nt, Artificial Sequence
  derived and/or modified CDS sequence (opt2) from neuraminidase__InfluenzaB__AET74344
augcuccccuccaccauccagacccucacccucuuccucaccuccggcggcguccuccucucccucuacgucuccgccucccucuccuaccuccucuacuccgacauccuccucaaguucucccccaaggagaucaccgcccccaccaugccccucgacugcgccaacgccuccaacguccaggccgucaaccacuccgccaccaagggcgucacccuccuccuccccgagcccgaguggaccuacccccgccucuccugccccggcuccaccuuccagaaggcccuccucaucuccccccaccgcuucggcgagaccaagggcaacuccgccccccucaucauccgcgagcccuucaucgccugcggccccaacgagugcaagcacuucgcccucacccacuacgccgcccagcccggcggcuacuacaacggcacccgcggcgaccgcaacaagcuccgccaccucaucuccgucaagcucggcaagauccccaccgucgagaacuccaucuuccacauggccgccugguccggcuccgccugccacgacggcaaggaguggaccuacaucggcgucgacggccccgacaacaacgcccuccucaaggucaaguacggcgaggccuacaccgacaccuaccacuccuacgccaacaagauccuccgcacccaggaguccgccugcaacugcaucggcggcaacugcuaccucaugaucaccgacggcuccgccuccggcgucuccgagugccgcuuccucaagauccgcgagggccgcaucaucaaggagaucuuccccaccggccgcgucaagcacaccgaggagugcaccugcggcuucgccuccaacaagaccaucgagugcgccugccgcgacaacuccuacaccgccaagcgccccuucgucaagcucaacgucgaggccgacaccgccgagauccgccucaugugcaccgacaccuaccucgacaccccccgccccgacgacggcuccaucaccggccccugcgaguccaacggcgacaagggcuccggcggcaucaagggcggcuucguccaccagcgcauggaguccaagaucggccgcugguacucccgcaccauguccaagaccgagcgcaugggcaugggccucuacgucaaguacgacggcgaccccugggccgacuccgacgcccucgccuucuccggcgucauggucuccaugaaggagcccggcugguacuccuucggcuucgagaucaaggacaagaagugcgacguccccugcaucggcaucgagaugguccacgacggcggcaaggagaccuggcacuccgccgccaccgccaucuacugccucaugggcuccggccagcuccucugggacaccgucaccggcgucgacauggcccucuga

SEQ ID NO: 124974 - RNA, 1401 nt, Artificial Sequence; identical to SEQ ID NO: 124911
  derived and/or modified CDS sequence (opt2) from neuraminidase__InfluenzaB__AET74355

SEQ ID NO: 124975 - RNA, 1404 nt, Artificial Sequence
  derived and/or modified CDS sequence (opt2) from neuraminidase__InfluenzaB__AEY75594
augcuccccuccaccauccagaugcucacccucuuccucaccuccggcggcguccuccucucccucuacgucuccgccucccucuccuaccuccucuacuccgacauccuccucaaguucucccccaccgagaucaccgcccccaccaugccccucgacugcgccaacgccuccaacguccacgccgucaaccgcuccgccaccaagggcgucaccuuccuccuccuccccgagcccgaguggaccuacccccgccucuccugccccggcuccaccuuccagaaggcccuccucaucuccccccaccgcuucggcgagaccaagggcaacuccgccccccucaucauccgcgagcccuucaucgccugcggccccaacgagugcaagcacuucgcccucacccacuacgccgcccagcccggcggcuacuacaacggcacccgcggcgaccgcaacaagcuccgccaccucaucuccgucaagcucggcaagauccccaccgucgagaacuccaucuuccacauggccgccugguccggcuccgccugccacgacggcaaggaguggaccuacaucggcgucgacggccccgacaacaacgcccuccucaagaucaaguacggcgaggccuacaccgacaccuaccacuccuacgccaacaacauccuccgcacccaggaguccgccugcaacugcaucggcggcaacugcuaccucaugaucaccgacggcuccgccuccggcgucuccgagugccgcuuccucaagauccgcgagggccgcaucaucaaggagaucuuccccaccggccgcgucaagcacaccgaggagugcaccugcggcuucgccuccaacaagaccaucgagugcgccugccgcgacaacuccuacaccgccaagcgccccuucgucaagcucaacgucgagaccgacaccgccgagauccgccucaugugcaccgacaccuaccucgacaccccccgccccgacgacggcuccaucaccggccccugcgaguccaacggcgacaagggcuccggcggcaccaagggcggcuucguccaccagcgcauggccuccaagaucggccgcugguacucccgcaccauguccaagaccgagcgcaagggcaugggccucuacgucaaguacgacggcgaccccuggaccgacuccgacgcccucgccuuccgcggcgucauggucuccaugaaggagcccggcugguacuccuucggcuucgagaucaaggacaagaagugcgacguccccugcaucggcaucgagaugguccacgacggcggcaaggagaccuggcacuccgccgccaccgccaucuacugccucaugggcuccggccagcuccucugggacaccgucaccggcgucgacauggcccucuga

SEQ ID NO: 124976 - RNA, 1401 nt, Artificial Sequence
  derived and/or modified CDS sequence (opt2) from neuraminidase__InfluenzaB__AFA45223
augcuccccuccaccauccagacccucacccucuuccucaccuccggcggcguccuccucucccucuacgucuccgcccuccucuccuaccuccucuacuccgacauccuccccaaguucucccccaccgagaucaccgcccccaccaugucccucgacugcgccaacgccuccaacguccaggccgucaaccgcuccgccaccaagggcgucaccuuccuccucuccgagcccgaguggaccuacccccgccucuccugccccggcuccaccuuccagaaggcccuccucaucuccccccaccgcuucggcgagaccaagggcaacuccgccccccucaucauccgcgagcccuucaucgccugcggccccaacgagugcaagcacuucgcccucacccacuacgccgcccagcccggcggcuacuacaacggcacccgcggcgaccgcaacaagcuccgccaccucaucuccgucaagcucggcaagauccccaccgucgagaacuccaucuuccacauggccgccugguccggcuccgccugccacgacggcaaggaguggaccuacaucggcgucgacggccccgacaacgacgcccuccucaaggucaaguacggcgaggccuacaccgacaccuaccacuccuacgccaacaagauccuccgcacccaggaguccgccugcaacugcaucggcggcaacugcuaccucaugaucaccgacggcuccgccuccggcgucuccgagugccgcuuccucaagauccgcgagggccgcaucaucaaggagaucuuccccaccggccgcgucaagcacaccgaggagugcaccugcggcuucgccuccaacaagaccaucgagugcgccugccgcgacaacuccuacaccgccaagcgccccuucgucaagcucaacgucgagaccgacaccgccgagauccgccucaugugcaccgacaccuaccucgacaccccccgccccgacgacggcuccaucaccggccccugcgaguccaacggcgacaagggcuccggcggcaucaagggcggcuucguccaccagcgcauggaguccaagaucggccgcugguacucccgcaccauguccaagaccgagcgcaugggcaugggccucuacgucaaguacgacggcgaccccugggccgacuccgacgcccucgccuucuccggcgucauggucuccaugaaggagcccggcugguacuccuucggcuucgagaucaaggacaagaagugcgacguccccugcaucggcaucgagaugguccacgacggcggcaaggagaccuggcacuccgccgccaccgccaucuacugccucaugggcuccggccagcuccucugggacaccgucaccggcgucgacauggcccucuga

SEQ ID NO: 124977 - RNA, 1401 nt, Artificial Sequence
  derived and/or modified CDS sequence (opt2) from neuraminidase__InfluenzaB__AFA45226
augcuccccuccaccauccagacccucacccucuuccucaccuccggcggcguccuccucucccucuacgucuccgccucccucuccuaccuccucuacuccgacauccuccucaaguucucccccaccgagaccaccgcccccaccaugucccucgacugcgccaacgccuccaacguccaggccgucaaccgcuccgccaccaagggcgucaccuuccuccuccccgagcccgaguggaccuacccccgccucuccugccccggcuccaccuuccagaaggcccuccucaucuccccccaccgcuucggcgagaccaagggcaacuccgccccccucaucauccgcgagcccuucaucgccugcggccccaacgagugcaagcacuucgcccucacccacuacgccgcccagcccggcggcuacuacaacggcacccgcggcgaccgcaacaagcuccgccaccucaucuccgucaagcucggcaagguccccaccgucgagaacuccaucuuccacauggccgccugguccggcuccgccugccacgacggcaaggaguggaccuacaucggcgucgacggccccgacaacgacgcccuccucaaggucaaguacggcgaggccuacaccgacaccuaccacuccuacgccaacaagauccuccgcacccaggaguccgccugcaacugcaucggcggcaacugcuaccucaugaucaccgacggcuccgccuccggcgucuccgagugccgcuuccucaagauccgcgagggccgcaucaucaaggagaucuuccccaccggccgcgucaagcacaccgaggagugcaccugcggcuucgccuccaacaagaccaucgagugcgccugccgcgacaacuccuacaccgccaagcgccccuucgucaagcucaacgucgagaccgacaccgccgagauccgccucaugugcaccgacaccuaccucgacaccccccgccccgacgacggcuccaucaccggccccugcgaguccaacggcgacaagggcuccggcggcaucaagggcggcuucguccaccagcgcauggaguccaagaucggccgcugguacucccgcaccauguccaagaccgagcgcaugggcaugggccucuacgucaaguacgacggcgaccccugggccgacuccgacgcccucgccuucuccggcgucauggucuccaugaaggagcccggcugguacuccuucggcuucgagaucaaggacaagaagugcgacguccccugcaucggcaucgagaugguccacgacggcggcaagggcaccuggcacuccgccgccaccgccaucuacugccucaugggcuccggccagcuccucugggacaccgucaccggcgucgacauggcccucuga

SEQ ID NO: 124978 - RNA, 1401 nt, Artificial Sequence
  derived and/or modified CDS sequence (opt2) from neuraminidase__InfluenzaB__AFA45229
augcuccccuccaccauccagacccucacccucuuccucaccuccggcggcguccuccucucccucuacgucuccgcccuccucuccuaccuccucuacuccgacauccuccucaaguucucccccaccgagaucaccgcccccaccaugccccucgacugcgccaacgccuccaacguccaggccgucaaccgcuccgccaccaagggcgucaccuuccuccuccccgagcccgaguggaccuacccccgccucuccugccccggcuccaccuuccagaaggcccuccucaucuccccccaccgcuucggcgagaccaagggcaacuccgccccccucaucauccgcgagcccuucaucgccugcggccccaacgagugcaagcacuucgcccucacccacuacgccgcccagcccggcggcuacuacaacggcacccgcggcgaccgcaacaagcuccgccaccucaucuccgucaagcucggcaagauccccaccgucgagaacuccaucuuccacauggccgccugguccggcuccgccugccacgacggcaaggaguggaccuacaucggcgucgacggccccgacaacgacgcccuccucaaggucaaguacggcgaggccuacaccgacaccuaccacuccuacgccaacaagauccuccgcacccaggaguccgccugcaacugcaucggcggcaacugcuaccucaugaucaccgacggcuccgccuccggcgucuccgagugccgcuuccucaagauccgcgagggccgcaucaucaaggagaucuuccccaccggccgcgucaagcacaccgaggagugcaccugcggcuucgccuccaacaagaccaucgagugcgccugccgcgacaacuccuacaccgccaagcgccccuucgucaagcucaacgucgagaccgacaccgccgagauccgccucaugugcaccgacaccuaccucgacaccccccgccccgacgacggcuccaucaccggccccugcgaguccaacggcgacaagggcuccggcggcaucaagggcggcuucguccaccagcgcauggaguccaagaucggccgcugguacucccgcaccauguccaagaccgagcgcaugggcaugggccucuacgucaaguacgacggcgaccccugggccgacuccgacgcccucgccuucuccggcgucauggucuccaugaaggagcccggcugguacuccuucggcuucgagaucaaggacaagaagugcgacguccccugcaucggcaucgagaugguccacgacggcggcaaggagaccuggcacuccgccgccaccgccaucuacugccucaugggcuccggccagcuccucugggacaccgucaccggcgucgacauggcccucuga

SEQ ID NO: 124979 - RNA, 1401 nt, Artificial Sequence; identical to SEQ ID NO: 124931
  derived and/or modified CDS sequence (opt2) from neuraminidase__InfluenzaB__AFA45235

SEQ ID NO: 124980 - RNA, 1401 nt, Artificial Sequence
  derived and/or modified CDS sequence (opt2) from neuraminidase__InfluenzaB__AFA45238
augcuccccuccaccauccagacccucacccucuuccucaccuccggcggcguccuccucucccucuacgucuccgccucccucuccuaccuccucuacuccgacauccuccucaaguucucccccaccaagaccaccgcccccaccaugucccucgacugcgccaacgccuccaacguccaggccgucaaccgcuccgccaccaagggcgucaccuuccuccuccccgagcccgaguggaccuacccccgccucuccugccccggcuccaccuuccagaaggcccuccucaucuccccccaccgcuucggcgagaccaagggcaacuccgccccccucaucauccgcgagcccuucaucgccugcggccccaacgagugcaagcacuucgcccucacccacuacgccgcccagcccggcggcuacuacaacggcacccgcggcgaccgcaacaagcuccgccaccucaucuccgucaagcucggcaagauccccaccgucgagaacuccaucuuccacauggccgccugguccggcuccgccugccacgacggcaaggaguggaccuacaucggcgucgacggccccgacaacgacgcccuccucaaggucaaguacggcgaggccuacaccgacaccuaccacuccuacgccaacaagauccuccgcacccaggaguccgccugcaacugcaucggcggcaacugcuaccucaugaucaccgacggcuccgccuccggcgucuccgagugccgcuuccucaagauccgcgagggccgcaucaucaaggagaucuuccccaccggccgcgucaagcacaccgaggagugcaccugcggcuucgccuccaacaagaccaucgagugcgccugccgcgacaacuccuacaccgccaagcgccccuucgucaagcucaacgucgagaccgacaccgccgagauccgccucaugugcaccgacaccuaccucgacaccccccgccccgacgacggcuccaucaccggccccugcgaguccaacggcgacaagggcuccggcggcaucaagggcggcuucguccaccagcgcauggaguccaagaucggccgcugguacucccgcaccauguccaagaccgagcgcaugggcaugggccucuacgucaaguacgacggcgaccccugggccgacuccgacgcccucgccuucuccggcgucauggucuccaugaaggagcccggcugguacuccuucggcuucgagaucaaggacaagaagugcgacguccccugcaucggcaucgagaugguccacgacggcggcaaggagaccuggcacuccgccgccaccgccaucuacugccucaugggcuccggccagcuccucugggacaccgucaccggcgucgacauggcccucuga

SEQ ID NO: 124981 - RNA, 1401 nt, Artificial Sequence
  derived and/or modified CDS sequence (opt2) from neuraminidase__InfluenzaB__AFA45241
augcuccccuccaccauccagacccucacccucuuccucaccuccggcggcguccuccucucccucuacgucuccgccucccucuccuaccuccucuacuccgacauccuccucaaguucucccccaccgagaucaccgcccccaccaugccccucgacugcgccaacgccuccaacguccaggccgucaaccgcuccgccaccaagggcgucaucuuccuccuccccgagcccgaguggaccuacccccgccucuccugccccggcuccaccuuccagaaggcccuccucaucuccccccaccgcuucggcgagaccaagggcaacuccgccccccucaucauccgcgagcccuucaucgccugcggccccaacgagugcaagcacuucgcccucacccacuacgccgcccagcccggcggcuacuacaacggcacccgcggcgaccgcaacaagcuccgccaccucaucuccgucaagcucggcaagauccccaccgucgagaacuccaucuuccacauggccgccugguccggcuccgccugccacgacggcaaggaguggaccuacaucggcgucgacggccccgacaacaacgcccuccucaaggucaaguacggcgaggccuacaccgacaccuaccacuccuacgccaacaagauccuccgcacccaggaguccgccugcaacugcaucggcggcaacugcuaccucaugaucaccgacggcuccgccuccggcgucuccgagugccgcuuccucaagauccgcgagggccgcaucaucaaggagaucuuccccaccggccgcgucaagcacaccgaggagugcaccugcggcuucgccuccaacaagaccaucgagugcgccugccgcgacaacuccuacaccgccaagcgccccuucgucaagcucaacgucgagaccgacaccgccgagauccgccucaugugcaccgacaccuaccucgacaccccccgccccgacgacggcuccaucaccggccccugcgaguccaacggcgacaagggcuccggcggcaucaagggcggcuucguccaccagcgcauggaguccaagaucggccgcugguacucccgcaccauguccaagaccgagcgcaugggcaugggccucuacgucaaguacgacggcgaccccugggccgacuccgacgcccucaccuucuccggcgucauggucuccaugaaggagcccggcugguacuccuucggcuucgagaucaaggacaagaagugcgacguccccugcaucggcaucgagaugguccacgacggcggcaaggagaccuggcacuccgccgccaccgccaucuacugccucaugggcuccggccagcuccucugggacaccgucaccggcgucgacauggcccucuga

SEQ ID NO: 124982 - RNA, 1401 nt, Artificial Sequence
  derived and/or modified CDS sequence (opt2) from neuraminidase__InfluenzaB__AFA45244
augcuccccuccaccauccagacccucacccucuuccucaccuccggcggcguccuccucucccucuacgucuccgccucccucuccuaccuccucuacuccgacauccuccucaaguucucccccaccgagaccaccgcccccaccaugucccucgacugcgccaacgccuccaacguccaggccgucaaccgcuccgccaccaagggcgucaccuuccuccuccccgagcccgaguggaccuacccccgccucuccugccccggcuccaccuuccagaaggcccuccucaucuccccccaccgcuucggcgagaccaagggcaacuccgccccccucaucauccgcgagcccuucaucgccugcggccccaacgagugcaagcacuucgcccucacccacuacgccgcccagcccggcggcuacuacaacggcacccgcggcgaccgcaacaagcuccgccaccucaucuccgucaagcucggcaagauccccaccgucgagaacuccaucuuccacauggccgccugguccggcuccgccugccacgacggcaaggaguggaccuacaucggcgucgacggccccgacaacgacgcccuccucaaggucaaguacggcgaggccuacaccgacaccuaccacuccuacgccaacaagauccuccgcacccaggaguccgccugcaacugcaucggcggcaacugcuaccucaugaucaccgacggcuccgccuccggcgucuccgagugccgcuuccucaagauccgcgagggccgcaucaucaaggagaucuuccccaccggccgcgucaagcacaccgaggagugcaccugcggcuucgccuccaacaagaccaucgagugcgccugccgcgacaacuccuacaccgccaagcgccccuucgucaagcucaacgucgagaccgacaccgccgagauccgccucaugugcaccgacaccuaccucgacaccccccgccccgacgacggcuccaucaccggccccugcgaguccaacggcgacaagggcuccggcggcaucaagggcggcuucguccaccagcgcauggaguccaagaucggccgcugguacucccgcaccauguccaagaccgagcgcaugggcaugggccucuacgucaaguacgacggcgaccccugggccgacuccgacgcccucgccuucuccggcgucauggucuccaugaaggagcccggcugguacuccuucggcuucgagaucaaggacaagaagugcgacguccccugcaucggcaucgagaugguccacgacggcggcaagaagaccuggcacuccgccgccaccgccaucuacugccucaugggcuccggccagcuccucugggacaccgucaccggcgucgacauggcccucuga

SEQ ID NO: 124983 - RNA, 1401 nt, Artificial Sequence
  derived and/or modified CDS sequence (opt2) from neuraminidase__InfluenzaB__AFA45247
augcuccccuccaccauccagacccucacccucuuccucaccuccggcggcguccuccucucccucuacgucuccgccucccucuccuaccuccucuacuccgacauccuccucaaguucuccaccaccgagaucaccgcccccaccaugccccucgacugcgccaacgccuccaacguccaggccgucaaccgcuccgccaccaagggcgucacccuccuccuccccgagcccgaguggaccuacccccgccucuccugccccggcuccaccuuccagaaggcccuccucaucuccccccaccgcuucggcgagaccaagggcaacuccgccccccucaucauccgcgagcccuucaucgccugcggccccaacgagugcaagcacuucgcccucacccacuacgccgcccagcccggcggcuacuacaacggcacccgcggcgaccgcaacaagcuccgccaccucaucuccgucaagcucggcaagauccccaccgucgagaacuccaucuuccacauggccgccugguccggcuccgccugccacgacggcaaggaguggaccuacaucggcgucgacggccccgacaacaacgcccuccucaaggucaaguacggcgaggccuacaccgacaccuaccacuccuacgccaacaagauccuccgcacccaggaguccgccugcaacugcaucggcggcaacugcuaccucauggucaccgacggcuccgccuccggcgucuccgagugccgcuuccucaagauccgcgagggccgcaucaucaaggagaucuuccccaccggccgcgucaagcacaccgaggagugcaccugcggcuucgccuccaacaagaccaucgagugcgccugccgcgacaacuccuacaccgccaagcgccccuucgucaagcucaacgucgagaccgacaccgccgagauccgccucaugugcaccgacaccuaccucgacaccccccgccccgacgacggcuccaucaccggccccugcgaguccaacggcgacaagggcuccggcggcaucaagggcggcuucguccaccagcgcauggaguccaagaucggccgcugguacucccgcaccauguccaagaccgagcgcaugggcaugggccucuacgucaaguacgacggcgaccccugggccgacuccgacgcccucgucuucuccggcgucauggucuccaugaaggagcccggcugguacuccuucggcuucgagaucaaggacaagaagugcgacguccccugcaucggcaucgagaugguccacgacggcggcaaggagaccuggcacuccgccgccaccgccaucuacugccucaugggcuccggccagcuccucugggacaccgucaccggcgucgacauggcccucuga

SEQ ID NO: 124984 - RNA, 1401 nt, Artificial Sequence; identical to SEQ ID NO: 124934
  derived and/or modified CDS sequence (opt2) from neuraminidase__InfluenzaB__AFA45250

SEQ ID NO: 124985 - RNA, 1401 nt, Artificial Sequence
  derived and/or modified CDS sequence (opt2) from neuraminidase__InfluenzaB__AFA45253
augcuccccuccaccauccagacccucacccucuuccucaccuccggcggcguccuccucucccucuacgucuccgcccuccucuccuaccuccucuacuccgacauccuccucaaguucucccccaccgagaucaccgcccccaccaugucccucgacugcgccaacgccuccaacguccaggccgucaaccgcuccgccaccaagggcgucaccuuccuccuccccgagcccgaguggaccuacccccgccucuccugccccggcuccaccuuccagaaggcccuccucaucuccccccaccgcuucggcgagaccaagggcaacuccgccccccucaucauccgcgagcccuucaucgccugcggccccaacgagugcaagcacuucgcccucacccacuacgccgcccagcccggcggcuacuacaacggcacccgcggcgaccgcaacaagcuccgccaccucaucuccgucaagcucggcaagauccccaccgucgagaacuccaucuuccacauggccgccugguccggcuccgccugccacgacggcaaggaguggaccuacaucggcgucgacggccccgacaacgacgcccuccucaaggucaaguacggcgaggccuacaccgacaccuaccacuccuacgccaacaagauccuccgcacccaggaguccgccugcaacugcaucggcggcaacugcuaccucaugaucaccgacggcuccgccuccggcgucuccgagugccgcuuccucaagauccgcgagggccgcaucaucaaggagaucuuccccaccggccgcgucaagcacaccgaggagugcaccugcggcuucgccuccaacaagaccaucgagugcgucugccgcgacaacuccuacaccgccaagcgccccuucgucaagcucaacgucgagaccgacaccgccgagauccgccucaugugcaccgacaccuaccucgacaccccccgccccgacgacggcuccaucaccggccccugcgaguccaacggcgacaagggcuccggcggcaucaagggcggcuucguccaccagcgcauggaguccaagaucggccgcugguacucccgcaccauguccaagaccgagcgcaugggcaugggccucuacgucaaguacgacggcgaccccugggccgacuccgacgcccucgccuucuccggcgucauggucuccaugaaggagcccggcugguacuccuucggcuucgagaucaaggacaagaagugcgacguccccugcaucggcaucgagaugguccacgacggcggcaaggagaccuggcacuccgccgccaccgccaucuacugccucaugggcuccggccagcuccucugggacaccgucaccggcgucgacauggcccucuga

SEQ ID NO: 124986 - RNA, 1401 nt, Artificial Sequence
  derived and/or modified CDS sequence (opt2) from neuraminidase__InfluenzaB__AFB77645
augcuccccuccaccauccagacccucacccucuuccucaccuccggcggcguccuccucucccucuacgucuccgccucccucuccuaccuccucuacuccgacauccuccucaaguucucccccaccgagaucaccgcccccgccaugccccucgacugcgccaacgccuccaacguccaggccgucaaccgcuccgccaccaagggcgucacccuccuccuccccgagcccgaguggaccuacccccgccucuccugccccggcuccaccuuccagaaggcccuccucaucuccccccaccgcuucggcgagaccaagggcaacuccgccccccucaucauccgcgagcccuucaucgccugcggccccaacgagugcaagcacuucgcccucacccacuacgccgcccagcccggcggcuacuacaacggcacccgcggcgaccgcaacaagcuccgccaccucaucuccgucaagcucggcaagauccccaccgucgagaacuccaucuuccacauggccgccugguccggcuccgccugccacgacggcaaggaguggaccuacaucggcgucgacggccccgacaacaacgcccuccucaaggucaaguacggcgaggccuacaccgacaccuaccacuccuacgccaacaagauccuccgcacccaggaguccgccugcaacugcaucggcggcaacugcuaccucaugaucaccgacggcuccgccuccggcgucuccgagugccgcuuccucaagauccgcgagggccgcaucaucaaggagaucuuccccaccggccgcgucaagcacaccgaggagugcaccugcggcuucgccuccaacaagaccaucgagugcgccugccgcgacaacuccuacaccgccaagcgccccuucgucaagcucaacgucgagaccgacaccgccgagauccgccucaugugcaccgacaccuaccucgacaccccccgccccaacgacggcuccaucaccggccccugcgaguccgacggcgacaagggcuccggcggcaucaagggcggcuucguccaccagcgcauggaguccaagaucggccgcugguacucccgcaccauguccaagaccgagcgcaugggcaugggccucuacgucaaguacgacggcgaccccugggccgacuccgacgcccucgucuucuccggcgucauggucuccaugaaggagcccggcugguacuccuucggcuucgagaucaaggacaagaagugcgacguccccugcaucggcaucgagaugguccacgacggcggcaaggagaccuggcacuccgccgccaccgccaucuacugccucaugggcuccggccagcuccucugggacaccgucaccggcgucgacauggcccucuga

SEQ ID NO: 124987 - RNA, 1401 nt, Artificial Sequence
  derived and/or modified CDS sequence (opt2) from neuraminidase__InfluenzaB__AFB77647
augcuccccuccaccauccagacccucacccucuuccucaccuccggcggcguccuccucucccucuacgucuccgccucccucuccuaccuccucuacuccgacauccuccucaaguucucccccaccgagaucaccgcccccgccaucccccucgacugcgccaacgccuccaacguccaggccgucaaccgcuccgccaccaagggcgucacccuccuccuccccgagcccgaguggaccuacccccgccucuccugccccggcuccaccuuccagaaggcccuccucaucuccccccaccgcuucggcgagaccaagggcaacuccgccccccucaucauccgcgagcccuucaucgccugcggccccaacgagugcaagcacuucgcccucacccacuacgccgcccagcccggcggcuacuacaacggcacccgcggcgaccgcaacaagcuccgccaccucaucuccgucaagcucggcaagauccccaccgucgagaacuccaucuuccacauggccgccugguccggcuccgccugccacgacggcaaggaguggaccuacaucggcgucgacggccccgacaacaacgcccuccucaaggucaaguacggcgaggccuacaccgacaccuaccacuccuacgccaacaagauccuccgcacccaggaguccgccugcaacugcaucggcggcaacugcuaccucaugaucaccgacggcuccgccuccggcgucuccgagugccgcuuccucaagauccgcgagggccgcaucaucaaggagaucuuccccaccggccgcgucaagcacaccgaggagugcaccugcggcuucgccuccaacaagaccaucgagugcgccugccgcgacaacuccuacaccgccaagcgccccuucgucaagcucaacgucgagaccgacaccgccgagauccgccucaugugcaccgacaccuaccucgacaccccccgccccaacgacggcuccaucaccggccccugcgaguccgacggcgacaagggcuccggcggcaucaagggcggcuucguccaccagcgcauggaguccaagaucggccgcugguacucccgcaccauguccaagaccgagcgcaugggcaugggccucuacgucaaguacgacggcgaccccugggccgacuccgacgcccucgccuucuccggcgucauggucuccaugaaggagcccggcugguacuccuucggcuucgagaucaaggacaagaagugcgacguccccugcaucggcaucgagaugguccacgacggcggcaaggagaccuggcacuccgccgccaccgccaucuacugccucaugggcuccggccagcuccucugggacaccgucaccggcgucgacauggcccucuga

SEQ ID NO: 124988 - RNA, 1401 nt, Artificial Sequence
  derived and/or modified CDS sequence (opt2) from neuraminidase__InfluenzaB__AFB77649
augcuccccuccaccauccagacccucacccucuuccucaccuccggcggcguccuccucucccucuacgucuccgccucccucuccuaccuccucuacuccgacauccuccucaaguucucccccaccgagaucaccgcccccgccaugccccucgacugcgccaacgccuccaacguccaggccgucaaccgcuccgccaccaagggcgucacccuccuccuccccgagcccgaguggaccuacccccgccucuccugccccggcuccaccuuccagaaggcccuccucaucuccccccaccgcuucggcgagaccaagggcaacuccgccccccucaucauccgcgagcccuucaucgccugcggccccaacgagugcaagcacuucgcccucacccacuacgccgcccagcccggcggcuacuacaacggcacccgcggcgaccgcaacaagcuccgccaccucaucuccgucaagcucggcaagauccccaccgucgagaacuccaucuuccacauggccgccugguccggcuccgccugccacgacggcaaggaguggaccuacaucggcgucgacggccccgacaacaacgcccuccucaaggucaaguacggcgaggccuacaccgacaccuaccacuccuacgccaacaagauccuccgcacccaggaguccgccugcaacugcaucggcggcaacugcuaccucaugaucaccgacggcuccgccuccggcgucuccgagugccgcuuccucaagauccgcgagggccgcaucaucaaggagaucuuccccaccggccgcaucaagcacaccgaggagugcaccugcggcuucgccuccaacaagaccaucgagugcgccugccgcgacaacuccuacaccgccaagcgccccuucgucaagcucaacgucgagaccgacaccgccgagauccgccucaugugcaccgacaccuaccucgacaccccccgccccaacgacggcuccaucaccggccccugcgaguccgacggcgacaagggcuccggcggcaucaagggcggcuucguccaccagcgcauggaguccaagaucggccgcugguacucccgcaccauguccaagaccgagcgcaugggcaugggccucuacgucaaguacgacggcgaccccugggccgacuccgacgcccucgccuucuccggcgucauggucuccaugaaggagcccggcugguacuccuucggcuucgagaucaaggacaagaagugcgacguccccugcaucggcaucgagaugguccacgacggcggcaaggagaccuggcacuccgccgccaccgccaucuacugccucaugggcuccggccagcuccucugggacaccgucaccggcgucgacauggcccucuga

SEQ ID NO: 124989 - RNA, 1401 nt, Artificial Sequence
  derived and/or modified CDS sequence (opt2) from neuraminidase__InfluenzaB__AFB77651
augcuccccuccaccauccagacccucacccucuuccucaccuccggcggcguccuccucucccucuacgucuccgccucccucuccuaccuccucuacuccgacauccuccucaaguucucccccaccgagaucaccgcccccgccaugccccucgacugcgccaacgccuccaacguccaggccgucaaccgcuccgccaccaagggcgucacccuccuccuccccgagcccgaguggaccuacccccgccucuccugccccggcuccaccuuccagaaggcccuccucaucuccccccaccgcuucggcgagaccaagggcaacuccgccccccucaucauccgcgagcccuucaucgccugcggccccaacgagugcaagcacuucgcccucacccacuacgccgcccagcccggcggcuacuacaacggcacccgcggcgaccgcaacaagcuccgccaccucaccuccgucaagcucggcaagauccccaccgucgagaacuccaucuuccacauggccgccugguccggcuccgccugccacgacggcaaggaguggaccuacaucggcgucgacggccccgacaacaacgcccuccucaaggucaaguacggcgaggccuacaccgacaccuaccacuccuacgccaacaagauccuccgcacccaggaguccgccugcaacugcaucggcggcaacugcuaccucaugaucaccgacggcuccgccuccggcgucuccgagugccgcuuccucaagauccgcgagggccgcaucaucaaggagaucuuccccaccggccgcgucaagcacaccgaggagugcaccugcggcuucgccuccaacaagaccaucgagugcgccugccgcgacaacuccuacaccgccaagcgccccuucgucaagcucaacgucgagaccgacaccgccgagauccgccucaugugcaccgacaccuaccucgacaccccccgccccaacgacggcuccaucaccggccccugcgaguccgacggcgacaagggcuccggcggcaucaagggcggcuucguccaccagcgcauggaguccaagaucggccgcugguacucccgcaccauguccaagaccgagcgcaugggcaugggccucuacgucaaguacgacggcgaccccugggccgacuccgacgcccucgccuucuccggcgucauggucuccaugaaggagcccggcugguacuccuucggcuucgagaucaaggacaagaagugcgacguccccugcaucggcaucgagaugguccacgacggcggcaaggagaccuggcacuccgccgccaccgccaucuacugccucaugggcuccggccagcuccucugggacaccgucaccggcgucgacauggcccucuga

SEQ ID NO: 124990 - RNA, 1401 nt, Artificial Sequence
  derived and/or modified CDS sequence (opt2) from neuraminidase__InfluenzaB__AFE00364
augcuccccuccaccauccagaugcucacccucuuccucaccuccggcggcguccuccucucccucuacgucuccgccucccucuccuaccuccucuacuccgacauccuccucaaguucucccccaccgagaucaccgcccccaccaugccccucgacugcgccaacgccuccaacguccacgccgucaaccgcuccgccaccaagggcgucaccuuccuccuccccgagcccgaguggaccuacccccgccucuccugccccggcuccaccuuccagaaggcccuccucaucuccccccaccgcuucggcgagaccaagggcaacuccgccccccucaucauccgcgagcccuucaucgccugcggccccaacgagugcaagcacuucgcccucacccacuacgccgcccagcccggcggcuacuacaacggcacccgcggcgaccgcaaccgccuccgccaccucaucuccgucaagcucggcaagauccccaccgucgagaacuccaucuuccacauggccgccugguccggcuccgccugccacgacggcaaggaguggaccuacaucggcgucgacggccccgacaacaacgcccuccucaagaucaaguacggcgaggccuacaccgacaccuaccacuccuacgccaacaacauccuccgcacccaggaguccgccugcaacugcaucggcggcaacugcuaccucaugaucaccgacggcuccgccuccggcgucuccgagugccgcuuccucaagauccgcgagggccgcaucaucaaggagaucuuccccaccggccgcgucaagcacaccgaggagugcaccugcggcuucgccuccaacaagaccaucgagugcgccugccgcgacaacuccuacaccgccaagcgccccuucgucaagcucaacgucgagaccgacaccgccgagauccgccucaugugcaccgacaccuaccucgacaccccccgccccgacgacggcuccaucaccggccccugcgaguccaacggcgacaagggcuccggcggcaucaagggcggcuucguccaccagcgcauggccuccaagaucggccgcugguacucccgcaccauguccaagaccgagcgcaagggcaugggccucuacgucaaguacgacggcgaccccuggaccgacuccgacgcccucgccuuccgcggcgucauggucuccaugaaggagcccggcugguacuccuucggcuucgagaucaaggacaagaagugcgacguccccugcaucggcaucgagaugguccacgacggcggcaaggagaccuggcacuccgccgccaccgccaucuacugccucaugggcuccggccagcuccucugggacaccgucaccggcgucgacauggcccucuga

SEQ ID NO: 124991 - RNA, 1401 nt, Artificial Sequence
  derived and/or modified CDS sequence (opt2) from neuraminidase__InfluenzaB__AFF18536
augcuccccuccaccauccagaugcucacccucuuccucaccuccggcggcguccuccucucccucuacgucuccgccucccucuccuaccuccucuacuccgacauccuccucaaguucucccccaccgagaucaccgcccccaccaugccccucgacugcgccaacgccuccaacguccacgccgucaaccgcuccgccaccaagggcgucaccuuccuccuccccgagcccgaguggaccuacccccgccucuccugccccggcuccaccuuccagaaggcccuccucaucuccccccaccgcuucggcgagaccaagggcaacuccgccccccucaucauccgcgagcccuucaucgccugcggccccaacgagugccgccacuucgcccucacccacuacgccgcccagcccggcggcuacuacaacggcacccgcggcgaccgcaacaagcuccgccaccucaucuccgucaagcucggcaagauccccaccgucgagaacuccaucuuccacauggccgccugguccggcuccgccugccacgacggcaaggaguggaccuacaucggcgucgacggccccgacaacaacgcccuccucaagaucaaguacggcgaggccuacaccgacaccuaccacuccuacgccaacaacauccuccgcacccaggaguccgccugcaacugcauccgcggcaacugcuaccucaugaucaccgacggcuccgccuccggcgucuccgagugccgcuuccucaagauccgcgagggccgcaucaucaaggagaucuuccccaccggccgcgucaagcacaccgaggagugcaccugcggcuucgccuccaacaagaccaucgagugcgccugccgcgacaacuccuacaccgccaagcgccccuucgucaagcucaacgucgagaccgacaccgccgagauccgccucaugugcaccgacaccuaccucgacaccccccgccccgacgacggcuccaucaccggccccugcgaguccaacggcgacaagggcuccggcggcaucaagggcggcuucguccaccagcgcauggccuccaagaucggccgcugguacucccgcaccauguccaagaccgagcgcaagggcaugggccucuacgucaaguacgacggcgaccccuggaccgacuccgacgcccucgccuuccgcggcgucauggucuccaugaaggagcccggcugguacuccuucggcuucgagaucaaggacaagaagugcgacguccccugcaucggcaucgagaugguccacgacggcggcaaggagaccuggcacuccgccgccaccgccaucuacugccucaugggcuccggccagcuccucugggacaccgucaccggcgucgacauggcccucuga

SEQ ID NO: 124992 - RNA, 1401 nt, Artificial Sequence
  derived and/or modified CDS sequence (opt2) from neuraminidase__InfluenzaB__AFF18545
augcuccccuccaccauccagaugcucacccucuuccucaccuccggcggcguccuccucucccucuacgucuccgccucccucuccuaccuccucuacuccgacauccuccucaaguucucccccaccgagaucaccgcccccaccaugccccucgacugcgccaacgccuccaacguccacgccgucaaccgcuccgccaccaagggcgucaccuuccuccuccccgagcccgaguggaccuacccccgccucuccugccccggcuccaccuuccagaaggcccuccucaucuccccccaccgcuucggcgagaccaagggcaacuccgccccccucaucauccgcgagcccuucaucgccugcggccccaacgagugcaagcacuucgcccucacccacuacgccgcccagcccggcggcuacuacaacggcacccgcggcgaccgcaacaagcuccgccaccucaucuccgucaagcucggcaagauccccaccgucgagaacuccaucuuccacauggccgccugguccggcuccgccugccacgacggcaaggaguggaccuacaucggcgucgacggccccgacaacaacgcccuccucaagaucaaguacggcgaggccuacaccgacaccuaccacuccuacgccaacaacauccuccgcacccaggaguccgccugcaacugcaucggcggcaacugcuaccucaugaucaccgacggcuccgccuccggcgucuccgagugccgcuuccucaagauccgcgagggccgcaucaucaaggagaucuuccccaccggccgcgucaagcacaccgaggagugcaccugcggcuucgccuccaacaagaccaucgagugcgccugccgcgacaacuccuacaccgccaagcgccccuucgucaagcucaacgucgagaccgacaccgccgagauccgccucaugugcaccgacaccuaccucgacaccccccgccccgacgacggcuccaucaccggccccugcgaguccaacggcgacaagggcuccggcggcaucaagggcggcuucguccaccagcgcauggccuccaagaucggccgcugguacucccgcaccauguccaagaccgagcgcaagggcaugggccucuacgucaaguacgacggcgaccccuggaccgacuccgacgcccucgccuuccgcggcgucauggucuccaugaaggagcccggcugguacuccuucggcuucgagaucaaggacaagaagugcgacguccccugcaucggcaucgagaugguccacgacggcggcaaggagaccuggcacuccgccgccaccgccaucuacugccucaugggcuccggccagcuccucugggacaccgucaccggcgucgacauggcccucuga

SEQ ID NO: 124993 - RNA, 1401 nt, Artificial Sequence; identical to SEQ ID NO: 124853
  derived and/or modified CDS sequence (opt2) from neuraminidase__InfluenzaB__AFH34933

SEQ ID NO: 124994 - RNA, 1401 nt, Artificial Sequence; identical to SEQ ID NO: 124853
  derived and/or modified CDS sequence (opt2) from neuraminidase__InfluenzaB__AFH34939

SEQ ID NO: 124995 - RNA, 1401 nt, Artificial Sequence; identical to SEQ ID NO: 124791
  derived and/or modified CDS sequence (opt2) from neuraminidase__InfluenzaB__AFH57869

SEQ ID NO: 124996 - RNA, 1401 nt, Artificial Sequence
  derived and/or modified CDS sequence (opt2) from neuraminidase__InfluenzaB__AFH57891
augcuccccuccaccauccagacccucacccucuuccucaccuccggcggcguccuccucucccucuacgucuccgccucccucuccuaccuccucuacuccgacauccuccucaaguucucccagaccgagaucaccgcccccaucaugccccucgacuacgccaacgccuccaacguccaggccgucaaccacuccgccgccaagggcgucacccuccuccuccccgagcccgaguggaccuacccccgccucuccugccccggcuccaccuuccagaaggcccuccucaucuccccccaccgcuucggcgagaccaagggcaacuccgccccccucaucauccgcgagcccuucaucgccugcggccccaccgagugcaagcacuucgcccucacccacuacgccgcccagcccggcggcuacuacaacggcacccgcgaggaccgcaacaagcuccgccaccucaucuccgucaagcucggcaagauccccaccgucgagaacuccaucuuccacauggccgccugguccggcuccgccugccacgacggcaaggaguggaccuacaucggcgucgacggccccgacuccaacgcccuccucaagaucaaguacggcgaggccuacaccgacaccuaccacuccuacgccaagaacauccuccgcacccaggaguccgccugcaacugcaucggcggcgacugcuaccucaugaucaccgacggccccgccuccggcaucuccgagugccgcuuccucaagauccgcgagggccgcaucaucaaggagaucuuccccaccggccgcgucaagcacaccgaggagugcaccugcggcuucgccuccaacaagaccaucgagugcgccugccgcgacaacuccuacaccgccaagcgccccuucgucaagcucaacgucgagaccgacaccgccgagauccgccucaugugcaccgagaccuaccucgacaccccccgccccaacgacggcuccaucaccggccccugcgaguccgacggcgacaagggcuccggcggcaucaagggcggcuucguccaccagcgcauggccuccaagaucggccgcugguacucccgcaccauguccaagaccaagcgcaugggcaugggccucuacgucaaguacgacggcgaccccuggaccgacuccgaggcccucgcccucuccggcgucauggucuccauggaggagcccggcugguacuccuucggcuucgagaucaaggacaagaagugcgacguccccugcaucggcaucgagaugguccacgacggcggcaagaccaccuggcacuccgccgccaccgccaucuacugccucaugggcuccggccagcuccucugggacaccgucaccggcgucgacauggcccucuga

SEQ ID NO: 124997 - RNA, 1401 nt, Artificial Sequence
  derived and/or modified CDS sequence (opt2) from neuraminidase__InfluenzaB__AFH57913
augcuccccuccaccauccagacccucacccucuuccucaccuccggcggcguccuccucucccucuacgucuccgccucccucuccuaccuccucuacuccgacauccuccucaaguucucccccaccgagaucaccgcccccaccaugccccucgacugcgccaacgccuccaacguccaggccgucaaccgcuccgccaccaagggcgucacccuccuccuccccgagcccgaguggaccuacccccgccucuccugccccggcuccaccuuccagaaggcccuccucaucuccccccaccgcuucggcgagaccaagggcaacuccgccccccucaucauccgcgagcccuucaucgccugcggccccaacgagugcaagcacuucgcccucacccacuacgccgcccagcccggcggcuacuacaacggcacccgcggcgaccgcaacaagcuccgccaccucaucuccgucaagcucggcaagauccccaccgucgagaacuccaucuuccacauggccgccugguccggcuccgccugccacgacggcaaggaguggaccuacaucggcgucgacggccccgacaacaacgcccuccucaaggucaaguacggcgaggccuacaccgacaccuaccacuccuacgccaacaagauccuccgcacccaggaguccgccugcaacugcaucggcggcaacugcuaccucaugaucaccgacggcuccgccuccggcgucuccgagugccgcuuccucaagauccgcgagggccgcaucaucaaggagaucuuccccaccggccgcgucaagcacaccgaggagugcaccugcggcuucgccuccaacaagaccaucgagugcgccugccgcgacaacuccuacaccgccaagcgccccuucgucaagcucaacgucgagaccgacaccgccgagauccgccucaugugcaccgacaccuaccucgacaccccccgccccaacgacggcuccaucaccggccccugcgaguccaacggcgacaagggcuccggcggcaucaagggcggcuucguccaccagcgcauggaguccaagaucggccgcugguacucccgcaccauguccaagaccgagcgcaugggcaugggccucuacgucaaguacgacggcgaccccugggccgacuccgacgcccucgccuucuccggcgucauggucuccaugaaggagcccggcugguacuccuucggcuucgagaucaaggacaagaagugcgacguccccugcaucggcaucgagaugguccacgacggcggcaaggagaccuggcacuccgccgccaccgccaucuacugccucaugggcuccggccagcuccucugggacaccgucaccggcgucgacauggcccucuga

SEQ ID NO: 124998 - RNA, 1401 nt, Artificial Sequence; identical to SEQ ID NO: 124853
  derived and/or modified CDS sequence (opt2) from neuraminidase__InfluenzaB__AFH57935

SEQ ID NO: 124999 - RNA, 1401 nt, Artificial Sequence; identical to SEQ ID NO: 124853
  derived and/or modified CDS sequence (opt2) from neuraminidase__InfluenzaB__AFH57946

SEQ ID NO: 125000 - RNA, 1401 nt, Artificial Sequence; identical to SEQ ID NO: 124853
  derived and/or modified CDS sequence (opt2) from neuraminidase__InfluenzaB__AFH57957

SEQ ID NO: 125001 - RNA, 1401 nt, Artificial Sequence; identical to SEQ ID NO: 124931
  derived and/or modified CDS sequence (opt2) from neuraminidase__InfluenzaB__AFH57968

SEQ ID NO: 125002 - RNA, 1401 nt, Artificial Sequence
  derived and/or modified CDS sequence (opt2) from neuraminidase__InfluenzaB__AFH57979
augcuccccuccaccauccagacccucacccucuuccucaccuccggcggcguccuccucucccucuacgucuccgcccuccucuccuaccuccucuacuccgacauccuccucaaguucucccccaccgagaucaccgcccccaccaugucccucgacugcgccaacgccuccaacguccaggccgucaaccgcuccgccaccaagggcgucaucuuccuccuccccgagcccgaguggaccuacccccgccucuccugccccggcuccaccuuccagaaggcccuccucaucuccccccaccgcuucggcgagaccaagggcaacuccgccccccucaucauccgcgagcccuucaucgccugcggccccaacgagugcaagcacuucgcccucacccacuacgccgcccagcccggcggcuacuacaacggcacccgcggcgaccgcaacaagcuccgccaccucaucuccgucaagcucggcaagauccccaccgucgagaacuccaucuuccacauggccgccugguccggcuccgccugccacgacggcaaggaguggaccuacaucggcgucgacggccccgacaacgacgcccuccucaaggucaaguacggcgaggccuacaccgacaccuaccacuccuacgccaacaagauccuccgcacccaggaguccgccugcaacugcaucggcggcaacugcuaccucaugaucaccgacggcuccgccuccggcgucuccgagugccgcuuccucaagauccgcgagggccgcaucaucaaggagaucuuccccaccggccgcgucaagcacaccgaggagugcaccugcggcuucgccuccaacaagaccaucgagugcgccugccgcgacaacuccuacaccgccaagcgccccuucgucaagcucaacgucgagaccgacaccgccgagauccgccucaugugcaccgacaccuaccucgacaccccccgccccgacgacggcuccaucaccggccccugcgaguccaacggcgacaagggcuccggcggcaucaagggcggcuucguccaccagcgcauggaguccaagaucggccgcugguacucccgcaccauguccaagaccgagcgcaugggcaugggccucuacgucaaguacgacggcgaccccugggccgacuccgacgcccucgccuucuccggcgucauggucuccaugaaggagcccggcugguacuccuucggcuucgagaucaaggacaagaagugcgacguccccugcaucggcaucgagaugguccacgacggcggcaaggagaccuggcacuccgccgccaccgccaucuacugccucaugggcuccggccagcuccucugggacaccgucaccggcgucgacauggcccucuga

SEQ ID NO: 125003 - RNA, 1401 nt, Artificial Sequence; identical to SEQ ID NO: 124620
  derived and/or modified CDS sequence (opt2) from neuraminidase__InfluenzaB__AFH58253

SEQ ID NO: 125004 - RNA, 1401 nt, Artificial Sequence; identical to SEQ ID NO: 124683
  derived and/or modified CDS sequence (opt2) from neuraminidase__InfluenzaB__AFH58264

SEQ ID NO: 125005 - RNA, 1401 nt, Artificial Sequence; identical to SEQ ID NO: 124824
  derived and/or modified CDS sequence (opt2) from neuraminidase__InfluenzaB__AFH58275

SEQ ID NO: 125006 - RNA, 1401 nt, Artificial Sequence; identical to SEQ ID NO: 124824
  derived and/or modified CDS sequence (opt2) from neuraminidase__InfluenzaB__AFH58286

SEQ ID NO: 125007 - RNA, 1401 nt, Artificial Sequence; identical to SEQ ID NO: 124997
  derived and/or modified CDS sequence (opt2) from neuraminidase__InfluenzaB__AFH58297

SEQ ID NO: 125008 - RNA, 1401 nt, Artificial Sequence
  derived and/or modified CDS sequence (opt2) from neuraminidase__InfluenzaB__AFH58308
augcuccccuccaccauccagacccucacccucuuccucaccuccggcggcguccuccucucccucuacgucuccgccucccucuccuaccuccucuacuccgacauccuccucaaguucucccgcaccgagaccaccgcccccaucaugccccucgacugcgccaacgccuccaacguccaggccgucaaccgcuccgccaccaagggcgucacccuccuccuccccgagcccgaguggaccuacccccgccucuccugccccggcuccaccuuccagaaggcccuccucaucuccccccaccgcuucggcgagaccaagggcaacuccgccccccucaucauccgcgagcccuucaucgccugcggccccaaggagugcaagcacuucgcccucacccacuacgccgcccagcccggcggcuacuacaacggcacccgcgaggaccgcaacaagcuccgccaccucaucuccgucaagcucggcaagauccccaccgucgagaacuccaucuuccacauggccgccugguccggcuccgccugccacgacggccgcgaguggaccuacaucggcgucgacggccccgacuccaacgcccuccucaagaucaaguacggcgaggccuacaccgacaccuaccacuccuacgccaagaacauccuccgcacccaggaguccgccugcaacugcaucggcggcgacugcuaccucaugaucaccgacggccccgccuccggcaucuccgagugccgcuuccucaagauccgcgagggccgcaucaucaaggagaucuuccccaccggccgcgucaagcacaccgaggagugcaccugcggcuucgccuccaacaagaccaucgagugcgccugccgcgacaacuccuacaccgccaagcgccccuucgucaagcucaacgucgagaccgacaccgccgagauccgccucaugugcaccgagaccuaccucgacaccccccgccccaacgacggcuccaucaccggccccugcgaguccaacggcgacaagggcuccggcggcaucaagggcggcuucguccaccagcgcauggccuccaagaucggccgcugguacucccgcaccauguccaagaccaagcgcaugggcaugggccucuacgucaaguacgacggcgaccccuggaccgacuccgaggcccucgcccucuccggcgucauggucuccauggaggagcccggcugguacuccuucggcuucgagaucaaggacaagaagugcgacguccccugcaucggcaucgagaugguccacgacggcggcaagaccaccuggcacuccgccgccaccgccaucuacugccucaugggcuccggccagcuccucugggacaccgucaccggcgucgacauggcccucuga

SEQ ID NO: 125009 - RNA, 1401 nt, Artificial Sequence; identical to SEQ ID NO: 125008
  derived and/or modified CDS sequence (opt2) from neuraminidase__InfluenzaB__AFH58319

SEQ ID NO: 125010 - RNA, 1401 nt, Artificial Sequence
  derived and/or modified CDS sequence (opt2) from neuraminidase__InfluenzaB__AFH58341
augcuccccuccaccauccagacccucacccucuuccucaccuccggcggcguccuccucucccucuacgucuccgccucccucuccuaccuccucuacuccgacauccuccucaaguucucccgcaccgagaucaccgcccccaucaugccccucgacugcgccaacgccuccaacguccaggccgucaaccgcuccgccaccaagggcgucacccuccuccuccccgagcccgaguggaccuacccccgccucuccugccccggcuccaccuuccagaaggcccuccucaucuccccccaccgcuucggcgagaccaagggcaacuccgccccccucaucauccgcgagcccuucaucgccugcggccccaaggagugcaagcacuucgcccucacccacuacgccgcccagcccggcggcuacuacaacggcacccgcgaggaccgcaacaagcuccgccaccucaucuccguccgccucggcaagauccccaccgucgagaacuccaucuuccacauggccgccugguccggcuccgccugccacgacggccgcgaguggaccuacaucggcgucgacggccccgacuccaacgcccuccucaagaucaaguacggcgaggccuacaccgacaccuaccacuccuacgccaagaacauccuccgcacccaggaguccgccugcaacugcaucggcggcgacugcuaccucaugaucaccgacggccccgccuccggcaucuccgagugccgcuuccucaagauccgcgagggccgcaucaucaaggagaucuuccccaccggccgcgucaagcacaccgaggagugcaccugcggcuucgccuccaacaagaccaucgagugcgccugccgcgacaacuccuacaccgccaagcgccccuucgucaagcucaacgucgagaccgacaccgccgagauccgccucaugugcaccgagaccuaccucgacaccccccgccccaacgacggcuccaucaccggccccugcgaguccaacggcgacaagggcuccggcggcaucaagggcggcuucguccaccagcgcauggccuccaagaucggccgcugguacucccgcaccauguccaagaccaagcgcaugggcaugggccucuacgucaaguacgacggcgaccccuggaccgacuccgaggcccucgcccucuccggcgucauggucuccauggaggagcccggcugguacuccuucggcuucgagaucaaggacaagaagugcgacguccccugcaucggcaucgagaugguccacgacggcggcaagaccaccuggcacuccgccgccaccgccaucuacugccucaugggcuccggccagcuccucugggacaccgucaccggcgucaacaugacccucuga

SEQ ID NO: 125011 - RNA, 1401 nt, Artificial Sequence
  derived and/or modified CDS sequence (opt2) from neuraminidase__InfluenzaB__AFH58363
augcuccccuccaccauccagacccucacccucuuccucaccuccggcggcguccuccucucccucuacgucuccgccucccucuccuaccuccucuacuccgacauccuccucaaguuccccuccaccgagaucaccgcccccaccaugccccucgacugcgccaacgccuccaacguccaggccgucaaccgcuccgccaccaagggcgucaccuuccuccuccccgagcccgaguggaccuacccccgccucuccugccccggcuccaccuuccagaaggcccuccucaucuccccccaccgcuucggcgagaccaagggcaacuccgccccccucaucauccgcgagcccuucaucgccugcggccccaaggagugcaagcacuucgcccucacccacuacgccgcccagcccggcggcuacuacaacggcacccgcggcgaccgcaacaagcuccgccaccucaucuccgucaagcucggcaagauccccaccgucgagaacuccaucuuccacauggccgccugguccggcuccgccugccacgacggcaaggaguggaccuacaucggcgucgacggccccgacaacaacgcccuccucaagaucaaguacggcgaggccuacaccgacaccuaccacuccuacgccaacaacauccuccgcacccaggaguccgccugcaacugcaucggcggcaacugcuaccucaugaucaccgacggcuccgccuccggcgucuccgagugccgcuuccucaagauccgcgagggccgcaucaucaaggagaucuuccccaccggccgcaucaagcacaccgaggagugcaccugcggcuucgccuccaacaagaccaucgagugcgccugccgcgacaacuccuacaccgccaagcgccccuucgucaagcucaacgucgagaccgacaccgccgagauccgccucaugugcaccgagaccuaccucgacaccccccgccccgacgacggcuccaucaccggccccugcgaguccaacggcggcaagggcuccggcggcaucaagggcggcuucguccaccagcgcauggccuccaagaucggccgcugguacucccgcaccauguccaagaccgagcgcaagggcaugggccucuacgucaaguacgacggcgaccccugggccgacuccgacgcccucgccuucuccggcgucauggucuccauggaggagcccggcugguacuccuucggcuucgagaucaaggacaagaagugcgacguccccugcaucggcaucgagaugguccacgacggcggcaaggagaccuggcacuccgccgccaccgccaucuacugccucaugggcuccggccagcuccucugggacaccgucaccggcgucaacauggcccucuga

SEQ ID NO: 125012 - RNA, 1401 nt, Artificial Sequence; identical to SEQ ID NO: 125011
  derived and/or modified CDS sequence (opt2) from neuraminidase__InfluenzaB__AFH58374

SEQ ID NO: 125013 - RNA, 1401 nt, Artificial Sequence; identical to SEQ ID NO: 124997
  derived and/or modified CDS sequence (opt2) from neuraminidase__InfluenzaB__AFH58385

SEQ ID NO: 125014 - RNA, 1401 nt, Artificial Sequence; identical to SEQ ID NO: 124997
  derived and/or modified CDS sequence (opt2) from neuraminidase__InfluenzaB__AFH58396

SEQ ID NO: 125015 - RNA, 1401 nt, Artificial Sequence; identical to SEQ ID NO: 124997
  derived and/or modified CDS sequence (opt2) from neuraminidase__InfluenzaB__AFH58407

SEQ ID NO: 125016 - RNA, 1401 nt, Artificial Sequence; identical to SEQ ID NO: 124997
  derived and/or modified CDS sequence (opt2) from neuraminidase__InfluenzaB__AFH58418

SEQ ID NO: 125017 - RNA, 1401 nt, Artificial Sequence
  derived and/or modified CDS sequence (opt2) from neuraminidase__InfluenzaB__AFH58429
augcuccccuccaccauccagacccucacccucuuccucaccuccggcggcguccuccucucccucuacgucuccgccucccucuccuaccuccucuacuccgacauccuccucaaguucucccccaccgagaucaccgcccccaccaugccccucgacugcgccaacgccuccaacguccaggccgucaaccgcuccgccaccaagggcgucacccuccuccuccccgagcccgaguggaccuacccccgccucuccugccccggcuccaccuuccagaaggcccuccucaucuccccccaccgcuucggcgagaccaagggcaacuccgccccccucaucauccgcgagcccuucaucgccugcggccccaacgagugcaagcacuucgcccucacccacuacgccgcccagcccggcggcuacuacaacggcacccgcggcgaccgcaacaagcuccgccaccucaucuccgucaagcucggcaagauccccaccgucgagaacuccaucuuccacauggccgccugguccggcuccgccugccacgacggcaaggaguggaccuacaucggcgucgacggccccgacaacaacgcccuccucaaggucaaguacggcgaggccuacaccgacaccuaccacuccuacgccaacaagauccuccgcacccaggaguccgccugcaacugcaucggcggcaacugcuaccucaugaucaccgacggcuccgccuccggcgucuccgagugccgcuuccucaagauccgcgagggccgcaucaucaaggagaucuuccccaccggccgcgucaagcacaccgaggagugcaccugcggcuucgccuccaacgagaccaucgagugcgccugccgcgacaacuccuacaccgccaagcgccccuucgucaagcucaacgucgagaccgacaccgccgagauccgccucaugugcaccgacaccuaccucgacaccccccgccccaacgacggcuccaucaccggccccugcgaguccaacggcgacaagggcuccggcggcaucaagggcggcuucguccaccagcgcauggaguccaagaucggccgcugguacucccgcaccauguccaagaccgagcgcaugggcaugggccucuacgucaaguacgacggcgaccccugggccgacuccgacgcccucgccuucuccggcgucauggucuccaugaaggagcccggcugguacuccuucggcuucgagaucaaggacaagaagugcgacguccccugcaucggcaucgagaugguccacgacggcggcaaggagaccuggcacuccgccgccaccgccaucuacugccucaugggcuccggccagcuccucugggacaccgucaccggcgucgacauggcccucuga

SEQ ID NO: 125018 - RNA, 1401 nt, Artificial Sequence
  derived and/or modified CDS sequence (opt2) from neuraminidase__InfluenzaB__AFH58440
augcuccccuccaccauccagacccucacccucuuccucaccuccggcggcguccuccucucccucuacgucuccgccucccucuccuaccuccucuacuccgacauccuccucaaguucucccccaccgagaucaccgcccccaccaugccccucgacugcgccaacgccuccaacguccaggccgucaaccgcuccgccaccaagggcgucacccuccuccuccccgagcccgaguggaccuacccccgccucuccugccccggcuccaccuuccagaaggcccuccucaucuccccccaccgcuucggcgagaccaagggcaacuccgccccccucaucauccgcgagcccuucaucgccugcggccccaacgagugcaagcacuucgcccucacccacuacgccgcccagcccggcggcuacuacaacggcacccgcggcgaccgcaacaagcuccgccaccucaucuccgucaagcucggcaagauccccaccgucgagaacuccaucuuccacauggccgccugguccggcuccgccugccacgacggcaaggaguggaccuacaucggcgucgacggccccgacaacaacgcccuccucaaggucaaguacggcgaggccuacaccgacaccuaccacuccuacgccaacaagauccuccgcacccaggaguccgccugcaacugcaucggcggcaacugcuaccucaugaucaccgacggcuccgccuccggcgucuccgagugccgcuuccucaagauccaggagggccgcaucaucaaggagaucuuccccaccggccgcgucaagcacaccgaggagugcaccugcggcuucgccuccaacaagaccaucgagugcgccugccgcgacaacuccuacaccgccaagcgccccuucgucaagcucaacgucgagaccgacaccgccgagauccgccucaugugcaccgacaccuaccucgacaccccccgccccaacgacggcuccaucaccggccccugcgaguccaacggcgacaagggcuccggcggcaucaagggcggcuucguccaccagcgcauggaguccaagaucggccgcugguacucccgcaccauguccaagaccgagcgcaugggcaugggccucuacgucaaguacgacggcgaccccugggccgacuccgacgcccucgccuucuccggcgucauggucuccaugaaggagcccggcugguacuccuucggcuucgagaucaaggacaagaagugcgacguccccugcaucggcaucgagaugguccacgacggcggcaaggagaccuggcacuccgccgccaccgccaucuacugccucaugggcuccggccagcuccucugggacaccgucaccggcgucgacauggcccucuga

SEQ ID NO: 125019 - RNA, 1401 nt, Artificial Sequence
  derived and/or modified CDS sequence (opt2) from neuraminidase__InfluenzaB__AFH58462
augcuccccuccaccauccagacccucacccucuuccucaccuccggcggcguccuccucucccucuacgucuccgccucccucuccuaccuccucuacuccgacauccuccucaaguucucccccaccgagaucaccgcccccaccaugccccucgacugcgccaacgccuccaacguccaggccgucaaccgcuccgccaccaagggcgucaccuuccuccuccccgagcccgaguggaccuacccccgccucuccugccccggcuccaccuuccagaaggcccuccucaucuccccccaccgcuucggcgagaccaagggcaacuccgccccccucaucauccgcgagcccuucaucgccugcggccccaacgagugcaagcacuucgcccucacccacuacgccgcccagcccggcggcuacuacaacggcacccgcggcgaccgcaacaagcuccgccaccucaucuccgucaagcucggcaagauccccaccgucgagaacuccaucuuccacauggccgccugguccggcuccgccugccacgacggcaaggaguggaccuacaucggcgucgacggccccgacaacaacgcccuccucaaggucaaguacggcgaggccuacaccgacaccuaccacuccuacgccaacaagauccuccgcacccaggaguccgccugcaacugcaucggcggcaacugcuaccucaugaucaccgacggcuccgccuccggcgucuccgagugccgcuuccucaagauccgcgagggccgcaucaucaaggagaucuuccccaccggccgcgucaagcacaccgaggagugcaccugcggcuucgccuccaacaagaccaucgagugcgccugccgcgacaacuccuacaccgccaagcgccccuucgucaagcucaacgucgagaccgacaccgccgagauccgccucaugugcaccgacaccuaccucgacaccccccgccccgacgacggcuccaucaccggccccugcgaguccaacggcgacgagggcuccggcggcaucaagggcggcuucguccaccagcgcauggaguccaagaucggccgcugguacucccgcaccauguccaagaccgagcgcaugggcaugggccucuacgucaaguacgacggcgaccccugggccgacuccgacgcccucgccuucuccggcgucauggucuccaugaaggagcccggcugguacuccuucggcuucgagaucaaggacaagaagugcgacguccccugcaucggcaucgagaugguccacgacggcggcaaggagaccuggcacuccgccgccaccgccaucuacugccucaugggcuccggccagcuccucugggacaccgucaccggcgucgacaugacccucuga

SEQ ID NO: 125020 - RNA, 1401 nt, Artificial Sequence; identical to SEQ ID NO: 125019
  derived and/or modified CDS sequence (opt2) from neuraminidase__InfluenzaB__AFH58473

SEQ ID NO: 125021 - RNA, 1401 nt, Artificial Sequence; identical to SEQ ID NO: 124853
  derived and/or modified CDS sequence (opt2) from neuraminidase__InfluenzaB__AFH58484

SEQ ID NO: 125022 - RNA, 1401 nt, Artificial Sequence; identical to SEQ ID NO: 124853
  derived and/or modified CDS sequence (opt2) from neuraminidase__InfluenzaB__AFH58495

SEQ ID NO: 125023 - RNA, 1401 nt, Artificial Sequence; identical to SEQ ID NO: 124853
  derived and/or modified CDS sequence (opt2) from neuraminidase__InfluenzaB__AFH58506

SEQ ID NO: 125024 - RNA, 1401 nt, Artificial Sequence
  derived and/or modified CDS sequence (opt2) from neuraminidase__InfluenzaB__AFH58517
augcuccccuccaccauccagacccucacccucuuccucaccuccggcggcguccuccucucccucuacgucuccgcccuccucuccuaccuccucuacuccgacauccuccucaaguucucccccaccgagaucaccgcccccaccaugucccucgacugcgccaacgccuccaacguccaggccgucaaccgcuccgccaccaagggcgucaccuuccuccuccccgagcccgaguggaccuacccccgccucuccugccccggcuccaccuuccagaaggcccuccucaucuccccccaccgcuucggcgagaccaagggcaacuccgccccccucaucauccgcgagcccuucaucgccugcggccccaacgagugcaagcacuucgcccucacccacuacgccgcccagcccggcggcuacuacaacggcacccgcggcgaccgcaacaagcuccgccaccucaucuccgucaagcucggcaagauccccaccgucgagaacuccaucuuccacauggccgccugguccggcuccgccugccacgacggcaaggaguggaccuacaucggcgucgacggccccgacaacgacgcccuccucaaggucaaguacggcgaggccuacaccgacaccuaccacuccuacgccaacaagauccuccgcacccaggaguccgccugcaacugcaucggcggcaacugcuaccucaugaucaccgacggcuccgccuccggcgucuccgagugccgcuuccucaagauccgcgagggccgcaucaucaaggagaucuuccccaccggccgcgucaagcacaccgaggagugcaccugcggcuucgccuccaacaagaccaucgagugcgccugccgcgacaacuccuacaccgccaagcgccccuucgucaagcucaacgucgagaccgacaccgccgagauccgccucaugugcaccgacaccuaccucgacaccccccgccccgacgacggcuccaucaccggccccugcgaguccaacggcgacaagggcuccggcggcaucaagggcggcuucguccaccagcgcauggaguccaagaucggccgcugguacucccgcaccauguccaagaccgagcgcaugggcaugggccucuacgucaaguacgacggcgaccccugggccgacuccgacgcccucgccuucuccggcgucauggucuccaugaaggagcccggcugguacuccuucggcuucgagaucaaggacaagaagugcgacguccccugcaucggcaucgagaugguccacgacggcggcaaggagaccuggcacuccgccgccaccgccaucuacugccucaugggcuccggccgccuccucugggacaccgucaccggcgucgacauggcccucuga

SEQ ID NO: 125025 - RNA, 1401 nt, Artificial Sequence; identical to SEQ ID NO: 124931
  derived and/or modified CDS sequence (opt2) from neuraminidase__InfluenzaB__AFH58528

SEQ ID NO: 125026 - RNA, 1401 nt, Artificial Sequence
  derived and/or modified CDS sequence (opt2) from neuraminidase__InfluenzaB__AFH58539
augcuccccuccaccguccagacccucacccuccuccucaccuccggcggcguccuccucucccucuacgucuccgccucccucuccuaccuccucuacuccgacguccuccucaaguucuccuccaccaagaccaccgcccccaccaugucccucgagugcaccaacgccuccaacgcccagaccgucaaccacuccgccaccaaggagaugaccuuccccccccccgagcccgaguggaccuacccccgccucuccugccagggcuccaccuuccagaaggcccuccucaucuccccccaccgcuucggcgagaucaagggcaacuccgccccccucaucauccgcgagcccuucgucgccugcggccccaaggagugccgccacuucgcccucacccacuacgccgcccagcccggcggcuacuacaacggcacccgcaaggaccgcaacaagcuccgccaccucgucuccgucaagcucggcaagauccccaccgucgagaacuccaucuuccacauggccgccugguccggcuccgccugccacgacggccgcgaguggaccuacaucggcgucgacggccccgacaacgacgcccucgucaagaucaaguacggcgaggccuacaccgacaccuaccacuccuacgcccacaacauccuccgcacccaggaguccgccugcaacugcaucggcggcgacugcuaccucaugaucaccgacggcuccgccuccggcaucuccaagugccgcuuccucaagauccgcgagggccgcaucaucaaggagauccuccccaccggccgcgucgagcacaccgaggagugcaccugcggcuucgccuccaacaagaccaucgagugcgccugccgcgacaacuccuacaccgccaagcgccccuucgucaagcucaacgucgagaccgacaccgccgagauccgccucaugugcaccaagaccuaccucgacaccccccgccccgacgacggcuccaucgccggccccugcgaguccaacggcgacaaguggcucggcggcaucaagggcggcuucguccaccagcgcauggccuccaagaucggccgcugguacucccgcaccauguccaagaccaaccgcaugggcauggagcucuacgucaaguacgacggcgaccccuggaccgacuccgacgcccucacccucuccggcgucauggucuccaucgaggagcccggcugguacuccuucggcuucgagaucaaggacaagaagugcgacguccccugcaucggcaucgagaugguccacgacggcggcaaggacaccuggcacuccgccgccaccgccaucuacugccucaugggcuccggccagcuccucugggacaccgccaccggcgucgacauggcccucuga

SEQ ID NO: 125027 - RNA, 1401 nt, Artificial Sequence
  derived and/or modified CDS sequence (opt2) from neuraminidase__InfluenzaB__AFH58550
augcuccccuccaccauccagacccucacccucuuccucaccuccggcggcguccuccucucccucuacgucuccgccucccucuccuaccuccucuacuccgacauccuccucaaguucucccccaccgagaucaccgcccccaccaugccccucgacugcgccaacgccuccaacguccaggccgucaaccgcuccgccaccaaggagaugacccuccuccuccccgagcccgaguggaccuacccccgccucuccugccccggcuccaccuuccagaaggcccuccucaucuccccccaccgcuucggcgagacccgcggcaacuccgccccccucaccauccgcgagcccuucaucgccugcggccccaaggagugcaagcacuucgcccucacccacuacgccgcccagcccggcggcuacuacaacggcacccgcgaggaccgcaacaagcuccgccaccucaucuccgucaagcucggcaagauccccaccgucgagaacuccaucuuccacauggccgccugguccggcuccgccugccacgacggccgcgaguggaccuacaucggcgucgacggccccgacuccaacgcccucaucaagaucaaguacggcgaggccuacaccgacaccuaccacuccuacgccaacaacauccuccgcacccaggaguccgccugcaacugcaucggcggcgacugcuaccucaugaucaccgacggcuccgccuccggcaucuccaagugccgcuuccucaagauccgcgagggccgcaucaucaaggagaucuuccccaccggccgcgucgagcacaccgaggagugcaccugcggcuucgccuccaacaagaccaucgagugcgccugccgcgacaacuccuacaccgccaagcgccccuucgucaagcucaacgucgagaccgacaccgccgagauccgccucaugugcaccgagaccuaccucgacaccccccgccccgacgacggcuccaucaccggccccugcgaguccaacggcgacaagggccgcggcggcaucaagggcggcuucguccaccagcgcauggccuccaagaucggccgcugguacucccgcaccauguccaagaccgagcgcaugggcauggagcucuacgucaaguacgacggcgaccccuggaccgacuccgaggcccucgcccccuccggcgucauggucuccauggaggagcccggcugguacuccuucggcuucgagaucaaggacaagaagugcgacguccccugcaucggcaucgagaugguccacgacggcggcaagaagaccuggcacuccgccgccaccgccaucuacugccucaugggcuccggccagcuccucugggacaccgucaccggcgucgacauggcccucuga

SEQ ID NO: 125028 - RNA, 1401 nt, Artificial Sequence; identical to SEQ ID NO: 125027
  derived and/or modified CDS sequence (opt2) from neuraminidase__InfluenzaB__AFH58561

SEQ ID NO: 125029 - RNA, 1401 nt, Artificial Sequence
  derived and/or modified CDS sequence (opt2) from neuraminidase__InfluenzaB__AFJ69969
augcuccccuccaccauccagacccucacccucuuccucaccuccggcggcguccuccucucccucuacgucuccgccucccucuccuaccuccucuacuccgacauccuccucaaguucucccccaccgagaucaccgcccccaccaugccccucgacugcgccaacgccuccaacguccaggccgucaaccgcuccgccaccaagggcgucacccuccuccuccccgagcccgaguggaccuacccccgccucuccugccccggcuccaccuuccagaaggcccuccucaucuccccccaccgcuucggcgagaccaagggcaacuccgccccccucaucauccgcgagcccuucaucgccugcggccccaacgagugcaagcacuucgcccucacccacuacgccgcccagcccggcggcuacuacaacggcacccgcggcgaccgcaacaagcuccgccaccucaucuccgucaagcucggcaagauccccaccgucgagaacuccaucuuccacauggccgccugguccggcuccgccugccacgacggcaaggaguggaccuacaucggcgucgacggccccgacaacaacgcccuccucaaggucaaguacggcgaggccuacaccgacaccuaccacuccuacgccaacaagauccuccgcacccaggaguccgccugcaacugcaucggcggcaacugcuaccucaugaucaccgacggcuccgccuccggcgucuccgagugccgcuuccucaagauccgcgagggccgcaucaucaaggagaucuuccccaccggccgcgucaagcacaccgaggagugcaccugcggcuucgccuccaacaagaccaucgagugcgccugccgcgacaacuccuacaccgccaagcgccccuucgucaagcucaacgucgagaccgacaccgccgagauccgccucaugugcaccgacaccuaccucgacaccccccgccccaacgacggcuccaucaccggccccugcgaguccaacggcgacaagggcuccggcggcaucaagggcggcuucguccaccagcgcauggaguccaagaucggccgcugguacucccgcaccauguccaagaccgagcgcaugggcaugggccucuacgucaaguacgacggcgaccccuggaccgacuccgacgcccucgccuucuccggcgucauggucuccaugaaggagcccggcugguacuccuucggcuucgagaucaaggacaagaagugcgacguccccugcaucggcaucgagaugguccacgacggcggcaaggagaccuggcacuccgccgccaccgccaucuacugccucaugggcuccggccagcuccucugggacaccgucaccggcgucgacauggcccucuga

SEQ ID NO: 125030 - RNA, 1401 nt, Artificial Sequence; identical to SEQ ID NO: 124992
  derived and/or modified CDS sequence (opt2) from neuraminidase__InfluenzaB__AFJ69971

SEQ ID NO: 125031 - RNA, 1401 nt, Artificial Sequence
  derived and/or modified CDS sequence (opt2) from neuraminidase__InfluenzaB__AFJ69973
augcuccccuccaccauccagaugcucacccucuuccucaccuccggcggcguccuccucucccucuacgucuccgccucccucuccuaccuccucuacuccgacauccuccucaaguucucccccaccgagaucaccgcccccaccaugccccucgacugcgccaacgccuccaacguccacgccgucaaccgcuccgccaccaagggcgucaccuuccuccuccccgagcccgaguggaccuacccccgccucuccugccccggcuccaccuuccagaaggcccuccucaucuccccccaccgcuucggcgagaccaagggcaacuccgccccccucaucauccgcgagcccuucaucgccugcggccccaacgagugcaagcacuucgcccucacccacuacgccgcccagcccggcggcuacuacaacggcacccgcggcgaccgcaacaagcuccgccaccucaucuccgucaagcucggcaagauccccaccgucgagaacuccaucuuccacauggccgccugguccggcuccgccugccacgacggcaaggaguggaccuacaucggcgucgacggccccgacaacaacgcccuccucaagaucaaguacggcgaggccuacaccgacaccuaccacuccuacgccaacaacauccuccgcacccaggaguccgccugcaacugcaucggcggcaacugcuaccucaugaucaccgacggcuccgccuccggcgucuccgccugccgcuuccucaagauccgcgagggccgcaucaucaaggagaucuuccccaccggccgcgucaagcacaccgaggagugcaccugcggcuucgccuccaacaagaccaucgagugcgccugccgcgacaacuccuacaccgccaagcgccccuucgucaagcucaacgucgagaccgacaccgccgagauccgccucaugugcaccgacaccuaccucgacaccccccgccccgacgacggcuccaucaccggccccugcgaguccaacggcgacaagggcuccggcggcaucaagggcggcuucguccaccagcgcauggccuccaagaucggccgcugguacucccgcaccauguccaagaccgagcgcaagggcaugggccucuacgucaaguacgacggcgaccccuggaccgacuccgacgcccucgccuuccgcggcgucauggucuccaugaaggagcccggcugguacuccuucggcuucgagaucaaggacaagaagugcgacguccccugcaucggcaucgagaugguccacgacggcggcaaggagaccuggcacuccgccgccaccgccaucuacugccucaugggcuccggccagcuccucugggacaccgucaccggcgucgacauggcccucuga

SEQ ID NO: 125032 - RNA, 1401 nt, Artificial Sequence; identical to SEQ ID NO: 124853
  derived and/or modified CDS sequence (opt2) from neuraminidase__InfluenzaB__AFJ69975

SEQ ID NO: 125033 - RNA, 1401 nt, Artificial Sequence
  derived and/or modified CDS sequence (opt2) from neuraminidase__InfluenzaB__AFJ69979
augcuccccuccaccauccagacccucacccucuuccucaccuccggcggcguccuccucucccucuacgucuccgccucccucuccuaccuccucuacuccgacauccuccucaaguucucccccaccgagaucaccgcccccaccaugccccucgacugcgccaacaccuccaacguccaggccgucaaccacuccgccaccaagggcgucacccuccuccuccccgagcccgaguggaccuacccccgccucuccugccccggcuccaccuuccagaaggcccuccucaucuccccccaccgcuucggcgagaccaagggcaacuccgccccccucaucauccgcgagcccuucaucgccugcggccccaacgagugcaagcacuucgcccucacccacuacgccgcccagcccggcggcuacuacaacggcacccgcggcgaccgcaacaagcuccgccaccucaucuccgucaagcucggcaagauccccaccgucgagaacuccaucuuccacauggccgccugguccggcuccgccugccacgacggcaaggaguggaccuacaucggcgucgacggccccgacaacaacgcccuccucaaggucaaguacggcgaggccuacaccgacaccuaccacuccuacgccaacaagauccuccgcacccaggaguccgccugcaacugcaucggcggcaacugcuaccucaugaucaccgacggcuccgccuccggcgucuccgagugccgcuuccucaagauccgcgagggccgcaucaucaaggagaucuuccccaccggccgcgucaagcacaccgaggagugcaccugcggcuucgccuccaacaagaccaucgagugcgccugccgcgacaacuccuacaccgccaagcgccccuucgucaagcucaacgucgagaccgacaccgccgagauccgccucaugugcaccgacaccuaccucgacaccccccgccccgacgacggcuccaucaccggccccugcgaguccaacggcgacaagggcuccggcggcaucaagggcggcuucguccaccagcgcauggaguccaagaucggccgcugguacucccgcaccauguccaagaccgagcgcaugggcaugggccucuacgucaaguacgacggcgaccccugggccgacuccgacgcccucgccuucuccggcgucauggucuccaugaaggagcccggcugguacuccuucggcuucgagaucaaggacaagaagugcgacguccccugcaucggcaucgagaugguccacgacggcggcaaggagaccuggcacuccgccgccaccgccaucuacugccucaugggcuccggccagcuccucugggacaccgucaccggcgucgacauggcccucuga

SEQ ID NO: 125034 - RNA, 1401 nt, Artificial Sequence; identical to SEQ ID NO: 124992
  derived and/or modified CDS sequence (opt2) from neuraminidase__InfluenzaB__AFJ69981

SEQ ID NO: 125035 - RNA, 1401 nt, Artificial Sequence
  derived and/or modified CDS sequence (opt2) from neuraminidase__InfluenzaB__AFJ69983
augcuccccuccaccauccagaugcucacccucuuccucaccuccggcggcguccuccucucccucuacgucuccgccucccucuccuaccuccucuacuccgacauccuccucaaguucucccccaccgagaucaccgcccccaccaugccccucgacugcgccaacgccuccaacguccacgccgucaaccgcuccgccaccaagggcgucaccuuccuccuccccgagcccgaguggaccuacccccgccucuccugccccggcuccaccuuccagaaggcccuccucaucuccccccaccgcuucggcgagaccaagggcaacuccgccccccucaucauccgcgagcccuucaucgccugcggccccaacgagugcaagcacuucgcccucacccacuacgccgcccagcccggcggcuacuacaacggcacccgcggcgaccgcaacaagcuccgccaccucaucuccgucaagcucggcaagauccccaccgucgagaacuccaucuuccacauggccgccugguccggcuccgccugccacgacggcaaggaguggaccuacaucggcgucgacggccccgacaacaacgcccuccucaagaucaaguacggcgaggccuacaccgacaccuaccacuccuacgccaacaacauccuccgcacccaggaguccgccugcaacugcaucggcggcaacugcuaccucaugaucaccgacggcuccgccuccggcgucuccgagugccgcuuccucaagauccgcgagggccgcaucaucaaggagauccuccccaccggccgcgucaagcacaccgaggagugcaccugcggcuucgccuccaacaagaccaucgagugcgccugccgcgacaacuccuacaccgccaagcgccccuucgucaagcucaacgucgagaccgacaccgccgagauccgccucaugugcaccgacaccuaccucgacaccccccgccccgacgacggcuccaucaccggccccugcgaguccaacggcggcaagggcuccggcggcaucaagggcggcuucguccaccagcgcauggccuccaagaucggccgcugguacucccgcaccauguccaagaccgagcgcaagggcaugggccucuacgucaaguacgacggcgaccccuggaccgacuccgacgcccucgccuuccgcggcgucauggucuccaugaaggagcccggcugguacuccuucggcuucgagaucaaggacaagaagugcgacguccccugcaucggcaucgagaugguccacgacggcggcaaggagaccuggcacuccgccgccaccgccaucuacugccucaugggcuccggccagcuccucugggacaccgucaccggcgucgacauggcccucuga

SEQ ID NO: 125036 - RNA, 1401 nt, Artificial Sequence
  derived and/or modified CDS sequence (opt2) from neuraminidase__InfluenzaB__AFJ69987
augcuccccuccaccauccagacccucacccucuuccucaccuccggcggcguccuccucucccucuacgucuccgccucccucuccuaccuccucuacuccgacauccuccucaaguucucccccaccgagaucaccgcccccaccaugccccucgacugcgccaacgccuccaacguccaggccgucaaccgcuccgccaccaagggcgucacccuccuccuccccgagcccgaguggaccuacccccgccucuccugccccggcuccaccuuccagaaggcccuccucaucuccccccaccgcuucggcgagaccaagggcaacuccgccccccucaucauccgcgagcccuucaucgccugcggccccaacgagugcaagcacuucgcccucacccacuacgccgcccagcccggcggcuacuacaacggcacccgcggcgaccgcaacaagcuccgccaccucaucuccgucaagcucggcaagauccccaccgucgagaacuccaucuuccacauggccgccugguccggcuccgccugccacgacggcaaggaguggaccuacaucggcgucgacggccccgacaacaacgcccuccucaaggucaaguacggcgaggccuacaccgacaccuaccacuccuacgccaacaagauccuccgcacccaggaguccgccugcaacugcaucggcggcaacugcuaccucaugaucaccgacggcuccgccuccggcgucuccgagugccgcuuccucaagauccgcgagggccgcaucaucaaggagaucuuccccaccggccgcgucaagcacaccgaggagugcaccugcggcuucgccuccaacaagaccaucgagugcgccugccgcgacaaccgcuacaccgccaagcgccccuucgucaagcucaacgucgagaccgacaccgccgagauccgccucaugugcaccgacaccuaccucgacaccccccgccccaacgacggcuccaucaccggccccugcgaguccgacggcgacaagggcuccggcggcaccaagggcggcuucguccaccagcgcaugaaguccaagaucggccgcugguacucccgcaccauguccaagaccgagcgcaugggcaugggccucuacgucaaguacgacggcgaccccugggccgacuccgacgcccucaccuucuccggcgucauggucuccaugaaggagcccggcugguacuccuucggcuucgagaucaaggacaagaagugcgacguccccugcaucggcaucgagaugguccacgacggcggcaaggagaccuggcacuccgccgccaccgccaucuacugccucaugggcuccggccagcuccucugggacaccgucaccggcgucgacauggcccucuga

SEQ ID NO: 125037 - RNA, 1401 nt, Artificial Sequence
  derived and/or modified CDS sequence (opt2) from neuraminidase__InfluenzaB__AFJ76228
augcuccccuccaccauccagacccucacccucuuccucaccuccggcggcguccuccucucccucuacgucuccgccucccucuccuaccuccucuacuccggcauccuccucaaguucucccccaccgagaucaccgcccccaccaugccccucaacugcgccaacgccuccaacguccaggccgucaaccgcuccgccaccaagggcgucacccuccuccuccccgagcccgaguggaccuacccccgccucuccugccccggcuccaccuuccagaaggcccuccucaucuccccccaccgcuucggcgagaccaagggcaacuccgccccccucaucauccgcgagcccuucaucgccugcggccccaaggagugcaagcacuucgcccucacccacuacgccgcccagcccggcggcuacuacaacggcacccgcgaggaccgcaacaagcuccgccaccucaucuccgucaagcucggcaagauccccaccgucgagaacuccaucuuccacauggccgccugguccggcuccgccugccacgacggccgcgaguggaccuacaucggcgucgacggccccgacuccaacgcccuccucaagaucaaguacggcgaggccuacaccgacaccuaccacuccuacgccaacaacauccuccgcacccaggaguccgccugcaacugcaucggcggcgacugcuaccucaugaucaccgacggcuccgccuccggcaucuccgagugccgcuuccucaagauccgcgagggccgcaucaucaaggagaucuuccccaccggccgcgucgagcacaccgaggagugcaccugcggcuucgccuccaacaagaccaucgagugcgccugccgcgacaacuccuacaccgccaagcgccccuucgucaagcucaacgucgagaccgacaccgccgagauccgccucaugugcaccgagaccuaccucgacaccccccgccccgacgacggcuccaucaccggccccugcgaguccaacggcgacaagggcuccggcggcaucaagggcggcuucguccaccagcgcauggccuccaagaucggccgcugguacucccgcaccauguccaagaccaagcgcaugggcaugggccucuacgucaaguacgacggcgaccccuggaucgacuccgacgcccucacccucuccggcgucauggucuccauggaggagcccggcugguacuccuucggcuucgagaucaaggacaagaagugcgacguccccugcaucggcaucgagaugguccacgacggcggcaagaagaccuggcacuccgccgccaccgccaucuacugccucaugggcuccggccagcuccucugggacaccgucaccggcgucgacauggcccucuga

SEQ ID NO: 125038 - RNA, 1401 nt, Artificial Sequence; identical to SEQ ID NO: 124704
  derived and/or modified CDS sequence (opt2) from neuraminidase__InfluenzaB__AFJ76261

SEQ ID NO: 125039 - RNA, 1401 nt, Artificial Sequence
  derived and/or modified CDS sequence (opt2) from neuraminidase__InfluenzaB__AFJ76283
augcuccccuccaccauccagacccucacccucuuccucaccuccggcggcguccuccucucccucuacgucuccgccucccucuccuaccuccucuacuccgacauccuccucaaguucccccccaccgagaucaccgcccccaccaugccccucgacugcgccaacgccuccaacguccaggccgucaaccgcuccgccaccaagggcgucacccuccuccuccccgagcccgaguggaccuacccccgccucuccugccccggcuccaccuuccagaaggcccuccucaucuccccccaccgcuucggcgagaccaagggcaacuccgccccccucaucauccgcgagcccuucaucgccugcggccccaaggagugcaagcacuucgcccucacccacuacgccgcccagcccggcggcuacuacaacggcacccgcggcgaccgcaacaagcuccgccaccucaucuccgucaagcucggcaagauccccaccgucgagaacuccaucuuccacauggccgccugguccggcuccgccugccacgacggcaaggaguggaccuacaucggcgucgacggccccgacaacaacgcccuccucaagaucaaguacggcgaggccuacaccgacaccuaccacuccuacgccaacaacauccuccgcacccaggaguccgccugcaacugcaucggcggcaacugcuaccucaugaucaccgacggcuccgccuccggcgucuccgagugccgcuuccucaagauccgcgagggccgcaucaucaaggagaucuuccccaccggccgcaucaagcacaccgaggagugcaccugcggcuucgccuccaacaagaccaucgagugcgccugccgcgacaacuccuacaccgccaagcgccccuucgucaagcucaacgucgagaccgacaccgccgagauccgccucaugugcaccgagaccuaccucgacaccccccgccccgacgacggcuccaucaccggccccugcgaguccaacggcgacaagggcuccggcggcaucaagggcggcuucguccaccagcgcauggccuccaagaucggccgcugguacucccgcaccauguccaagaccgagcgcaugggcaugggccucuacgucaaguacgacggcgaccccugggccgacuccgacgcccucaccuucuccggcgucauggucuccauggaggagcccggcugguacuccuucggcuucgagaucaaggacaagaagugcgacguccccugcaucggcaucgagaugguccacgacggcggcaaggagaccuggcacuccgccgccaccgccaucuacugccucaugggcuccggccagcuccucugggacaccgucaccggcgucaacauggcccucuga

SEQ ID NO: 125040 - RNA, 1401 nt, Artificial Sequence
  derived and/or modified CDS sequence (opt2) from neuraminidase__InfluenzaB__AFJ76305
augcuccccuccaccauccagacccucacccucuuccucaccuccggcggcguccuccucucccucuacgucuccgccucccucuccuaccuccucuacuccgacauccuccucaaguuccccuccaccgagaucaccgcccccaccaugccccucgacugcgccaacgccuccaacguccaggccgucaaccgcuccgccaccaagggcgucacccuccuccuccccgagcccgaguggaccuacccccgccucuccugccccggcuccaccuuccagcgcgcccuccucaucuccccccaccgcuucggcgagaccaagggcaacuccgccccccucaucauccgcgagcccuucaucgccugcggccccaaggagugcaagcacuucgcccucacccacuacgccgcccagcccggcggcuacuacaacggcacccgcggcgaccgcaacaagcuccgccaccucaucuccgucaagcucggcaagauccccaccgucgagaacuccaucuuccacauggccgccugguccggcuccgccugccacgacggcaaggaguggaccuacaucggcgucgacggccccgacaacaacgcccuccucaagaucaaguacggcgaggccuacaccgacaccuaccacuccuacgccaacaacauccuccgcacccaggaguccgccugcaacugcaucggcggcaacugcuaccucaugaucaccgacggcuccgccuccggcgucuccgagugccgcuuccucaagauccgcgagggccgcaucaucaaggagaucuuccccaccggccgcaucaagcacaccgaggagugcaccugcggcuucgccuccaacaagaccaucgagugcgccugccgcgacaacuccuacaccgccaagcgccccuucgucaagcucaacgucgagaccgacaccgccgagauccgccucaugugcaccgagaccuaccucgacaccccccgccccgacgacggcuccaucaccggccccugcgaguccaacggcgacaagggcuccggcggcaucaagggcggcuucguccaccagcgcauggccuccaagaucggccgcugguacucccgcaccauguccaagaccgagcgcaugggcaugggccucuacgucaaguacgacggcgaccccugggccgacuccgacgcccucaccuucuccggcgucauggucuccauggaggagcccggcugguacuccuucggcuucgagaucaaggacaagaagugcgacguccccugcaucggcaucgagaugguccacgacggcggcaaggagaccuggcacuccgccgccaccgccaucuacugccucaugggcuccggccagcuccucugggacaccgucaccggcgucgacauggcccucuga

SEQ ID NO: 125041 - RNA, 1401 nt, Artificial Sequence
  derived and/or modified CDS sequence (opt2) from neuraminidase__InfluenzaB__AFJ76316
augcuccccuccaccauccagacccucacccucuuccucaccuccggcggcguccuccucucccucuacgucuccgccucccucuccuaccuccucuacuccgacauccuccucaaguuccccuccaccgagaucaccgcccccaccaugccccucgacugcgccaacgccuccaacguccaggccgucaaccgcuccgccaccaagggcgucacccuccuccuccccgagcccgaguggaccuacccccgccucuccugccccggcuccaccuuccagaaggcccuccucaucuccccccaccgcuucggcgagaccaagggcaacuccgccccccucaucauccgcgagcccuucaucgccugcggccccaaggagugcaagcacuucgcccucacccacuacgccgcccagcccggcggcuacuacaacggcacccgcggcgaccgcaacaagcuccgccaccucaucuccgucaagcucggcaagauccccaccgucgagaacuccaucuuccacauggccgccugguccggcuccgccugccacgacggcaaggaguggaccuacaucggcgucgacggccccgacaacaacgcccuccucaagaucaaguacggcgaggccuacaccgacaccuaccacuccuacgccaacaacauccuccgcacccaggaguccgccugcaacugcaucggcggcaacugcuaccucaugaucaccgacggcuccgccuccggcgucuccgagugccgcuuccucaagauccgcgagggccgcaucaucaaggagaucuuccccaccggccgcaucaagcacaccgaggagugcaccugcggcuucgccuccaacaagaccaucgagugcgccugccgcgacaacuccuacaccgccaagcgccccuucgucaagcucaacgucgagaccgacaccgccgagauccgccucaugugcaccgagaccuaccucgacaccccccgccccgacgacggcuccaucaccggccccugcgaguccaacggcgacaagggcuccggcggcaucaagggcggcuucguccaccagcgcauggccuccaagaucggccgcugguacucccgcaccauguccaagaccgagcgcaugggcaugggccucuacgucaaguacgacggcgaccccugggccgacuccgacgcccucaccuucuccggcgucauggucuccauggaggagcccggcugguacuccuucggcuucgagaucaaggacaagaagugcgacguccccugcaucggcaucgagaugguccacgacggcggcaaggagaccuggcacuccgccgccaccgccaucuacugccucaugggcuccggccagcuccucugggacaccgucaccggcgucaacauggcccucuga

SEQ ID NO: 125042 - RNA, 1401 nt, Artificial Sequence; identical to SEQ ID NO: 124704
  derived and/or modified CDS sequence (opt2) from neuraminidase__InfluenzaB__AFJ76338

SEQ ID NO: 125043 - RNA, 1401 nt, Artificial Sequence
  derived and/or modified CDS sequence (opt2) from neuraminidase__InfluenzaB__AFJ77331
augcuccccuccaccauccagacccucacccucuuccucaccuccggcggcguccuccucucccucuacgucuccgccucccucuccuaccuccucuacuccgacauccuccucaaguucucccagaccgagaucaccgcccccaucaugccccucgacugcgccaacgccuccaacguccaggccgucaaccacuccgccgccaagggcgucacccuccuccuccccgagcccgaguggaccuacccccgccucuccugccccggcuccaccuuccagaaggcccuccucaucuccccccaccgcuucggcgagaccaagggcaacuccgccccccucaucauccgcgagcccuucaucgccugcggccccaccgagugcaagcacuucgcccucacccacuacgccgcccagcccggcggcuacuacaacggcacccgcgaggaccgcaacaagcuccgccaccucaucuccgucaagcucggcaagauccccaccgucgagaacuccaucuuccacauggccgccugguccggcuccgccugccacgacggcaaggaguggaccuacaucggcgucgacggccccgacuccaacgcccuccucaagaucaaguacggcgaggccuacaccgacaccuaccacuccuacgccaagaacauccuccgcacccaggaguccgccuacaacugcaucggcggcgacugcuaccucaugaucaccgacggccccgccuccggcaucuccgagugccgcuuccucaagauccgcgagggccgcaucaucaaggagaucuuccccaccggccgcgucaagcacaccgaggagugcaccugcggcuucgccuccaacaagaccaucgagugcgccugccgcgacaacuccuacaccgccaagcgccccuucgucaagcucaacgucgagaccgacaccgccgagauccgccucaugugcaccgagaccuaccucgacaccccccgccccaacgacggcuccaucaccggccccugcgaguccgacggcgacaagggcuccggcggcaucaagggcggcuucguccaccagcgcauggccuccaagaucggccgcugguacucccgcaccauguccaagaccaagcgcaugggcaugggccucuacgucaaguacgacggcgaccccuggaccgacuccgaggcccucgcccucuccggcgucauggucuccauggaggagcccggcugguacuccuucggcuucgagaucaaggacaagaagugcgacguccccugcaucggcaucgagaugguccacgacggcggcaagaccaccuggcacuccgccgccaccgccaucuacugccucaugggcuccggccagcuccucugggacaccgucaccggcgucgacauggcccucuga

SEQ ID NO: 125044 - RNA, 1401 nt, Artificial Sequence; identical to SEQ ID NO: 124779
  derived and/or modified CDS sequence (opt2) from neuraminidase__InfluenzaB__AFJ77351

SEQ ID NO: 125045 - RNA, 1401 nt, Artificial Sequence; identical to SEQ ID NO: 124671
  derived and/or modified CDS sequence (opt2) from neuraminidase__InfluenzaB__AFJ77362

SEQ ID NO: 125046 - RNA, 1401 nt, Artificial Sequence; identical to SEQ ID NO: 124824
  derived and/or modified CDS sequence (opt2) from neuraminidase__InfluenzaB__AFJ77384

SEQ ID NO: 125047 - RNA, 1401 nt, Artificial Sequence; identical to SEQ ID NO: 124746
  derived and/or modified CDS sequence (opt2) from neuraminidase__InfluenzaB__AFJ80132

SEQ ID NO: 125048 - RNA, 1401 nt, Artificial Sequence
  derived and/or modified CDS sequence (opt2) from neuraminidase__InfluenzaB__AFJ80143
augcuccccuccaccauccagacccucacccucuuccucaccuccggcggcguccuccucucccucuacgucuccgccucccucuccuaccuccucuacuccgacauccuccucaaguucucccccaccgagaucaccgcccccaccaugccccucgacugcgccaacgccuccaacguccaggccgucaaccgcuccgccaccaagggcgucacccuccuccuccccgagcccgaguggaccuacccccgccucuccugccccggcuccaccuuccagaaggcccuccucaucuccccccaccgcuucggcgagaccaagggcaacuccgccccccucaucauccgcgagcccuucaucgccugcggccccaaggagugcaagcacuucgcccucacccacuacgccgcccagcccggcggcuacuacaacggcacccgcgaggaccgcaacaagcuccgccaccucaucuccgucaagcucggcaagauccccaccgucgagaacuccaucuuccacauggccgccugguccggcuccgccugccacgacggccgcgaguggaccuacaucggcgucgacggccccgacuccaacgcccuccucaagaucaaguacggcgaggccuacaccgacaccuaccacuccuacgccaacaacauccuccgcacccaggaguccgccugcaacugcaucggcggcaacugcuaccucaugaucaccgacggcuccgccuccggcaucuccgagugccgcuuccucaagauccgcgagggccgcaucaucaaggagaucuuccccaccggccgcgucgagcacaccgaggagugcaccugcggcuucgccuccaacaagaccaucgagugcgccugccgcgacaacuccuacaccgccaagcgccccuucgucaagcucaacgucgagaccgacaccgccgagauccgccucaugugcaccgagaccuaccucgacaccccccgccccgacgacggcuccaucaccggccccugcgaguccaacggcgacaagggcuccggcggcaucaagggcggcuucguccaccagcgcauggccuccaagaucggccgcugguacucccgcaccauguccaagaccaagcgcaugggcaugggccucuacgucaaguacgacggcgaccccuggaccgacuccgacgcccucgcccucuccggcgucauggucuccauggaggagcccggcugguacuccuucggcuucgagaucaaggacaagaagugcgacguccccugcaucggcaucgagaugguccacgacggcggcaagaagaccuggcacuccgccgccaccgccaucuacugccucaugggcuccggccagcuccucugggacaccgucaccggcgucgacauggcccucuga

SEQ ID NO: 125049 - RNA, 1401 nt, Artificial Sequence
  derived and/or modified CDS sequence (opt2) from neuraminidase__InfluenzaB__AFJ80154
augcuccccuccaccauccagacccucacccucuuccucaccuccggcggcguccuccucucccucuacgucuccgccucccucuccuaccuccucuacuccgacauccuccucaaguucucccccaccgagaucaccgcccccaccaugccccucgacugcgccaacgccuccaacguccaggccgucaaccgcuccgccaccaagggcgucacccuccuccuccccgagcccgaguggaccuacccccgccucuccugccccggcuccaccuuccagaaggccauccucaucuccccccaccgcuucggcgagaccaagggcaacuccgccccccucaucauccgcgagcccuucaucgccugcggccccaaggagugcaagcacuucgcccucacccacuacgccgcccagcccggcggcuacuacaacggcacccgcgaggaccgcaacaagcuccgccaccucaucuccgucaagcucggcaagauccccaccgucgagaacuccaucuuccacauggccgccugguccggcuccgccugccacgacggccgcgaguggaccuacaucggcgucgacggccccgacuccaacgcccuccucaagaucaaguacggcgaggccuacaccgacaccuaccacuccuacgccaacaacauccuccgcacccaggaguccgccugcaacugcaucggcggcaacugcuaccucaugaucaccgacggcuccgccuccggcaucuccgagugccgcuuccucaagauccgcgagggccgcaucaucaaggagaucuuccccaccggccgcgucgagcacaccgaggagugcaccugcggcuucgccuccaacaagaccaucgagugcgccugccgcgacaacuccuacaccgccaagcgccccuucgucaagcucaacgucgagaccgacaccgccgagauccgccucaugugcaccgagaccuaccucgacaccccccgccccgacgacggcuccaucaccggccccugcgaguccaacggcgacaagggcuccggcggcaucaagggcggcuucguccaccagcgcauggccuccaagaucggccgcugguacucccgcaccauguccaagaccaagcgcaugggcaugggccucuacgucaaguacgacggcgaccccuggaccgacuccgacgcccucgcccucuccggcgucauggucuccauggaggagcccggcugguacuccuucggcuucgagaucaaggacaagaagugcgacguccccugcaucggcaucgagaugguccacgacggcggcaagaagaccuggcacuccgccgccaccgccaucuacugccucaugggcuccggccagcuccucugggacaccgucaccggcgucgacauggcccucuga

SEQ ID NO: 125050 - RNA, 1401 nt, Artificial Sequence
  derived and/or modified CDS sequence (opt2) from neuraminidase__InfluenzaB__AFJ80165
augcuccccuccaccauccagacccucacccucuuccucaccuccggcggcguccuccucucccucuacgucuccgccucccucuccuaccuccucuacuccgacauccuccucaaguucucccccaccgagaucaccgcccccaccaucccccucgacugcgccaacgccuccaacguccaggccgucaaccgcuccgccaccaagggcgucacccuccuccuccccgagcccgaguggaccuacccccgccucuccugccccggcuccaccuuccagaaggcccuccucaucuccccccaccgcuucggcgagaucaagggcaacuccgccccccucaucauccgcgagcccuucaucgccugcggccccaaggagugcaagcacuucgcccucacccacuacgccgcccagcccggcggcuacuacaacggcacccgcgaggaccgcaacaagcuccgccaccucaucuccgucaagcucggcaagauccccaccgucgagaacuccaucuuccacauggccgccugguccggcuccgccugccacgacggcaaggaguggaccuacaucggcgucgacggccccgacuccaacgcccuccucaagaucaaguacggcgaggccuacaccgacaccuaccacuccuacgccaacaacauccuccgcacccaggaguccgccugcaacugcaucggcggcaacugcuaccucaugaucaccgacggcuccgccuccggcaucuccgagugccgcuuccucaagauccgcgagggccgcaucaucaaggagaucuuccccaccggccgcgucgagcacaccgaggagugcaccugcggcuucgccuccaacaagaccaucgagugcgccugccgcgacaacuccuacaccgccaagcgccccuucgucaagcucaacgucgagaccgacaccgccgagauccgccucaugugcaccgagaccuaccucgacaccccccgccccgacgacggcuccaucaccggccccugcgaguccaacggcgacaagggcuccggcggcaucaagggcggcuucguccaccagcgcauggccuccaagaucggccgcugguacucccgcaccauguccaagaccaagcgcaugggcaugggccucuacgucaaguacgacggcgaccccuggaccgacuccgacgcccucgcccucuccggcgucauggucuccauggaggagcccggcugguacuccuucggcuucgagaucaaggacaagaagugcgacauccccugcaucggcaucgagaugguccacgacggcggcaaggagaccuggcacuccgccgccaccgccaucuacugccucaugggcuccggccagcuccucugggacaccgucaccggcgucgacauggcccucuga

SEQ ID NO: 125051 - RNA, 1401 nt, Artificial Sequence
  derived and/or modified CDS sequence (opt2) from neuraminidase__InfluenzaB__AFJ80176
augcuccccuccaccauccagacccucacccucuuccucaccuccggcggcguccuccucucccucuacgucuccgccucccucuccuaccuccucuacuccgacauccuccucaaguucucccccaccgagaucaccguccccaccaugccccucgacugcgccaacgccuccaacguccaggccgucaaccgcuccgccaccaagggcgucacccuccuccuccccgagcccgaguggaccuacccccgccucuccugccccggcuccaccuuccagaaggcccuccucaucuccccccaccgcuucggcgagaccaagggcaacuccgccccccucaucauccgcgagcccuucaucgccugcggccccaaggagugcaagcacuucgcccucacccacuacgccgcccagcccggcggcuacuacaacggcacccgcgaggaccgcaacaagcuccgccaccucaucuccgucaagcucggcaagauccccaccgucgagaacuccaucuuccacauggccgccugguccggcuccgccugccacgacggccgcgaguggaccuacaucggcgucgacggccccgacuccaacgcccuccucaagaucaaguacggcgaggccuacaccgacaccuaccacuccuacgccaacaacauccuccgcacccaggaguccgccugcaacugcaucggcggcaacugcuaccucaugaucaccgacggcuccgccuccggcaucuccgagugccgcuuccucaagauccgcgagggccgcaucaucaaggagaucuuccccaccggccgcgucgagcacaccgaggagugcaccugcggcuucgccuccaacaagaccaucgagugcgccugccgcgacaacuccuacaccgccaagcgccccuucgucaagcucaacgucgagaccgacaccgccgagauccgccucaugugcaccgagaccuaccucgacaccccccgccccgacgacggcuccaucaccggccccugcgaguccaacggcgacaagggcuccggcggcaucaagggcggcuucguccaccagcgcauggccuccaagaucggccgcugguacucccgcaccauguccaagaccaagcgcaugggcaugggccucuacgucaaguacgacggcgaccccuggaccgacuccgacgcccucgcccucuccggcgucauggucuccauggaggagcccggcugguacuccuucggcuucgagaucaaggacaagaagugcgacguccccugcaucggcaucgagaugguccacgacggcggcaagaagaccuggcacuccgccgccaccgccaucuacugccucaugggcuccggccagcuccucugggacaccgucaccggcgucgacauggcccucuga

SEQ ID NO: 125052 - RNA, 1401 nt, Artificial Sequence
  derived and/or modified CDS sequence (opt2) from neuraminidase__InfluenzaB__AFJ80187
augcuccccuccaccauccagacccucacccucuuccucaccuccggcggcguccuccucucccucuacgucuccgccucccucuccuaccuccucuacuccggcauccuccucaaguucucccccaccgagaucaccgcccccaccaugccccucaacugcgccaacgccuccaacuuccaggccgucaaccgcuccgccaccaagggcgucacccuccuccuccccgagcccgaguggaccuacccccgccucuccugccccggcuccaccuuccagaaggcccuccucaucuccccccaccgcuucggcgagaccaagggcaacuccgccccccucaucauccgcgagcccuucaucgccugcggccccaaggagugcaagcacuucgcccucacccacuacgccgcccagcccggcggcuacuacaacggcacccgcgaggaccgcaacaagcuccgccaccucaucuccgucaagcucggcaagauccccaccgucgagaacuccaucuuccacauggccgccugguccggcuccgccugccacgacggccgcgaguggaccuacaucggcgucgacggccccgacuccaacgcccuccucaagaucaaguacggcgaggccuacaccgacaccuaccacuccuacgccaacaacauccuccgcacccaggaguccgccugcaacugcaucggcggcgacugcuaccucaugaucaccgacggcuccgccuccggcaucuccgagugccgcuuccucaagauccgcgagggccgcaucaucaaggagaucuuccccaccggccgcgucgagcacaccgaggagugcaccugcggcuucgccuccaacaagaccaucgagugcgccugccgcgacaacuccuacaccgccaagcgccccuucgucaagcucaacgucgagaccgacaccgccgagauccgccucaugugcaccgagaccuaccucgacaccccccgccccgacgacggcuccaucaccggccccugcgaguccaacggcgacaagggcuccggcggcaucaagggcggcuucguccaccagcgcauggccuccaagaucggccgcugguacucccgcaccauguccaagaccaagcgcaugggcaugggccucuacgucaaguacgacggcgaccccuggaucgacuccgacgcccucacccucuccggcgucauggucuccauggaggagcccggcugguacuccuucggcuucgagaucaaggacaagaagugcgacguccccugcaucggcaucgagaugguccacgacggcggcaagaagaccuggcacuccgccgccaccgccaucuacugccucaugggcuccggccagcuccucugggacaccgucaccggcgucgacauggcccucuga

SEQ ID NO: 125053 - RNA, 1401 nt, Artificial Sequence; identical to SEQ ID NO: 125048
  derived and/or modified CDS sequence (opt2) from neuraminidase__InfluenzaB__AFJ80198

SEQ ID NO: 125054 - RNA, 1401 nt, Artificial Sequence; identical to SEQ ID NO: 124676
  derived and/or modified CDS sequence (opt2) from neuraminidase__InfluenzaB__AFJ80220

SEQ ID NO: 125055 - RNA, 1401 nt, Artificial Sequence
  derived and/or modified CDS sequence (opt2) from neuraminidase__InfluenzaB__AFJ80231
augcuccccuccaccauccagacccucacccucuuccucaccuccggcggcguccuccucucccucuacgucuccgccucccucuccuaccuccucuacuccggcauccuccucaaguucucccucaccgagaucaccgcccccaccaugccccucaacugcgccaacgccuccaacguccaggccgucaaccgcuccgccaccaagggcgucacccucuuccuccccgagcccgaguggaccuacccccgccucuccugccccggcuccaccuuccagaaggcccuccucaucuccccccaccgcuucggcgagaccaagggcaacuccgccccccucaucauccgcgagcccuucaucgccugcggccccaaggagugcaagcacuucgcccucacccacuacgccgcccagcccggcggcuacuacaacggcacccgcgaggaccgcaacaagcuccgccaccucaucuccgucgagcucggcaagauccccaccgucgagaacuccaucuuccacauggccgccugguccggcuccgccugccacgacggcaaggaguggaccuacaucggcgucgacggccccgacuccaacgcccuccucaagaucaaguacggcgaggccuacaccgacaccuaccacuccuacgccaacaacauccuccgcacccaggaguccgccugcaacugcaucggcggcgacugcuaccucaugaucaccgacggcuccgccuccggcaucuccgagugccgcuuccucaagauccgcgagggccgcaucaucaaggagaucuuccccaccggccgcgucgagcacaccgaggagugcaccugcggcuucgccuccaacaagaccaucgagugcgccugccgcgacaacuccuacaccgccaagcgccccuucgucaagcucaacgucgagaccgacaccgccgagauccgccucaugugcaccgagaccuaccucgacaccccccgccccgacgacggcuccaucaccggccccugcgaguccaacggcgacaagggcuccggcggcaucaagggcggcuucguccaccagcgcauggccuccaagaucggccgcugguacucccgcaccauguccaagaccaagcgcaugggcaugggccucuacgucaaguacgacggcgaccccuggaucgacuccgacgcccucacccucuccggcgucauggucuccauggaggagcccggcugguacuccuucggcuucgagaucaaggacaagaagugcgacguccccugcaucggcaucgagaugguccacgacggcggcaagaagaccuggcacuccgccgccaccgccaucuacugccucaugggcuccggccagcuccucugggacaccgucaccggcgucgacauggcccucuga

SEQ ID NO: 125056 - RNA, 1401 nt, Artificial Sequence
  derived and/or modified CDS sequence (opt2) from neuraminidase__InfluenzaB__AFJ80242
augcuccccuccaccauccagacccucacccucuuccucaccuccggcggcguccuccucucccucuacgucuccgcccuccucuccuaccuccucuacuccgacauccuccucaaguucucccccaccaaggucaucgcccccaccaugucccucgacugcgccaacgccuccaacguccaggccgucaaccacuccgccaccgaggagaugaccuuccuccuccccgagcccgaguggaccuacccccgccucuccugccagggcuccaccuuccagaaggcccuccucaucuccccccaccgcuucggcgaggccaagggcaacuccgccccccucaucauccgcgagcccuucaucgccugcggccccaaggagugcaagcacuucgcccucacccacuacgccgcccagcccggcggcuacuacaacggcacccgcgaggaccgcaacaagcuccgccaccucaucuccgucaaccucggcaagauccccaccgucgagaacuccaucuuccacauggccgccugguccggcuccgccugccacgacggccgcgaguggaccuacaucggcgucgacggccccgacuccaacgcccucaucaagaucaaguacggcgaggccuacaccgacaccuaccacuccuacgccaacaacauccuccgcacccaggaguccgccugcaacugcaucggcggcgacugcuaccucaugaucaccgacggcuccgccuccggcaucucccgcugccgcuuccucaagauccgcgagggccgcaucaucaaggagaucuuccccaccggccgcgucgagcacaccgaggagugcaccugcggcuucgccuccaacaagaccaucgagugcgccugccgcgacaacuccuacaccgccaagcgccccuucgucaagcucaacgucgagaccgacaccgccgagauccgccucaugugcaccgagaccuaccucgacaccccccgccccgacgacggcuccaucaccggccccugcgaguccaacggcgacaagggcaacggcggcaucaagggcggcuucguccaccagcgcauggccucccgcaucggccgcugguacucccgcaccauguccaagaccaagcgcaugggcauggagcucuacgucaaguacgacggcgaccccuggaccgacuccgacgcccucgcccccuccggcgucauggucuccauggaggagcccggcugguacuccuucggcuucgagaucaaggacaagaagugcgacguccccugcaucggcaucgagaugguccacgacggcggcaagaccaccuggcacuccgccgccaccgccaucuacugccucaugggcuccggccagcuccucugggacaccgucaccggcgucgacauggcccucuga

SEQ ID NO: 125057 - RNA, 1401 nt, Artificial Sequence
  derived and/or modified CDS sequence (opt2) from neuraminidase__InfluenzaB__AFJ80660
augcuccccuccaccauccagacccucacccucuuccucaccuccggcggcguccuccucucccucuacgucuccgccucccucuccuaccuccucuacuccgacauccuccucaaguucucccccaccgagaucaccgcccccaccaugccccucgacugcgccaacgccuccaacguccaggccgucaaccgcuccgccaccaagggcgucacccuccuccuccccgagcccgaguggaccuacccccgccucuccugccccggcuccaccuuccagaaggcccuccucaucuccccccaccgcuucggcgagaccaagggcaacuccgccccccucaucauccgcgagcccuucaucgccugcggccccaaggagugcaagcacuucgcccucacccacuacgccgcccagcccggcggcuacuacaacggcacccgcgaggaccgcaacaagcuccgccaccucaucuccgucaagcucggcaagauccccaccgucgagaacuccaucuuccacauggccgccugguccggcuccgccugccacgacggccgcgaguggaccuacaucggcgucgacggccccgacuccaacgcccuccucaagaucaaguacggcgaggccuacaccgacaccuaccacuccuacgccaacaacauccuccgcacccaggaguccgccugcaacugcaucggcggcgacugcuaccucaugaucaccgacggcuccgccuccggcaucuccgagugccgcuuccucaagauccgcgagggccgcaucaucaaggagaucuuccccaccggccgcgucgagcacaccgaggagugcaccugcggcuucgccuccaacaagaccaucgagugcgccugccgcgacaacuccuacaccgccaagcgccccuucgucaagcucaacgucgagaccgacaccgccgagauccgccucaugugcaccgagaccuaccucgacaccccccgccccgacgacggcuccaucaccggccccugcgaguccaacggcgacaagggcuccggcggcaucaagggcggcuucguccaccagcgcaugaccuccaagaucggccgcugguacucccgcaccauguccaagaccaagcgcaugggcaugggccucuacgucaaguacgacggcgaccccuggaccgacuccgacgcccucgcccucuccggcgucauggucuccauggaggagcccggcugguacuccuucggcuucgagaucaaggacaagaagugcgacguccccugcaucggcaucgagaugguccacgacggcggcaagaagaccuggcacuccgccgccaccgccaucuacugccucaugggcuccggccagcuccucugggacaccgucaccggcgucgacauggcccucuga

SEQ ID NO: 125058 - RNA, 1401 nt, Artificial Sequence; identical to SEQ ID NO: 125055
  derived and/or modified CDS sequence (opt2) from neuraminidase__InfluenzaB__AFJ80671

SEQ ID NO: 125059 - RNA, 1401 nt, Artificial Sequence; identical to SEQ ID NO: 125055
  derived and/or modified CDS sequence (opt2) from neuraminidase__InfluenzaB__AFJ80682

SEQ ID NO: 125060 - RNA, 1401 nt, Artificial Sequence
  derived and/or modified CDS sequence (opt2) from neuraminidase__InfluenzaB__AFJ80693
augcuccccuccaccauccagacccucacccucuuccucaccuccggcggcguccuccucucccucuacgucuccgccucccucuccuaccuccucuacuccggcauccuccucaaguucucccccaccgagaucaccgcccccaccaugccccucaacugcgccaacgccuccaacguccaggccgucaaccgcuccgccaccaagggcgucacccuccuccuccccgagcccgaguggaccuacccccgccucuccugccccggcuccaccuuccagaaggcccuccucaucuccccccaccgcuucggcgagaccaagggcaacuccgccccccucaucauccgcgagcccuucaucgccugcggccccaaggagugcaagcacuucgcccucacccacuacgccgcccagcccggcggcuacuacaacggcacccgcgaggaccgcaacaagcuccgccaccucaucuccgucaagcucggcaagauccccaccgucgagaacuccaucuuccacauggccgccugguccggcuccgccugccacgacggccgcgaguggaccuacaucggcgucgacggccccgacuccaacgcccuccucaagaucaaguacggcgaggccuacaccgacaccuaccacuccuacgccaacaacauccuccgcacccaggaguccgccugcaacugcaucggcggcgacugcuaccucaugaucaccgacggcuccgccuccggcaucuccgagugccgcuuccucaagauccgcgagggccgcaucaucaaggagaucuuccccaccggccgcgucgagcacaccgaggagugcaccugcggcuucgccuccaacaagaccaucgagugcgccugccgcgacaacuccuacaccgccaagcgccccuucgucaagcucaacgucgagaccgacaccgccgagauccgccucaugugcaccgagaccuaccucgacaccccccgccccgacgacggcuccaucaccggccccugcgagucccacggcgacaagggcuccggcggcaucaagggcggcuucguccaccagcgcauggccuccaagaucggccgcugguacucccgcaccauguccaagaccaagcgcaugggcaugggccucuacgucaaguacgacggcgaccccuggaucgacuccggcgcccucacccucuccggcgucauggucuccauggaggagcccggcugguacuccuucggcuucgagaucaaggacaagaagugcgacguccccugcaucggcaucgagaugguccacgacggcggcaagaagaccuggcacuccgccgccaccgccaucuacugccucaugggcuccggccagcuccucugggacaccgucaccggcgucgacauggcccucuga

SEQ ID NO: 125061 - RNA, 1401 nt, Artificial Sequence
  derived and/or modified CDS sequence (opt2) from neuraminidase__InfluenzaB__AFJ80726
augcuccccuccaccauccagacccucacccucuuccucaccuccggcggcguccuccucucccucuacgucuccgccucccucuccuaccuccucuacuccgacauccuccucaaguucucccagaccgagaucaccgcccccaccaugccccucgacugcgccaacgccuccaacguccaggccgucaaccgcuccgccaccaagggcgucacccuccuccuccccgagcccgaguggaccuacccccgccucuccugccccggcuccaccuuccagaaggcccuccucaucuccccccaccgcuucggcgagaccaagggcaacuccgccccccucaucauccgcgagcccuucaucgccugcggccccaaggagugcaagcacuucgcccucacccacuacgccgcccagcccggcggcuacuacaacggcacccgcgaggaccgcaacaagcuccgccaccucaucuccgucaagcucggcaagauccccaccgucgagaacuccaucuuccacauggccgccugguccggcuccgccugccacgacggccgcgaguggaccuacaucggcgucgacggccccgacuccaacgcccuccucaagaucaaguacggcgaggccuacaccgacaccuaccacuccuacgccaagaacauccuccgcacccaggaguccgccugcaacugcaucggcggcgacugcuaccucaugaucaccgacggcuccgccuccggcaucuccgagugccgcuuccucaagauccgcgagggccgcaucaucaaggagaucuuccccaccggccgcgucaagcacaccgaggagugcaccugcggcuucgccuccaacaagaccaucgagugcgccugccgcgacaacuccuacaccgccaagcgccccuucgucaagcucaacgucgagaccgacaccgccgagauccgccucaugugcaccgagaccuaccucgacaccccccgccccaacgacggcuccaucaccggccccugcgaguccaacggcgaccgcggcggcggcggcaucaagggcggcuucguccaccagcgcauggccuccaagaucggccgcugguacucccgcaccauguccaagaccaagcgcaugggcaugggccucuacgucaaguacgacggcgaccccuggaccgacuccgaggcccucgcccucuccggcgucaugguccccauggaggagcccggcugguacuccuucggcuucgagaucaaggacaagaagugcgacguccccugcaucggcaucgagaugguccacgacggcggcaagaccaccuggcacuccgccgccaccgccaucuacugccucaugggcuccggccagcuccucugggacaccgucaccggcgucgacauggcccucuga

SEQ ID NO: 125062 - RNA, 1401 nt, Artificial Sequence
  derived and/or modified CDS sequence (opt2) from neuraminidase__InfluenzaB__AFJ80737
augcuccccuccaccauccagacccucacccucuuccucaccuccggcggcguccuccucucccucuacgucuccgccucccucuccuaccuccucuacuccgacauccuccucaaguucucccagaccgagaucaccgcccccaucaugccccucgacugcgccaacgccuccaacguccaggccgucaaccgcuccgccaccaagggcgucacccuccuccuccccgagcccgaguggaccuacccccgccucuccugccccggcuccaccuuccagaaggcccuccucaucuccccccaccgcuucggcgagaccaagggcaacuccgccccccucaucauccgcgagcccuucaucgccugcggccccaaggagugcaagcacuucgcccucacccacuacgccgcccagcccggcggcuacuacaacggcacccgcgaggaccgcaacaagcuccgccaccucaucuccgucaagcucggcaagauccccaccgucgagaacuccaucuuccacauggccgccugguccggcuccgccugccacgacggccgcgaguggaccuacaucggcgucgacggccccgacuccaacgcccuccucaagaucaaguacggcgaggccuacaccgacaccuaccacuccuacgccaagaacauccuccgcacccaggaguccgccugcaacugcauccgcggcgacugcuaccucaugaucaccgacggccccgccuccggcaucuccgagugccgcuuccucaagauccgcgagggccgcaucaucaaggagaucuuccccaccggccgcgucaagcacaccgaggagugcaccugcggcuucgccuccaacaagaccaucgagugcgccugccgcgacaacuccuacaccgccaagcgccccuucgucaagcucaacgucgagaccgacaccgccgagauccgccucaugugcaccgagaccuaccucgacaccccccgccccaacgacggcuccaucaccggccccugcgaguccaacggcgacaagggcuccggcggcaucaagggcggcuucguccaccagcgcauggccuccaagaucggccgcugguacucccgcaccauguccaagaccaagcgcaugggcaugggccucuacgucaaguacgacggcgaccccuggaccgacuccgaggcccucgcccucuccggcgucauggucuccauggaggagcccggcugguacuccuucggcuucgagaucaaggacaagaagugcgacguccccugcaucggcaucgagaugguccacgacggcggcaagaccaccuggcacuccgccgccaccgccaucuacugccucaugggcuccggccagcuccucugggacaccgucaccggcgucgacauggcccucuga

SEQ ID NO: 125063 - RNA, 1401 nt, Artificial Sequence; identical to SEQ ID NO: 124704
  derived and/or modified CDS sequence (opt2) from neuraminidase__InfluenzaB__AFJ80759

SEQ ID NO: 125064 - RNA, 1401 nt, Artificial Sequence
  derived and/or modified CDS sequence (opt2) from neuraminidase__InfluenzaB__AFJ80770
augcuccccuccaccauccagacccucacccucuuccucaccuccggcggcguccuccucucccucuacgucuccgccucccucuccuaccuccucuacuccgacauccuccucaaguucucccagaccgagaucaccgcccccaccaugccccucgacugcgccaacgccuccaacguccaggccgucaaccgcuccgccaccaagggcgucacccuccuccuccccgagcccgaguggaccuacccccgccucuccugccccggcuccaccuuccagaaggcccuccucaucuccccccaccgcuucggcgagaccaagggcaacuccgccccccucaucauccgcgagcccuucaucgccugcggccccaacgagugcaagcacuucgcccucacccacuacgccgcccagcccggcggcuacuacaacggcacccgcgaggaccgcaacaagcuccgccaccucaucuccgucaagcucggcaagauccccaccgucgagaacuccaucuuccacauggccgccugguccggcuccgccugccacgacggccgcgaguggaccuacaucggcgucgacggccccgacuccaacgcccuccucaagaucaaguacggcgaggccuacaccgacaccuaccacuccuacgccaagaacauccuccgcacccaggaguccgccugcaacugcaucggcggcgacugcuaccucaugaucaccgacggccccgccuccggcaucuccgagugccgcuuccucaagauccgcgagggccgcaucaucaaggagaucuuccccaccggccgcgucaagcacaccgaggagugcaccugcggcuucgccuccaacaagaccaucgagugcgccugccgcgacaacuccuacaccgccaagcgccccuucgucaagcucgacgucgagaccgacaccgccgagauccgccucaugugcaccgagaccuaccucgacaccccccgccccaacgacggcuccaucaccggccccugcgaguccaacggcgacaagggcuccggcggcaucaagggcggcuucguccaccagcgcauggccuccaagaucggccgcugguacucccgcacccucuccaagaccaagcgcaugggcaugggccucuacgucaaguacgacggcgaccccuggaccgacuccgaggcccucgcccucuccggcgucauggucuccauggaggagcccggcugguacuccuucggcuucgagaucaaggacaagaagugcgacguccccugcaucggcaucgagaugguccacgacggcggcaagaccaccuggcacuccgccgccaccgccaucuacugccucaugggcuccggccagcuccucugggacaccgucaccggcgucgacauggcccucuga

SEQ ID NO: 125065 - RNA, 1401 nt, Artificial Sequence; identical to SEQ ID NO: 124704
  derived and/or modified CDS sequence (opt2) from neuraminidase__InfluenzaB__AFJ80785

SEQ ID NO: 125066 - RNA, 1401 nt, Artificial Sequence; identical to SEQ ID NO: 124704
  derived and/or modified CDS sequence (opt2) from neuraminidase__InfluenzaB__AFJ80796

SEQ ID NO: 125067 - RNA, 1401 nt, Artificial Sequence
  derived and/or modified CDS sequence (opt2) from neuraminidase__InfluenzaB__AFJ80807
augcuccccuccaccauccagacccucacccucuuccucaccuccggcggcguccuccucucccucuacgucuccgucucccucuccuaccuccucuacuccgacauccuccucaaguuccccuccaccgagaucaccgcccccaccaugccccucgacugcgccaacgccuccaacguccaggccgucaaccgcuccgccaccaagggcgucacccuccuccuccccgagcccgaguggaccuacccccgccucuccugccccggcuccaccuuccagaaggcccuccucaucuccccccaccgcuucggcgagaccaagggcaacuccgccccccucaucauccgcgagcccuucaucgccugcggccccaaggagugcaagcacuucgcccucacccacuacgccgcccagcccggcggcuacuacaacggcacccgcggcgaccgcaacaagcuccgccaccucaucuccgucaagcucggcaagauccccaccgucgagaacuccaucuuccacauggccgccugguccggcuccgccugccacgacggcaaggaguggaccuacaucggcgucgacggccccgacaacaacgcccuccucaagaucaaguacggcgaggccuacaccgacaccuaccacuccuacgccaacaacauccuccgcacccaggaguccgccugcaacugcaucggcggcaacugcuaccucaugaucaccgacggcuccgccuccggcgucuccgagugccgcuuccucaagauccgcgagggccgcaucaucaaggagaucuuccccaccggccgcaucaagcacaccgaggagugcaccugcggcuucgccuccaacaagaccaucgagugcgccugccgcgacaacuccuacaccgccaagcgccccuucgucaagcucaacgucgagaccgacaccgccgagauccgccucaugugcaccgagaccuaccucgacaccccccgccccgacgacggcuccaucaccggccccugcgaguccaacggcgacaagggcuccggcggcaucaagggcggcuucguccaccagcgcauggccuccaagaucggccgcugguacucccgcaccauguccaagaccaagcgcaugggcaugggccucuacgucaaguacgacggcgaccccugggccgacuccgacgcccucgccuucuccggcgucauggucuccauggaggagcccggcugguacuccuucggcuucgagaucaaggacaagaagugcgacguccccugcaucggcaucgagaugguccacgacggcggcaaggagaccuggcacuccgccgccaccgccaucuacugccucaugggcuccggccagcuccucugggacaccgucaccggcgucaacauggcccucuga

SEQ ID NO: 125068 - RNA, 1401 nt, Artificial Sequence; identical to SEQ ID NO: 124704
  derived and/or modified CDS sequence (opt2) from neuraminidase__InfluenzaB__AFJ80818

SEQ ID NO: 125069 - RNA, 1401 nt, Artificial Sequence; identical to SEQ ID NO: 124704
  derived and/or modified CDS sequence (opt2) from neuraminidase__InfluenzaB__AFJ80829

SEQ ID NO: 125070 - RNA, 1401 nt, Artificial Sequence; identical to SEQ ID NO: 125041
  derived and/or modified CDS sequence (opt2) from neuraminidase__InfluenzaB__AFJ80840

SEQ ID NO: 125071 - RNA, 1401 nt, Artificial Sequence; identical to SEQ ID NO: 125041
  derived and/or modified CDS sequence (opt2) from neuraminidase__InfluenzaB__AFJ80851

SEQ ID NO: 125072 - RNA, 1401 nt, Artificial Sequence
  derived and/or modified CDS sequence (opt2) from neuraminidase__InfluenzaB__AFJ80862
augcuccccuccaccauccagacccucacccucuuccucaccuccggcggcguccuccucucccucuacgucuccgccucccucuccuaccuccucuacuccgacauccuccucaaguuccccuccaccgagaucaccgcccccaccaugccccucgacugcgccaacgccuccaacguccaggccaugaaccgcuccgccaccaagggcgucacccuccuccuccccgagaccgaguggaccuacccccgccucuccugccccggcuccaccuuccagaaggcccuccucaucuccccccaccgcuucggcgagaccaagggcaacuccgccccccucaucauccgcgagcccuucaucgccugcggccccaaggagugcaagcacuucgcccucacccacuacgccgcccagcccggcggcuacuacaacggcacccgcggcgaccgcaacaagcuccgccaccucaucuccgucaagcucggcaagauccccaccgucgagaacuccaucuuccacauggccgccugguccggcuccgccugccacgacggcaaggaguggaccuacaucggcgucgacggccccgacaacaacgcccuccucaagaucaaguacggcgaggccuacaccgacaccuaccacuccuacgccaacaacauccuccgcacccaggaguccgccugcaacugcaucggcggcaacugcuaccucaugaucaccgacggcuccgccuccggcgucuccgagugccgcuuccucaagauccgcgagggccgcaucaucaaggagaucuuccccaccggccgcaucaagcacaccgaggagugcaccugcggcuucgccuccaacaagaccaucgagugcgccugccgcgacaacuccuacaccgccaagcgccccuucgucaagcucaacgucgagaccgacaccgccgagauccgccucaugugcaccgagaccuaccucgacaccccccgccccgacgacggcuccaucaccggccccugcgaguccaacggcgacaagggcuccggcggcaucaagggcggcuucguccaccagcgcauggccuccaagaucggccgcugguacucccgcaccauguccaagaccgagcgcaugggcaugggccucuacgucaaguacgacggcgaccccugggccgacuccgacgcccucaccuucuccggcgucauggucuccauggaggagcccggcugguacuccuucggcuucgagaucaaggacaagaagugcgacguccccugcaucggcaucgagaugguccacgacggcggcaaggagaccuggcacuccgccgccaccgccaucuacugccucaugggcuccggccagcuccucugggacaccgucaccggcgucaacauggcccucuga

SEQ ID NO: 125073 - RNA, 1401 nt, Artificial Sequence
  derived and/or modified CDS sequence (opt2) from neuraminidase__InfluenzaB__AFJ80873
augcuccccuccaccauccagacccucacccucuuccucaccuccggcggcguccuccucucccucuacgucuccgccucccucucccaccuccucuacuccggcauccuccucaaguuccccuccaccgagaucaccgcccccaccaugccccucgacugcgccaacgccuccaacguccaggccgucaaccgcuccgccaccaagggcgucacccuccucccccccgagcccgaguggaccuacccccgccucuccugccccggcuccaccuuccagaaggcccuccucaucuccccccaccgcuucggcgagaccaagggcaacuccgccccccucaucauccgcgagcccuucaucgccugcggccccaaggagugcaagcacuucgcccucacccacuacgccgcccagcccggcggcuacuacaacggcacccgcggcgaccgcaacaagcuccgccaccucaucuccgucaagcucggcaagauccccaccgucgagaacuccaucuuccacauggccgccugguccggcuccgccugccacgacggcaaggaguggaccuacaucggcgucgacggccccgacaacaacgcccuccucaagaucaaguacggcgaggccuacaccgacaccuaccacuccuacgccaacaacauccuccgcacccaggaguccgccugcaacugcaucggcggcaacugcuaccucaugaucaccgacggcuccgccuccggcgucuccgagugccgcuuccucaagauccgcgagggccgcaucaucaaggagaucuuccccaccggccgcaucaagcacaccgaggagugcaccugcggcuucgccuccaacaagaccaucgagugcgccugccgcgacaacuccuacaccgccaagcgccccuucgucaagcucaacgucgagaccgacaccgccgagauccgccucaugugcaccgagaccuaccucgacaccccccgccccgacgacggcuccaucaccggccccugcgaguccaacggcgacaagggcuccggcggcaucaagggcggcuucguccaccagcgcauggccuccaagaucggccgcugguacucccgcaccauguccaagaccgagcgcaugggcaugggccucuacgucaaguacgacggcgaccccugggccgacuccgacgcccucaccuucuccggcgucauggucuccauggaggagcccggcugguacuccuucggcuucgagaucaaggacaagaagugcgacguccccugcaucggcaucgagaugguccacgacggcggcaaggagaccuggcacuccgccgccaccgccaucuacugccucaugggcuccggccagcuccucugggacaccgucaccggcgucaacauggcccucuga

SEQ ID NO: 125074 - RNA, 1401 nt, Artificial Sequence
  derived and/or modified CDS sequence (opt2) from neuraminidase__InfluenzaB__AFJ80884
augcuccccuccaccauccagacccucacccucuuccucaccuccggcggcguccuccucucccucuacgucuccgccucccucuccuaccuccucuacuccgacauccuccucaaguuccccuccaccgagaucaccgcccccaccaugccccucgacugcgccaacgccuccaacguccaggccgucaaccgcuccgccaccaagggcgucacccuccuccuccccgagcccgaguggaccuacccccgccucuccugccccggcuccaccuuccagaaggcccuccucaucuccccccaccgcuucggcgagaccaagggcaacuccgccccccucaucauccgcgagcccuucaucgccugcggccccaaggagugcaagcacuucgcccucacccacuacgccgcccagcccggcggcuacuacaacggcacccgcggcgaccgcaacaagcuccgccaccucaucuccgucaagcucggcaagauccccaccgucgagaacuccaucuuccacauggccgccugguccggcuccgccugccacgacggcaaggaguggaccuacaucggcgucgacggccccgacaacaacgcccuccucaagaucaaguacggcgaggccuacaccgacaccuaccacuccuacgccaacaacauccuccgcacccaggaguccgccugcaacugcaucggcggcaacugcuaccucaugaucaccgacggcuccgccuccggcgucuccaagugccgcuuccucaagauccgcgagggccgcaucaucaaggagaucuuccccaccggccgcaucaagcacaccgaggagugcaccugcggcuucgccuccaacaagaccaucgagugcgccugccgcgacaacuccuacaccgccaagcgccccuucgucaagcucaacgucgagaccgacaccgccgagauccgccucaugugcaccgagaccuaccucgacaccccccgccccgacgacggcuccaucaccggccccugcgaguccaacggcgacaagggcuccggcggcaucaagggcggcuucguccaccagcgcauggccuccaagaucggccgcugguacucccgcaccauguccaagaccgagcgcaugggcaugggccucuacgucaaguacgacggcgaccccugggccgacuccgacgcccucaccuucuccggcgucauggucuccauggaggagcccggcugguacuccuucggcuucgagaucaaggacaagaagugcgacguccccugcaucggcaucgagaugguccacgacggcggcaaggagaccuggcacuccgccgccaccgccaucuacugccucaugggcuccggccagcuccucugggacaccgucaccggcgucaacauggcccucuga

SEQ ID NO: 125075 - RNA, 1401 nt, Artificial Sequence; identical to SEQ ID NO: 125040
  derived and/or modified CDS sequence (opt2) from neuraminidase__InfluenzaB__AFJ80895

SEQ ID NO: 125076 - RNA, 1401 nt, Artificial Sequence
  derived and/or modified CDS sequence (opt2) from neuraminidase__InfluenzaB__AFJ80917
augcuccccuccaccauccagacccucacccucuuccucaccuccggcggcguccuccucucccucuacgucuccgccucccucuccuaccuccucuacuccgacauccuccucaaguuccccuccaccgagaucaccgcccccaccaugccccucgacugcgccaacgccuccaacguccaggccgucaaccgcuccgccaccaagggcgucacccuccuccuccccgagcccgaguggaccuacccccgccucuccugccccggcuccaccuuccagaaggcccuccucaucuccccccaccgcuucggcgagaccaagggcaacuccgccccccucaucauccgcgagcccuucaucgccugcggccccaaggagugcaagcacuucgcccucacccacuacgccgcccagcccggcggcuacuacaacggcacccgcggcgaccgcaacaagcuccgccaccucaucuccgucaagcucggcaagauccccaccgucgagaacuccaucuuccacauggccgccugguccggcuccgccugccacgacggcaaggaguggaccuacaucggcgucgacggccccgacaacaacgcccuccucaagaucaaguacggcgaggccuacaccgacaccuaccacuccuacgccaacaacauccuccgcacccaggaguccgccugcaacugcaucggcggcaacugcuaccucaugaucaccgacggcuccgccuccggcgucuccgagugccgcuuccucaagauccgcgagggccgcaucaucaaggagaucuuccccaccggccgcaucaagcacaccgaggagugcaccugcggcuucgccuccaacaagaccaucgagugcaccugccgcgacaacuccuacaccgccaagcgccccuucgucaagcucaacgucgagaccgacaccgccgagauccgccucaugugcaccgagaccuaccucgacaccccccgccccgacgacggcuccaucaccggccccugcgaguccaacggcgacaagggcuccggcggcaucaagggcggcuucguccaccagcgcauggccuccaagaucggccgcugguacucccgcaccauguccaagaccgagcgcaugggcaugggccucuacgucaaguacgacggcgaccccugggccgacuccgacgcccucaccuucuccggcgucauggucuccauggaggagcccggcugguacuccuucggcuucgagaucaaggacaagaagugcgacguccccugcaucggcaucgagaugguccacgacggcggcaaggagaccuggcacuccgccgccaccgccaucuacugccucaugggcuccggccagcuccucugggacaccgucaccggcgucaacauggcccucuga

SEQ ID NO: 125077 - RNA, 1401 nt, Artificial Sequence
  derived and/or modified CDS sequence (opt2) from neuraminidase__InfluenzaB__AFJ80928
augcuccccuccaccauccagacccucacccucuuccucaccuccggcggcguccuccucucccucuacgucuccgccucccucuccuaccuccucuacuccgacauccuccucaaguuccccuccaccgagaucaccgcccccaccaugccccucgacugcgccaacgccuccaacguccaggccgucaaccgcuccgccaccaagggcgucacccuccuccuccccgagcccgaguggaccuacccccgccucuccugccccggcuccaccuuccagaaggcccuccucaucuccccccaccgcuucggcgagaccaagggcaacuccgccccccucaucauccgcgagcccuucaucgccugcgagcccaaggagugcaagcacuucgcccucacccacuacgccgcccagcccggcggcuacuacaacggcacccgcggcgaccgcaacaagcuccgccaccucaucuccgucaagcucggcaagauccccaccgucgagaacuccaucuuccacauggccgccugguccggcuccgccugccacgacggcaaggaguggaccuacaucggcgucgacggccccgacaacaacgcccuccucaagaucaaguacggcgaggccuacaccgacaccuaccacuccuacgccaacaacauccuccgcacccaggaguccgccugcaacugcaucggcggcaacugcuaccucaugaucaccgacggcuccgccuccggcgucuccgagugccgcuuccucaagauccgcgagggccgcaucaucaaggagaucuuccccaccggccgcaucaagcacaccgaggagugcaccugcggcuucgccuccaacaagaccaucgagugcgccugccgcgacaacuccuacaccgccaagcgccccuucgucaagcucaacgucgagaccgacaccgccgagauccgccucaugugcaccgagaccuaccucgacaccccccgccccgacgacggcuccaucaccggccccugcgaguccaacggcgacaagggcuccggcggcaucaagggcggcuucguccaccagcgcauggccuccaagaucggccgcugguacucccgcaccauguccaagaccgagcgcaugggcaugggccucuacgucaaguacgacggcgaccccugggccgacuccgacgcccucaccuucuccggcgucauggucuccauggaggagcccggcugguacuccuucggcuucgagaucaaggacaagaagugcgacguccccugcaucggcaucgagaugguccacgacggcggcaaggagaccuggcacuccgccgccaccgccaucuacugccucaugggcuccggccagcuccucugggacaccgucaccggcgucaacauggcccucuga

SEQ ID NO: 125078 - RNA, 1401 nt, Artificial Sequence
  derived and/or modified CDS sequence (opt2) from neuraminidase__InfluenzaB__AFJ80939
augcuccccuccaccauccagacccucacccucuuccucaccuccggcggcguccuccucucccucuacgucuccgccucccucuccuaccuccucuacuccgacauccuccucaaguucccccccaccgaggucaccgcccccaccaugccccucgacugcgccaacgccuccaacguccaggccgucaaccgcuccgccaccaagggcgucacccuccuccuccccgagcccgaguggaccuacccccgccucuccugccccggcuccaccuuccagaaggcccuccucaucuccccccaccgcuucggcgagaccaagggcaacuccgccccccucaucauccgcgagcccuucaucgccugcggccccaaggagugcaagcacuucgcccucacccacuacgccgcccagcccggcggcuacuacaacggcacccgcggcgaccgcaacaagcuccgccaccucaucuccgucaagcucggcaagauccccaccgucgagaacuccaucuuccacauggccgccugguccggcuccgccugccacgacggcaaggaguggaccuacaucggcgucgacggccccgacaacaacgcccuccucaagaucaaguacggcgaggccuacaccgacaccuaccacuccuacgccaacaacauccuccgcacccaggaguccgccugcaacugcaucggcggcaacugcuaccucaugaucaccgacggcuccgccuccggcgucuccgagugccgcuuccucaagauccgcgagggccgcaucaucaaggagaucuuccccaccggccgcaucaagcacaccgaggagugcaccugcggcuucgccuccaacaagaccaucgagugcgccugccgcgacaacuccuacaccgccaagcgccccuucgucaagcucaacgucgagaccgacaccgccgagauccgccucaugugcaccgagaccuaccucgacaccccccgccccgacgacggcuccaucaccggccccugcgaguccaacggcgacaagggcuccggcggcaucaagggcggcuucguccaccagcgcauggccuccaagaucggccgcugguacucccgcaccauguccaagaccgagcgcaugggcaugggccucuacgucaaguacgacggcgaccccugggccgacuccgacgcccucaccuucuccggcgucauggucuccauggaggagcccggcugguacuccuucggcuucgagaucaaggacaagaagugcgacguccccugcaucggcaucgagaugguccacgacggcggcaaggagaccuggcacuccgccgccaccgccaucuacugccucaugggcuccggccagcuccucugggacaccgucaccggcgucaacauggcccucuga

SEQ ID NO: 125079 - RNA, 1401 nt, Artificial Sequence
  derived and/or modified CDS sequence (opt2) from neuraminidase__InfluenzaB__AFJ80950
augcuccccuccaccauccagacccucacccucuuccucaccuccggcggcguccuccucucccucuacgucuccgccucccucuccuaccuccucuacuccgacauccuccucaaguucucccagaccgagaucaccgcccccaucaugccccucgacugcgccaacgccuccaacguccaggccgucaaccgcuccgccgccaagggcgucacccuccuccuccccgagcccgaguggaccuacccccgccucuccugccccggcuccaccuuccagaaggcccuccucaucuccccccaccgcuucggcgagaccaagggcaacuccgccccccucaucauccgcgagcccuucaucgccugcggccccaccgagugcaagcacuucgcccucacccacuacgccgcccagcccggcggcuacuacaacggcacccgcgaggaccgcaacaagcuccgccaccucaucuccgucaagcucggcaagauccccaccgucgagaacuccaucuuccacauggccgccugguccggcuccgccugccacgacggcaaggaguggaccuacaucggcgucgacggccccgacuccaacgcccuccucaagaucaaguacggcgaggccuacaccgacaccuaccacuccuacgccaagaacauccuccgcacccaggaguccgccugcaacugcaucggcggcgacugcuaccucaugaucaccgacggccccgccuccggcaucuccgagugccgcuuccucaagauccgcgagggccgcaucaucaaggagaucuuccccaccggccgcgucaagcacaccgaggagugcaccugcggcuucgccuccaacaagaccaucgagugcgccugccgcgacaacuccuacaccgccaagcgccccuucgucaagcucaacgucgagaccgacaccgccgagauccgccucaugugcaccgagaccuaccucgacaccccccgccccaacgacggcuccaucaccggccccugcgaguccgacggcgacaagggcaacggcggcaucaagggcggcuucguccaccagcgcauggccuccaagaucggccgcugguacucccgcaccauguccaagaccaagcgcaugggcaugggccucuacgucaaguacgacggcgaccccuggaccgacuccgaggcccucgcccucuccggcgucauggucuccauggaggagcccggcugguacuccuucggcuucgagaucaaggacaagaagugcgacguccccugcaucggcaucgagaugguccacgacggcggcaagaccaccuggcacuccgccgccaccgccaucuacugccucaugggcuccggccagcuccucugggacaccgucaccggcgucgacauggcccucuga

SEQ ID NO: 125080 - RNA, 1401 nt, Artificial Sequence; identical to SEQ ID NO: 125041
  derived and/or modified CDS sequence (opt2) from neuraminidase__InfluenzaB__AFJ80961

SEQ ID NO: 125081 - RNA, 1401 nt, Artificial Sequence; identical to SEQ ID NO: 124824
  derived and/or modified CDS sequence (opt2) from neuraminidase__InfluenzaB__AFJ80972

SEQ ID NO: 125082 - RNA, 1401 nt, Artificial Sequence; identical to SEQ ID NO: 124824
  derived and/or modified CDS sequence (opt2) from neuraminidase__InfluenzaB__AFJ80983

SEQ ID NO: 125083 - RNA, 1401 nt, Artificial Sequence; identical to SEQ ID NO: 124779
  derived and/or modified CDS sequence (opt2) from neuraminidase__InfluenzaB__AFJ80994

SEQ ID NO: 125084 - RNA, 1401 nt, Artificial Sequence; identical to SEQ ID NO: 124824
  derived and/or modified CDS sequence (opt2) from neuraminidase__InfluenzaB__AFJ81005

SEQ ID NO: 125085 - RNA, 1401 nt, Artificial Sequence; identical to SEQ ID NO: 124824
  derived and/or modified CDS sequence (opt2) from neuraminidase__InfluenzaB__AFJ84364

SEQ ID NO: 125086 - RNA, 1401 nt, Artificial Sequence
  derived and/or modified CDS sequence (opt2) from neuraminidase__InfluenzaB__AFJ90399
augcuccccuccaccauccagacccucacccucuuccucaccuccggcggcguccuccucucccucuacgucuccgccucccucuccuaccuccucuacuccgacauccuccucaaguuccccuccaccgagaucaccgccccccccaugccccucgacugcgccaacgccuccaacguccaggccgucaaccgcuccgccaccaagggcgucacccuccuccuccccgagcccgaguggaccuacccccgccucuccugccccggcuccaccuuccagcgcgcccuccucaucuccccccaccgcuucggcgagaccaagggcaacuccgccccccucaucauccgcgagcccuucaucgccugcggcccccgcgagugcaagcacuucgcccucacccacuacgccgcccagcccggcggcuacuacaacggcacccgcggcgaccgcaacaagcuccgccaccucaucuccgucaagcucggcaagauccccaccgucgagaacuccaucuuccacauggccgccugguccggcuccgccugccacgacggcaaggaguggaccuacaucggcgucgacggccccgacaacaacgcccuccucaagaucaaguacggcgaggccuacaccgacaccuaccacuccuacgccaacaacauccuccgcacccaggaguccgccugcaacugcaucggcggcaacugcuaccucaugaucaccgacggcuccgccuccggcgucuccgagugccgcuuccucaagauccgcgagggccgcaucaucaaggagaucuuccccaccggccgcaucaagcacaccgaggagugcaccugcggcuucgccuccaacaagaccaucgagugcgccugccgcgacaacuccuacaccgccaagcgccccuucgucaagcucaacgucgagaccgacaccgccgagauccgccucaugugcaccgagaccuaccucgacaccccccgccccgacgacggcuccaucaccggccccugcgaguccaacggcgacaagggcuccggcggcaucaagggcggcuucguccaccagcgcaugaccuccaagaucggccgcugguacucccgcaccauguccaagaccgagcgcaugggcaugggccucuacgucaaguacgacggcgaccccugggccgacuccgacgcccucaccuucuccggcgucauggucuccauggaggagcccggcugguacuccuucggcuucgagaucaaggacaagaagugcgacguccccugcaucggcaucgagaugguccacgacggcggcaaggagaccuggcacuccgccgccaccgccaucuacugccucaugggcuccggccagcuccucugggacaccgucaccggcgucaacauggcccucuga

SEQ ID NO: 125087 - RNA, 1401 nt, Artificial Sequence
  derived and/or modified CDS sequence (opt2) from neuraminidase__InfluenzaB__AFJ90410
augcuccccuccaccauccagacccucacccucuuccucaccuccggcggcguccuccucucccucuacgucuccgccucccucuccuaccuccucuacuccgacauccuccucaaguucucccagaccgagaucaccgcccccaucaugccccucgacugcgccaacgccuccaacguccaggccgucaaccgcuccgccgccaagggcgucacccuccuccuccccaagcccgaguggaccuacccccgccucuccugccccggcuccaccuuccagaaggcccuccucaucuccccccaccgcuucggcgagaccaagggcaacuccgccccccucaucauccgcgagcccuucaucgccugcggccccaccgagugcaagcacuucgcccucacccacuacgccgcccagcccggcggcuacuacaacggcacccgcgaggaccgcaacaaccuccgccaccucaucuccgucaagcucggcaagauccccaccgucgagaacuccaucuuccacauggccgccugguccggcuccgccugccacgacggcaaggaguggaccuacaucggcgucgacggccccgacuccaacgcccuccucaagaucaaguacggcgaggccuacaccgacaccuaccacuccuacgccaagaacauccuccgcacccaggaguccgccugcaacugcaucggcggcgacugcuaccucaugaucaccgacggccccgccuccggcaucuccgagugccgcuuccucaagauccgcgagggccgcaucaucaaggagaucuuccccaccggccgcgucaagcacaccgaggagugcaccugcggcuucgccuccaacaagaccaucgagugcgccugccgcgacaacuccuacaccgccaagcgccccuucgucaagcucaacgucgagaccgacaccgccgagauccgccucaugugcaccgagaccuaccucgacaccccccgccccaacgacggcuccaucaccggccccugcgaguccgacggcgacaagggcuccggcggcaucaagggcggcuucguccaccagcgcauggccuccaagaucggccgcugguacucccgcaccauguccaagaccaagcgcaugggcaugggccucuacgucaaguacgacggcgaccccuggaccgacuccgaggcccucgcccucuccggcgucauggucuccauggaggagcccggcugguacuccuucggcuucgagaucaaggacaagaagugcgacguccccugcaucggcaucgagaugguccacgacggcggcaagaccaccuggcacuccgccgccaccgccaucuacugccucaugggcuccggccagcuccucugggacaccgucaccggcgucgacauggcccucuga

SEQ ID NO: 125088 - RNA, 1401 nt, Artificial Sequence
  derived and/or modified CDS sequence (opt2) from neuraminidase__InfluenzaB__AFJ90432
augcuccccuccaccauccagacccucacccucuuccucaccuccggcggcguccuccucucccucuacgucuccaccucccucuccuaccuccucuacuccgacauccuccucaaguucucccagaccgagaucaccgcccccaucaugccccucgacugcgccaacgccuccaacguccaggccgucaaccgcuccgccgccaagggcgucacccuccuccuccccgagcccgaguggaccuacccccgccucuccugccccggcuccaccuuccagaaggcccuccucaucuccccccaccgcuucggcgagaccaagggcaacuccgccccccucaucauccgcgagcccuucaucgccugcggccccaccgagugcaagcacuucgcccucacccacuacgccgcccagcccggcggcuacuacaacggcacccgcgaggaccgcaacaagcuccgccaccucaucuccgucaagcucggcaagauccccaccgucgagaacuccaucuuccacauggccgccugguccggcuccgccugccacgacggcaaggaguggaccuacaucggcgucgacggccccgacuccaacgcccuccucaagaucaaguacggcgaggccuacaccgacaccuaccacuccuacgccaagaacauccuccgcacccaggaguccgccugcaacugcaucggcggcgacugcuaccucaugaucaccgacggccccgccuccggcaucuccgagugccgcuuccucaagauccgcgagggccgcaucaucaaggagaucuuccccaccggccgcgucaagcacaccgaggagugcaccugcggcuucgccuccaacaagaccaucgagugcgccugccgcgacaacuccuacaccgccaagcgccccuucgucaagcucaacgucgagaccgacaccgccgagauccgccucaugugcaccgagaccuaccucgacaccccccgccccaacgacggcuccaucaccggccccugcgaguccgacggcgacaagggcuccggcggcaucaagggcggcuucguccaccagcgcauggccuccaagaucggccgcugguacucccgcaccauguccaagaccaagcgcaugggcaugggccucuacgucaaguacgacggcgaccccuggaccgacuccgaggcccucgcccucuccggcgucauggucuccauggaggagcccggcugguacuccuucggcuucgagaucaaggacaagaagugcgacguccccugcaucggcaucgagaugguccacgacggcggcaagaccaccuggcacuccgccgccaccgccaucuacugccucaugggcuccggccagcuccucugggacaccgucaccggcgucgacauggcccucuga

SEQ ID NO: 125089 - RNA, 1401 nt, Artificial Sequence; identical to SEQ ID NO: 125008
  derived and/or modified CDS sequence (opt2) from neuraminidase__InfluenzaB__AFJ90443

SEQ ID NO: 125090 - RNA, 1401 nt, Artificial Sequence
  derived and/or modified CDS sequence (opt2) from neuraminidase__InfluenzaB__AFJ90454
augcuccccuccaccauccagacccucacccucuuccucaccuccggcggcguccuccucucccucuacgucuccgccucccucuccuaccuccucuacuccgacauccuccucaaguucucccagaccgagaucaccgcccccaucgucccccucgacugcgccaacgccuccaacguccaggccgucaaccgcuccgccgccaagggcgucacccuccuccuccccgagcccgaguggaccuacccccgccucuccugccccggcuccaccuuccagaaggcccuccucaucuccccccaccgcuucggcgagaccaagggcaacuccgccccccucaucauccgcgagcccuucaucgccugcggccccaccgagugcaagcacuucgcccucacccacuacgccgcccagcccggcgaguacuacaacggcacccgcgaggaccgcaacaagcuccgccaccucaucuccgucaagcucggcaagauccccaccgucgagaacuccaucuuccacauggccgccugguccggcuccgccugccacgacggcaaggaguggaccuacaucggcgucgacggccccgacuccaacgcccuccucaagaucaaguacggcgaggccuacaccgacaccuaccacuccuacgccaagaacauccuccgcacccaggaguccgccugcaacugcaucggcggcgacugcuaccucaugaucaccgacggccccgccuccggcaucuccgagugccgcuuccucaagauccgcgagggccgcaucaucaaggagaucuuccccaccggccgcgucaagcacaccgaggagugcaccugcggcuucgccuccaacaagaccaucgagugcgccugccgcgacaacuccuacaccgccaagcgccccuucgucaagcucaacgucgagaccgacaccgccgagauccgccucaugugcaccgagaccuaccucgacaccccccgccccaacgacggcuccaucaccggccccugcgaguccgacggcgacaagggcuccggcggcaucaagggcggcuucguccaccagcgcauggccuccaagaucggccgcugguacucccgcaccauguccaagaccaagcgcaugggcaugggccucuacgucaaguacgacggcgaccccuggaccgacuccgaggcccucgcccucuccggcgucauggucuccauggaggagcccggcugguacuccuucggcuucgagaucaaggacaagaagugcgacguccccugcaucggcaucgagaugguccacgacggcggcaagaccaccuggcacuccgccgccaccgccaucuacugccucaugggcuccggccagcuccucugggacaccgucaccggcgucgacauggcccucuga

SEQ ID NO: 125091 - RNA, 1401 nt, Artificial Sequence
  derived and/or modified CDS sequence (opt2) from neuraminidase__InfluenzaB__AFJ91042
augcuccccuccaccauccagacccucacccucuuccucaccuccggcggcguccuccucucccucuacgucuccgccucccucuccuaccuccucuacuccgacauccuccucaaguucucccagaccgagaucaccgcccccaucaugccccucgacugcgccaacgccuccaacguccaggccgucaaccgcuccgccgccaagggcgucacccuccucauccccgagcccgaguggaccuacccccgccucuccugccccggcuccaccuuccagaaggcccuccucaucuccccccaccgcuucggcgagaccaagggcaacuccgccccccucaucauccgcgagcccuucaucgccugcggccccaccgagugcaagcacuucgcccucacccacuacgccgcccagcccggcggcuacuacaacggcacccgcgaggaccgcaacaagcuccgccaccucaucuccgucaagcucggcaagauccccaccgucgagaacuccaucuuccacauggccgccugguccggcuccgccugccacgacggcaaggaguggaccuacaucggcgucgacggccccgacuccaacgcccuccucaagaucaaguacggcgaggccuacaccgacaccuaccacuccuacgccaagaacauccuccgcacccaggaguccgccugcaacugcaucggcggcgacugcuaccucaugaucaccgacggccccgccuccggcaucuccgagugccgcuuccucaagauccgcgagggccgcaucaucaaggagaucuuccccaccggccgcgucaagcacaccgaggagugcaccugcggcuucgccuccaacaagaccaucgagugcgccugccgcgacaacuccuacaccgccaagcgccccuucgucaagcucaacgucgagaccgacaccgccgagauccgccucaugugcaccgagaccuaccucgacaccccccgccccaacgacggcuccaucgccggccccugcgaguccgacggcgacaagggcuccggcggcaucaagggcggcuucguccaccagcgcaugaccuccaagaucggccgcugguacucccgcaccauguccaagaccaagcgcaugggcaugggccucuacgucaaguacgacggcgaccccuggaccgacuccgaggcccucgcccucuccggcgucauggucuccauggaggagcccggcugguacuccuucggcuucgagaucaaggacaagaagugcgacguccccugcaucggcaucgagaugguccacgacggcggcaagaccaccuggcacuccgccgccaccgccaucuacugccucaugggcuccggccagcuccucugggacaccgucaccggcgucgacauggcccucuga

SEQ ID NO: 125092 - RNA, 1401 nt, Artificial Sequence
  derived and/or modified CDS sequence (opt2) from neuraminidase__InfluenzaB__AFJ91053
augcuccccuccaccauccagacccucacccucuuccucaccuccggcggcguccuccucucccucuacgucuccgccucccucuccuaccuccucuacuccgacauccuccucaaguucucccagaccgagaucaccgcccccaucaugccccucgacugcgccaacgccuccaacguccaggccgucaaccgcuccgccgccaaggaggucacccuccuccuccccgagcccgaguggaccuacccccgccucuccugccccggcuccaccuuccagaaggcccuccucaucuccccccaccgcuucggcgagaccaagggcaacuccgccccccucaucauccgcgagcccuucaucgccugcggccccaccgagugcaagcacuucgcccucacccacuacgccgcccagcccggcggcuacuacaacggcacccgcgaggaccgcaacaagcuccgccaccucaucuccgucaagcucggcaagauccccaccgucgagaacuccaucuuccacauggccgccugguccggcuccgccugccacgacggcaaggaguggaccuacaucggcgucgacggccccgacuccaacgcccuccucaagaucaaguacggcgaggccuacaccgacaccuaccacuccuacgccaagaacauccuccgcacccaggaguccgccugcaacugcaucggcggcgacugcuaccucaugaucaccgacggccccgccuccggcaucuccgagugccgcuuccucaagauccgcgagggccgcaucaucaaggagaucuuccccaccggccgcgucaagcacaccgaggagugcaccugcggcuucgccuccaacaagaccaucgagugcgccugccgcgacaacuccuacaccgccaagcgccccuucgucaagcucaacgucgagaccgacaccgccgagauccgccucaugugcaccgagaccuaccucgacaccccccgccccaacgacggcuccaucaccggccccugcgaguccgacggcgacaagggcuccggcggcaucaagggcggcuucguccaccagcgcauggccuccaagaucggccgcugguacucccgcaccauguccaagaccaagcgcaugggcaugggccucuacgucaaguacgacggcgaccccuggaccgacuccgaggcccucgcccucuccggcgucauggucuccauggaggagcccggcugguacuccuucggcuucgagaucaaggacaagaagugcgacguccccugcaucggcaucgagaugguccacgacggcggcaagaccaccuggcacuccgccgccaccgccaucuacugccucaugggcuccggccagcuccucugggacaccgucaccggcgucgacauggcccucuga

SEQ ID NO: 125093 - RNA, 1401 nt, Artificial Sequence
  derived and/or modified CDS sequence (opt2) from neuraminidase__InfluenzaB__AFJ91075
augcuccccuccaccauccagacccucacccucuuccucaccuccggcggcguccuccucucccucuacgucuccgccucccucuccuaccuccucuacuccgacauccuccucaaguucucccagaccgagaucaccgcccccaucaugccccucgacugcgccaacgccuccaacguccaggccgucaaccgcuccgccgccaagggcgucacccuccuccuccccgagcccgaguggaccuacccccgccucuccugccccggcuccaccuuccagaaggcccuccucaucuccccccaccgcuucggcgagaccaagggcaacuccgccccccucaucauccgcgagcccuucaucgccugcggccccaccgagugcaagcacuucgcccucacccacuacgccgcccagcccggcggcuacuacaacggcacccgcgaggaccgcaacaagcuccgccaccucaucuccgucaagcucggcaagauccccaccgucgagaacuccaucuuccacauggccgccugguccggcuccgccugccacgacggcaaggaguggaccuacaucggcgucgacggccccgacuccaacacccuccucaagaucaaguacggcgaggccuacaccgacaccuaccacuccuacgccaagaacauccuccgcacccaggaguccgccugcaacugcaucggcggcgacugcuaccucaugaucaccgacggccccgccuccggcaucuccgagugccgcuuccucaagauccgcgagggccgcaucaucaaggagaucuuccccaccggccgcgucaagcacaccgaggagugcaccugcggcuucgccuccaacaagaccaucgagugcgccugccgcgacaacuccuacaccgccaagcgccccuucgucaagcucaacgucgagaccgacaccgccgagauccgccucaugugcaccgagaccuaccucgacaccccccgccccaacgacggcuccaucaccggccccugcgaguccgacggcgacaagggcuccggcggcaucaagggcggcuucguccaccagcgcauggccuccaagaucggccgcugguacucccgcaccauguccaagaccaagcgcaugggcaugggccucuacgucaaguacgacggcgaccccuggaccgacuccgaggcccucgcccucuccggcgucauggucuccauggaggagcccggcugguacuccuucggcuucgagaucaaggacaagaagugcgacguccccugcaucggcaucgagaugguccacgacggcggcaagaccaccuggcacuccgccgccaccgccaucuacugccucaugggcuccggccagcuccucugggacaccgucaccggcgucgacauggcccucuga

SEQ ID NO: 125094 - RNA, 1401 nt, Artificial Sequence; identical to SEQ ID NO: 124853
  derived and/or modified CDS sequence (opt2) from neuraminidase__InfluenzaB__AFJ91086

SEQ ID NO: 125095 - RNA, 1401 nt, Artificial Sequence; identical to SEQ ID NO: 124853
  derived and/or modified CDS sequence (opt2) from neuraminidase__InfluenzaB__AFJ91097

SEQ ID NO: 125096 - RNA, 1401 nt, Artificial Sequence; identical to SEQ ID NO: 124853
  derived and/or modified CDS sequence (opt2) from neuraminidase__InfluenzaB__AFJ91108

SEQ ID NO: 125097 - RNA, 1401 nt, Artificial Sequence; identical to SEQ ID NO: 124853
  derived and/or modified CDS sequence (opt2) from neuraminidase__InfluenzaB__AFJ91119

SEQ ID NO: 125098 - RNA, 1401 nt, Artificial Sequence; identical to SEQ ID NO: 124704
  derived and/or modified CDS sequence (opt2) from neuraminidase__InfluenzaB__AFJ91707

SEQ ID NO: 125099 - RNA, 1401 nt, Artificial Sequence
  derived and/or modified CDS sequence (opt2) from neuraminidase__InfluenzaB__AFK09801
augcuccccuccaccauccagacccucacccucuuccucaccuccggcggcguccuccucucccucuacgucuccgccucccucuccuaccuccucuacuccgacauccuccucaaguucucccagaccgagaucaccgcccccaccaugccccucgacugcgccaacgccuccaacguccaggccgucaaccgcuccgccaccaagggcgucacccuccuccuccccgagcccgaguggaccuacccccgccucuccugccccggcuccaccuuccagaaggcccuccucaucuccccccaccgcuucggcgagaccaagggcaacuccgccccccucaucauccgcgagcccuucaucgccugcggccccaaggagugcaagcacuucgcccucacccacuacgccgcccagcccggcggcuacuacaacggcacccgcgaggaccgcaacaagcuccgccaccucaucuccgucaagcucggcaagauccccaccgucgagaacuccaucuuccacauggccgccugguccggcuccgccugccacgacggccgcgaguggaccuacaucggcgucgacggccccgacuccaacgcccuccucaagaucaaguacggcgaggccuacaccgacaccuaccacuccuacgccaagaacauccuccgcacccaggaguccgccugcaacugcaucggcggcgacugcuaccucaugaucaccgacggcuccgccuccggcaucuccgagugccgcuuccucaagauccgcgagggccgcaucaucaaggagaucuuccccaccggccgcgucaagcacaccgaggagugcaccugcggcuucgccuccaacaagaccaucgagugcgccugccgcgacaacuccuacaccgccaagcgccccuucgucaagcucaacgucgagaccgacaccgccgagauccgccucaugugcaccgagaccuaccucgacaccccccgccccaacgacggcuccaucaccggccccugcgaguccaacggcgaccgcggcuccggcggcaucaagggcggcuucguccaccagcgcauggccuccaagaucggccgcugguacucccgcaccauguccaagaccaagcgcaugggcaugggccucuacgucaaguacgacggcgaccccuggaccgacuccgaggcccucgcccucuccggcgucaugguccccauggaggagcccggcugguacuccuucggcuucgagaucaaggacaagaagugcgacguccccugcaucggcaucgagaugguccacgacggcggcaagaccaccuggcacuccgccgccaccgccaucuacugccucaugggcuccggccagcuccucugggacaccgucaccggcgucgacauggcccucuga

SEQ ID NO: 125100 - RNA, 1401 nt, Artificial Sequence; identical to SEQ ID NO: 124828
  derived and/or modified CDS sequence (opt2) from neuraminidase__InfluenzaB__AFN54669

SEQ ID NO: 125101 - RNA, 1401 nt, Artificial Sequence; identical to SEQ ID NO: 124828
  derived and/or modified CDS sequence (opt2) from neuraminidase__InfluenzaB__AFN54680

SEQ ID NO: 125102 - RNA, 1401 nt, Artificial Sequence; identical to SEQ ID NO: 124853
  derived and/or modified CDS sequence (opt2) from neuraminidase__InfluenzaB__AFN54691

SEQ ID NO: 125103 - RNA, 1401 nt, Artificial Sequence; identical to SEQ ID NO: 124853
  derived and/or modified CDS sequence (opt2) from neuraminidase__InfluenzaB__AFN54702

SEQ ID NO: 125104 - RNA, 1401 nt, Artificial Sequence; identical to SEQ ID NO: 124853
  derived and/or modified CDS sequence (opt2) from neuraminidase__InfluenzaB__AFN54713

SEQ ID NO: 125105 - RNA, 1401 nt, Artificial Sequence; identical to SEQ ID NO: 124853
  derived and/or modified CDS sequence (opt2) from neuraminidase__InfluenzaB__AFN54724

SEQ ID NO: 125106 - RNA, 1401 nt, Artificial Sequence; identical to SEQ ID NO: 124853
  derived and/or modified CDS sequence (opt2) from neuraminidase__InfluenzaB__AFN54735

SEQ ID NO: 125107 - RNA, 1401 nt, Artificial Sequence; identical to SEQ ID NO: 124853
  derived and/or modified CDS sequence (opt2) from neuraminidase__InfluenzaB__AFN54746

SEQ ID NO: 125108 - RNA, 1401 nt, Artificial Sequence; identical to SEQ ID NO: 124853
  derived and/or modified CDS sequence (opt2) from neuraminidase__InfluenzaB__AFN54757

SEQ ID NO: 125109 - RNA, 1401 nt, Artificial Sequence; identical to SEQ ID NO: 124853
  derived and/or modified CDS sequence (opt2) from neuraminidase__InfluenzaB__AFN54768

SEQ ID NO: 125110 - RNA, 1401 nt, Artificial Sequence; identical to SEQ ID NO: 124853
  derived and/or modified CDS sequence (opt2) from neuraminidase__InfluenzaB__AFN54779

SEQ ID NO: 125111 - RNA, 1401 nt, Artificial Sequence; identical to SEQ ID NO: 124853
  derived and/or modified CDS sequence (opt2) from neuraminidase__InfluenzaB__AFN54790

SEQ ID NO: 125112 - RNA, 1401 nt, Artificial Sequence; identical to SEQ ID NO: 124853
  derived and/or modified CDS sequence (opt2) from neuraminidase__InfluenzaB__AFN54801

SEQ ID NO: 125113 - RNA, 1401 nt, Artificial Sequence; identical to SEQ ID NO: 124853
  derived and/or modified CDS sequence (opt2) from neuraminidase__InfluenzaB__AFN54812

SEQ ID NO: 125114 - RNA, 1401 nt, Artificial Sequence
  derived and/or modified CDS sequence (opt2) from neuraminidase__InfluenzaB__AFN54834
augcuccccuccaccauccagacccucacccucuuccucaccuccggcggcguccuccucucccucuacgucuccgccucccucuccuaccuccucuacuccgacauccuccucaaguucucccgcaccgagaucaccgcccccaucaugccccucgacugcgccaacgccuccaacguccaggccgucaaccgcuccgccaccaagggcgucacccuccuccuccccgagcccgaguggaccuacccccgccucuccugccccggcuccaccuuccagaaggcccuccucaucuccccccaccgcuucggcgagaccaagggcaacuccgccccccucaucauccgcgagcccuucaucgccugcggccccaaggagugcaagcacuucgcccucacccacuacgccgcccagcccggcggcuacuacaacggcacccgcgaggaccgcaacaagcuccgccaccucaucuccgucaagcucggcaagauccccaccgucgagaacuccaucuuccacauggccgccugguccggcuccgccugccacgacggccgcgaguggaucuacaucggcgucgacggccccgacuccaacgcccuccucaagaucaaguacggcgaggccuacaccgacaccuaccacuccuacgccaagaacauccuccgcacccaggaguccgccugcaacugcaucggcggcgacugcuaccucaugaucaccgacggccccgccuccggcaucuccgagugccgcuuccucaagauccgcgagggccgcaucaucaaggagaucuuccccaccggccgcgucaagcacaccgaggagugcaccugcggcuucgccuccaacaagaccaucgagugcgccugccgcgacaacuccuacaccgccaagcgccccuucgucaagcucaacgucgagaccgacaccgccgagauccgccucaugugcaccgagaccuaccucgacaccccccgccccaacgacggcuccaucaccggccccugcgaguccaacggcgacaagggcuccggcggcaucaagggcggcuucguccaccagcgcauggccuccaagaucggccgcugguacucccgcaccauguccaagaccaagcgcaugggcaugggccucuacgucaaguacgacggcgaccccuggaccgacuccgaggcccucgcccucuccggcgucauggucuccauggaggagcccggcugguacuccuucggcuucgagaucaaggacaagaagugcgacguccccugcaucggcaucgagaugguccacgacggcggcaagaccaccuggcacuccgccgccaccgccaucuacugccucaugggcuccggccagcuccucugggacaccgucaccggcgucaacaugacccucuga

SEQ ID NO: 125115 - RNA, 1401 nt, Artificial Sequence; identical to SEQ ID NO: 124853
  derived and/or modified CDS sequence (opt2) from neuraminidase__InfluenzaB__AFN54845

SEQ ID NO: 125116 - RNA, 1401 nt, Artificial Sequence
  derived and/or modified CDS sequence (opt2) from neuraminidase__InfluenzaB__AFN54856
augcuccccuccaccauccagacccucacccucuuccucaccuccggcggcguccuccucucccucuacgucuccgccucccucuccuaccuccucuacuccgacauccuccucaaguucucccgcaccgagaucaccgcccccaucaugccccucgacugcgccaacgccuccaacguccaggccgucaaccgcuccgccaccaagggcgucacccuccuccuccccgagcccgaguggaccuacccccgccucuccugccccggcuccaccuuccagaaggcccuccucaucuccccccaccgcuucggcgagaccaagggcaacuccgccccccucaucauccgcgagcccuucaucgccugcggccccaaggagugcaagcacuucgcccucacccacuacgccgcccagcccggcggcuacuacaacggcacccgcgaggaccgcaacaagcuccgccaccucaucuccgucaagcucggcaagauccccaccgucgagaacuccaucuuccacauggccgccugguccggcuccgccugccacgacggccgcgaguggaccuacaucggcgucgacggccccgacuccaacgcccuccucaagaucaaguacggcgaggccuacaccgacaccuaccacuccuacgccaagaacauccuccgcacccaggaguccgccugcaacugcaucggcggcgacugcuaccucaugaucaccgacggccccgccuccggcgucuccgagugccgcuuccucaagauccgcgagggccgcaucaucaaggagaucuuccccaccggccgcgucaagcacaccgaggagugcaccugcggcuucgccuccaacaagaccaucgagugcgccugccgcgacaacuccuacaccgccaagcgccccuucgucaagcucaacgucgagaccgacaccgccgagauccgccucaugugcaccgagaccuaccucgacaccccccgccccaacgacggcuccaucaccggccccugcgaguccaacggcgacaagggcuccggcggcaucaagggcggcuucguccaccagcgcauggccuccaagaucggccgcugguacucccgcaccauguccaagaccaagcgcaugggcaugggccucuacgucaaguacgacggcgaccccuggaccgacuccgaggcccucgcccucuccggcgucauggucuccauggaggagcccggcugguacuccuucggcuucgagaucaaggacaagaagugcgacguccccugcaucggcaucgagaugguccacgacggcggcaagaccaccuggcacuccgccgccaccgccaucuacugccucaugggcuccggccagcuccucugggacaccgccaccggcgucaacaugacccucuga

SEQ ID NO: 125117 - RNA, 1401 nt, Artificial Sequence; identical to SEQ ID NO: 124853
  derived and/or modified CDS sequence (opt2) from neuraminidase__InfluenzaB__AFN54867

SEQ ID NO: 125118 - RNA, 1401 nt, Artificial Sequence
  derived and/or modified CDS sequence (opt2) from neuraminidase__InfluenzaB__AFU34598
augcuccccuccaccauccagacccucacccucuuccucaccuccggcggcguccuccucucccucuacgucuccgccucccucuccuaccuccucuacuccgacauccuccucaaguucucccccaccgagaucaccgcccccaccaugucccucgacugcgccaacgccuccaacguccaggccgucaaccgcuccgccaccaagggcgucaccuuccuccuccccgagcccgaguggaccuacccccgccucuccugccccggcuccaccuuccagaaggcccuccucaucuccccccaccgcuucggcgagaccaagggcaacuccgccccccucaucauccgcgagcccuucaucgccugcggccccaacgagugcaagcacuucgcccucacccacuacgccgcccagcccggcggcuacuacaacggcacccgcggcgaccgcaacaagcuccgccaccucaucuccgucaagcucggcaagauccccaccgucgagaacuccaucuuccacauggccgccugguccggcuccgccugccacgacggcaaggaguggaccuacaucggcgucgacggccccgacaacaacgcccuccucaaggucaaguacggcgaggccuacaccgacaccuaccacuccuacgccaacaagauccuccgcacccgcgaguccgccugcaacugcaucggcggcaacugcuaccucaugaucaccgacggcuccgccuccggcgucuccgagugccgcuuccucaagauccgcgucggccgcaucaucaaggagaucuuccccaccggccgcgucaagcacaccgaggagugcaccugcggcuucgccuccaacaagaccaucgagugcgccugccgcgacaacuccuacaccgccaagcgccccuucgucaagcucaacgucgagaccgacaccgccgagauccgccucaugugcaccgacaccuaccucgacaccccccgccccgacgacggcuccaucaccggccccugcgaguccaacggcgacaagggcuccggcggcaucaagggcggcuucguccaccagcgcauggaguccaagaucggccgcugguacucccgcaccauguccaagaccgagcgcaugggcaugggccucuacgucaaguacgacggcgaccccugggccgacuccgacgcccucgccuucuccggcgucauggucuccaugaaggagcccggcugguacuccuucggcuucgagaucaaggacaagaagugcgacguccccugcaucggcaucgagaugguccacgacggcggcaaggagaccuggcacuccgccgccaccgccaucuacugccucaugggcuccggccagcuccucugggacaccgucaccggcgucgacgucgcccucuga

SEQ ID NO: 125119 - RNA, 1401 nt, Artificial Sequence
  derived and/or modified CDS sequence (opt2) from neuraminidase__InfluenzaB__AFU34609
augcuccccuccaccauccagacccucacccucuuccucaccuccggcggcguccuccucucccucuacgucuccgcccuccucuccuaccuccucuacuccgacauccuccucaaguucucccccaccgagaucaccgcccccaccaugucccucgacugcgccaacgccuccaacguccaggccgucaaccgcuccgccacccgcggcgucaccuuccuccuccccgagcccgagugggccuacccccgccucuccugccccggcuccaccuuccagaaggcccuccucaucuccccccaccgcuucggcgagaccaagggcaacuccgccccccucaucauccgcgagcccuucaucgccugcggccccaacgagugcaagcacuucgcccucacccacuacgccgcccagcccggcggcuacuacaacggcacccgcggcgaccgcaacaagcuccgccaccucaucuccgucaagcucggcaagauccccaccgucgagaacuccaucuuccacauggccgccugguccggcuccgccugccacgacggcaaggaguggaccuacaucggcgucgacggccccgacaacgacgcccuccucaaggucaaguacggcgaggccuacaccgacaccuaccacuccuacgccaacaagauccuccgcacccaggaguccgccugcaacugcaucggcggcaacugcuaccucaugaucaccgacggcuccgccuccggcgucuccgagugccgcuuccucaagauccgcgagggccgcaucaucaaggagaucuuccccaccggccgcgucaagcacaccgaggagugcaccugcggcuucgccuccaacaagaccaucgagugcgccugccgcgacaacuccuacaccgccaagcgccccuucgucaagcucaacgucgagaccgacaccgccgagauccgccucaugugcaccgacaccuaccucgacaccccccgccccgacgacggcuccaucaccggccccugcgaguccaacggcgacaagggcuccggcggcaucaagggcggcuucguccaccagcgcauggaguccaagaucggccgcugguacucccgcaccauguccaagaccgagcgcaugggcaugggccucuacgucaaguacgacggcgaccccugggccgacuccgacgcccucgccuucuccggcgucauggucuccaugaaggagcccggcugguacuccuucggcuucgagaucaaggacaagaagugcgacguccccugcaucggcaucgagaugguccacgacggcggcaaggagaccuggcacuccgccgccaccgccaucuacugccucaugggcuccggccagcuccucugggacaccgucaccggcgucgacauggcccucuga

SEQ ID NO: 125120 - RNA, 1401 nt, Artificial Sequence
  derived and/or modified CDS sequence (opt2) from neuraminidase__InfluenzaB__AFU34620
augcuccccuccaccauccagacccucacccucuuccucaccuccggcggcguccuccucucccucuacgucuccgcccuccucuccuaccuccucuacuccgacauccuccucaaguucucccccaccgagaucaccgcccccaccaugucccucgacugcgccaacgccuccaacguccaggccgucaaccgcuccgccacccgcggcgucaccuuccuccuccccgagcccgaguggaccuacccccgccucuccugccccggcuccaccuuccagaaggcccuccucaucuccccccaccgcuucggcgagaccaagggcaacuccgccccccucaucauccgcgagcccuucaucgccugcggccccaacgagugcaagcacuucgcccucacccacuacgccgcccagcccggcggcuacuacaacggcacccgcggcgaccgcaacaagcuccgccaccucaucuccgucaagcucggcaagauccccaccgucgagaacuccaucuuccacauggccgccugguccggcuccgccugccacgacggcaaggaguggaccuacaucggcgucgacggccccgacaacgacgcccuccucaaggucaaguacggcgaggccuacaccgacaccuaccacuccuacgccaacaagauccuccgcacccaggaguccgccugcaacugcaucggcggcaacugcuaccucaugaucaccgacggcuccgccuccggcgucuccgagugccgcuuccucaagauccgcgagggccgcaucaucaaggagaucuuccccaccggccgcgucaagcacaccgaggagugcaccugcggcuucgccuccaacaagaccaucgagugcgccugccgcgacaacuccuacaccgccaagcgccccuucgucaagcucaacgucgagaccgacaccgccgagauccgccucaugugcaccgacaccuaccucgacaccccccgccccgacgacggcuccaucaccggccccugcgaguccaacggcgacaagggcuccggcggcaucaagggcggcuucguccaccagcgcauggaguccaagaucggccgcugguacucccgcaccauguccaagaccgagcgcaugggcaugggccucuacgucaaguacgacggcgaccccugggccgacuccgacgcccucgccuucuccggcgucauggucuccaugaaggagcccggcugguacuccuucggcuucgagaucaaggacaagaagugcgacguccccugcaucggcaucgagaugguccacgacggcggcaaggagaccuggcacuccgccgccaccgccaucuacugccucaugggcuccggccagcuccucugggacaccgucaccggcgucgacauggcccucuga

SEQ ID NO: 125121 - RNA, 1401 nt, Artificial Sequence
  derived and/or modified CDS sequence (opt2) from neuraminidase__InfluenzaB__AFU34631
augcuccccuccaccauccagacccucacccucuuccucaccuccggcggcguccuccucucccucuacgucuccgcccuccucuccuaccuccucuacuccgacauccuccucaaguucucccccaccgagaucaccgcccccaccaugucccucgacugcgccaacgccuccaacguccaggccgucaaccgcuccgccacccgcggcgucaccuuccuccuccccgagcccgaguggaccuacccccgccucuccugccccggcuccaccuuccagaaggcccuccucaucuccccccaccgcuucggcgagaccaagggcaacuccgccccccucaucauccgcgagcccuucaucgccugcggccccaacgagugcaagcacuucgcccucacccacuacgccgcccagcccggcggcuacuacaacggcacccgcggcgaccgcaacaagcuccgccaccucaucuccgucaagcucggcaagauccccaccgucgagaacuccaucuuccacauggccgccugguccggcuccgccugccacgacggcaaggaguggaccuacaucggcgucgacggccccgacaacgacgcccuccucaaggucaaguacggcgaggccuacaccgacaccuaccacuccuacgccaacaagauccuccgcacccaggaguccgccugcaacugcauccgcggcaacugcuaccucaugaucaccgacggcuccgccuccggcgucuccgagugccgcuuccucaagauccgcgagggccgcaucaucaaggagaucuuccccaccggccgcgucaagcacaccgaggagugcaccugcggcuucgccuccaacaagaccaucgagugcgccugccgcgacaacuccuacaccgccaagcgccccuucgucaagcucaacgucgagaccgacaccgccgagauccgccucaugugcaccgacaccuaccucgacaccccccgccccgacgacggcuccaucaccggccccugcgaguccaacggcgacaagggcuccggcggcaucaagggcggcuucguccaccagcgcauggaguccaagaucggccgcugguacucccgcaccauguccaagaccgagcgcaugggcaugggccucuacgucaaguacgacggcgaccccugggccgacuccgacgcccucgccuucuccggcgucauggucuccaugaaggagcccggcugguacuccuucggcuucgagaucaaggacaagaagugcgacguccccugcaucggcaucgagaugguccacgacggcggcaaggagaccuggcacuccgccgccaccgccaucuacugccucaugggcuccggccagcuccucugggacaccgucaccggcgucgacauggcccucuga

SEQ ID NO: 125122 - RNA, 1401 nt, Artificial Sequence
  derived and/or modified CDS sequence (opt2) from neuraminidase__InfluenzaB__AFU34642
augcuccccuccaccauccagacccucacccucuuccucaccuccggcggcguccuccucucccucuacgucuccgccucccucuccuaccuccucuacuccgacauccuccucaaguucucccccaccgagaucaccgcccccaccaugucccucgacugcgccaacgccuccaacguccaggccgucaaccgcuccgccaccaagggcaugaccuuccuccuccccgagcccgaguggaccuacccccgccucuccugccccggcuccaccuuccagaaggcccuccucaucuccccccaccgcuucggcgagaccaagggcaacuccgccccccucaucauccgcgagcccuucaucgccugcggccccaacggcugcaagcacuucgcccucacccacuacgccgcccagcccggcggcuacuacaacggcacccgcggcgaccgcaacaagcuccgccaccucaucuccgucaagcucggcaagauccccaccgucgagaacuccaucuuccacauggccgccugguccggcuccgccugccacgacggcaaggaguggaccuacaucggcgucgacggccccgacaacaacgcccuccucaaggucaaguacggcgaggccuacaccgacaccuaccacuccuacgccaacaagauccuccgcacccaggaguccgccugcaacugcaucggcggcaacugcuaccucaugaucaccgacggcuccgccuccggcgucuccgagugccgcuuccucaagauccgcgagggccgcaucaucaaggagaucuuccccaccggccgcgucaagcacaccgaggagugcaccugcggcuucgccuccaacaagaccaucgagugcgccugccgcgacaacuccuacaccgccaagcgccccuucgucaagcucaacgucgagaccgacaccgccgagauccgccucaugugcaccgacaccuaccucgacaccccccgccccgacgacggcuccaucaccggccccugcgaguccuacggcgacaagggcuccggcggcaucaagggcggcuucguccaccagcgcauggaguccaagaucggccgcugguacucccgcaccauguccaagaccgagcgcaugggcaugggccucuacgucaaguacgacggcgaccccugggccgacuccgacgcccucgccuucuccggcgucauggucuccaugaaggagcccggcugguacuccuucggcuucgagaucaaggacaagaagugcgacguccccugcaucggcaucgagaugguccacgacggcggcaaggagaccuggcacuccgccgccaccgccaucuacugccucaugggcuccggccagcuccucugggacaccgucaccggcgucgacauggcccucuga

SEQ ID NO: 125123 - RNA, 1401 nt, Artificial Sequence
  derived and/or modified CDS sequence (opt2) from neuraminidase__InfluenzaB__AGB97261
augcuccccuccaccauccagacccucacccucuuccucaccuccggcggcguccuccucucccucuacgucuccgccucccucuccuaccuccucuacuccgacaugcuccucaaguucucccgcaccgagaucaccgcccccaucaugccccucgacugcgccaacgccuccaacguccaggccgucaaccgcuccgccaccaagggcgucacccuccuccuccccgagcccgaguggaccuacccccgccucuccugccccggcuccaccuuccagaaggcccuccucaucuccccccaccgcuucggcgagaccaagggcaacuccgccccccucaucauccgcgagcccuucaucgccugcggccccaaggagugcaagcacuucgcccucacccacuacgccgcccagcccggcggcuacuacaacggcacccgcgaggaccgcaacaagcuccgccaccucaucuccgucaagcucggcaagauccccaccgucgagaacuccaucuuccacauggccgccugguccggcuccgccugccacgacggccgcgaguggaccuacaucggcgucgacggccccgacuccaacgcccuccucaagaucaaguacggcgaggccuacaccgacaccuaccacuccuacgccaagaacauccuccgcacccaggaguccgccugcaacugcaucggcggcgacugcuaccucaugaucaccgacggccccgccuccggcaucuccgagugccgcuuccucaagauccgcgagggccgcaucaucaaggagaucuuccccaccggccgcgucaagcacaccgaggagugcaccugcggcuucgccuccaacaagaccaucgagugcgccugccgcgacaacuccuacaccgccaagcgccccuucgucaagcucaacgucgagaccgacaccgccgagauccgccucaugugcaccgagaccuaccucgacaccccccgccccaacgacggcuccaucaccggccccugcgaguccaacggcgacaagggcuccggcggcaucaagggcggcuucguccaccagcgcauggccuccaagaucggccgcugguacucccgcaccauguccaagaccaagcgcaugggcaugggccucuacgucaaguacgacggcgaccccuggaccgacuccgaggcccucgcccucuccggcgucauggucuccauggaggagcccggcugguacuccuucggcuucgagaucaaggacaagaagugcgacguccccugcaucggcaucgagaugguccacgacggcggcaagaccaccuggcacuccgccgccaccgccaucuacugccucaugggcuccggccagcuccucugggacaccgucaccggcgucaacaugacccucuga

SEQ ID NO: 125124 - RNA, 1401 nt, Artificial Sequence
  derived and/or modified CDS sequence (opt2) from neuraminidase__InfluenzaB__AGB97267
augcuccccuccaccauccagacccucacccucuuccucaccuccggcggcguccuccucucccucuacgucuccgccucccucuccuaccuccucuacuccgacauccuccucaaguucucccagaccgagaucaccgcccccaucaugccccucgacugcaccaacgccuccaacguccaggccgucaaccgcuccgccgccaagggcgucacccuccuccuccccgagcccgaguggaccuacccccgccucuccugccccggcuccaccuuccagaaggcccuccucaucuccccccaccgcuucggcgagaucaagggcaacuccgccccccucaucauccgcgagcccuucaucgccugcggccccaccgagugcaagcacuucgcccucacccacuacgccgcccagcccggcggcuacuacaacggcacccgcgaggaccgcaacaagcuccgccaccucaucuccgucaagcucggcaagauccccaccgucgagaacuccaucuuccacauggccgccugguccggcuccgccugccacgacggcaaggaguggaccuacaucggcaucgacggccccgacuccaacgcccuccucaagaucaaguacggcgaggccuacaccgacaccuaccacuccuacgccaagaacauccuccgcacccaggaguccgccugcaacugcaucggcggcgacugcuaccucaugaucaccgacggccccgccuccggcgucuccgagugccgcuuccucaagauccgcgagggccgcaucaucaaggagaucuuccccaccggccgcgucaagcacaccgaggagugcaccugcggcuucgccuccaacaagaccaucgagugcgccugccgcgacaaccgcuacaccgccaagcgccccuucgucaagcucaacgucgagaccgacaccgccgagauccgccucaugugcaccgagaccuaccucgacaccccccgccccaacgacggcuccaucaccggccccugcgaguccgacggcgacaagggcuccggcggcaucaagggcggcuucguccaccagcgcauggccuccaagaucggccgcugguacucccgcaccauguccaagaccaagcgcaugggcaugggccucuacgucaaguacgacggcgaccccuggaccgacuccgaggcccucgcccucuccggcgucauggucuccauggaggagcccggcugguacuccuucggcuucgagaucaaggacaagaagugcgacguccccugcaucggcaucgagaugguccacgacggcggcaagaccaccuggcacuccgccgccaccgccaucuacugccucaugggcuccggccagcuccucugggacaccgucaccggcgucgacauggcccucuga

SEQ ID NO: 125125 - RNA, 1401 nt, Artificial Sequence; identical to SEQ ID NO: 124853
  derived and/or modified CDS sequence (opt2) from neuraminidase__InfluenzaB__AGR54784

SEQ ID NO: 125126 - RNA, 1401 nt, Artificial Sequence; identical to SEQ ID NO: 124718
  derived and/or modified CDS sequence (opt2) from neuraminidase__InfluenzaB__AGX15491

SEQ ID NO: 125127 - RNA, 1401 nt, Artificial Sequence
  derived and/or modified CDS sequence (opt2) from neuraminidase__InfluenzaB__AGX15533
augcuccccuccaccauccagacccucacccucuuccucaccuccggcggcguccuccucucccucuacgucuccgccucccucuccuaccuccucuacuccgacauccuccucaaguucucccccaccgagaucaccgcccccaccaugccccucgacugcgccaacgccuccaacguccaggccgucaaccgcuccgccaccaagggcgucacccuccuccuccccgagcccgaguggaccuacccccgccucuccugccccggcuccaccuuccagaaggcccuccucaucuccccccaccgcuucggcgagaccaagggcaacuccgccccccucaucauccgcgagcccuucaucgccugcggccccaacgagugcaagcacuucgcccucacccacuacgccgcccagcccggcggcuacuacaacggcaagcgcggcgaccgcaacaagcuccgccaccucaucuccgucaagcucggcaagauccccaccgucgagaacuccaucuuccacauggccgccugguccggcuccgccugccacgacggcaaggaguggaccuacaucggcgucgacggccccgacaacaacgcccuccucaagaucaaguacggcgaggccuacaccgacaccuaccacuccuacgccaacaacauccuccgcacccaggaguccgccugcaacugcaucggcggcaacugcuaccucaugaucaccgacggcuccgccuccggcgucuccgagugccgcuuccucaagauccgcgagggccgcaucaucaaggagaucuuccccaccggccgcgucaagcacaccgaggagugcaccugcggcuucgccuccaacaagaccaucgagugcgccugccgcgacaacuccuacaccgccaagcgccccuucgucaagcucaacgucgagaccgacaccgccgagauccgccucaugugcaccgacaccuaccucgacaccccccgccccgacgacggcuccaucaccggccccugcgaguccaacggcgacaagggcuccggcggcaucaagggcggcuucguccaccagcgcauggccuccaaggucggccgcugguacucccgcaccauguccaagaccgagcgcaugggcaugggccucuacgucaaguacgacggcgaccccugggccgacuccgacgcccucgccuucuccggcgucauggucuccaugaaggagcccggcugguacuccuucggcuucgagaucaaggacaagaagugcgacguccccugcaucggcaucgagaugguccacgacggcggcaaggagaccuggcacuccgccgccaccgccaucuacugccucaugggcuccggccagcuccucugggacaccgucaccggcgucgacauggcccucuga

SEQ ID NO: 125128 - RNA, 1401 nt, Artificial Sequence; identical to SEQ ID NO: 124671
  derived and/or modified CDS sequence (opt2) from neuraminidase__InfluenzaB__AGX15545

SEQ ID NO: 125129 - RNA, 1401 nt, Artificial Sequence; identical to SEQ ID NO: 124671
  derived and/or modified CDS sequence (opt2) from neuraminidase__InfluenzaB__AGX15556

SEQ ID NO: 125130 - RNA, 1401 nt, Artificial Sequence
  derived and/or modified CDS sequence (opt2) from neuraminidase__InfluenzaB__AGX15567
augcuccccuccaccauccagacccucacccucuuccucaccuccggcggcguccuccucucccucuacgucuccgccucccucuccuaccuccucuacuccgacauccuccucaaguuccccuccaccgagaucaccgcccccaccaugccccucgacugcgccaacgccuccaacguccaggccgucaaccgcuccgccaccaagggcgucacccuccuccuccccgagcccgaguggaccuacccccgccucuccugccccggcuccaccuuccagaaggcccuccucaucuccccccaccgcuucggcgagaccaagggcaacuccgccccccucaucauccgcgagcccuucaucgccugcggccccaaggagugcaagcacuucgcccucacccacuacgccgcccagcccggcggcuacuacaacggcacccgcggcgaccgcaacaagcuccgccaccucaucuccgucaagcucggcaagauccccaccgucgagaacuccaucuuccacauggccgccugguccggcuccgccugccacgacggcaaggaguggaccuacaucggcgucgacggccccgacaacaacgcccuccucaagaucaaguacggcgaggccuacaccgacaccuaccacuccuacgccaacaacauccuccgcacccaggaguccgccugcaacugcaucggcggcaacugcuaccucaugaucaccgacggcuccgccuccggcgucuccgagugccgcuuccucaagauccgcgagggccgcaucaucaaggagaucuuccccaccggccgcaucaagcacaccgaggagugcaccugcggcuucgccuccaacaagaccaucgagugcgccugccgcgacaacuccuacaccgccaagcgccccuucgucaagcucaacgucgagaccgacaccgccgagauccgccucaugugcaccgagaccuaccucgacaccccccgccccgacgacggcuccaucaccggccccugcgaguccaacggcgacaagggcuccggcggcaucaagggcggcuucguccaccagcgcauggccuccaagaucggccgcugguacucccgcaccauguccaagaccgagcgcaugggcaugggccucuacgucaaguacgacggcgaccccugggccgacuccgacgcccucgccuucuccggcgucauggucuccauggaggagcccggcugguacuccuucggcuucgagaucaaggacaagaagugcgacguccccugcaucggcaucgagaugguccacgacggcggcaaggagaccuggcacuccgccgccaccgccaucuacugccucaugggcuccggccagcuccucugggacaccgucaccggcgucaacauggcccucuga

SEQ ID NO: 125131 - RNA, 1401 nt, Artificial Sequence; identical to SEQ ID NO: 124671
  derived and/or modified CDS sequence (opt2) from neuraminidase__InfluenzaB__AGX15578

SEQ ID NO: 125132 - RNA, 1401 nt, Artificial Sequence; identical to SEQ ID NO: 124671
  derived and/or modified CDS sequence (opt2) from neuraminidase__InfluenzaB__AGX15589

SEQ ID NO: 125133 - RNA, 1401 nt, Artificial Sequence; identical to SEQ ID NO: 124877
  derived and/or modified CDS sequence (opt2) from neuraminidase__InfluenzaB__AGX15600

SEQ ID NO: 125134 - RNA, 1401 nt, Artificial Sequence; identical to SEQ ID NO: 124877
  derived and/or modified CDS sequence (opt2) from neuraminidase__InfluenzaB__AGX15611

SEQ ID NO: 125135 - RNA, 1401 nt, Artificial Sequence; identical to SEQ ID NO: 124997
  derived and/or modified CDS sequence (opt2) from neuraminidase__InfluenzaB__AGX15644

SEQ ID NO: 125136 - RNA, 1401 nt, Artificial Sequence; identical to SEQ ID NO: 124997
  derived and/or modified CDS sequence (opt2) from neuraminidase__InfluenzaB__AGX15655

SEQ ID NO: 125137 - RNA, 1401 nt, Artificial Sequence; identical to SEQ ID NO: 124997
  derived and/or modified CDS sequence (opt2) from neuraminidase__InfluenzaB__AGX15666

SEQ ID NO: 125138 - RNA, 1401 nt, Artificial Sequence; identical to SEQ ID NO: 124997
  derived and/or modified CDS sequence (opt2) from neuraminidase__InfluenzaB__AGX15679

SEQ ID NO: 125139 - RNA, 1401 nt, Artificial Sequence
  derived and/or modified CDS sequence (opt2) from neuraminidase__InfluenzaB__AGX15690
augcuccccuccaccauccagacccucacccucuuccucaccuccggcggcguccuccucucccucuacgucuccgccucccucuccuaccuccucuacuccgacauccuccucaaguucucccccaccgagaucaccgcccccaccaugccccucgacugcgccaacgccuccaacguccaggccgucaaccgcuccgccaccaagggcgucacccuccuccuccccgagcccgaguggaccuacccccgccucuccugccccggcuccaccuuccagaaggcccuccucaucuccccccaccgcuucggcgagaccaagggcaacuccgccccccucaucauccgcgagcccuucaucgccugcggccccaacgagugcaagcacuucgcccucacccacuacgccgcccagcccggcggcuacuacaacggcacccgcggcgaccgcaacaagcuccgccaccucaucuccgucaagcucggcaagauccccaccgucgagaacuccaucuuccacauggccgccugguccggcuccgccugccacgacggcaaggaguggaccuacaucggcgucgacggccccgacaacaacgcccuccucaaggucaaguacggcgaggccuacaccgacaccuaccacuccuacgccaacaagauccuccgcacccaggaguccgccugcaacugcaucggcggcaacugcuaccucaugaucaccgacggcuccgccuccggcgucuccgagugccgcuuccucaagauccgcgagggccgcaucaucaaggagaucuuccccaccggccgcgucaagcacaccgaggagugcaccugcggcuucgccuccaacaagaccaucgagugcgccugccgcgacaacuccuacaccgccaagcgccccuucgucaagcucaacgucgagaccgacaccgccgagauccgccucaugugcaccgacaccuaccucgacaccccccgccccaacgacggcuccaucaccggccccugcgaguccaacggcgacaagggcuccggcggcaucaagggcggcuucguccaccagcgcaugaaguccaagaucggccgcugguacucccgcaccauguccaagaccgagcgcaugggcaugggccucuacgucaaguacgacggcgaccccugggccgacuccgacgcccucgccuucuccggcgucauggucuccaugaaggagcccggcugguacuccuucggcuucgagaucaaggacaagaagugcgacguccccugcaucggcaucgagaugguccacgacggcggcaaggagaccuggcacuccgccgccaccgccaucuacugccucaugggcuccggccagcuccucugggacaccgucaccggcgucgacauggcccucuga

SEQ ID NO: 125140 - RNA, 1401 nt, Artificial Sequence; identical to SEQ ID NO: 124997
  derived and/or modified CDS sequence (opt2) from neuraminidase__InfluenzaB__AGX15701

SEQ ID NO: 125141 - RNA, 1401 nt, Artificial Sequence
  derived and/or modified CDS sequence (opt2) from neuraminidase__InfluenzaB__AGX15712
augcuccccuccaccauccagacccucacccucuuccucaccuccggcggcguccuccucucccucuacgucuccgccucccucuccuaccuccucuacuccgacauccuccucaaguucucccccaccgagaucaccgcccccaccaugccccucgacugcgccaacgccuccaacguccaggccgucaaccgcuccgccaccaagggcgucacccuccuccuccccgagcccgaguggaccuacccccgccucuccugccccggcuccaccuuccagaaggcccuccucaucuccccccaccgcuucggcgagcccaagggcaacuccgccccccucaucauccgcgagcccuucaucgccugcggccccaacgagugcaagcacuucgcccucacccacuacgccgcccagcccggcggcuacuacaacggcacccgcggcgaccgcaacaagcuccgccaccucaucuccgucaagcucggcaagauccccaccgucgagaacuccaucuuccacauggccgccugguccggcuccgccugccacgacggcaaggaguggaccuacaucggcgucgacggccccgacaacaacgcccuccucaaggucaaguacggcgaggccuacaccgacaccuaccacuccuacgccaacaagauccuccgcacccaggaguccgccugcaacugcaucggcggcaacugcuaccucaugaucaccgacggcuccgccuccggcgucuccgagugccgcuuccucaagauccgcgagggccgcaucaucaaggagaucuuccccaccggccgcgucaagcacaccgaggagugcaccugcggcuucgccuccaacaagaccaucgagugcgccugccgcgacaacuccuacaccgccaagcgccccuucgucaagcucaacgucgagaccgacaccgccgagauccgccucaugugcaccgacaccuaccucgacaccccccgccccaacgacggcuccaucaccggccccugcgaguccgacggcgacaagggcuccggcggcaucaagggcggcuucguccaccagcgcauggaguccaagaucggccgcugguacucccgcaccauguccaagaccgagcgcaugggcaugggccucuacgucaaguacgacggcgaccccugggccgacuccgacgcccucgccuucuccggcgucauggucuccaugaaggagcccggcugguacuccuucggcuucgagaucaaggacaagaagugcgacguccccugcaucggcaucgagaugguccacgacggcggcaaggagaccuggcacuccgccgccaccgccaucuacugccucaugggcuccggccagcuccucugggacaccgucaccggcgucaacauggcccucuga

SEQ ID NO: 125142 - RNA, 1401 nt, Artificial Sequence; identical to SEQ ID NO: 124997
  derived and/or modified CDS sequence (opt2) from neuraminidase__InfluenzaB__AGX15723

SEQ ID NO: 125143 - RNA, 1401 nt, Artificial Sequence; identical to SEQ ID NO: 124997
  derived and/or modified CDS sequence (opt2) from neuraminidase__InfluenzaB__AGX15745

SEQ ID NO: 125144 - RNA, 1401 nt, Artificial Sequence; identical to SEQ ID NO: 124997
  derived and/or modified CDS sequence (opt2) from neuraminidase__InfluenzaB__AGX15757

SEQ ID NO: 125145 - RNA, 1401 nt, Artificial Sequence
  derived and/or modified CDS sequence (opt2) from neuraminidase__InfluenzaB__AGX15768
augcuccccuccaccauccagacccucacccucuuccucaccuccggcggcguccuccucucccucuacgucuccgccucccucuccuaccuccucuacuccgacauccuccucaaguucucccccaccgagaucaccgcccccaccaugccccucgacugcgccaacgccuccaacguccaggccgucaaccgcuccgccaccaagggcgucacccuccuccuccccgagcccgaguggaccuacccccgccucuccugccccggcuccaccuuccagaaggcccuccucaucuccccccaccgcuucggcgagaccaagggcaacuccgccccccucaucauccgcgagcccuucaucgccugcggccccaacgagugcaagcacuucgcccucacccacuacgccgcccagcccggcggcuacuacaacggcacccgcggcgaccgcaacaagcuccgccaccucaucuccgucaagcucggcaagauccccaccgucgagaacuccaucuuccacauggccgccugguccggcuccgccugccacgacggcaaggaguggaccuacaucggcgucgacggccccgacaacaacgcccuccucaaggucaaguacggcgaggccuacaccgacaccuaccacuccuacgccaacaagauccuccgcacccaggaguccgccugcaacugcaucggcggcaacugcuaccucaugaucaccgacggcuccgccuccggcgucuccgagugccgcuuccucaagauccgcgagggccgcaucaucaaggagaucuuccccaccggccgcgucaagcacaccgaggagugcaccugcggcuucgccuccaacaagaccaucgagugcgccugccgcgacaacuccuacaccgccaagcgccccuucgucaagcucaacgucgagaccgacaccgccgagauccgccucaugugcaccgacaccuaccucgacaccccccgccccaacgacggcuccaucaccggccccugcgaguccaacggcgacaagggcuccggcggcaucaagggcggcuucguccaccagcgcauggaguccaagaucggccgcugguacucccgcaccauguccaagaccgagcgcaugggcaugggccucuacgucaaguacgacggcgaccccugggccgacuccgacgcccucgccuucuccggcgucaugaucuccaugaaggagcccggcugguacuccuucggcuucgagaucaaggacaagaagugcgacguccccugcaucggcaucgagaugguccacgacggcggcaaggagaccuggcacuccgccgccaccgccaucuacugccucaugggcuccggccagcuccucugggacaccgucaccggcgucgacauggcccucuga

SEQ ID NO: 125146 - RNA, 1401 nt, Artificial Sequence
  derived and/or modified CDS sequence (opt2) from neuraminidase__InfluenzaB__AGX15801
augcuccccuccaccauccagacccucacccucuuccucaccuccggcggcguccuccucucccucuacgucuccgccucccucuccuaccuccucuacuccgacauccuccucaaguucucccccaccgagaucaccgcccccaccaugucccucgacugcgucaacgccuccaacguccaggccgucaaccgcuccgccaccaagggcgucacccuccuccuccccgagcccgaguggaccuacccccgccucuccugccccggcuccaccuuccagaaggcccuccucaucuccccccaccgcuucggcgagaccaagggcaacuccgccccccucaucauccgcgagcccuucaucgccugcggccccaacgagugcaagcacuucgcccucacccacuacgccgcccagcccggcggcuacuacaacggcacccgcggcgaccgcaacaagcuccgccaccucaucuccgucaagcucggcaagauccccaccgucgagaacuccaucuuccacauggccgccugguccggcuccgccugccacgacggcaaggaguggaccuacaucggcgucgacggccccgacaacaacgcccuccucaaggucaaguacggcgaggccuacaccgacaccuaccacuccuacgccaacaagauccuccgcacccaggaguccgccugcaacugcaucggcggcaacugcuaccucaugaucaccgacggcuccgccuccggcgucuccgagugccgcuuccucaagauccgcgagggccgcaucaucaaggagaucuuccccaccggccgcgucaagcacaccgaggagugcaccugcggcuucgccuccaacaagaccaucgagugcgccugccgcgacaacuccuacaccgccaagcgccccuucgucaagcucaacgucgagaccgacaccgccgagauccgccucaugugcaccgacaccuaccucgacaccccccgccccaacgacggcuccaucaccggccccugcgaguccaacggcgacaagggcuccggcggcaucaagggcggcuucguccaccagcgcauggaguccaagaucggccgcugguacucccgcaccauguccaagaccgagcgcaugggcaugggccucuacgucaaguacgacggcgaccccugggccgacuccgacgcccucgccuucuccggcgucauggucuccaugaaggagcccggcugguacuccuucggcuucgagaucaaggacaagaagugcgacguccccugcaucggcaucgagaugguccacgacggcggcaaggagaccuggcacuccgccgccaccgccaucuacugccucaugggcuccggccagcuccucugggacaccgucaccggcgucgacauggcccucuga

SEQ ID NO: 125147 - RNA, 1401 nt, Artificial Sequence; identical to SEQ ID NO: 124997
  derived and/or modified CDS sequence (opt2) from neuraminidase__InfluenzaB__AGX15812

SEQ ID NO: 125148 - RNA, 1401 nt, Artificial Sequence; identical to SEQ ID NO: 124997
  derived and/or modified CDS sequence (opt2) from neuraminidase__InfluenzaB__AGX15823

SEQ ID NO: 125149 - RNA, 1401 nt, Artificial Sequence; identical to SEQ ID NO: 124931
  derived and/or modified CDS sequence (opt2) from neuraminidase__InfluenzaB__AGX15845

SEQ ID NO: 125150 - RNA, 1401 nt, Artificial Sequence; identical to SEQ ID NO: 124908
  derived and/or modified CDS sequence (opt2) from neuraminidase__InfluenzaB__AGX15856

SEQ ID NO: 125151 - RNA, 1401 nt, Artificial Sequence; identical to SEQ ID NO: 124931
  derived and/or modified CDS sequence (opt2) from neuraminidase__InfluenzaB__AGX15867

SEQ ID NO: 125152 - RNA, 1401 nt, Artificial Sequence; identical to SEQ ID NO: 124931
  derived and/or modified CDS sequence (opt2) from neuraminidase__InfluenzaB__AGX15889

SEQ ID NO: 125153 - RNA, 1401 nt, Artificial Sequence
  derived and/or modified CDS sequence (opt2) from neuraminidase__InfluenzaB__AGX15900
augcuccccuccaccauccagacccucacccucuuccucaccuccggcggcguccuccucucccucuacgucuccgcccuccucuccuaccuccucuacuccgacauccuccucaaguucucccccaccgagaucaccgcccccaccaugucccucgacugcgccaacaccuccaacguccaggccgucaaccgcuccgccaccaagggcgucaccuuccuccuccccgagcccgaguggaccuacccccgccucuccugccccggcuccaccuuccagaaggcccuccucaucuccccccaccgcuucggcgagaccaagggcaacuccgccccccucaucauccgcgagcccuucaucgccugcggccccaacgagugcaagcacuucgcccucacccacuacgccgcccagcccggcggcuacuacaacggcacccgcggcgaccgcaacaagcuccgccaccucaucuccgucaagcucggcaagauccccaccgucgagaacuccaucuuccacauggccgccugguccggcuccgccugccacgacggcaaggaguggaccuacaucggcgucgacggccccgacaacgacgcccuccucaaggucaaguacggcgaggccuacaccgacaccuaccacuccuacgccaacaagauccuccgcacccaggaguccgccugcaacugcaucggcggcaacugcuaccucaugaucaccgacggcuccgccuccggcgucuccgagugccgcuuccucaagauccgcgagggccgcaucaucaaggagaucuuccccaccggccgcgucaagcacaccgaggagugcaccugcggcuucgccuccaacaagaccaucgagugcgccugccgcgacaacuccuacaccgccaagcgccccuucgucaagcucaacgucgagaccgacaccgccgagauccgccucaugugcaccgacaccuaccucgacaccccccgccccgacgacggcuccaucaccggccccugcgaguccaacggcgacaagggcuccggcggcaucaagggcggcuucguccaccagcgcauggaguccaagaucggccgcugguacucccgcaccauguccaagaccgagcgccgcggcaugggccucuacgucaaguacgacggcgaccccugggccgacuccgacgcccucgccuucuccggcgucauggucuccaugaaggagcccggcugguacuccuucggcuucgagaucaaggacaagaagugcgacguccccugcaucggcaucgagaugguccacgacggcggcaaggagaccuggcacuccgccgccaccgccaucuacugccucaugggcuccggccagcuccucugggacaccgucaccggcgucgacauggcccucuga

SEQ ID NO: 125154 - RNA, 1401 nt, Artificial Sequence; identical to SEQ ID NO: 124931
  derived and/or modified CDS sequence (opt2) from neuraminidase__InfluenzaB__AGX15911

SEQ ID NO: 125155 - RNA, 1401 nt, Artificial Sequence
  derived and/or modified CDS sequence (opt2) from neuraminidase__InfluenzaB__AGX15933
augcuccccuccaccauccagacccucacccucuuccucaccuccggcggcguccuccucucccucuacgucuccgccucccucuccuaccuccucuacuccgacauccuccucaaguucucccccaccgagaucaccgcccccgccaugccccucgacugcgccaacgccuccaacguccaggccgucaaccgcuccgccaccaagggcgucacccuccuccuccccgagcccgaguggaccuacccccgccucuccugccccggcuccaccuuccagaaggcccuccucaucuccccccaccgcuucggcgagaccaagggcaacuccgccccccucaucauccgcgagcccuucaucgccugcggccccaacgagugcaagcacuucgcccucacccacuacgccgcccagcccggcggcuacuacaacggcacccgcggcgaccgcaacaagcuccgccaccucaucuccgucaagcucggcaagauccccaccgucgagaacuccaucuuccacauggccgccugguccggcuccgccugccacgacggcaaggaguggaccuacaucggcgucgacggccccgacaacaacgcccuccucaaggucaaguacggcgaggccuacaccgacaccuaccacuccuacgccaacaagauccuccgcacccaggaguccgccugcaacugcaucggcggcaacugcuaccucaugaucaccgacggcuccgccuccggcgucuccgagugccgcuuccucaagauccgcgagggccgcaucaucaaggagaucuuccccaccggccgcgucaagcacaccgaggagugcaccugcggcuucgccuccaacaagaccaucgagugcgccugccgcgacaacuccuacaccgccaagcgccccuucgucaagcucaacgucgagaccgacaccgccgagauccgccucaugugcaccgacaccuaccucgacaccccccgccccaacgacggcuccaucaccggccccugcgaguccgacggcgacaagggcuccggcggcaucaagggcggcuucguccaccagcgcauggaguccaagaucggccgcugguacucccgcaccauguccaagaccgagcgcaugggcaugggccucuacgucaaguacgacggcgaccccugggccgacuccgacgcccucgccuucuccggcgucauggucuccaugaaggagcccggcugguacuccuucggcuucgagaucaaggacaagaagugcgacguccccugcaucggcaucgagaugguccacgacggcggcaaggagaccuggcacuccgccgccaccgccaucuacugccucaugggcuccggccagcuccucugggacaccgucaccggcgucgacauggcccucuga

SEQ ID NO: 125156 - RNA, 1401 nt, Artificial Sequence; identical to SEQ ID NO: 124931
  derived and/or modified CDS sequence (opt2) from neuraminidase__InfluenzaB__AGX15944

SEQ ID NO: 125157 - RNA, 1401 nt, Artificial Sequence; identical to SEQ ID NO: 124992
  derived and/or modified CDS sequence (opt2) from neuraminidase__InfluenzaB__AGX15966

SEQ ID NO: 125158 - RNA, 1401 nt, Artificial Sequence
  derived and/or modified CDS sequence (opt2) from neuraminidase__InfluenzaB__AGX15988
augcuccccuccaccauccagacccucacccucuuccucaccuccggcggcguccuccucucccucuacgucuccgccucccucuccuaccuccucuacuccgacauccuccucaaguucucccccaccgagaucaccgcccccaccaugccccucgacugcgccaacgccuccaacguccaggccgucaaccgcuccgccaccaagggcgucacccuccuccuccccgagcccgaguggaccuacccccgccucuccugccccggcuccaccuuccagaaggcccuccucaucuccccccaccgcuucggcgagaccaagggcaacuccgccccccucaucauccgcgagcccuucaucgccugcggccccaacgagugcaagcacuucgcccucacccacuacgccgcccagcccggcggcuacuacaacggcacccgcggcgaccgcaacaagcuccgccaccucaucuccgucaagcucggcaagauccccaccgucgagaacuccaucuuccacauggccgccugguccggcuccgccugccacgacggcaaggaguggaccuacaucggcgucgacggccccgacaacaacgcccuccucaaggucaaguacggcgaggccuacaccgacaccuaccacuccuacgccaacaagauccuccgcacccaggaguccgccugcaacugcaucggcggcaacugcuaccucaugaucaccgacggcuccgccuccggcgucuccgagugccgcuuccucaagauccgcgagggccgcaucaucaaggagaucuuccccaccggccgcgucaagcacaccgaggagugcaccugcggcuucgccuccaacaagaccaucgagugcgccugccgcgacaacuccuacaccgccaagcgccccuucgucaagcucaacgucgagaccgacaccgccgagguccgccucaugugcaccgacaccuaccucgacaccccccgccccaacgacggcuccaucaccggccccugcgaguccgacggcgacaagggcuccggcggcaucaagggcggcuucguccaccagcgcauggaguccaagaucggccgcugguacucccgcaccauguccaagaccgagcgcaugggcaugggccucuacgucaaguacgacggcgaccccugggccgacuccgacgcccucaccuucuccggcgucauggucuccaugaaggagcccggcugguacuccuucggcuucgagaucaaggacaagaagugcgacguccccugcaucggcaucgagaugguccacgacggcggcaaggagaccuggcacuccgccgccaccgccaucuacugccucaugggcuccggccagcuccucugggacaccgucaccggcgucgacauggcccucuga

SEQ ID NO: 125159 - RNA, 1401 nt, Artificial Sequence; identical to SEQ ID NO: 124992
  derived and/or modified CDS sequence (opt2) from neuraminidase__InfluenzaB__AGX15999

SEQ ID NO: 125160 - RNA, 1401 nt, Artificial Sequence; identical to SEQ ID NO: 124992
  derived and/or modified CDS sequence (opt2) from neuraminidase__InfluenzaB__AGX16010

SEQ ID NO: 125161 - RNA, 1401 nt, Artificial Sequence; identical to SEQ ID NO: 124992
  derived and/or modified CDS sequence (opt2) from neuraminidase__InfluenzaB__AGX16021

SEQ ID NO: 125162 - RNA, 1401 nt, Artificial Sequence
  derived and/or modified CDS sequence (opt2) from neuraminidase__InfluenzaB__AGX16032
augcuccccuccaccauccagacccucacccucuuccucaccuccggcggcguccuccucucccucuacgucuccgccucccucuccuaccuccucuacuccgacauccuccucaaguucucccagaccgagaucaccgcccccaucaugccccucgacugcgccaacgccuccaacguccaggccgucaaccgcuccgccaccaagggcgucacccuccuccuccccgagcccgaguggaccuacccccgccucuccugccccggcuccaccuuccagaaggcccuccucaucuccccccaccgcuucggcgagaccaagggcaacuccgccccccucaucauccgcgagcccuucaucgccugcggccccaaggagugcaagcacuucgcccucacccacuacgccgcccagcccggcggcuacuacaacggcacccgcgaggaccgcaacaagcuccgccaccucaucuccgucaagcucggcaagauccccaccgucgagaacuccaucuuccacauggccgccugguccggcuccgccugccacgacggcaaggaguggaccuacaucggcgucgacggccccgacuccaacgcccuccucaagaucaaguacggcgaggccuacaccgacaccuaccacuccuacgccaagaacauccuccgcacccaggaguccgccugcaacugcaucggcggcgacugcuaccucaugaucaccgacggccccgccuccggcaucuccgagugccgcuuccucaagauccgcgagggccgcaucaucaaggagaucuuccccaccggccgcgucaagcacaccgaggagugcaccugcggcuucgccuccaacaagaccaucgagugcgccugccgcgacaacuccuacaccgccaagcgccccuucgucaagcucaacgucgagaccgacaccgccgagauccgccucaugugcaccgagaccuaccucgacaccccccgccccaacgacggcuccaucaccggccccugcgaguccgacggcgacaagggcuccggcggcaucaagggcggcuucguccaccagcgcauggccuccaagaucggccgcugguacucccgcaccauguccaagaccaagcgcaugggcaugggccucuacgucaaguacgacggcgaccccuggaccgacuccgaggcccucgcccucuccggcgucauggucuccauggaggagcccggcugguacuccuucggcuucgagaucaaggacaagaagugcgacguccccugcaucggcaucgagaugguccacgacggcggcaagaccaccuggcacuccgccgccaccgccaucuacugccucaugggcuccggccagcuccucugggacaccgucaccggcgucgacauggcccucuga

SEQ ID NO: 125163 - RNA, 1401 nt, Artificial Sequence; identical to SEQ ID NO: 124779
  derived and/or modified CDS sequence (opt2) from neuraminidase__InfluenzaB__AGX16043

SEQ ID NO: 125164 - RNA, 1401 nt, Artificial Sequence; identical to SEQ ID NO: 124781
  derived and/or modified CDS sequence (opt2) from neuraminidase__InfluenzaB__AGX16054

SEQ ID NO: 125165 - RNA, 1401 nt, Artificial Sequence
  derived and/or modified CDS sequence (opt2) from neuraminidase__InfluenzaB__AGX16087
augcuccccuccaccauccagacccucacccucuuccucaccuccggcggcguccuccucucccucuacgucuccgccucccucuccuaccuccucuacuccgacauccuccucaaguucucccagaccgagaucaccgcccccaucaugccccucgacugcgccaacgccuccaacguccaggccgucaaccgcuccgccaccaagggcgucacccuccuccuccccgagcccgaguggaccuacccccgccucuccugccccggcuccaccuuccagaaggcccuccucaucuccccccaccgcuucggcgagaccaagggcaacuccgccccccucaucauccgcgagcccuucaucgccugcggccccaaggagugcaagcacuucgcccucacccacuacgccgcccagcccggcggcuacuacaacggcacccgcgaggaccgcaacaagcuccgccaccucaucuccgucaagcucggcaagauccccaccgucgagaacuccaucuuccacauggccgccugguccggcuccgccugccacgacggccgcgaguggaccuacaucggcgucgacggccccgacuccaacgcccuccucaagaucaaguacggcgaggccuacaccgacaccuaccacuccuacgccaagaacauccuccgcacccaggaguccgccugcaacugcaucggcggcgacugcuaccucaugaucaccgacggccccgccuccggcaucuccgagugccgcuuccucaagauccgcgagggccgcaucaucaaggagaucuuccccaccggccgcgucaagcacaccgaggagugcaccugcggcuucgccuccaacaagaccaucgagugcgccugccgcgacaacaacuacaccgccaagcgccccuucgucaagcucaacgucgagaccgacaccgccgagauccgccucaugugcaccgagaccuaccucgacaccccccgccccaacgacggcuccaucaccggccccugcgaguccaacggcgacaagggcuccggcggcaucaagggcggcuucguccaccagcgcauggccuccaagaucggccgcugguacucccgcaccauguccaagaccaagcgcaugggcaugggccucuacgucaaguacgacggcgaccccuggaccgacuccgaggcccucgcccucuccggcgucauggucuccauggaggagcccggcugguacuccuucggcuucgagaucaaggacaagaagugcgacguccccugcaucggcaucgagaugguccacgacggcggcaagaccaccuggcacuccgccgccaccgccaucuacugccucaugggcuccggccagcuccucugggacaccgucaccggcgucgacauggcccucuga

SEQ ID NO: 125166 - RNA, 1401 nt, Artificial Sequence
  derived and/or modified CDS sequence (opt2) from neuraminidase__InfluenzaB__AGX16109
augcuccccuccaccauccagacccucacccucuuccucaccuccggcggcguccuccucucccucuacgucuccgccucccucuccuaccuccucuacuccgacauccuccucaaguucucccagaccgagaucaccgcccccaccaugccccucgacugcgccaacgccuccaacguccaggccgucaaccgcuccgccaccaagggcgucacccuccuccuccccgagcccgaguggaccuacccccgccucuccugccccggcuccaccuuccagaaggcccuccucaucuccccccaccgcuucggcgagaccaagggcaacuccgccccccucaucauccgcgagcccuucaucgccugcggccccaaggagugcaagcacuucgcccucacccacuacgccgcccagcccggcggcuacuacaacggcacccgcgaggaccgcaacaagcuccgccaccucaucuccgucaagcucggcaagauccccaccgucgagaacuccaucuuccacauggccgccugguccggcuccgccugccacgacggccgcgaguggaccuacgucggcgucgacggccccgacuccaacgcccuccucaagaucaaguacggcgaggccuacaccgacaccuaccacuccuacgccaagaacauccuccgcacccaggaguccgccugcaacugcaucggcggcgacugcuaccucaugaucaccgacggccccgccuccggcaucuccgagugccgcuuccucaagauccgcgagggccgcaucaucaaggagaucuuccccaccggccgcgucaagcacaccgaggagugcaccugcggcuucgccuccaacaagaccaucgagugcgccugccgcgacaacuccuacaccgccaagcgccccuucgucaagcucgacgucgagaccgacaccgccgagauccgccucaugugcaccgagaccuaccucgacaccccccgccccaacgacggcuccaucaccggccccugcgaggccaacggcgacaagggcuccggcggcaucaagggcggcuucguccaccagcgcauggccuccaagaucggccgcugguacucccgcaccauguccaagaccaagcgcaugggcaugggccucuacgucaaguacgacggcgaccccuggaccgacuccgaggcccucgcccucuccggcgucauggucuccauggaggagcccggcugguacuccuucggcuucgagaucaaggacaagaagugcgacguccccugcaucggcaucgagaugguccacgacggcggcaagaccaccuggcacuccgccgccaccgccaucuacugccucaugggcuccggccagcuccucugggacaccgucaccggcgucgacauggcccucuga

SEQ ID NO: 125167 - RNA, 1401 nt, Artificial Sequence
  derived and/or modified CDS sequence (opt2) from neuraminidase__InfluenzaB__AGX16120
augcuccccuccaccauccagacccucacccucuuccucaccuccggcggcguccuccucucccucuacgucuccgccucccucuccuaccuccucuacuccgacauccuccucaaguucuccaccaccgagaucaccgcccccaccaugccccucgacugcgccaacgccuccaacguccaggccgucaaccgcuccgccaccaagggcgucaccuuccuccuccccgagcccgaguggaccuacccccgccucuccugccccggcuccaccuuccagaaggcccuccucaucuccccccaccgcuucggcgagaccaagggcaacuccgccccccucaucauccgcgagcccuucaucgccugcggccccaaggagugcaagcacuucgcccucacccacuacgccgcccagcccggcggcuacuacaacggcacccgcgaggaccgcaacaagcuccgccaccucaucuccgucaagcucggcaagauccccaccgucgagaacuccaucuuccacauggccgccugguccggcuccgccugccacgacggcaaggaguggaccuacaucggcgucgacggccccgacuccaacgcccuccucaagaucaaguacggcgaggccuacaccgacaccuaccacuccuacgccaacaacauccuccgcacccaggaguccgccugcaacugcaucggcggcaacugcuaccucaugaucaccgacggcuccgccuccggcaucuccgagugccgcuuccucaagauccgcgagggccgcaucaucaaggagaucuuccccaccggccgcgucaagcacaccgaggagugcaccugcggcuucgccuccaacaagaccaucgagugcgccugccgcgacaacuccuacaccgccaagcgccccuucgucaagcucaacgucgagaccgacaccgccgagauccgccucaugugcaccgagaccuaccucgacaccccccgccccgacgacggcuccaucaccggccccugcgaguccaacggcaacaagggcuccggcggcaucaagggcggcuucguccaccagcgcauggccuccaagaucggccgcugguacucccgcaccauguccaagaccaagcgcaugggcaugggccucuacgucaaguacgacggcgaccccuggaccgacuccgacgcccucgcccucuccggcgucauggucuccauggaggagcccggcugguacuccuucggcuucgagaucaaggacaagaagugcgacguccccugcaucggcaucgagaugguccacgacggcggcaaggagaccuggcacuccgccgccaccgccaucuacugccucaugggcuccggccagcuccucugggacaccgucaccggcgucgacauggcccucuga

SEQ ID NO: 125168 - RNA, 1401 nt, Artificial Sequence; identical to SEQ ID NO: 125167
  derived and/or modified CDS sequence (opt2) from neuraminidase__InfluenzaB__AGX16131

SEQ ID NO: 125169 - RNA, 1401 nt, Artificial Sequence; identical to SEQ ID NO: 125167
  derived and/or modified CDS sequence (opt2) from neuraminidase__InfluenzaB__AGX16142

SEQ ID NO: 125170 - RNA, 1401 nt, Artificial Sequence
  derived and/or modified CDS sequence (opt2) from neuraminidase__InfluenzaB__AGX16153
augcuccccuccaccauccagacccucacccucuuccucaccuccggcggcguccuccucucccucuacgucuccgccucccucuccuaccuccucuacuccgacauccuccucaaguucucccagaccgagaucaccgcccccaucaugccccucgacugcgccaacgccuccaacguccaggccgucaaccgcuccgccacccgcggcgucacccuccuccuccccgagcccgaguggaccuacccccgccucuccugccccggcuccaccuuccagaaggcccuccucaucuccccccaccgcuucggcgagaccaagggcaacuccgccccccucaucauccgcgagcccuucaucgccugcggccccaaggagugcaagcacuucgcccucacccacuacgccgcccagcccggcggcuacuacaacggcacccgcgaggaccgcaacaagcuccgccaccucaucuccgucaagcucggcaagauccccaccgucgagaacuccaucuuccacaugaccgccugguccggcuccgccugccacgacggccgcgaguggaccuacaucggcgucgacggccccgacuccaacgcccuccucaagaucaaguacggcgaggccuacaccgacaccuaccacuccuacgccaagaacauccuccgcacccaggaguccgccugcaacugcaucggcggcgacugcuaccucaugaucaccgacggccccgccuccggcaucuccgagugccgcuuccucaagauccgcgagggccgcaucaucaaggagaucuuccccaccggccgcgucaagcacaccgaggagugcaccugcggcuucgccuccaacaagaccaucgagugcgccugccgcgacaacuccuacaccgccaagcgccccuucgucaagcucaacgucgagaccgacaccgccgagauccgccucaugugcaccgagaccuaccucgacaccccccgccccaacgacggcuccaucaccggccccugcgaguccaacggcgacaagggcuccggcggcaucaagggcggcuucguccaccagcgcauggccuccaagaucggccgcugguacucccgcaccauguccaagaccaagcgcaugggcaugggccucuacgucaaguacgacggcgaccccuggaccgacuccgaggcccucgcccucuccggcgucauggucuccauggaggagcccggcugguacuccuucggcuucgagaucaaggacaagaagugcgacguccccugcaucggcaucgagaugguccacgacggcggcaagaccaccuggcacuccgccgccaccgccaucuacugccucaugggcuccggccagcuccucugggacaccgucaccggcgucgacauggcccucuga

SEQ ID NO: 125171 - RNA, 1401 nt, Artificial Sequence; identical to SEQ ID NO: 125165
  derived and/or modified CDS sequence (opt2) from neuraminidase__InfluenzaB__AGX16164

SEQ ID NO: 125172 - RNA, 1401 nt, Artificial Sequence; identical to SEQ ID NO: 124824
  derived and/or modified CDS sequence (opt2) from neuraminidase__InfluenzaB__AGX16197

SEQ ID NO: 125173 - RNA, 1401 nt, Artificial Sequence; identical to SEQ ID NO: 124824
  derived and/or modified CDS sequence (opt2) from neuraminidase__InfluenzaB__AGX16208

SEQ ID NO: 125174 - RNA, 1401 nt, Artificial Sequence; identical to SEQ ID NO: 124824
  derived and/or modified CDS sequence (opt2) from neuraminidase__InfluenzaB__AGX16219

SEQ ID NO: 125175 - RNA, 1401 nt, Artificial Sequence; identical to SEQ ID NO: 124663
  derived and/or modified CDS sequence (opt2) from neuraminidase__InfluenzaB__AGX16230

SEQ ID NO: 125176 - RNA, 1401 nt, Artificial Sequence
  derived and/or modified CDS sequence (opt2) from neuraminidase__InfluenzaB__AGX16241
augcuccccuccaccauccagacccucacccucuuccucaccuccggcggcguccuccucucccucuacgucuccgccucccucuccuaccuccucuacuccgacauccuccucaaguucucccagaccgagaucaccgcccccaucaugccccucgacugcgccaacgccuccaacguccaggccgucaaccacuccgccaccaagggcgucacccuccuccuccccgagcccgaguggaccuacccccgccucuccugccccggcuccaccuuccagaaggcccuccucaucuccccccaccgcuucggcgagaccaagggcaacuccgccccccucaucauccgcgagcccuucaucgccugcggccccaaggagugcaagcacuucgcccucacccacuacgccgcccagcccggcggcuacuacaacggcacccgcgaggaccgcaacaagcuccgccaccucaucuccgucaagcucggcaagauccccaccgucgagaacuccaucuuccacauggccgccugguccggcuccgccugccacgacggccgcgaguggaccuacaucggcgucgacggccccgacuccaacgcccuccucaagaucaaguacggcgaggccuacaccgacaccuaccacuccuacgccaagaacauccuccgcacccaggaguccgccugcaacugcaucggcggcgacugcuaccucaugaucaccgacggccccgccuccggcaucuccgagugccgcuuccucaagauccgcgagggccgcaucaucaaggagaucuuccccaccggccgcgucaagcacaccgaggagugcaccugcggcuucgccuccaacaagaccaucgagugcgccugccgcgacaacuccuacaccgccaagcgccccuucgucaagcucaacgucgagaccgacaccgccgagauccgccucaugugcaccgagaccuaccucgacaccccccgccccaacgacggcuccaucaucggccccugcgaguccaacggcgacaagggcuccggcggcaucaagggcggcuucguccaccagcgcauggccuccaagaucggccgcugguacucccgcaccauguccaagaccaagcgcaugggcaugggccucuacgucaaguacgacggcgaccccuggaccgacuccgaggcccucacccucuccggcgucauggucuccauggaggagcccggcugguacuccuucggcuucgagaucaaggacaagaagugcgacguccccugcaucggcaucgagaugguccacgacggcggcaagaccaccuggcacuccgccgccaccgccaucuacugccucaugggcuccggccagcuccucugggacaccgucaccggcgucgacauggcccucuga

SEQ ID NO: 125177 - RNA, 1401 nt, Artificial Sequence
  derived and/or modified CDS sequence (opt2) from neuraminidase__InfluenzaB__AGX16252
augcuccccuccaccauccagacccucacccucuuccucaccuccggcggcguccuccucucccucuacgucuccgccucccucuccuaccuccucuacuccgacauccuccucaaguucucccagaccgagaucaccgcccccaucaugccccucgacugcgccaacgccuccaacguccaggccgucaaccgcuccgccgccaagggcgucacccuccuccuccccgagcccgagugggccuacccccgccucuccugccccggcuccaccuuccagaaggcccuccucaucuccccccaccgcuucggcgagaccaagggcaacuccgccccccucaucauccgcgagcccuucaucgccugcggccccaccgagugcaagcacuucgcccucacccacuacgccgcccagcccggcggcuacuacaacggcacccgcgaggaccgcaacaagcuccgccaccucaucuccgucaagcucggcaagauccccaccgucgagaacuccaucuuccacauggccgccugguccggcuccgccugccacgacggcaaggaguggaccuacaucggcgucgacggccccgacuccaacgcccuccucaagaucaaguacggcgaggccuacaccgacaccuaccacuccuacgccaagaacauccuccgcacccaggaguccgccugcaacugcaucggcggcgacugcuaccucaugaucaccgacggccccgccuccggcaucuccgagugccgcuuccucaagauccgcgagggccgcaucaucaaggagaucuuccccaccggccgcgucaagcacaccgaggagugcaccugcggcuucgccuccaacaagaccaucgagugcgccugccgcgacaaccgcuacaccgccaagcgccccuucgucaagcucaacgucgagaccgacaccgccgagauccgccucaugugcaccgagaccuaccucgacaccccccgccccaacgacggcuccaucaccggccccugcgaguccgacggcgacaagggcuccggcggcaucaagggcggcuucguccaccagcgcauggccuccaagaucggccgcugguacucccgcaccauguccaagaccaagcgcaugggcaugggccucuacgucaaguacgacggcgaccccuggaccgacuccgaggcccucgcccucuccggcgucauggucuccauggaggagcccggcugguacuccuucggcuucgagaucaaggacaagaagugcgacguccccugcaucggcaucgagaugguccacgacggcggcaagaccaccuggcacuccgccgccaccgccaucuacugccucaugggcuccggccagcuccucugggacaccgucaccggcgucgacauggcccucuga

SEQ ID NO: 125178 - RNA, 1401 nt, Artificial Sequence; identical to SEQ ID NO: 124824
  derived and/or modified CDS sequence (opt2) from neuraminidase__InfluenzaB__AGX16274

SEQ ID NO: 125179 - RNA, 1401 nt, Artificial Sequence
  derived and/or modified CDS sequence (opt2) from neuraminidase__InfluenzaB__AGX16285
augcuccccuccaccauccagacccucacccucuuccucaccuccggcggcguccuccucucccucuacgucuccgccucccucuccuaccuccucuacuccgacauccuccucaaguucucccagaccgagaucaccgcccccaucaugccccucgacugcgccaacgccuccaacguccaggccgucaaccgcuccgccgccaagggcgucacccuccuccuccccgagcccgaguggaccuacccccgccucuccugccccggcuccaccuuccagaaggcccuccucaucuccccccaccgcuucggcgagaccaagggcaacuccgccccccucaucauccgcgagcccuucaucgccugcggccccaccgagugcaagcacuucgcccucacccacuacgccgcccagcccggcggcuacuacaacggcacccgcgaggaccgcaacaagcuccgccaccucaucuccgucaagcucggcaagauccccaccgucgagaacuccaucuuccacauggccgccugguccggcuccgccugccacgacggcaaggaguggaccuacaucggcgucgacggccccgacuccaacgcccuccucaagaucaaguacggcgaggccuacaccgacaccuaccacuccuacgccaagaacauccuccgcacccaggaguccgccugcaacugcaucggcggcgacugcuaccucaugaucaccgacggccccgccuccggcaucuccgagugccgcuuccucaagauccgcgagggccgcaucaucaaggagaucuuccccaccggccgcgucaagcacaccgaggagugcaccugcggcuucgccuccaacaagaccaucgagugcgccugccgcgacaacuccuacaccgccaagcgccccuucgucaagcucaacgucgagaccgacaccgccgagauccgccucaugugcaccgagaccuaccucgacaccccccgccccaacgacggcuccaccaccggccccugcgaguccgacggcgacaagggcuccggcggcaucaagggcggcuucguccaccagcgcauggccuccaagaucggccgcugguacucccgcaccauguccaagaccaagcgcaugggcaugggccucuacgucaaguacgacggcgaccccuggaccgacuccgaggcccucgcccucuccggcgucauggucuccauggaggagcccggcugguacuccuucggcuucgagaucaaggacaagaagugcgacguccccugcaucggcaucgagaugguccacgacggcggcaagaccaccuggcacuccgccgccaccgccaucuacugccucaugggcuccggccagcuccucugggacaccgucaccggcgucgacauggcccucuga

SEQ ID NO: 125180 - RNA, 1401 nt, Artificial Sequence; identical to SEQ ID NO: 124824
  derived and/or modified CDS sequence (opt2) from neuraminidase__InfluenzaB__AGX16296

SEQ ID NO: 125181 - RNA, 1401 nt, Artificial Sequence; identical to SEQ ID NO: 124671
  derived and/or modified CDS sequence (opt2) from neuraminidase__InfluenzaB__AGX16307

SEQ ID NO: 125182 - RNA, 1401 nt, Artificial Sequence; identical to SEQ ID NO: 124824
  derived and/or modified CDS sequence (opt2) from neuraminidase__InfluenzaB__AGX16329

SEQ ID NO: 125183 - RNA, 1401 nt, Artificial Sequence
  derived and/or modified CDS sequence (opt2) from neuraminidase__InfluenzaB__AGX16362
augcuccccuccaccauccagacccucacccucuuccucaccuccggcggcguccuccucucccucuacgucuccgccucccucuccuaccuccucuacuccgacauccuccucaaguucucccagaccgagaucaccgcccccaucaugccccucgacugcgccaacgccuccaacguccaggccgucaaccgcuccgccgccaagggcgucacccuccuccuccccgagcccgaguggaccuacccccgccucuccugccccggcuccaccuuccagaaggcccuccucaucuccccccaccgcuucggcgagaccaagggcaacuccgccccccucaucauccgcgagcccuucaucgccugcggccccaccgagugcaagcacuucgcccucacccacuacgccgcccagcccggcggcuacuacaacggcacccgcgaggaccgcaacaagcuccgccaccucaucuccgucaagcucggcaagauccccaccgucgagaacuccaucuuccacauggccgccugguccggcuccgccugccacgacggcaaggaguggaccuacaucggcgucgacggccccgacuccaacgcccuccucaagaucaaguacggcgaggccuacaccgacaccuaccacuccuacgccaagaacauccuccgcacccaggaguccgccugcaacugcaucggcggcgacugcuaccucaugaucaccgacggccccgccuccggcgucuccgagugccgcuuccucaagauccgcgagggccgcaucaucaaggagaucuuccccaccggccgcgucaagcacaccgaggagugcaccugcggcuucgccuccaacaagaccaucgagugcgccugccgcgacaacuccuacaccgccaagcgccccuucgucaagcucaacgucgagaccgacaccgccgagauccgccucaugugcaccgagaccuaccucgacaccccccgccccaacgacggcuccaucaccggccccugcgaguccgacggcgacaagggcuccggcggcaucaagggcggcuucguccaccagcgcauggccuccaagaucggccgcugguacucccgcaccauguccaagaccaagcgcaugggcaugggccucuacgucaaguacgacggcgaccccuggaccgacuccgaggcccucgcccucuccggcgucauggucuccauggaggagcccggcugguacuccuucggcuucgagaucaaggacaagaagugcgacguccccugcaucggcaucgagaugguccacgacggcggcaagaccaccuggcacuccgccgccaccgccaucuacugccucaugggcuccggccagcuccucugggacaccgucaccggcgucgacauggcccucuga

SEQ ID NO: 125184 - RNA, 1401 nt, Artificial Sequence; identical to SEQ ID NO: 124996
  derived and/or modified CDS sequence (opt2) from neuraminidase__InfluenzaB__AGX16373

SEQ ID NO: 125185 - RNA, 1401 nt, Artificial Sequence
  derived and/or modified CDS sequence (opt2) from neuraminidase__InfluenzaB__AGX16384
augcuccccuccaccauccagacccucacccucuuccucaccuccggcggcguccuccucucccucuacgucuccgccucccucuccuaccuccucuacuccgacauccuccucaaguucucccagaccgagaucaccgcccccaucaugccccucgacugcgccaacgccuccaacguccaggccgucaaccgcuccgccgccaagggcgucacccuccuccuccccgagcccgaguggaccuacccccgccucuccugccccggcuccaccuuccagaaggcccuccucaucuccccccaccgcuucggcgagaccaagggcaacuccgccccccucaucauccgcgagcccuucaucgccugcggccccaccgagugcaagcacuucgcccucacccacuacgccgcccagcccggcggcuacuacaacggcacccgcgaggaccgcaacaagcucaagcaccucaucuccgucaagcucggcaagauccccaccgucgagaacuccaucuuccacauggccgccugguccggcuccgccugccacgacggcaaggaguggaccuacaucggcgucgacggccccgacuccaacgcccuccucaagaucaaguacggcgaggccuacaccgacaccuaccacuccuacgccaagaacauccuccgcacccaggaguccgccugcaacugcaucggcggcgacugcuaccucaugaucaccgacggccccgccuccggcaucuccgagugccgcuuccucaagauccgcgagggccgcaucaucaaggagaucuuccccaccggccgcgucaagcacaccgaggagugcaccugcggcuucgccuccaacaagaccaucgagugcgccugccgcgacaacuccuacaccgccaagcgccccuucgucaagcucaacgucgagaccgacaccgccgagauccgccucaugugcaccgagaccuaccucgacaccccccgccccaacgacggcuccaucaccggccccugcgaguccgacggcgacaagggcuccggcggcaucaagggcggcuucguccaccagcgcauggccuccaagaucggccgcugguacucccgcaccauguccaagaccaagcgcaugggcaugggccucuacgucaaguacgacggcgaccccuggaccgacuccgaggcccucgcccucuccggcgucauggucuccauggaggagcccggcugguacuccuucggcuucgagaucaaggacaagaagugcgacguccccugcaucggcaucgagaugguccacgacggcggcaagaccaccuggcacuccgccgccaccgccaucuacugccucaugggcuccggccagcuccucugggacaccgucaccggcgucgacauggcccucuga

SEQ ID NO: 125186 - RNA, 1401 nt, Artificial Sequence; identical to SEQ ID NO: 124853
  derived and/or modified CDS sequence (opt2) from neuraminidase__InfluenzaB__AGX16406

SEQ ID NO: 125187 - RNA, 1401 nt, Artificial Sequence; identical to SEQ ID NO: 124853
  derived and/or modified CDS sequence (opt2) from neuraminidase__InfluenzaB__AGX16427

SEQ ID NO: 125188 - RNA, 1401 nt, Artificial Sequence; identical to SEQ ID NO: 124853
  derived and/or modified CDS sequence (opt2) from neuraminidase__InfluenzaB__AGX16438

SEQ ID NO: 125189 - RNA, 1401 nt, Artificial Sequence; identical to SEQ ID NO: 124853
  derived and/or modified CDS sequence (opt2) from neuraminidase__InfluenzaB__AGX16449

SEQ ID NO: 125190 - RNA, 1401 nt, Artificial Sequence; identical to SEQ ID NO: 124853
  derived and/or modified CDS sequence (opt2) from neuraminidase__InfluenzaB__AGX16460

SEQ ID NO: 125191 - RNA, 1401 nt, Artificial Sequence
  derived and/or modified CDS sequence (opt2) from neuraminidase__InfluenzaB__AGX16471
augcuccccuccaccauccagacccucacccucuuccucaccuccggcggcguccuccucucccucuacgucuccgccucccucuccuaccuccucuacuccgacauccuccucaaguucucccagaccgagaucaccgcccccaucaugccccucgacugcgccaacgccuccaacguccaggccgucaaccgcuccgccgccaagggcgucacccuccuccuccccgagcccgaguggaccuacccccgccucuccugccccggcuccaccuuccagaaggcccuccucaucuccccccaccgcuucggcgagaccaagggcaacuccgccccccucaucauccgcgagcccuucaucgccugcggccccaccgagugcaagcacuucgcccucacccacuacgccgcccagcccggcggcuacuacaacggcacccgcgaggaccgcaacaagcuccgccaccucaucuccgucaagcucggcaagauccccaccgucgagaacuccaucuuccacauggccgccugguccggcuccgccugccacgacggcaaggaguggaccuacaucggcgucgacggccccgacuccaacgcccuccucaagaucaaguacggcgaggccuacaccgacaccuaccacuccuacgccaagaacauccuccgcacccaggaguccgccugcaacugcaucggcggcgacugcuaccucaugaucaccgacggccccgccuccggcaucuccgagugccgcuuccucaagauccgcgagggccgcaucaucaaggagaucuuccccaccggccgcgucaagcacaccgaggagugcaccugcggcuucgccuccaacaagaccaucgagugcgccugccgcgacaacuccuacaccgccaagcgccccuucgucaagcucaacgucgagaccgacaccgccgagauccgccucaugugcaccaagaccuaccucgacaccccccgccccaacgacggcuccaucaccggccccugcgaguccgacggcgacaagggcuccggcggcaucaagggcggcuucguccaccagcgcauggccuccaagaucggccgcugguacucccgcaccauguccaagacccgccgcaugggcaugggccucuacgucaaguacgacggcgaccccuggaccgacuccgaggcccucgcccucuccggcgucauggucuccauggaggagcccggcugguacuccuucggcuucgagaucaaggacaagaagugcgacguccccugcaucggcaucgagaugguccacgacggcggcaagaccaccuggcacuccgccgccaccgccaucuacugccucaugggcuccggccagcuccucugggacaccgucaccggcgucgacauggcccucuga

SEQ ID NO: 125192 - RNA, 1401 nt, Artificial Sequence; identical to SEQ ID NO: 124853
  derived and/or modified CDS sequence (opt2) from neuraminidase__InfluenzaB__AGX16482

SEQ ID NO: 125193 - RNA, 1401 nt, Artificial Sequence
  derived and/or modified CDS sequence (opt2) from neuraminidase__InfluenzaB__AGX16493
augcuccccuccaccauccagacccucacccucuuccucaccuccggcggcguccuccucucccucuacgucuccgccucccucuccuaccuccucuacuccgacauccuccucaaguucucccagaccgagaucaccgcccccaucaugccccucgacugcgccaacgccuccaacguccaggccgucaaccgcuccgccgccaagggcgucacccuccuccuccccgagcccgaguggaccuacccccgccucuccugccccggcuccaccuuccagaaggcccuccucaucuccccccaccgcuucggcgagaccaagggcaacuccgccccccucaucauccgcgagcccuucaucgccugcggccccaccgagugcaagcacuucgcccucacccacuacgccgcccagcccggcggcuacuacaacggcacccgcgaggaccgcaacaagcuccgccaccucaucuccgucaagcucggcaagauccccaccgucgagaacuccaucuuccacauggccgccugguccggcuccgccugccacgacggcaaggaguggaccuacaucggcgucgacggccccgacuccaacgcccuccucaagaucaaguacggcgaggccuacaccgacaccuaccacuccuacgccaagaacauccuccgcacccaggaguccgccugcaacugcaucggcggcgacugcuaccucaugaucaccgacggccccgccuccggcaucuccgagugccgcuuccucaagauccgcgagggccgcaucaucaaggagaucuuccccaccggccgcgucaagcacaccgaggagugcaccugcggcuucgccuccaacaagaccaucgagugcgccugccgcgacaacuccuacaccgccaagcgccccuucgucaagcucaacgucgagaccgacaccgccgagauccgccucaugugcaccgagaccuaccucgacaccccccgccccaacgacggcuccaucaccggccccugcgaguccgacggcgacaagggcuccggcggcaucaagggcggcuucguccaccagcgcauggccuccaagaucggccgcugguacucccgcaccauguccaagaccaagcgcaugggcaugggccucuacgucaaguacgacggcgaccccuggaccgacuccgaggcccucgcccucuccggcgucgucgucuccauggaggagcccggcugguacuccuucggcuucgagaucaaggacaagaagugcgacguccccugcaucggcaucgagaugguccacgacggcggcaagaccaccuggcacuccgccgccaccgccaucuacugccucaugggcuccggccagcuccucugggacaccgucaccggcgucgacauggcccucuga

SEQ ID NO: 125194 - RNA, 1401 nt, Artificial Sequence; identical to SEQ ID NO: 124652
  derived and/or modified CDS sequence (opt2) from neuraminidase__InfluenzaB__AGX16504

SEQ ID NO: 125195 - RNA, 1401 nt, Artificial Sequence; identical to SEQ ID NO: 124652
  derived and/or modified CDS sequence (opt2) from neuraminidase__InfluenzaB__AGX16515

SEQ ID NO: 125196 - RNA, 1401 nt, Artificial Sequence
  derived and/or modified CDS sequence (opt2) from neuraminidase__InfluenzaB__AGX16548
augcuccccuccaccauccagacccucacccucuuccucaccuccggcggcguccuccucucccucuacgucuccgccucccucuccuaccuccucuacuccgacauccuccucaaguucucccccaccgagaucaccgcccccaccaugccccucgacugcgccaacgccuccaacguccaggccgucaaccgcuccgccaccaagggcgucacccuccuccuccccgagcccgaguggaccuacccccgccucuccugccccggcuccaccuuccagaaggcccuccucaucuccccccaccgcuucggcgagaccaagggcaacuccgccccccucaucauccgcgagcccuucaucgccugcggccccaaggagugcaagcacuucgcccucacccacuacgccgcccagcccggcggcuacuacaacggcacccgcggcgaccgcaacaagcuccgccaccucaucuccgucaagcucggcaagauccccaccgucgagaacuccaucuuccacauggccgccugguccggcuccgccugccacgacggcaaggaguggaccuacaucggcgucgacggccccgacaacaacgcccuccucaagaucaaguacggcgaggccuacaccgacaccuaccacuccuacgccaacaacauccuccgcacccaggaguccgccugcaacugcaucggcggcaacugcuaccucaugaucaccgacggcuccgccuccggcaucuccgagugccgcuuccucaagauccgcgagggccgcaucaucaaggagaucuuccccaccggccgcgucaagcacaccgaggagugcaccugcggcuucgccuccaacaagaccaucgagugcgccugccgcgacaacuccuacaccgccaagcgccccuucgucaagcucaacgucgagaccgacaccgccgagauccgccucaugugcaccgagaccuaccucgacaccccccgccccgacgacggcuccaucaccggccccugcgaguccaacggcgacaacggcuccggcggcaucaagggcggcuucguccaccagcgcauggccuccaagaucggccgcugguacucccgcaccauguccaagaccaagcgcaugggcaugggccucuacgucaaguacgacggcgaccccugggccgacuccgacgcccucgcccucuccggcgucauggucuccauggaggagcccggcugguacuccuucggcuucgagaucaaggacaagaagugcgacguccccugcaucggcaucgagaugguccacgacggcggcaaggagaccuggcacuccgccgccaccgccaucuacugccucaugggcuccggccagcuccucugggacaccgucaccggcgucgacauggcccucuga

SEQ ID NO: 125197 - RNA, 1401 nt, Artificial Sequence
  derived and/or modified CDS sequence (opt2) from neuraminidase__InfluenzaB__AGX16559
augcuccccuccaccauccagacccucacccucuuccucaccuccggcggcguccuccucucccucuacgucuccgccucccucuccuaccuccucuacuccgacauccuccucaaguucucccccaccgagaucaucgcccccaccaugccccucgacugcgccaacgccuccaacguccaggccgucaaccgcuccgccaccaagggcgucacccuccuccuccccgagcccgaguggaccuacccccgccucuccugccccggcuccaccuuccagaaggcccuccucaucuccccccaccgcuucggcgagaccaagggcaacuccgccccccucaucauccgcgagcccuucaucgccugcggccccaaggagugcaagcacuucgcccucacccacuacgccgcccagcccggcggcuacuacaacggcacccgcggcgaccgcaacaagcuccgccaccucaucuccgucaagcucggcaagauccccaccgucgagaacuccaucuuccacauggccgccugguccggcuccgccugccacgacggcaaggaguggaccuacaucggcgucgacggccccgacaacaacgcccuccucaagaucaaguacggcgaggccuacaccgacaccuaccacuccuacgccaacaacauccuccgcacccaggaguccgccugcaacugcaucggcggcaacugcuaccucaugaucaccgacggcuccgccuccggcaucuccgagugccgcuuccucaagauccgcgagggccgcaucaucaaggagaucuuccccaccggccgcgucaagcacaccgaggagugcaccugcggcuucgccuccaacaagaccaucgagugcgccugccgcgacaacuccuacaccgccaagcgccccuucgucaagcucaacgucgagaccgacaccgccgagauccgccucaugugcaccgagaccuaccucgacaccccccgccccgacgacggcuccaucaccggccccugcgaguccaacggcgacaagggcuccggcggcaucaagggcggcuucguccaccagcgcauggccuccaagaucggccgcugguacucccgcaccauguccaagaccaagcgcaugggcaugggccucuacgucaaguacgacggcgaccccugggccgacuccgacgcccucgcccucuccggcgucauggucuccauggaggagcccggcugguacuccuucggcuucgagauccgcgacaagaagugcgacguccccugcaucggcaucgagaugguccacgacggcggcaaggagaccuggcacuccgccgccaccgccaucuacugccucaugggcuccggccagcuccucugggacaccgucaccggcgucgacauggcccucuga

SEQ ID NO: 125198 - RNA, 1401 nt, Artificial Sequence
  derived and/or modified CDS sequence (opt2) from neuraminidase__InfluenzaB__AGX16581
augcuccccuccaccauccagacccucacccucuuccucaccuccggcggcguccuccucucccucuacgucuccgccucccucuccuaccuccucuacuccgacauccuccucaaguucucccccaccgagaucaucgcccccaccaugccccucgacugcgccaacgccuccaacguccaggccgucaaccgcuccgccaccaagggcgucacccuccuccuccccgagcccgaguggaccuacccccgccucuccugccccggcuccaccuuccagaaggcccuccucaucuccccccaccgcuucggcgagaccaagggcaacuccgccccccucaucauccgcgagcccuucaucgccugcggccccaaggagugcaagcacuucgcccucacccacuacgccgcccagcccggcggcuacuacaacggcacccgcggcgaccgcaacaagcuccgccaccucaucuccgucaagcucggcaagauccccaccgucgagaacuccaucuuccacauggccgccugguccggcuccgccugccacgacggcaaggaguggaccuacaucggcgucgacggccccgacaacaacgcccuccucaagaucaaguacggcgaggccuacaccgacaccuaccacuccuacgccaacaacauccuccgcacccaggaguccgccugcaacugcaucggcggcaacugcuaccucaugaucaccgacggcuccgccuccggcaucuccgagugccgcuuccucaagauccgcgagggccgcaucaucaaggagaucuuccccaccggccgcgucaagcacaccgaggagugcaccugcggcuucgccuccaacaagaccaucgagugcgccugccgcgacaacuccuacaccgccaagcgccccuucgucaagcucaacgucgagaccgacaccgccgagauccgccucaugugcaccgagaccuaccucgacaccccccgccccgacgacggcuccaucaccggccccugcgaguccaacggcgacaagggcuccggcggcaucaagggcggcuucguccaccagcgcauggccuccaagaucggccgcugguacucccgcaccauguccaagaccaagcgcaugggcaugggccucuacgucaaguacgacggcgaccccugggccgacuccgacgcccucgcccucuccggcgucauggucuccauggaggagcccggcugguacuccuucggcuucgagaucaaggacaagaagugcgacguccccugcaucggcaucgagaugguccacgacggcggcaaggagaccuggcacuccgccgccaccgccaucuacugccucaugggcuccggccagcuccucugggacaccgucaccggcgucgacauggcccucuga

SEQ ID NO: 125199 - RNA, 1401 nt, Artificial Sequence; identical to SEQ ID NO: 125198
  derived and/or modified CDS sequence (opt2) from neuraminidase__InfluenzaB__AGX16592

SEQ ID NO: 125200 - RNA, 1401 nt, Artificial Sequence; identical to SEQ ID NO: 124652
  derived and/or modified CDS sequence (opt2) from neuraminidase__InfluenzaB__AGX16603

SEQ ID NO: 125201 - RNA, 1401 nt, Artificial Sequence; identical to SEQ ID NO: 124718
  derived and/or modified CDS sequence (opt2) from neuraminidase__InfluenzaB__AGX16614

SEQ ID NO: 125202 - RNA, 1401 nt, Artificial Sequence; identical to SEQ ID NO: 125196
  derived and/or modified CDS sequence (opt2) from neuraminidase__InfluenzaB__AGX16625

SEQ ID NO: 125203 - RNA, 1401 nt, Artificial Sequence
  derived and/or modified CDS sequence (opt2) from neuraminidase__InfluenzaB__AGX16636
augcuccccuccaccauccagacccucacccucuuccucaccuccggcggcguccuccucucccucuacgucuccgccucccucuccuaccuccucuacuccgacauccuccucaaguucucccccaccgagaucaucgcccccaccaugccccucgacugcgccaacgccuccaacguccaggccgucaaccgcuccgccaccaagggcgucacccuccuccuccccgagcccgaguggaccuacccccgccucuccugccccggcuccaccuuccagaaggcccuccucaucuccccccaccgcuucggcgagaccaagggcaacuccgccccccucaucauccgcgagcccuucaucgccugcggccccaaggagugcaagcacuucgcccucacccacuacgccgcccagcccggcggcuacuacaacggcacccgcggcgaccgcaacaagcuccgccaccucaucuccgucaagcucggcaagauccccaccgucgagaacuccaucuuccacauggccgccugguccggcuccgccugccacgacggcaaggaguggaccuacaucggcgucgacggccccgacaacaacgcccuccucaagaucaaguacggcgaggccuacaccgacaccuaccacuccuacgccaacaacauccuccgcacccaggaguccgccugcaacugcaucggcggcaacugcuaccucaugaucaccgacggcuccgccuccggcaucuccgagugccgcuuccucaagauccgcgagggccgcaucaucaaggagaucuuccccaccggccgcgucaagcacaccgaggagugcaccugcggcuucgccuccaacaagaccaucgagugcgccugccgcgacaacuccuacaccgccaagcgccccuucgucaagcucaacgucgagaccgacaccgccgagauccgccucaugugcaccgagaccuaccucgacaccccccgccccgacgacggcuccaucaccggccccugcgaguccaacggcgacaagggcuccggcggcaucaagggcggcuucguccaccagcgcauggccuccaagaucggccgcugguacucccgcaccauguccaagaccaagcgcaugggcaugggccucuacgucaaguacgacggcgaccccugggccgacuccgacgcccucgcccucuccggcgucauggucuccauggaggagcccggcugguacuccuucggcuucgagaucaaggacaagaagugcgacguccccugcaucggcaucgagaugguccacgacggcggcaaggagaccuggcacuccgccgccaccgccaucuacugccucaugggcuccggccagcuccucuggaacaccgucaccggcgucgacauggcccucuga

SEQ ID NO: 125204 - RNA, 1401 nt, Artificial Sequence; identical to SEQ ID NO: 124650
  derived and/or modified CDS sequence (opt2) from neuraminidase__InfluenzaB__AGX16647

SEQ ID NO: 125205 - RNA, 1401 nt, Artificial Sequence; identical to SEQ ID NO: 125198
  derived and/or modified CDS sequence (opt2) from neuraminidase__InfluenzaB__AGX16658

SEQ ID NO: 125206 - RNA, 1401 nt, Artificial Sequence; identical to SEQ ID NO: 124652
  derived and/or modified CDS sequence (opt2) from neuraminidase__InfluenzaB__AGX16669

SEQ ID NO: 125207 - RNA, 1401 nt, Artificial Sequence; identical to SEQ ID NO: 124718
  derived and/or modified CDS sequence (opt2) from neuraminidase__InfluenzaB__AGX16680

SEQ ID NO: 125208 - RNA, 1401 nt, Artificial Sequence; identical to SEQ ID NO: 124652
  derived and/or modified CDS sequence (opt2) from neuraminidase__InfluenzaB__AGX16691

SEQ ID NO: 125209 - RNA, 1401 nt, Artificial Sequence
  derived and/or modified CDS sequence (opt2) from neuraminidase__InfluenzaB__AGX16702
augcuccccuccaccauccagacccucacccucuuccucaccuccggcggcguccuccucucccucuacgucuccgccucccucuccuaccuccucuacuccgacauccuccucaaguucucccccaccgagaucaccgcccccaccaugccccucgacugcgccaacgccuccaacguccaggccgucaaccgcuccgccaccaagggcgucacccuccuccuccccgagcccgaguggaccuacccccgccucuccugccccggcuccaccuuccagaaggcccuccucaucuccccccaccgcuucggcgagaccaagggcaacuccgccccccucaucauccgcgagcccuucaucgccugcggccccaaggagugcaagcacuucgcccucacccacuacgccgcccagcccggcggcuacuacaacggcaagcgcggcgaccgcaacaagcuccgccaccucaucuccgucaagcucggcaagauccccaccgucgagaacuccaucuuccacauggccgccugguccggcuccgccugccacgacggcaaggaguggaccuacaucggcgucgacggccccgacaacaacgcccuccucaagaucaaguacggcgaggccuacaccgacaccuaccacuccuacgccaacaacauccuccgcacccaggaguccgccugcaacugcaucggcggcaacugcuaccucaugaucaccgacggcuccgccuccggcaucuccgagugccgcuuccucaagauccgcgagggccgcaucaucaaggagaucuuccccaccggccgcgucaagcacaccgaggagugcaccugcggcuucgccuccaacaagaccaucgagugcgccugccgcgacaacuccuacaccgccaagcgccccuucgucaagcucaacgucgagaccgacaccgccgagauccgccucaugugcaccgagaccuaccucgacaccccccgccccgacgacggcuccaucaccggccccugcgaguccaacggcgacaagggcuccggcggcaucaagggcggcuucguccaccagcgcauggccuccaagaucggccgcugguacucccgcaccauguccaagaccaagcgcaugggcaugggccucuacgucaaguacgacggcgaccccugggccgacuccgacgcccucgcccucuccggcgucauggucuccauggaggagcccggcugguacuccuucggcuucgagaucaaggacaagaagugcgacguccccugcaucggcaucgagaugguccacgacggcggcaaggagaccuggcacuccgccgccaccgccaucuacugccucaugggcuccggccagcuccucugggacaccgucaccggcgucgacauggcccucuga

SEQ ID NO: 125210 - RNA, 1401 nt, Artificial Sequence
  derived and/or modified CDS sequence (opt2) from neuraminidase__InfluenzaB__AGX16713
augcuccccuccaccauccagacccucacccucuuccucaccuccggcggcguccuccucucccucuacgucuccgccucccucuccuaccuccucuacuccgacauccuccucaaguucucccccaccgagaucaccgcccccaccaugccccucgacugcgccaacgccuccaacguccaggccgucaaccgcuccgccaccaagggcgucacccuccuccuccccgagcccgaguggaccuacccccgccucuccugccccggcuccaucuuccagaaggcccuccucaucuccccccaccgcuucggcgagaccaagggcaacuccgccccccucaucauccgcgagcccuucaucgccugcggccccaaggagugcaagcacuucgcccucacccacuacgccgcccagcccggcggcuacuacaacggcacccgcggcgaccgcaacaagcuccgccaccucaucuccgucaagcucggcaagauccccaccgucgagaacuccaucuuccacauggccgccugguccggcuccgccugccacgacggcaaggaguggaccuacaucggcgucgacggccccgacaacaacgcccuccucaagaucaaguacggcgaggccuacaccgacaccuaccacuccuacgccaacaacauccuccgcacccaggaguccgccugcaacugcaucggcggcaacugcuaccucaugaucaccgacggcuccgccuccggcaucuccgagugccgcuuccucaagauccgcgagggccgcaucaucaaggagaucuuccccaccggccgcgucaagcacaccgaggagugcaccugcggcuucgccuccaacaagaccaucgagugcgccugccgcgacaacuccuacaccgccaagcgccccuucgucaagcucaacgucgagaccgacaccgccgagauccgccucaugugcaccgagaccuaccucgacaccccccgccccgacgacggcuccaucaccggccccugcgaguccaacggcgacaagggcuccggcggcaucaagggcggcuucguccaccagcgcauggccuccaagaucggccgcugguacucccgcaccauguccaagaccaagcgcaugggcaugggccucuacgucaaguacgacggcgaccccugggccgacuccgacgcccucgcccucuccggcgucauggucuccauggaggagcccggcugguacuccuucggcuucgagauccgcgacaagaagugcgacguccccugcaucggcaucgagaugguccacgacggcggcaaggagaccuggcacuccgccgccaccgccaucuacugccucaugggcuccggccagcuccucugggacaccgucaccggcgucgacauggcccucuga

SEQ ID NO: 125211 - RNA, 1401 nt, Artificial Sequence; identical to SEQ ID NO: 124652
  derived and/or modified CDS sequence (opt2) from neuraminidase__InfluenzaB__AGX16724

SEQ ID NO: 125212 - RNA, 1401 nt, Artificial Sequence; identical to SEQ ID NO: 125198
  derived and/or modified CDS sequence (opt2) from neuraminidase__InfluenzaB__AGX16735

SEQ ID NO: 125213 - RNA, 1401 nt, Artificial Sequence; identical to SEQ ID NO: 125198
  derived and/or modified CDS sequence (opt2) from neuraminidase__InfluenzaB__AGX16746

SEQ ID NO: 125214 - RNA, 1401 nt, Artificial Sequence; identical to SEQ ID NO: 124652
  derived and/or modified CDS sequence (opt2) from neuraminidase__InfluenzaB__AGX16757

SEQ ID NO: 125215 - RNA, 1401 nt, Artificial Sequence
  derived and/or modified CDS sequence (opt2) from neuraminidase__InfluenzaB__AGX16768
augcuccccuccaccauccagacccucacccucuuccucaccuccggcggcguccuccucucccucuacgucuccgccucccucuccuaccuccucuacuccgacauccuccucaaguucucccccaccgagaucaucgcccccaccaugccccucgacugcgccaacgccuccaacguccaggccgucaaccgcuccgccaccaagggcgucacccuccuccuccccgagcccgaguggaccuacccccgccucuccugccccggcuccaccuuccagaaggcccuccucaucuccccccaccgcuucggcgagaccaagggcaacuccgccccccucaucauccgcgagcccuucaucgccugcggccccaaggagugcaagcacuucgcccucacccacuacgccgcccagcccggcggcuacuacaacggcacccgcggcgaccgcaacaagcuccgccaccucaucuccgucaagcucggcaagauccccaccgucgagaacuccaucuuccacauggccgccugguccggcuccgccugccacgacggcaaggaguggaccuacaucggcgucgacggccccgacaacaacgcccuccucaagaucaaguacggcgaggccuacaccgacaccuaccacuccuacgccaacaacauccuccgcacccaggaguccgccugcaacugcaucggcggcaacugcuaccucaugaucaccgacggcuccgccuccggcaucuccgagugccgcuuccucaagauccgcgagggccgcaucaucaaggagaucuuccccaccggccgcgucaagcacaccgaggagugcaccugcggcuucgccuccaacaagaccaucgagugcgccugccgcgacaacuccuacaccgccaagcgccccuucgucaagcucaacgucgagaccgacaccgccgagauccgccucaugugcaccgagaccuaccucgacaccccccgccccgacgacggcuccaucaccggccccugcaaguccaacggcgacaagggcuccggcggcaucaagggcggcuucguccaccagcgcauggccuccaagaucggccgcugguacucccgcaccauguccaagaccaagcgcaugggcaugggccucuacgucaaguacgacggcgaccccugggccgacuccgacgcccucgcccucuccggcgucauggucuccauggaggagcccggcugguacuccuucggcuucgagaucaaggacaagaagugcgacguccccugcaucggcaucgagaugguccacgacggcggcaaggagaccuggcacuccgccgccaccgccaucuacugccucaugggcuccggccagcuccucugggacaccgucaccggcgucgacauggcccucuga

SEQ ID NO: 125216 - RNA, 1401 nt, Artificial Sequence; identical to SEQ ID NO: 124718
  derived and/or modified CDS sequence (opt2) from neuraminidase__InfluenzaB__AGX16779

SEQ ID NO: 125217 - RNA, 1401 nt, Artificial Sequence
  derived and/or modified CDS sequence (opt2) from neuraminidase__InfluenzaB__AGX16790
augcuccccuccaccauccagacccucacccucuuccucaccuccggcggcguccuccucucccucuacgucuccgccucccucuccuaccuccucuacuccgacauccuccucaaguucucccccaccgagaucaccgcccccaccaugccccucgacugcgccaacgccuccaacguccaggccgucaaccgcuccgccaccaagggcgucacccuccuccuccccgagcccgaguggaccuacccccgccucuccugccccggcuccaccuuccagaaggcccuccucaucuccccccaccgcuucggcgagaccaagggcaacuccgccccccucaucauccgcgagcccuucaucgccugcggccccaaggagugcaagcacuucgcccucacccacuacgccgcccagcccggcggcuacuacaacggcacccgcggcggccgcaacaagcuccgccaccucaucuccgucaagcucggcaagauccccaccgucgagaacuccaucuuccacauggccgccugguccggcuccgccugccacgacggcaaggaguggaccuacaucggcgucgacggccccgacaacaacgcccuccucaagaucaaguacggcgaggccuacaccgacaccuaccacuccuacgccaacaacauccuccgcacccaggaguccgccugcaacugcaucggcggcaacugcuaccucaugaucaccgacggcuccgccuccggcaucuccgagugccgcuuccucaagauccgcgagggccgcaucaucaaggagaucuuccccaccggccgcgucaagcacaccgaggagugcaccugcggcuucgccuccaacaagaccaucgagugcgccugccgcgacaacuccuacaccgccaagcgccccuucgucaagcucaacgucgagaccgacaccgccgagauccgccucaugugcaccgagaccuaccucgacaccccccgccccgacgacggcuccaucaccggccccugcgaguccaacggcgacaagggcuccggcggcaucaagggcggcuucguccaccagcgcauggccuccaagaucggccgcugguacucccgcaccauguccaagaccaagcgcaugggcaugggccucuacgucaaguacgacggcgaccccugggccgacuccgacgcccucgcccucuccggcgucauggucuccauggaggagcccggcugguacuccuucggcuucgagauccgcgacaagaagugcgacguccccugcaucggcaucgagaugguccacgacggcggcaaggagaccuggcacuccgccgccaccgccaucuacugccucaugggcuccggccagcuccucugggacaccgucaccggcgucgacauggcccucuga

SEQ ID NO: 125218 - RNA, 1401 nt, Artificial Sequence
  derived and/or modified CDS sequence (opt2) from neuraminidase__InfluenzaB__AGX16801
augcuccccuccaccauccagacccucacccucuuccucaccuccggcggcguccuccucucccucuacgucuccgccucccucuccuaccuccucuacuccgacauccuccucaaguucucccccaccgagaucaucgcccccaccaugccccucgacugcgccaacgccuccaacguccaggccgucaaccgcuccgccaccaagggcgucacccuccuccuccccgagcccgaguggaccuacccccgccucuccugccccggcuccaccuuccagaaggcccuccucaucuccccccaccgcuucggcgagaccaagggcaacuccgccccccucaucauccgcgagcccuucaucgccugcggccccaaggagugcaagcacuucgcccucacccacuacgccgcccagcccggcggcuacuacaacggcacccgcggcgaccgcaacaagcuccgccaccucaucuccgucaagcucggcaagauccccaccgucgagaacuccaucuuccacauggccgccugguccggcuccgccugccacgacggcaaggaguggaccuacaucggcgucgacggccccgacaacaacgcccuccucaagaucaaguacggcgaggccuacaccgacaccuaccacuccuacgccaacaacauccuccgcacccaggaguccgccugcaacugcaucggcggcaacugcuaccucaugaucaccgacggcuccgccuccggcaucuccgagugccgcuuccucaagauccgcgagggccgcaucaucaaggagaucuuccccaccggccgcgucaagcacaccgaggagugcaccugcggcuucgccuccaacaagaccaucgagugcgccugccgcgacaacuccuacaccgccaagcgccccuucgucaagcucaacgucgagaccgacaccgccgagauccgccucaugugcaccgagaccuaccucgacaccccccgccccaacgacggcuccaucaccggccccugcgaguccaacggcgacaagggcuccggcggcaucaagggcggcuucguccaccagcgcauggccuccaagaucggccgcugguacucccgcaccauguccaagaccaagcgcaugggcaugggccucuacgucaaguacgacggcgaccccugggccgacuccgacgcccucgcccucuccggcgucauggucuccauggaggagcccggcugguacuccuucggcuucgagaucaaggacaagaagugcgacguccccugcaucggcaucgagaugguccacgacggcggcaaggagaccuggcacuccgccgccaccgccaucuacugccucaugggcuccggccagcuccucugggacaccgucaccggcgucgacauggcccucuga

SEQ ID NO: 125219 - RNA, 1401 nt, Artificial Sequence; identical to SEQ ID NO: 124652
  derived and/or modified CDS sequence (opt2) from neuraminidase__InfluenzaB__AGX16812

SEQ ID NO: 125220 - RNA, 1401 nt, Artificial Sequence
  derived and/or modified CDS sequence (opt2) from neuraminidase__InfluenzaB__AGX16823
augcuccccuccaccauccagacccucacccucuuccucaccuccggcggcguccuccucucccucuacgucuccgccucccucuccuaccuccucuacuccgacauccuccucaaguucucccccaccgagaucaccgcccccaccaugccccucgacugcgccaacgccuccaacguccaggccgucaaccgcuccgccaccaagggcgucacccuccuccuccccgagcccgaguggaccuacccccgccucuccugccccggcuccaccuuccagaaggcccuccucaucuccccccaccgcuucggcgagaccaagggcaacuccgccccccucaucauccgcgagcccuucaucgccugcggccccaaggagugcaagcacuucgcccucacccacuacgccgcccagcccggcggcuacuacaacggcacccgcggcgaccgcaacaagcuccgccaccucaucuccgucaagcucggcaagauccccaccgucgagaacuccaucuuccacauggccgccugguccggcuccgccugccacgacggcaaggaguggaccuacaucggcgucgacggccccgacaacaacgcccuccucaagaucaaguacggcgaggccuacaccgacaccuaccacuccuacgccaacaacauccuccgcacccaggaguccgccugcaacugcaucggcggcaacugcuaccucaugaucaccgacggcuccgccuccggcaucuccgagugccgcuuccucaagauccgcgagggccgcaucaucaaggagaucuuccccaccggccgcgucaagcacaccgaggagugcaccugcggcuucgccuccaacaagaccaucgagugcgccugccgcgacaacuccuacaccgccaagcgccccuucgucaagcucaacgucgagaccgacaccgccgagauccgccucaugugcaccgagaccuaccucgacaccccccgccccgccgacggcuccaucaccggccccugcgaguccaacggcgacaagggcuccggcggcaucaagggcggcuucguccaccagcgcauggccuccaagaucggccgcugguacucccgcaccauguccaagaccaagcgcaugggcaugggccucuacgucaaguacgacggcgaccccugggccgacuccgacgcccucgcccucuccggcgucauggucuccauggaggagcccggcugguacuccuucggcuucgagaucaaggacaagaagugcgacguccccugcaucggcaucgagaugguccacgacggcggcaaggagaccuggcacuccgccgccaccgccaucuacugccucaugggcuccggccagcuccucugggacaccgucaccggcgucgacauggcccucuga

SEQ ID NO: 125221 - RNA, 1401 nt, Artificial Sequence; identical to SEQ ID NO: 124652
  derived and/or modified CDS sequence (opt2) from neuraminidase__InfluenzaB__AGX16834

SEQ ID NO: 125222 - RNA, 1401 nt, Artificial Sequence
  derived and/or modified CDS sequence (opt2) from neuraminidase__InfluenzaB__AGX16845
augcuccccuccaccauccagacccucacccucuuccucaccuccggcggcguccuccucucccucuacgucuccgccucccucuccuaccuccucuacuccgacauccuccucaaguucucccccaccgagaucaccacccccaccaugccccucgacugcgccaacgccuccaacguccaggccgucaaccgcuccgccaccaagggcgucacccuccuccuccccgagcccgaguggaccuacccccgccucuccugccccggcuccaccuuccagaaggcccuccucgucuccccccaccgcuucggcgagaccaagggcaacuccgccccccucaucauccgcgagcccuucaucgccugcggccccaaggagugcaagcacuucgcccucacccacuacgccgcccagcccggcggcuacuacaacggcacccgcggcgaccgcaacaagcuccgccaccucaucuccgucaagcucggcaagauccccaccgucgagaacuccaucuuccacauggccgccugguccggcuccgccugccacgacggcaaggaguggaccuacaucggcgucgacggccccgacaacaacgcccuccucaagaucaaguacggcgaggccuacaccgacaccuaccacuccuacgccaacaacauccuccgcacccaggaguccgccugcaacugcaucggcggcaacugcuaccucaugaucaccgacggcuccgccuccggcaucuccgagugccgcuuccucaagauccgcgagggccgcaucaucaaggagaucuuccccaccggccgcgucaagcacaccgaggagugcaccugcggcuucgccuccaacaagaccaucgagugcgccugccgcgacaacuccuacaccgccaagcgccccuucgucaagcucaacgucgagaccgacaccgccgagauccgccucaugugcaccgagaccuaccucgacaccccccgccccgacgacggcuccaucaccggccccugcgaguccaacggcgacaagggcuccggcggcaucaagggcggcuucguccaccagcgcauggccuccaagaucggccgcugguacucccgcaccauguccaagaccaagcgcaugggcaugggccucuacgucaaguacgacggcgaccccugggccgacuccgacgcccucgcccucuccggcgucauggucuccauggaggagcccggcugguacuccuucggcuucgagaucaaggacaagaagugcgacguccccugcaucggcaucgagaugguccacgacggcggcaaggagaccuggcacuccgccgccaccgccaucuacugccucaugggcuccggccagcuccucugggacaccgucaccggcgucgacauggcccucuga

SEQ ID NO: 125223 - RNA, 1401 nt, Artificial Sequence
  derived and/or modified CDS sequence (opt2) from neuraminidase__InfluenzaB__AGX16856
augcuccccuccaccauccagacccucacccucuuccucaccuccggcggcguccuccucucccucuacgucuccgccucccucuccuaccuccucuacuccgacauccuccucaaguucucccccaccgagaucaccgcccccaccgucccccucgacugcgccaacgccuccaacguccaggccgucaaccgcuccgccaccaagggcgucacccuccuccuccccgagcccgaguggaccuacccccgccucuccugccccggcuccaccuuccagaaggcccuccucaucuccccccaccgcuucggcgagaccaagggcaacuccgccccccucaucauccgcgagcccuucaucgccugcggccccaaggagugcaagcacuucgcccucacccacuacgccgcccagcccggcggcuacuacuccggcacccgcggcgaccgcaacaagcuccgccaccucaucuccgucaagcucggcaagauccccaccgucgagaacuccaucuuccacauggccgccugguccggcuccgccugccacgacggcaaggaguggaccuacaucggcgucgacggccccgacaacaacgcccuccucaagaucaaguacggcgaggccuacaccgacaccuaccacuccuacgccaacaacauccuccgcacccaggaguccgccugcaacugcaucggcggcaacugcuaccucaugaucaccgacggcuccgccuccggcaucuccgagugccgcuuccucaagauccgcgagggccgcaucaucaaggagaucuuccccaccggccgcgucaagcacaccgaggagugcaccugcggcuucgccuccaacaagaccaucgagugcgccugccgcgacaacuccuacaccgccaagcgccccuucgucaagcucaacgucgagaccgacaccgccgagauccgccucaugugcaccgagaccuaccucgacaccccccgccccgacgacggcuccaucaccggccccugcgaguccaacggcgacaagggcuccggcggcaucaagggcggcuucguccaccagcgcauggccuccaagaucggccgcugguacucccgcaccauguccaagaacaagcgcaugggcaugggccucuacgucaaguacgacggcgaccccugggccgacuccgacgcccucgcccucuccggcgucauggucuccauggaggagcccggcugguacuccuucggcuucgagaucaaggacaagaagugcgacguccccugcaucggcaucgagaugguccacgacggcggcaaggagaccuggcacuccgccgccaccgccaucuacugccucaugggcuccggccagcuccucugggacaccgucaccggcgucgacauggcccucuga

SEQ ID NO: 125224 - RNA, 1401 nt, Artificial Sequence; identical to SEQ ID NO: 124652
  derived and/or modified CDS sequence (opt2) from neuraminidase__InfluenzaB__AGX16867

SEQ ID NO: 125225 - RNA, 1401 nt, Artificial Sequence
  derived and/or modified CDS sequence (opt2) from neuraminidase__InfluenzaB__AGX16878
augcuccccuccaccauccagacccucacccucuuccucaccuccggcggcguccuccucucccucuacgucuccgccucccucuccuaccuccucuacuccgacauccuccucaaguucucccccaccgagcucaccgcccccaccaugccccucgacugcgccaacgccuccaacguccaggccgucaaccgcuccgccaccaagggcgucacccuccuccuccccgagcccgaguggaccuacccccgccucuccugccccggcuccaccuuccagaaggcccuccucaucuccccccaccgcuucggcgagaccaagggcaacuccgccccccucaucauccgcgagcccuucaucgccugcggccccaaggagugcaagcacuucgcccucacccacuacgccgcccagcccggcggcuacuacaacggcaagcgcggcgaccgcaacaagcuccgccaccucaucuccgucaagcucggcaagauccccaccgucgagaacuccaucuuccacauggccgccugguccggcuccgccugccacgacggcaaggaguggaccuacaucggcgucgacggccccgacaacaacgcccuccucaagaucaaguacggcgaggccuacaccgacaccuaccacuccuacgccaacaacauccuccgcacccaggaguccgccugcaacugcaucggcggcaacugcuaccucaugaucaccgacggcuccgccuccggcaucuccgagugccgcuuccucaagauccgcgagggccgcaucaucaaggagaucuuccccaccggccgcgucaagcacaccgaggagugcaccugcggcuucgccuccaacaagaccaucgagugcgccugccgcgacaacuccuacaccgccaagcgccccuucgucaagcucaacgucgagaccgacaccgccgagauccgccucaugugcaccgagaccuaccucgacaccccccgccccgacgacggcuccaucaccggccccugcgaguccaacggcgacaacggcuccggcggcaucaagggcggcuucguccaccagcgcauggccuccaagaucggccgcugguacucccgcaccauguccaagaccaagcgcaugggcaugggccucuacgucaaguacgacggcgaccccugggccgacuccgacgcccucgcccucuccggcgucauggucuccauggaggagcccggcugguacuccuucggcuucgagaucaaggacaagaagugcgacguccccugcaucggcaucgagaugguccacgacggcggcaaggagaccuggcacuccgccgccaccgccaucuacugccucaugggcuccggccagcuccucugggacaccgucaccggcgucgacauggcccucuga

SEQ ID NO: 125226 - RNA, 1401 nt, Artificial Sequence; identical to SEQ ID NO: 125198
  derived and/or modified CDS sequence (opt2) from neuraminidase__InfluenzaB__AGX16889

SEQ ID NO: 125227 - RNA, 1401 nt, Artificial Sequence
  derived and/or modified CDS sequence (opt2) from neuraminidase__InfluenzaB__AGX16900
augcuccccuccaccauccagacccucacccucuuccucaccaccggcggcguccuccucucccucuacgucuccgccucccucuccuaccuccucuacuccgacauccuccucaaguucucccccaccgagaucaucgcccccaccaugccccucgacugcgccaacgccuccaacguccaggccgucaaccgcuccgccaccaagggcgucacccuccuccuccccgagcccgaguggaccuacccccgccucuccugccccggcuccaccuuccagaaggcccuccucaucuccccccaccgcuucggcgagaccaagggcaacuccgccccccucaucauccgcgagcccuucaucgccugcggccccaaggagugcaagcacuucgcccucacccacuacgccgcccagcccggcggcuacuacaacggcacccgcggcgaccgcaacaagcuccgccaccucaucuccgucaagcucggcaagauccccaccgucgagaacuccaucuuccacauggccgccugguccggcuccgccugccacgacggcaaggaguggaccuacaucggcgucgacggccccgacaacaacgcccuccucaagaucaaguacggcgaggccuacaccgacaccuaccacuccuacgccaacaacauccuccgcacccaggaguccgccugcaacugcaucggcggcaacugcuaccucaugaucaccgacggcuccgccuccggcaucuccgagugccgcuuccucaagauccgcgagggccgcaucaucaaggagaucuuccccaccggccgcgucaagcacaccgaggagugcaccugcggcuucgccuccaacaagaccaucgagugcgccugccgcgacaacuccuacaccgccaagcgccccuucgucaagcucaacgucgagaccgacaccgccgagauccgccucaugugcaccgagaccuaccucgacaccccccgccccgacgacggcuccaucaccggccccugcgaguccaacggcgacaagggcuccggcggcaucaagggcggcuucguccaccagcgcauggccuccaagaucggccgcugguacucccgcaccauguccaagaccaagcgcaugggcaugggccucuacgucaaguacgacggcgaccccugggccgacuccgacgcccucgcccucuccggcgucauggucuccauggaggagcccggcugguacuccuucggcuucgagaucaaggacaagaagugcgacguccccugcaucggcaucgagaugguccacgacggcggcaaggagaccuggcacuccgccgccaccgccaucuacugccucaugggcuccggccagcuccucugggacaccgucaccggcgucgacauggcccucuga

SEQ ID NO: 125228 - RNA, 1401 nt, Artificial Sequence
  derived and/or modified CDS sequence (opt2) from neuraminidase__InfluenzaB__AGX16911
augcuccccuccaccauccagacccucacccucuuccucaccuccggcggcguccuccucucccucuacgucuccgcccuccucuccuaccuccucuacuccgacauccuccucaaguucucccccaccgagaucaccgcccccaccaugccccucgacugcgccaacgccuccaacguccaggccgucaaccgcuccgccaccaagggcgucacccuccuccuccccgagcccgaguggaccuacccccgccucuccugccccggcuccaccuuccagaaggcccuccucaucuccccccaccgcuucggcgagaccaagggcaacuccgccccccucaucauccgcgagcccuucaucgccugcggccccaaggagugcaagcacuucgcccucacccacuacgccgcccagcccggcggcuacuacaacggcacccgcggcgaccgcaacaagcuccgccaccucaucuccgucaagcucggcaagauccccaccgucgagaacuccaucuuccacauggccgccugguccggcuccgccugccacgacggcaaggaguggaccuacaucggcgucgacggccccgacaacaacgcccuccucaagaucaaguacggcgaggccuacaccgacaccuaccacuccuacgccaacaacauccuccgcacccaggaguccgccugcaacugcaucggcggcaacugcuaccucaugaucaccgacggcuccgccuccggcaucuccgagugccgcuuccucaagauccgcgagggccgcaucaucaaggagaucuuccccaccggccgcgucaagcacaccgaggagugcaccugcggcuucgccuccaacaagaccaucgagugcgccugccgcgacaacuccuacaccgccaagcgccccuucgucaagcucaacgucgagaccgacaccgccgagauccgccucaugugcaccgagaccuaccucgacaccccccgccccgacgacggcuccaucaccggccccugcgaguccaacggcgacaagggcuccggcggcaucaagggcggcuucguccaccagcgcauggccuccaagaucggccgcugguacucccgcaccauguccaagaccaagcgcaugggcaugggccucuacgucaaguacgacggcgaccccugggccgacuccgacgcccucgcccucuccggcgucauggucuccauggaggagcccggcugguacuccuucggcuucgagaucaaggacaagaagugcgacguccccugcaucggcaucgagaugguccacgacggcggcaaggagaccuggcacuccgccgccaccgccaucuacugccucaugggcuccggccagcuccucugggacaccgucaccggcgucgacauggcccucuga

SEQ ID NO: 125229 - RNA, 1401 nt, Artificial Sequence
  derived and/or modified CDS sequence (opt2) from neuraminidase__InfluenzaB__AGX16922
augcuccccuccaccauccagacccucacccucuuccucaccuccggcggcguccuccucucccucuacgucuccgccucccucuccuaccuccucuacuccgacauccuccucaaguucucccccaccgagaucaccgcccccaccaugccccucgacugcgccaacgccuccaacguccaggccgucaaccgcuccgccaccaagggcgucaccuuccuccuccccgagcccgaguggaccuacccccgccucuccugccccggcuccaccuuccagaaggcccuccucaucuccccccaccgcuucggcgagaccaagggcaacuccgccccccucaucauccgcgagcccuucaucgccugcggccccaaggagugcaagcacuucgcccucacccacuacgccgcccagcccggcggcuacuacaacggcacccgcggcgaccgcaacaagcuccgccaccucaucuccgucaagcucggcaagauccccaccgucgagaacuccaucuuccacauggccgccugguccggcuccgccugccacgacggcaaggaguggaccuacaucggcgucgacggccccgacaacaacgcccuccucaagaucaaguacggcgaggccuacaccgacaccuaccacuccuacgccaacaacauccuccgcacccaggaguccgccugcaacugcaucggcggcaacugcuaccucaugaucaccgacggcuccgccuccggcaucuccgagugccgcuuccucaagauccgcgagggccgcaucaucaaggagaucuuccccaccggccgcgucaagcacaccgaggagugcaccugcggcuucgccuccaacaagaccaucgagugcgccugccgcgacaacuccuacaccgccaagcgccccuucgucaagcucaacgucgagaccgacaccgccgagauccgccucaugugcaccgagaccuaccucgacaccccccgccccgacgacggcuccaucaccggccccugcgaguccaacggcgacaagggcuccggcggcaucaagggcggcuucguccaccagcgcauggccuccaagaucggccgcugguacucccgcaccauguccaagaccaagcgcaugggcaugggccucuacgucaaguacgacggcgaccccugggccgacuccgacgcccucgcccucuccggcgucauggucuccauggaggagcccggcugguacuccuucggcuucgagaucaaggacaagaagugcgacguccccugcaucggcaucgagaugguccacgacggcggcaaggagaccuggcacuccgccgccaccgccaucuacugccucaugggcuccggccagcuccucugggacaccgucaccggcgucgacauggcccucuga

SEQ ID NO: 125230 - RNA, 1401 nt, Artificial Sequence
  derived and/or modified CDS sequence (opt2) from neuraminidase__InfluenzaB__AGX16933
augcuccccuccaccauccagacccucacccucuuccucaccuccggcggcguccuccucucccucuacgucuccgccucccucuccuaccuccucuacuccgacauccuccucaaguucucccccaccgagaucaacgcccccaccaugccccucgacugcgccaacgccuccaacguccaggccgucaaccgcuccgccaccaagggcgucacccuccuccuccccgagcccgaguggaccuacccccgccucuccugccccggcuccaccuuccagaaggcccuccucaucuccccccaccgcuucggcgagaccaagggcaacuccgccccccucaucauccgcgagcccuucaucgccugcggccccaaggagugcaagcacuucgcccucacccacuacgccgcccagcccggcggcuacuacaacggcacccgcggcgaccgcaacaagcuccgccaccucaucuccgucaagcucggcaagauccccaccgucgagaacuccaucuuccacauggccgccugguccggcuccgccugccacgacggcaaggaguggaccuacaucggcgucgacggccccgacaacaacgcccuccucaagaucaaguacggcgaggccuacaccgacaccuaccacuccuacgccaacaacauccuccgcacccaggaguccgccugcaacugcaucggcggcaacugcuaccucaugaucaccgacggcuccgccuccggcaucuccgagugccgcuuccucaagauccgcgagggccgcaucaucaaggagaucuuccccaccggccgcgucaagcacaccgaggagugcaccugcggcuucgccuccaacaagaccaucgagugcgccugccgcgacaacuccuacaccgccaagcgccccuucgucaagcucaacgucgagaccgacaccgccgagauccgccucaugugcaccgagaccuaccucgacaccccccgccccgacgacggcuccaucaccggccccugcgaguccaacggcgacaagggcuccggcggcaucaagggcggcuucguccaccagcgcauggccuccaagaucggccgcugguacucccgcaccauguccaagaccaagcgcaugggcaugggccucuacgucaaguacgacggcgaccccugggccgacuccgacgcccucgcccucuccggcgucauggucuccauggaggagcccggcugguacuccuucggcuucgagaucaaggacaagaagugcgacguccccugcaucggcaucgagaugguccacgacggcggcaaggagaccuggcacuccgccgccaccgccaucuacugccucaugggcuccggccagcuccuccucgacaccgucaccggcgucgacauggcccucuga

SEQ ID NO: 125231 - RNA, 1401 nt, Artificial Sequence
  derived and/or modified CDS sequence (opt2) from neuraminidase__InfluenzaB__AGX16944
augcuccccuccaccauccagacccucacccucuuccucaccuccggcggcguccuccucucccucuacgucuccgccucccucuccuaccuccucuacuccgacauccuccucaaguucucccccaccgagaucaccgcccccaccaugccccucgacugcgccaacgccuccaacguccaggccgucaaccgcuccgccaccaagggcgucacccuccuccuccccgagcccgaguggaccuacccccgccucuccugccccggcuccaccuuccagaaggcccuccucaucuccccccaccgcuucggcgagaccaagggcaacuccgccccccucaucauccgcgagcccuucaucgccugcggccccaaggagugcaagcacuucgcccucacccacuacgccgcccagcccggcggcuacuacuccggcacccgcggcgaccgcaacaagcuccgccaccucaucuccgucaagcucggcaagauccccaccgucgagaacuccaucuuccacauggccgccugguccggcuccgccugccacgacggcaaggaguggaccuacaucggcgucgacggccccgacaacaacgcccuccucaagaucaaguacggcgaggccuacaccgacaccuaccacuccuacgccaacaacauccuccgcacccaggaguccgccugcaacugcaucggcggcaacugcuaccucaugaucaccgacggcuccgccuccggcaucuccgagugccgcuuccucaagauccgcgagggccgcaucaucaaggagaucuuccccaccggccgcgucaagcacaccgaggagugcaccugcggcuucgccuccaacaagaccaucgagugcgccugccgcgacaacuccuacaccgccaagcgccccuucgucaagcucaacgucgagaccgacaccgccgagauccgccucaugugcaccgagaccuaccucgacaccccccgccccgacgacggcuccaucaccggccccugcgaguccaacggcgacaagggcuccggcggcaucaagggcggcuucguccaccagcgcauggccuccaagaucggccgcugguacucccgcaccauguccaagaacaagcgcaugggcaugggccucuacgucaaguacgacggcgaccccugggccgacuccgacgcccucgcccucuccggcgucauggucuccauggaggagcccggcugguacuccuucggcuucgagaucaaggacaagaagugcgacguccccugcaucggcaucgagaugguccacgacggcggcaaggagaccuggcacuccgccgccaccgccaucuacugccucaugggcuccggccagcuccucugggacaccgucaccggcgucgacauggcccucuga

SEQ ID NO: 125232 - RNA, 1401 nt, Artificial Sequence; identical to SEQ ID NO: 124652
  derived and/or modified CDS sequence (opt2) from neuraminidase__InfluenzaB__AGX16955

SEQ ID NO: 125233 - RNA, 1401 nt, Artificial Sequence; identical to SEQ ID NO: 124650
  derived and/or modified CDS sequence (opt2) from neuraminidase__InfluenzaB__AGX16966

SEQ ID NO: 125234 - RNA, 1401 nt, Artificial Sequence; identical to SEQ ID NO: 124652
  derived and/or modified CDS sequence (opt2) from neuraminidase__InfluenzaB__AGX16977

SEQ ID NO: 125235 - RNA, 1401 nt, Artificial Sequence; identical to SEQ ID NO: 124652
  derived and/or modified CDS sequence (opt2) from neuraminidase__InfluenzaB__AGX16988

SEQ ID NO: 125236 - RNA, 1401 nt, Artificial Sequence; identical to SEQ ID NO: 125196
  derived and/or modified CDS sequence (opt2) from neuraminidase__InfluenzaB__AGX16999

SEQ ID NO: 125237 - RNA, 1401 nt, Artificial Sequence; identical to SEQ ID NO: 124652
  derived and/or modified CDS sequence (opt2) from neuraminidase__InfluenzaB__AGX17010

SEQ ID NO: 125238 - RNA, 1401 nt, Artificial Sequence; identical to SEQ ID NO: 125198
  derived and/or modified CDS sequence (opt2) from neuraminidase__InfluenzaB__AGX17021

SEQ ID NO: 125239 - RNA, 1401 nt, Artificial Sequence
  derived and/or modified CDS sequence (opt2) from neuraminidase__InfluenzaB__AGX17032
augcuccccuccaccauccagacccucacccucuuccucaccuccggcggcguccuccucucccucuacgucuccgccucccucuccuaccuccucuacuccgacauccuccucaaguucucccccaccgagaucaccgcccccaccaugccccucgacugcgccaacgccuccgacguccaggccgucaaccgcuccgccaccaagggcgucacccuccuccuccccgagcccgaguggaccuacccccgccucuccugccccggcuccaccuuccagaaggcccuccucaucuccccccaccgcuucggcgagaccaagggcaacuccgccccccucaucauccgcgagcccuucaucgccugcggccccaaggagugcaagcacuucgcccucacccacuacgccgcccagcccggcggcuacuacaaccgcacccgcggcgaccgcaacaagcuccgccaccucaucuccgucaagcucggcaagauccccaccgucgagaacuccaucuuccacauggccgccugguccggcuccgccugccacgacggcaaggaguggaccuacaucggcgucgacggccccgacaacaacgcccuccucaagaucaaguacggcgaggccuacaccgacaccuaccacuccuacgccaacaacauccuccgcacccaggaguccgccugcaacugcaucggcggcaacugcuaccucaugaucaccgacggcuccgccuccggcaucuccgagugccgcuuccucaagauccgcgagggccgcaucaucaaggagaucuuccccaccggccgcgucaagcacaccgaggagugcaccugcggcuucgccuccaacaagaccaucgagugcgccugccgcgacaacuccuacaccgccaagcgccccuucgucaagcucaacgucgagaccgacaccgccgagauccgccucaugugcaccgagaccuaccucgacaccccccgccccgacgacggcuccaucaccggccccugcgaguccaacggcgacaagggcuccggcggcaucaagggcggcuucguccaccagcgcauggccuccaagaucggccgcugguacucccgcaccauguccaagaccaagcgcaugggcaugggccucuacgucaaguacgacggcgaccccugggccgacuccgacgcccucgcccucuccggcgucauggucuccauggaggagcccggcugguacuccuucggcuucgagaucaaggacaagaagugcgacguccccugcaucggcaucgagaugguccacgacggcggcaaggagaccuggcacuccgccgccaccgccaucuacugccucaugggcuccggccagcuccucugggacaccgucaccggcgucgacauggcccucuga

SEQ ID NO: 125240 - RNA, 1401 nt, Artificial Sequence; identical to SEQ ID NO: 124650
  derived and/or modified CDS sequence (opt2) from neuraminidase__InfluenzaB__AGX17043

SEQ ID NO: 125241 - RNA, 1401 nt, Artificial Sequence
  derived and/or modified CDS sequence (opt2) from neuraminidase__InfluenzaB__AGX17054
augcuccccuccaccauccagacccucacccucuuccucaccuccggcggcguccuccucucccucuacgucuccgccucccucuccuaccuccucuacuccgacauccuccucaaguucucccccaccgagaucaccgcccccaccaugccccucgacugcgccaacgccuccaacguccaggccgucaaccgcuccgccaccaagggcgucacccuccuccuccccgagcccgaguggaccuacccccgccucuccugccccggcuccaccuuccagaaggcccuccucaucuccccccaccgcuucggcgagaccaagggcaacuccgccccccucaucauccgcgagcccuucaucgccugcggccccaaggagugcaagcacuucgcccucacccacuacgccgcccagcccggcggcuacuacaacggcacccgcggcgaccgcaacaagcuccgccaccucaucuccgucaagcucggcaagauccccaccgucgagaacuccaucuuccacauggccgccugguccggcuccgccugccacgacggcaaggaguggaccuacaucggcgucgacggccccgacaacaacgcccuccucaagaucaaguacggcgaggccuacaccgacaccuaccacuccuacgccaacaacauccuccgcacccaggaguccgccugcaacugcaucggcggcaacugcuaccucaugaucaccgacggcuccgccuccggcaucuccgagugccgcuuccucaagauccgcgagggccgcaucaucaaggagaucuuccccaccggccgcgucaagcacaccgaggagugcaccugcggcuucgccuccaacaagaccaucgagugcgccugccgcgacaacuccuacaccgccaagcgccccuucgucaagcucaacgucgagaccgacaccgccgagauccgccucaugugcaccgagaccuaccucgacaccccccgccccgacgacggcuccaucaccggccccugcgaguccaacggcgacaacggcaacggcggcaucaagggcggcuucguccaccagcgcauggccuccaagaucggccgcugguacucccgcaccauguccaagaccaagcgcaugggcaugggccucuacgucaaguacgacggcgaccccugggccgacuccgacgcccucgcccucuccggcgucauggucuccauggaggagcccggcugguacuccuucggcuucgagaucaaggacaagaagugcgacguccccugcaucggcaucgagaugguccacgacggcggcaaggagaccuggcacuccgccgccaccgccaucuacugccucaugggcuccggccagcuccucugggacaccgucaccggcgucgacauggcccucuga

SEQ ID NO: 125242 - RNA, 1401 nt, Artificial Sequence
  derived and/or modified CDS sequence (opt2) from neuraminidase__InfluenzaB__AGX17065
augcuccccuccaccauccagacccucacccucuuccucaccuccggcggcguccuccucucccucuacgucuccgcccuccucuccuaccuccucuacuccgacauccuccucaaguucucccccaccaagaucaucgcccccaccaccucccucgacuccgccaacgccuccaacuuccaggccgucaaccacuccgccaccaaggagaugaccuuccuccuccccgagcccgaguggaccuacccccgccucuccugccagggcuccaccuuccagaaggcccuccucaucuccccccaccgcuucggcgaggccaagggcaacuccgccccccucaucauccgcgagcccuucaucgccugcggccccaaggagugcaagcacuucgcccucacccacuacgccgcccagcccggcggcuacuacaacggcacccgcgaggaccgcaacaagcuccgccaccucaucuccgucaaccucggcaagauccccaccgucgagaacuccaucuuccacauggccgccugguccggcuccgccugccacgacggccgcgaguggaccuacaucggcgucgacggccccgacuccaacgcccucaucaagaucaaguacggcgaggccuacaccgacaccuaccacuccuacgccaacaacauccuccgcacccaggaguccgccugcaacugcaucggcggcgacugcuaccucaugaucaccgacggcuccgccuccggcaucuccaagugccgcuuccucaagauccgcgagggccgcaucaucaaggagaucuuccccaccggccgcgucgagcacaccgaggagugcaccugcggcuucgccuccaacaagaccaucgagugcgccugccgcgacaacuccuacaccgccaagcgccccuucgucaagcucaacgucgagaccgacaccgccgagauccgccucaugugcaccgagaccuaccucgacaccccccgccccgacgacggcuccaucaccggccccugcgaguccaacggcgacaagggcuccggcggcaucaagggcggcuucguccaccagcgcauggccuccaagaucggccgcugguacucccgcaccaucuccaagaccaagcgcaugggcauggagcucuacgucaaguacgacggcgaccccuggaccgacuccgacgcccucgcccccuccggcgucauggucuccaucgaggagcccggcugguacuccuucggcuucgagaucaaggacaagaagugcgacguccccugcaucggcaucgagaugguccacgacggcggcaagaccaccuggcacuccgccgccaccgccaucuacugccucaugggcuccggccagcuccucugggacaccgucaccggcgucgacauggcccucuga

SEQ ID NO: 125243 - RNA, 1401 nt, Artificial Sequence
  derived and/or modified CDS sequence (opt2) from neuraminidase__InfluenzaB__AGX17076
augcuccccuccaccauccagacccucacccucuuccucaccuccggcggcguccuccucucccucuacgucuccgccucccucuccuaccuccucuacuccgacauccuccucaaguucucccccaccgagaucaccgcccccaccaugccccucgacugcgccaacgccuccaacguccaggccgucaaccgcuccgccaccaagggcgucacccuccuccuccccgagcccgaguggaccuacccccgccucuccugccccggcuccaccuuccagaaggcccuccucaucuccccccaccgcuucggcgagaccaagggcaacuccgccccccucaucauccgcgagcccuucaucgccugcggccccaaggagugcaagcacuucgcccucacccacuacgccgcccagcccggcggcuacuacaacggcacccgcggcgaccgcaacaagcuccgccaccucaucuccgucaagcucggcaagauccccaccgucgagaacuccaucuuccacauggccgccugguccggcuccgccugccacgacggcaaggaguggaccuacaucggcgucgacggccccgacaacaacgcccuccucaagaucaaguacggcgaggccuacaccgacaccuaccacuccuacgccaacaacauccuccgcacccaggaguccgccugcaacugcaucggcggcaacugcuaccucaugaucaccgacggcuccgccuccggcaucuccgagugccgcuuccucaagauccgcgagggccgcaucaucaaggagaucuuccccaccggccgcgucaagcacaccgaggagugcaccugcggcuucgccuccaacaagaccaucgagugcgccugccgcgacaacuccuacaccgccaagcgccccuucgucaagcucaacgucgagaccgacaccgccgagauccgccucaugugcaccgagaccuaccucgacaccccccgccccgacgacggcuccaucaccggccccugcgaguccaacggcgacaagggcuccggcggcaucaagggcggcuucguccaccagcgcauggccuccaagaucggccgcugguacucccgcaccauguccaagaccaagcgcaugggcaugggccucuacgucaaguacgacggcgaccccugggccgacuccgacgcccucgcccucuccggcgucauggucuccauggaggagcccggcugguacuccuucggcuucgagauccgcgacaagaagugcgacguccccugcaucggcaucgagaucguccacgacggcggcaaggagaccuggcacuccgccgccaccgccaucuacugccucaugggcuccggccagcuccucugggacaccgucaccggcgucgacauggcccucuga

SEQ ID NO: 125244 - RNA, 1401 nt, Artificial Sequence; identical to SEQ ID NO: 125198
  derived and/or modified CDS sequence (opt2) from neuraminidase__InfluenzaB__AGX17087

SEQ ID NO: 125245 - RNA, 1401 nt, Artificial Sequence; identical to SEQ ID NO: 125198
  derived and/or modified CDS sequence (opt2) from neuraminidase__InfluenzaB__AGX17098

SEQ ID NO: 125246 - RNA, 1401 nt, Artificial Sequence; identical to SEQ ID NO: 125198
  derived and/or modified CDS sequence (opt2) from neuraminidase__InfluenzaB__AGX17109

SEQ ID NO: 125247 - RNA, 1401 nt, Artificial Sequence; identical to SEQ ID NO: 125198
  derived and/or modified CDS sequence (opt2) from neuraminidase__InfluenzaB__AGX17120

SEQ ID NO: 125248 - RNA, 1401 nt, Artificial Sequence; identical to SEQ ID NO: 124650
  derived and/or modified CDS sequence (opt2) from neuraminidase__InfluenzaB__AGX17131

SEQ ID NO: 125249 - RNA, 1401 nt, Artificial Sequence; identical to SEQ ID NO: 124652
  derived and/or modified CDS sequence (opt2) from neuraminidase__InfluenzaB__AGX17142

SEQ ID NO: 125250 - RNA, 1401 nt, Artificial Sequence
  derived and/or modified CDS sequence (opt2) from neuraminidase__InfluenzaB__AGX17153
augcuccccuccaccauccagacccucacccucuuccucaccuccggcggcguccuccucucccucuacgucuccgccucccucuccuaccuccucuacuccgacauccuccucaaguucucccccaccgagaucaccgcccccaccaugccccucgacugcgccaacgccuccaacguccaggccgucaaccgcuccgccaccaagggcgucacccuccuccuccccgagcccgaguggaccuacccccgccucuccugccccggcuccaccuuccagaaggcccuccucaucuccccccaccgcuucggcgagaccaagggcaacuccgccccccucaucauccgcgagcccuucaucgccugcggccccaaggagugcaagcacuucgcccucacccacuacgccgcccagcccggcggcuacuacaacggcacccgcggcgaccgcaacaagcuccgccaccucaucuccgucaagcucggcaagauccccaccgucgagaacuccaucuuccacauggccgccugguccggcuccgccugccacgacggcaaggaguggaccuacaucggcgucgacggccccgacaacaacgcccuccucaagaucaaguacggcgaggccuacaccgacaccuaccacuccuacgccaacaacauccuccgcacccaggaguccgccugcaacugcaucggcggcaacugcuaccucaugaucaccgacggcuccgccuccggcaucuccgagugccgcuuccucaagauccgcgagggccgcaucaucaaggagaucuuccccaccggccgcgucaagcacaccgaggagugcaccugcggcuucgccuccaacaagaccaucgagugcgccugccgcgacaacuccuacaccgccaagcgccccuucgucaagcucaacgucgagaccgacaccgccgagauccgccucaugugcaccgagaccuaccucgacaccccccgccccgacgacggcuccaucaucggccccugcgaguccaacggcgacaagggcuccggcggcaucaagggcggcuucguccaccagcgcauggccuccaagaucggccgcugguacucccgcaccauguccaagaccaagcgcaugggcaugggccucuacgucaaguacgacggcgaccccugggccgacuccgacgcccucgcccucuccggcgucauggucuccauggaggagcccggcugguacuccuucggcuucgagaucaaggacaagaagugcgacguccccugcaucggcaucgagaugguccacgacggcggcaaggagaccuggcacuccgccgccaccgccaucuacugccucaugggcuccggccagcuccucugggacaccgucaccggcgucgacauggcccucuga

SEQ ID NO: 125251 - RNA, 1401 nt, Artificial Sequence; identical to SEQ ID NO: 125198
  derived and/or modified CDS sequence (opt2) from neuraminidase__InfluenzaB__AGX17164

SEQ ID NO: 125252 - RNA, 1404 nt, Artificial Sequence
  derived and/or modified CDS sequence (opt2) from neuraminidase__InfluenzaB__AGX17175
augcuccccuccaccauccagacccucacccucuuccucaccuccggcggcguccuccucucccucuacgucuccgccucccucuccuaccuccucuacuccgacauccuccucaaguucucccccaccgagaucaccgcccccaccaugccccucgacugcgccaacgccuccaacguccaggccgucaaccgcuccgccaccaagggcgucacccuccuccuccuccccgagcccgaguggaccuacccccgccucuccugccccggcuccaccuuccagaaggcccuccucaucuccccccaccgcuucggcgagaccaagggcaacuccgccccccucaucauccgcgagcccuucaucgccugcggccccaaggagugcaagcacuucgcccucacccacuacgccgcccagcccggcggcuacuacaacggcacccgcggcgaccgcaacaagcuccgccaccucaucuccgucaagcucggcaagauccccaccgucgagaacuccaucuuccacauggccgccugguccggcuccgccugccacgacggcaaggaguggaccuacaucggcgucgacggccccgacaacaacgcccuccucaagaucaaguacggcgaggccuacaccgacaccuaccacuccuacgccaacaacauccuccgcacccaggaguccgccugcaacugcaucggcggcaacugcuaccucaugaucaccgacggcuccgccuccggcaucuccgagugccgcuuccucaagauccgcgagggccgcaucaucaaggagaucuuccccaccggccgcgucaagcacaccgaggagugcaccugcggcuucgccuccaacaagaccaucgagugcgccugccgcgacaacuccuacaccgccaagcgccccuucgucaagcucaacgucgagaccgacaccgccgagauccgccucaugugcaccgagaccuaccucgacaccccccgccccgacgacggcuccaucaccggccccugcgaguccaacggcgacaagggcuccggcggcaucaagggcggcuucguccaccagcgcauggccuccaagaucggccgcugguacucccgcaccauguccaagaccaagcgcaugggcaugggccucuacgucaaguacgacggcgaccccugggccgacuccgacgcccucgcccucuccggcgucauggucuccauggaggagcccggcugguacuccuucggcuucgagauccgcgacaagaagugcgacguccccugcaucggcaucgagaugguccacgacggcggcaaggagaccuggcacuccgccgccaccgccaucuacugccucaugggcuccggccagcuccucugggacaccgucaccggcgucgacauggcccucuga

SEQ ID NO: 125253 - RNA, 1401 nt, Artificial Sequence
  derived and/or modified CDS sequence (opt2) from neuraminidase__InfluenzaB__AGX17186
augcuccccuccaccauccagacccucacccucuuccucaccuccggcggcguccuccucucccucuacgucuccgccucccucuccuaccuccucuacuccgacauccuccucaaguucucccccaccgagaucaccacccccaccaugccccucgacugcgccaacgccuccaacguccaggccgucaaccgcuccgccaccaagggcgucacccuccuccuccccgagcccgaguggaccuacccccgccucuccugccccggcuccaccuuccagaaggcccuccucaucuccccccaccgcuucggcgagaccaagggcaacuccgccccccucaucauccgcgagcccuucaucgccugcggccccaaggagugcaagcacuucgcccucacccacuacgccgcccagcccggcggcuacuacaacggcacccgcggcgaccgcaacaagcuccgccaccucaucuccgucaagcucggcaagauccccaccgucgagaacuccaucuuccacauggccgccugguccggcuccgccugccacgacggcaaggaguggaccuacaucggcgucgacggccccgacaacaacgcccuccucaagaucaaguacggcgaggccuacaccgacaccuaccacuccuacgccaacaacauccuccgcacccaggaguccgccugcaacugcaucggcggcaacugcuaccucaugaucaccgacggcuccgccuccggcaucuccgagugccgcuuccucaagauccgcgagggccgcaucaucaaggagaucuuccccaccggccgcgucaaguacaccgaggagugcaccugcggcuucgccuccaacaagaccaucgagugcgccugccgcgacaacuccuacaccgccaagcgccccuucgucaagcucaacgucgagaccgacaccgccgagauccgccucaugugcaccgagaccuaccucgacaccccccgccccgacgacggcuccaucaccggccccugcgaguccaacggcgacaagggcuccggcggcaucaagggcggcuucguccaccagcgcauggccuccaagaucggccgcugguacucccgcaccauguccaagacccgccgcaugggcaugggccucuacgucaaguacgacggcgaccccugggccgacuccgacgcccucgcccucuccggcgucauggucuccauggaggagcccggcugguacuccuucggcuucgagaucaaggacaagaagugcgacguccccugcaucggcaucgagaugguccacgacggcggcaaggagaccuggcacuccgccgccaccgccaucuacugccucaugggcuccggccagcuccucugggacaccgucaccggcgucgacauggcccucuga

SEQ ID NO: 125254 - RNA, 1401 nt, Artificial Sequence; identical to SEQ ID NO: 125229
  derived and/or modified CDS sequence (opt2) from neuraminidase__InfluenzaB__AGX17197

SEQ ID NO: 125255 - RNA, 1401 nt, Artificial Sequence
  derived and/or modified CDS sequence (opt2) from neuraminidase__InfluenzaB__AGX17208
augcuccccuccaccauccagacccucacccucuuccucaccuccggcggcguccuccucucccucuacgucuccgccucccucuccuaccuccucuacuccgacauccuccucaaguucucccccaccgagaucaccacccccaccaugccccucgacugcgccaacgccuccaacguccaggccgucaaccgcuccgccaccaagggcgucacccuccuccuccccgagcccgaguggaccuacccccgccucuccugccccggcuccaccuuccagaaggcccuccucaucuccccccaccgcuucggcgagaccaagggcaacuccgccccccucaucauccgcgagcccuucaucgccugcggccccaaggagugcaagcacuucgcccucacccacuacgccgcccagcccggcggcuacuacaacggcacccgcggcgaccgcaacaagcuccgccaccucaucuccgucaagcucggcaagauccccaccgucgagaacuccaucuuccacauggccgccugguccggcuccgccugccacgacggcaaggaguggaccuacaucggcgucgacggccccgacaacaacgcccuccucaagaucaaguacggcgaggccuacaccgacaccuaccacuccuacgccaacaacauccuccgcacccaggaguccgccugcaacugcaucggcggcaacugcuaccucaugaucaccgacggcuccgccuccggcaucuccgagugccgcuuccucaagauccgcgagggccgcaucaucaaggagaucuuccccaccggccgcgucaagcacaccgaggagugcaccugcggcuucgccuccaacaagaccaucgagugcgccugccgcgacaacuccuacaccgccaagcgccccuucgucaagcucaacgucgagaccgacaccgccgagauccgccucaugugcaccgagaccuaccucgacaccccccgccccgacgacggcuccaucaccggccccugcgaguccaacggcgacaagggcuccggcggcaucaagggcggcuucguccaccagcgcauggccuccaagaucggccgcugguacucccgcaccauguccaagacccgccgcaugggcaugggccucuacgucaaguacgacggcgaccccugggccgacuccgacgcccucgcccucuccggcgucauggucuccauggaggagcccggcugguacuccuucggcuucgagaucaaggacaagaagugcgacguccccugcaucggcaucgagaugguccacgacggcggcaaggagaccuggcacuccgccgccaccgccaucuacugccucaugggcuccggccagcuccucugggacaccgucaccggcgucgacauggcccucuga

SEQ ID NO: 125256 - RNA, 1401 nt, Artificial Sequence; identical to SEQ ID NO: 125198
  derived and/or modified CDS sequence (opt2) from neuraminidase__InfluenzaB__AGX17219

SEQ ID NO: 125257 - RNA, 1401 nt, Artificial Sequence; identical to SEQ ID NO: 124652
  derived and/or modified CDS sequence (opt2) from neuraminidase__InfluenzaB__AGX17230

SEQ ID NO: 125258 - RNA, 1401 nt, Artificial Sequence; identical to SEQ ID NO: 125198
  derived and/or modified CDS sequence (opt2) from neuraminidase__InfluenzaB__AGX17241

SEQ ID NO: 125259 - RNA, 1401 nt, Artificial Sequence
  derived and/or modified CDS sequence (opt2) from neuraminidase__InfluenzaB__AGX17252
augcuccccuccaccauccagacccucacccucuuccucaccuccggcggcguccuccucucccucuacgucuccgccucccucuccuaccuccucuacuccgacauccuccucaaguucucccccaccgagaucaccgcccccaccaugccccucgacugcgccaacgccuccaacguccaggccgucaaccgcuccgccaccaagggcgucacccuccuccuccccgagcucgaguggaccuacccccgccucuccugccccggcuccaccuuccagaaggcccuccucaucuccccccaccgcuucggcgagaccaagggcaacuccgccccccucaucauccgcgagcccuucaucgccugcggccccaaggagugcaagcacuucgcccucaccuacuacgccgcccagcccggcggcuacuacaacggcacccgcggcgaccgcaacaagcuccgccaccucaucuccgucaagcucggcaagauccccaccgucgagaacuccaucuuccacauggccgccugguccggcuccgccugccacgacggcaaggaguggaccuacaucggcgucgacggccccgacaacaacgcccuccucaagaucaaguacggcgaggccuacaccgacaccuaccacuccuacgccaacaacauccuccgcacccaggaguccgccugcaacugcaucggcggcaacugcuaccucaugaucaccgacggcuccgccuccggcaucuccgagugccgcuuccucaagauccgcgagggccgcaucaucaaggagaucuuccccaccggccgcgucaagcacaccgaggagugcaccugcggcuucgccuccaacaagaccaucgagugcgccugccgcgacaacuccuacaccgccaagcgccccuucgucaagcucaacgucgagaccgacaccgccgagauccgccucaugugcaccgagaccuaccucgacaccccccgccccgccgacggcuccaucaccggccccugcgaguccaacggcgacaagggcuccggcggcaucaagggcggcuucguccaccagcgcauggccuccaagaucggccgcugguacucccgcaccauguccaagaccaagcgcaugggcaugggccucuacgucaaguacgacggcgaccccugggccgacuccgacgcccucgcccucuccggcgucauggucuccauggaggagcccggcugguacuccuucggcuucgagaucaaggacaagaagugcgacguccccugcaucggcaucgagaugguccacgacggcggcaaggagaccuggcacuccgccgccaccgccaucuacugccucaugggcuccggccagcuccucugggacaccgucaccggcgucgacauggcccucuga

SEQ ID NO: 125260 - RNA, 1401 nt, Artificial Sequence
  derived and/or modified CDS sequence (opt2) from neuraminidase__InfluenzaB__AGX17263
augcuccccuccaccauccagacccucacccucuuccucaccuccggcggcguccuccucucccucuacgucuccgccucccucuccuaccuccucuacuccgacauccuccucaagcucucccccaccgagaucaccgcccccaccaugccccucgacugcgccaacgccuccaacguccaggccgucaaccgcuccgccaccaagggcgucacccuccuccuccccgagcccgaguggaccuacccccgccucuccugccccggcuccaccuuccagaaggcccuccucaucuccccccaccgcuucggcgagaccaagggcaacuccgccccccucaucauccgcgagcccuucaucgccugcggccccaaggagugcaagcacuucgcccucacccacuacgccgcccagcccggcggcuacuacaacggcacccgcggcgaccgcaacaagcuccgccaccucaucuccgucaagcucggcaagauccccaccgucgagaacuccaucuuccacauggccgccugguccggcuccgccugccacgacggcaaggaguggaccuacaucggcgucgacggccccgacaacaacgcccuccucaagaucaaguacggcgaggccuacaccgacaccuaccacuccuacgccaacaacauccuccgcacccaggaguccgccugcaacugcaucggcggcaacugcuaccucaugaucaccgacggcuccgccuccggcaucuccgagugccgcuuccucaagauccgcgagggccgcaucaucaaggagaucuuccccaccggccgcgucaagcacaccgaggagugcaccugcggcuucgccuccaacaagaccaucgagugcgccugccgcgacaacuccuacaccgccaagcgccccuucgucaagcucaacgucgagaccgacaccgccgagauccgccucaugugcaccgagaccuaccucgacaccccccgccccgacgacggcuccaucaccggccccugcgaguccaacggcgacaagggcuccggcggcaucaagggcggcuucguccaccagcgcauggccuccaagaucggccgcugguacucccgcaccauguccaagaccaagcgcaugggcaugggccucuacgucaaguacgacggcgaccccugggccgacuccgacgcccucgcccucuccggcgucauggucuccauggaggagcccggcugguacuccuucggcuucgagaucaaggacaagaagugcgacguccccugcaucggcaucgagaugguccacgacggcggcaaggagaccuggcacuccgccgccaccgccaucuacugccucaugggcuccggccagcuccucugggacaccgucaccggcgucgacauggcccucuga

SEQ ID NO: 125261 - RNA, 1401 nt, Artificial Sequence
  derived and/or modified CDS sequence (opt2) from neuraminidase__InfluenzaB__AGX17274
augcuccccuccaccauccagacccucacccucuuccucaccuccggcggcguccuccucucccucuacgucuccgccucccucuccuaccuccucuacuccgacauccuccucaaguucucccccaccgagaucaacgcccccaccaugccccucgacugcgccaacgccuccaacguccaggccgucaaccgcuccgccaccaagggcgucacccuccuccuccccgagcccgaguggaccuacccccgccucuccugccccggcuccaccuuccagaaggcccuccucaucuccccccaccgcuucggcgagaccaagggcaacuccgccccccucaucauccgcgagcccuucaucgccugcggccccaaggagugcaagcacuucgcccucacccacuacgccgcccagcccggcggcuacuacaacggcacccgcggcgaccgcaacaagcuccgccaccucaucuccgucaagcucggcaagauccccaccgucgagaacuccaucuuccacauggccgccugguccggcuccgccugccacgacggcaaggaguggaccuacaucggcgucgacggccccgacaacaacgcccuccucaagaucaaguacggcgaggccuacaccgacaccuaccacuccuacgccaacaacauccuccgcacccaggaguccgccugcaacugcaucggcggcaacugcuaccucaugaucaccgacggcuccgccuccggcaucuccgagugccgcuuccucaagauccgcgagggccgcaucaucaaggagaucuuccccaccggccgcgucaagcacaccgaggagugcaccugcggcuucgccuccaacaagaccaucgagugcgccugccgcgacaacuccuacaccgccaagcgccccuucgucaagcucaacgucgagaccgacaccgccgagauccgccucaugugcaccgagaccuaccucgacaccccccgccccgacgacggcuccaucaccggccccugcgaguccaacggcgacaagggcuccggcggcaucaagggcggcuucguccaccagcgcauggccuccaagaucggccgcugguacucccgcaccauguccaagaccaagcgcaugggcaugggccucuacgucaaguacgacggcgaccccugggccgacuccgacgcccucgcccucuccggcgucauggucuccauggaggagcccggcugguacuccuucggcuucgagaucaaggacaagaagugcgacguccccugcaucggcaucgagaugguccacgacggcggcaaggagaccuggcacuccgccgccaccgccaucuacugccucaugggcuccggccagcuccucugggacaccgucaccggcgucgacauggcccucuga

SEQ ID NO: 125262 - RNA, 1401 nt, Artificial Sequence
  derived and/or modified CDS sequence (opt2) from neuraminidase__InfluenzaB__AGX17285
augcuccccuccaccauccagacccucacccucuuccucaccuccggcggcguccuccucucccucuacauguccgccucccucuccuaccuccucuacuccgacauccuccucaaguucucccccaccgagaucaccgcccccaccaugccccucgacugcgccaacgccuccaacguccaggccgucaaccgcuccgccaccaagggcgucacccuccuccuccccgagcccgaguggaccuacccccgccucuccugccccggcuccaccuuccagaaggcccuccucaucuccccccaccgcuucggcgagaccaagggcaacuccgccccccucaucauccgcgagcccuucaucgccugcggccccaaggagugcaagcacuucgcccucacccacuacgccgcccagcccggcggcuacuacaacggcacccgcggcgaccgcaacaagcuccgccaccucaucuccgucaagcucggcaagauccccaccgucgagaacuccaucuuccacauggccgccugguccggcuccgccugccacgacggcaaggaguggaccuacaucggcgucgacggccccgacaacaacgcccuccucaagaucaaguacggcgaggccuacaccgacaccuaccacuccuacgccaacaacauccuccgcacccaggaguccgccugcaacugcaucggcggcaacugcuaccucaugaucaccgacggcuccgccuccggcaucuccgagugccgcuuccucaagauccgcgagggccgcaucaucaaggagaucuuccccaccggccgcgucaagcacaccgaggagugcaccugcggcuucgccuccaacaagaccaucgagugcgccugccgcgacaacuccuacaccgccaagcgccccuucgucaagcucaacgucgagaccgacaccgccgagauccgccucaugugcaccgagaccuaccucgacaccccccgccccgacgacggcuccaucaccggccccugcgaguccaacggcgacaagggcuccggcggcaucaagggcggcuucguccaccagcgcauggccuccaagaucggccgcugguacucccgcaccauguccaagaccaagcgcaugggcaugggccucuacgucaaguacgacggcgaccccugggccgacuccgacgcccucgcccucuccggcgucauggucuccauggaggagcccggcugguacuccuucggcuucgagaucaaggacaagaagugcgacguccccugcaucggcaucgagaugguccacgacggcggcaaggagaccuggcacuccgccgccaccgccaucuacugccucaugggcuccggccagcuccucugggacaccgucaccggcgucgacauggcccucuga

SEQ ID NO: 125263 - RNA, 1401 nt, Artificial Sequence
  derived and/or modified CDS sequence (opt2) from neuraminidase__InfluenzaB__AGX17296
augcuccccuccaccauccagacccucacccucuuccucaccuccggcggcguccuccucucccucuacgucuccgccucccucuccuaccuccucuacuccgacauccuccucaaguucucccccaccgagaucaccgcccccaccaugccccucgacugcgccaacgccuccaacguccaggccgucaaccgcuccgccaccaagggcgucacccuccuccuccccgagcccgaguggaccuacccccgccucuccugccccggcuccaccuuccagaaggcccuccucaucuccccccaccgcuucggcgaggccaagggcaacuccgccccccucaucauccgcgagcccuucaucgccugcggccccaaggagugcaagcacuucgcccucacccacuacgccgcccagcccggcggcuacuacaacggcacccgcggcgaccgcaacaagcuccgccaccucaucuccgucaagcucggcaagauccccaccgucgagaacuccaucuuccacauggccgccugguccggcuccgccugccacgacggcaaggaguggaccuacaucggcgucgacggccccgacaacaacgcccuccucaagaucaaguacggcgaggccuacaccgacaccuaccacuccuacgccaacaacauccuccgcacccaggaguccgccugcaacugcaucggcggcaacugcuaccucaugaucaccgacggcuccgccuccggcaucuccgagugccgcuuccucaagauccgcgagggccgcaucaucaaggagaucuuccccaccggccgcgucaagcacaccgaggagugcaccugcggcuucgccuccaacaagaccaucgagugcgccugccgcgacaacuccuacaccgccaagcgccccuucgucaagcucaacgucgagaccgacaccgccgagauccgccucaugugcaccgagaccuaccucgacaccccccgccccgacgacggcuccaucaccggccccugcgaguccaacggcgacaagggcuccggcggcaucaagggcggcuucguccaccagcgcauggccuccaagaucggccgcugguacucccgcaccauguccaagaccaagcgcaugggcaugggccucuacgucaaguacgacggcgaccccugggccgacuccgacgcccucgcccucuccggcgucauggucuccauggaggagcccggcugguacuccuucggcuucgagaucaaggacaagaagugcgacguccccugcaucggcaucgagaugguccacgacggcggcaaggagaccuggcacuccgccgccaccgccaucuacugccucaugggcuccggccagcuccucugggacaccgucaccggcgucgacauggcccucuga

SEQ ID NO: 125264 - RNA, 1401 nt, Artificial Sequence; identical to SEQ ID NO: 125196
  derived and/or modified CDS sequence (opt2) from neuraminidase__InfluenzaB__AGX17307

SEQ ID NO: 125265 - RNA, 1401 nt, Artificial Sequence; identical to SEQ ID NO: 124650
  derived and/or modified CDS sequence (opt2) from neuraminidase__InfluenzaB__AGX17318

SEQ ID NO: 125266 - RNA, 1401 nt, Artificial Sequence
  derived and/or modified CDS sequence (opt2) from neuraminidase__InfluenzaB__AGX17329
augcuccccuccaccauccagacccucacccucuuccucaccuccggcggcguccuccucucccucuacgucuccgccucccucuccuaccuccucuacuccgacaugcuccucaaguucucccccaccgagaucaccgcccccaccaugccccucgacugcgccaacgccuccaacguccaggccgucaaccgcuccgccaccaagggcgucacccuccuccuccccgagcccgaguggaccuacccccgccucuccugccccggcuccaccuuccagaaggcccuccucaucuccccccaccgcuucggcgagaccaagggcaacuccgccccccucaucauccgcgagcccuucaucgccugcggccccaaggagugcaagcacuucgcccucacccacuacgccgcccagcccggcggcuacuacuccggcacccgcggcgaccgcaacaagcuccgccaccucaucuccgucaagcucggcaagauccccaccgucgagaacuccaucuuccacauggccgccugguccggcuccgccugccacgacggcaaggaguggaccuacaucggcgucgacggccccgacaacaacgcccuccucaagaucaaguacggcgaggccuacaccgacaccuaccacuccuacgccaacaacauccuccgcacccaggaguccgccugcaacugcaucggcggcaacugcuaccucaugaucaccgacggcuccgccuccggcaucuccgagugccgcuuccucaagauccgcgagggccgcaucaucaaggagaucuuccccaccggccgcgucaagcacaccgaggagugcaccugcggcuucgccuccaacaagaccaucgagugcgccugccgcgacaacuccuacaccgccaagcgccccuucgucaagcucaacgucgagaccgacaccgccgagauccgccucaugugcaccgagaccuaccucgacaccccccgccccgacgacggcuccaucaccggccccugcgaguccaacggcgacaagggcuccggcggcaucaagggcggcuucguccaccagcgcauggccuccaagaucggccgcugguacucccgcaccauguccaagaacaagcgcaugggcaugggccucuacgucaaguacgacggcgaccccugggccgacuccgacgcccucgcccucuccggcgucauggucuccauggaggagcccggcugguacuccuucggcuucgagaucaaggacaagaagugcgacguccccugcaucggcaucgagaugguccacgacggcggcaaggagaccuggcacuccgccgccaccgccaucuacugccucaugggcuccggccagcuccucugggacaccgucaccggcgucgacauggcccucuga

SEQ ID NO: 125267 - RNA, 1401 nt, Artificial Sequence; identical to SEQ ID NO: 125198
  derived and/or modified CDS sequence (opt2) from neuraminidase__InfluenzaB__AGX17340

SEQ ID NO: 125268 - RNA, 1401 nt, Artificial Sequence
  derived and/or modified CDS sequence (opt2) from neuraminidase__InfluenzaB__AGX17351
augcuccccuccaccauccagacccucacccucuuccucaccuccggcggcguccuccucucccucuacgucuccgccucccucuccuaccuccucuacuccgacauccuccucaaguucucccccaccgagaucaccgcccccaccaugccccucgacugcgccaacgccuccaacguccaggccgucaaccgcuccgccaccaagggcgucacccuccuccuccccgagcccgaguggaccuacccccgccucuccugccccggcuccaccuuccagaaggcccuccucaucuccccccaccgcuucggcgagaccaagggcaacuccgccccccucaucauccgcgagcccuucaucgccugcggccccaaggagugcaagcacuucgcccucacccacuacgccgcccagcccggcggcuacuacaacggcacccgcggcgaccgcaacaagcuccgccaccucaucuccgucaagcucggcaagauccccaccgucgagaacuccaucuuccacauggccgccugguccggcuccgccugccacgacggcaaggaguggaccuacaucggcgucgacggccccgacaacaacgcccuccucaagaucaaguacggcgaggccuacaccgacaccuaccacuccuacgccaacaacauccuccgcacccaggaguccgccugcaacugcaucggcggcaacugcuaccucaugaucaccgacggcuccgccuccggcaucuccgagugccgcuuccucaagauccgcgagggccgcaucaucaaggagaucuuccccaccggccgcgucaagcacaccgaggagugcaccugcggcuucgccuccaacaagaccaucgagugcgccugccgcgacaacuccuacaccgccaagcgccccuucgucaagcucaacgucgagaccgacaccgccgagauccgccucaugugcaccgagaccuaccucgacaccccccgccccgacgacggcuccaucaccggccccugcgagaccaacggcgacaagggcuccggcggcaucaagggcggcuucguccaccagcgcauggccuccaagaucggccgcugguacucccgcaccauguccaagaccaagcgcaugggcaugggccucuacgucaaguacgacggcgaccccugggccgacuccgacgcccucgcccucuccggcgucauggucuccauggaggagcccggcugguacuccuucggcuucgagaucaaggacaagaagugcgacguccccugcaucggcaucgagaugguccacgacggcggcaaggagaccuggcacuccgccgccaccgccaucuacugccucaugggcuccggccagcuccucugggacaccgucaccggcgucgacauggcccucuga

SEQ ID NO: 125269 - RNA, 1401 nt, Artificial Sequence
  derived and/or modified CDS sequence (opt2) from neuraminidase__InfluenzaB__AGX17362
augcuccccuccaccauccagacccucacccucuuccucaccuccggcggcguccuccucucccucuacgucuccgccucccucuccuaccuccucuacuccgacauccuccucaaguucucccccaccgagaucaccgcccccaccaucccccucgacugcgccaacgccuccaacauccaggccgucaaccgcuccgccaccaagggcgucacccuccuccuccccgagcccgaguggaccuacccccgccucuccugccccggcuccaccuuccagaaggcccuccucaucuccccccaccgcuucggcgagaccaagggcaacuccgccccccucaucauccgcgagcccuucaucgccugcggccccaaggagugcaagcacuucgcccucacccacuacgccgcccagcccggcggcuacuacaacggcacccgcggcgaccgcaacaagcuccgccaccucaucuccgucaagcucggcaagauccccaccgucgagaacuccaucuuccacauggccgccugguccggcuccgccugccacgacggcaaggaguggaccuacaucggcgucgacggccccgacaacaacgcccuccucaagaucaaguacggcgaggccuacaccgacaccuaccacuccuacgccaacaacauccuccgcacccaggaguccgccugcaacugcaucggcggcaacugcuaccucaugaucaccgacggcuccgccuccggcaucuccgagugccgcuuccucaagauccgcgagggccgcaucaucaaggagaucuuccccaccggccgcgucaagcacaccgaggagugcaccugcggcuucgccuccaacaagaccaucgagugcgccugccgcgacaacuccuacaccgccaagcgccccuucgucaagcucaacgucgagaccgacaccgccgagauccgccucaugugcaccgagaccuaccucgacaccccccgccccgacgacggcuccaucaccggccccugcgaguccaacggcgacaagggcuccggcggcaucaagggcggcuucguccaccagcgcauggccuccaagaucggccgcugguacucccgcaccauguccaagaccaagcgcaugggcaugggccucuacgucaaguacgacggcgaccccugggccgacuccgacgcccucgcccucuccggcgucauggucuccauggaggagcccggcugguacuccuucggcuucgagaucaaggacaagaagugcgacguccccugcaucggcaucgagaugguccacgacggcggcaaggagaccuggcacuccgccgccaccgccaucuacugccucaugggcuccggccagcuccucugggacaccgucaccggcgucgacauggcccucuga

SEQ ID NO: 125270 - RNA, 1401 nt, Artificial Sequence
  derived and/or modified CDS sequence (opt2) from neuraminidase__InfluenzaB__AGX17373
augcuccccuccaccauccagacccucacccucuuccucaccuccggcggcguccuccucucccucuacgucuccgccucccucuccuaccuccucuacuccgacauccuccucaaguucucccccaccgagaucaccgcccccaccaugccccucgacugcgccaacgccuccaacguccaggccgucaaccgcuccgccaccaagggcgucacccuccuccuccccgagcccgaguggaccuacccccgccucuccugccccggcuccaccuuccagaaggcccuccucaucuccccccaccgcuucggcgagaccaagggcaacuccgccccccucaucauccgcgagcccuucaucgccugcggccccaaggagugcaagcacuucgcccucacccacuacgccgcccagcccggcggcuacuacaacggcacccgcggcgaccgcaacaagcuccgccaccucaucuccgucaagcucggcaagauccccaccgucgagaacuccaucuuccacauggccgccugguccggcuccgccugccacgacggcaaggaguggaccuacaucggcgucgacggccccgacaacaacgcccuccucaagaucaaguacggcgaggccuacaccgacaccuaccacuccuacgccaacaacauccuccgcacccaggaguccgccugcaacugcaucggcggcaacugcuaccucaugaucaccgacggcuccgccuccggcgucuccgagugccgcuuccucaagauccgcgagggccgcaucaucaaggagaucuuccccaccggccgcgucaagcacaccgaggagugcaccugcggcuucgccaacaacaagaccaucgagugcgccugccgcgacaacuccuacaccgccaagcgccccuucgucaagcucaacgucgagaccgacaccgccgagauccgccucaugugcaccgagaccuaccucgacaccccccgccccgacgacggcuccaucaccggccccugcgaguccaacggcgacaagggcuccggcggcaucaagggcggcuucguccaccagcgcauggccuccaagaucggccgcugguacucccgcaccauguccaagaccaagcgcaugggcaugggccucuacgucaaguacgacggcgaccccugggccgacuccgacgcccucgcccucuccggcgucauggucuccauggaggagcccggcugguacuccuucggcuucgagaucaaggacaagaagugcgacguccccugcaucggcaucgagaugguccacgacggcggcaaggagaccuggcacuccgccgccaccgccaucuacugccucaugggcuccggccagcuccucugggacaccgucaccggcgucaacauggcccucuga

SEQ ID NO: 125271 - RNA, 1401 nt, Artificial Sequence; identical to SEQ ID NO: 124650
  derived and/or modified CDS sequence (opt2) from neuraminidase__InfluenzaB__AGX17384

SEQ ID NO: 125272 - RNA, 1401 nt, Artificial Sequence; identical to SEQ ID NO: 124718
  derived and/or modified CDS sequence (opt2) from neuraminidase__InfluenzaB__AGX17395

SEQ ID NO: 125273 - RNA, 1401 nt, Artificial Sequence
  derived and/or modified CDS sequence (opt2) from neuraminidase__InfluenzaB__AGX17404
augcuccccuccaccauccagacccucacccucuuccucaccuccggcggcguccuccucucccucuacgucuccgccucccucuccuaccuccucuacuccgacauccuccucaaguucucccccaccgagaucaccgcccccaccaugccccucgacugcgccaacgccuccaacguccaggccgucaaccgcuccgccaccaagggcgucacccuccuccuccccgagcccgaguggaccuacccccgccucuccugccccggcuccaccuuccagaaggcccuccucaucuccccccaccgcuucggcgagaccaagggcaacuccgccccccucaucauccgcgagcccuucaucgccugcggccccaaggagugcaagcacuucgcccucacccacuacgccgcccagcccggcggcuacuacaacggcacccgcggcgaccgcaacaagcuccgccaccucaucuccgucaagcucggcaagauccccaccgucgagaacuccaucuuccacauggccgccugguccggcuccgccugccacgacggcaaggaguggaccuacaucggcgucgacggcuccgacaacaacgcccuccucaagaucaaguacggcgaggccuacaccgacaccuaccacuccuacgccaacaacauccuccgcacccaggaguccgccugcaacugcaucggcggcaacugcuaccucaugaucaccgacggcuccgccuccggcaucuccgagugccgcuuccucaagauccgcgagggccgcaucaucaaggagaucuuccccaccggccgcgucaagcacaccgaggagugcaccugcggcuucgccuccaacaagaccaucgagugcgccugccgcgacaacuccuacaccgccaagcgccccuucgucaagcucaacgucgagaccgacaccgccgagauccgccucaugugcaccgagaccuaccucgacaccccccgccccgacgacggcuccaucaccggccccugcgaguccaacggcgacaagggcuccggcggcaucaagggcggcuucguccaccagcgcauggccuccaagaucggccgcugguacucccgcaccauguccaagaccaagcgcaugggcaugggccucuacgucaaguacgacggcgaccccugggccgacuccgacgcccucgcccucuccggcaucauggucuccauggaggagcccggcugguacuccuucggcuucgagaucaaggacaagaagugcgacguccccugcaucggcaucgagaugguccacgacggcggcaaggagaccuggcacuccgccgccaccgccaucuacugccucaugggcuccggccagcuccucugggacaccgucaccggcgucgacauggcccucuga

SEQ ID NO: 125274 - RNA, 1401 nt, Artificial Sequence
  derived and/or modified CDS sequence (opt2) from neuraminidase__InfluenzaB__AGX17415
augcuccccuccaccauccagacccucacccucuuccucaccuccggcggcguccuccucucccucuacgucuccgccucccucuccuaccuccucuacuccgacauccuccucaaguucucccccaccgagaucaccgcccccaccaugccccucgacugcgccaacgccuccaacguccaggccgucaaccgcuccgccaccaagggcgucacccuccuccuccccgagcccgacuggaccuacccccgccucuccugccccggcuccaccuuccagaaggcccuccucaucuccccccaccgcuucggcgagaccaagggcaacuccgccccccucaucauccgcgagcccuucaucgccugcggccccaaggagugcaagcacuucgcccucacccacuacgccgcccagcccggcggcuacuacaacggcacccgcggcgaccgcaacaagcuccgccaccucaucuccgucaagcucggcaagauccccaccgucgagaacuccaucuuccacauggccgccugguccggcuccgccugccacgacggcaaggaguggaccuacaucggcgucgacggccccgacaacaacgcccuccucaagaucaaguacggcgaggccuacaccgacaccuaccacuccuacgccaacaacauccuccgcacccaggaguccgccugcaacugcaucggcggcaacugcuaccucaugaucaccgacggcuccgccuccggcaucuccgagugccgcuuccucaagauccgcgagggccgcaucaucaaggagaucuuccccaccggccgcgucaagcacaccgaggagugcaccugcggcuucgccuccaacaagaccaucgagugcgccugccgcgacaacuccuacaccgccaagcgccccuucgucaagcucaacgucgagaccgacaccgccgagauccgccucaugugcaccgagaccuaccucgacaccccccgccccgacgacggcuccaucaccggccccugcgaguccaacggcgacaagggcuccggcggcaucaagggcggcuucguccaccagcgcauggccuccaagaucggccgcugguacucccgcaccauguccaagaccaagcgcaugggcaugggccucuacgucaaguacgacggcgaccccugggccgacuccgacgcccucgcccucuccggcgucauggucuccauggaggagcccggcugguacuccuucggcuucgagaucaaggacaagaagugcgacguccccugcaucggcaucgagaugguccacgacggcggcaaggagaccuggcacuccgccgccaccgccaucuacugccucaugggcuccggccagcuccucugggacaccgucaccggcgucgacauggcccucuga

SEQ ID NO: 125275 - RNA, 1401 nt, Artificial Sequence
  derived and/or modified CDS sequence (opt2) from neuraminidase__InfluenzaB__AGX17426
augcuccccuccaccauccagacccucacccucuuccucaccuccggcggcguccuccucucccucuacgucuccgccucccucuccuaccuccucuacuccgacauccuccucaaguucucccccaccgagaucaccgcccccaccaugccccucgacugcgccaacgccuccaacguccaggccgucaaccgcuccgccaccaagggcgucaccuuccuccuccccgagcccgaguggaccuacccccgccucuccugccccggcuccaccuuccagaaggcccuccucaucuccccccaccgcuucggcgagaccaagggcaacuccgccccccucaucauccgcgagcccuucaucgccugcggccccaaggagugcaagcacuucgcccucacccacuacgccgcccagcccggcggcuacuacaacggcacccgcggcgaccgcaacaagcuccgccaccucaucuccgucaagcucggcaagauccccaccgucgagaacuccaucuuccacauggccgccugguccggcuccgccugccacgacggcaaggaguggaccuacaucggcgucgacggccccgacaacaacgcccuccucaagaucaaguacggcgaggccuacaccgacaccuaccacuccuacgccaacaacauccuccgcacccaggaguccgccugcaacugcaucggcggcaacugcuaccucaugaucaccgacggcuccgccuccggcaucuccgagugccgcuuccucaagauccgcgagggccgcaucaucaaggagaucuuccccaccggccgcgucaagcacaccgaggagugcaccugcggcuucgccuccaacaagaccaucgagugcgccugccgcgacaacuccuacaccgccaagcgccccuucgucaagcucaacgucgagaccgacaccgccgagauccgccucaugugcaccgagaccuaccucgacaccccccgccccgacgacggcuccaucaccggccccugcgaguccaacggcgacaagggcuccggcggcaucaagggcggcuucguccaccagcgcauggccuccaagaucggccgcugguacucccgcaccauguccaagaccaagcgcaugggcaugggccucuacgucaaguacgacggcgaccccugggccgacuccgacgcccucgcccucuccggcgucauggucuccauggaggagcccggcugguacuccuucggcuucgagauccgcgacaagaagugcgacguccccugcaucggcaucgagaugguccacgacggcggcaaggagaccuggcacuccgccgccaccgccaucuacugccucaugggcuccggccagcuccucugggacaccgucaccggcgucgacauggcccucuga

SEQ ID NO: 125276 - RNA, 1401 nt, Artificial Sequence
  derived and/or modified CDS sequence (opt2) from neuraminidase__InfluenzaB__AGX17437
augcuccccuccaccauccagacccucacccucuuccucaccuccggcggcguccuccucucccucuacgucuccgucucccucuccuaccuccucuacuccgacauccuccucaaguucucccccaccgagaucaccgcccagaccaugccccucgacuucgccaacgccuccaacguccaggccgucaaccgcuccgccaccaagggcgucacccuccuccuccccgagcccgaguggaccuacccccgccucuccugccccggcuccaccuuccagaaggcccuccucaucuccccccaccgcuucggcgagaccaagggcaacuccgccccccucaucauccgcgagcccuucaucgccugcggccccaaggagugcaagcacuucgcccucacccacuacgccgcccagcccggcggcuacuacaacggcacccgcggcgaccgcaacaagcuccgccaccucaucuccgucaagcucggcaagauccccaccgucgagaacuccaucuuccacauggccgccugguccggcuccgccugccacgacggcaaggaguggaccuacaucggcgucgacggccccgacaacaacgcccuccucaagaucaaguacggcgaggccuacaccgacaccuaccacuccuacgccaacaacauccuccgcacccaggaguccgccugcaacugcaucggcggcaacugcuaccucaugaucaccgacggcuccgccuccggcaucuccgagugccgcuuccucaagauccgcgagggccgcaucaucaaggagaucuuccccaccggccgcgucaagcacaccgaggagugcaccugcggcuucgccuccaacaagaccaucgagugcgccugccgcgacaacuccuacaccgccaagcgccccuucgucaagcucaacgucgagaccgacaccgccgagauccgccucaugugcaccgagaccuaccucgacaccccccgccccgacgacggcuccaucaccggccccugcgaguccaacggcgacaagggcuccggcggcaucaagggcggcuucguccaccagcgcauggccuccaagaucggccgcugguacucccgcaccauguccaagaccaagcgcaugggcaugggccucuacgucaaguacgacggcgaccccugggccgacuccgacgcccucgcccucuccggcgucauggucuccauggaggagcccggcugguacuccuucggcuucgagauccgcgacaagaagugcgacguccccugcaucggcaucgagaugguccacgacggcggcaaggagaccuggcacuccgccgccaccgccaucuacugccucaugggcuccggccagcuccucugggacaccgucaccggcgucgacauggcccucuga

SEQ ID NO: 125277 - RNA, 1401 nt, Artificial Sequence
  derived and/or modified CDS sequence (opt2) from neuraminidase__InfluenzaB__AGX17448
augcuccccuccaccauccagacccucacccucuuccucaccuccggcggcguccuccucucccucuacgucuccgccucccucuccuaccuccucuacuccgacauccuccucaaguucucccccaccgagaucaccgcccccaccaugccccucgacugcgccaacgccuccaacguccaggccgucaaccgcuccgccaccaagggcgucacccuccuccuccccgagcccgaguggaccuacccccgccucuccugccccggcuccaccuuccagaaggcccuccucaucuccccccaccgcuucggcgagaccaagggcaacuccgccccccucaucauccgcgagcccuucaucgccugcggccccaaggagugcaagcacuucgcccucacccacuacgccgcccagcccggcggcuacuacaacggcacccgcggcgaccgcaacaagcuccgccaccucaucuccgucaagcucggcaagauccccaccgucgagaacuccaucuuccacauggccgccugguccggcuccgccugccacgacggcaaggaguggaccuacaucggcgucgacggccccgacaacaacgcccuccucaagaucaaguacggcgaggccuacaccgacaccuaccacuccuacgccaacaacauccuccgcacccaggaguccgccugcaacugcaucggcggcaacugcuaccucaugaucaccgacggcuccgccuccggcaucuccgagugccgcuuccucaagauccgcgagggccgcaucaucaaggagaucuuccccaccggccgcgucaagcacaccgaggagugcaccugcggcuucgccuccaacaagaccaucgagugcgccugccgcgacaacuccuacaccgccaagcgccccuucgucaagcucaacgucgagaccgacaccgccgagauccgccucaugugcaccgagaccuaccucgacaccccccgccccgacgacggcuccaucaccggccccugcgagaccaacggcgacaagggcuccggcggcaucaagggcggcuucguccaccagcgcauggccuccaagaucggccgcugguacucccgcaccauguccaagaccaagcgcaugggcaugggccucuacgucaaguacgacggcgaccccugggccgacuccgacgcccucguccucuccggcgucauggucuccauggaggagcccggcugguacuccuucggcuucgagaucaaggacaagaagugcgacguccccugcaucggcaucgagaugguccacgacggcggcaaggagaccuggcacuccgccgccaccgccaucuacugccucaugggcuccggccagcuccucugggacaccgucaccggcgucgacauggcccucuga

SEQ ID NO: 125278 - RNA, 1401 nt, Artificial Sequence
  derived and/or modified CDS sequence (opt2) from neuraminidase__InfluenzaB__AGX17459
augcuccccuccaccauccagacccucacccucuuccucaccuccggcggcguccuccucucccucuacgucuccgccucccucuccuaccuccucuacuccgacauccuccucaaguucucccccaccgagaucaccgccuccaccaugccccucgacugcgccaacgccuccaacguccaggccgucaaccgcuccgccaccaagggcgucacccuccuccuccccgagcccgacuggaccuacccccgccucuccugccccggcuccaccuuccagaaggcccuccucaucuccccccaccgcuucggcgagaccaagggcaacuccgccccccucaucauccgcgagcccuucaucgccugcggccccaaggagugcaagcacuucgcccucacccacuacgccgcccagcccggcggcuacuacaacggcacccgcggcgaccgcaacaagcuccgccaccucaucuccgucaagcucggcaagauccccaccgucgagaacuccaucuuccacauggccgccugguccggcuccgccugccacgacggcaaggaguggaccuacaucggcgucgacggccccgacaacaacgcccuccucaagaucaaguacggcgaggccuacaccgacaccuaccacuccuacgccaacaacauccuccgcacccaggaguccgccugcaacugcaucggcggcaacugcuaccucaugaucaccgacggcuccgccuccggcaucuccgagugccgcuuccucaagauccgcgagggccgcaucaucaaggagaucuuccccaccggccgcgucaagcacaccgaggagugcaccugcggcuucgccuccaacaagaccaucgagugcgccugccgcgacaacuccuacaccgccaagcgccccuucgucaagcucaacgucgagaccgacaccgccgagauccgccucaugugcaccgagaccuaccucgacaccccccgccccgacgacggcuccaucaccggccccugcgaguccaacggcgacaagggcuccggcggcaucaagggcggcuucguccaccagcgcauggccuccaagaucggccgcugguacucccgcaccauguccaagaccaagcgcaugggcaugggccucuacgucaaguacgacggcgaccccugggccgacuccgacgcccucgcccucuccggcgucauggucuccauggaggagcccggcugguacuccuucggcuucgagaucaaggacaagaagugcgacguccccugcaucggcaucgagaugguccacgacggcggcaaggagaccuggcacuccgccgccaccgccaucuacugccucaugggcuccggccagcuccucugggacaccgucaccggcgucgacauggcccucuga

SEQ ID NO: 125279 - RNA, 1401 nt, Artificial Sequence; identical to SEQ ID NO: 124650
  derived and/or modified CDS sequence (opt2) from neuraminidase__InfluenzaB__AGX17470

SEQ ID NO: 125280 - RNA, 1401 nt, Artificial Sequence
  derived and/or modified CDS sequence (opt2) from neuraminidase__InfluenzaB__AGX17481
augcuccccuccaccauccagacccucacccucuuccucaccuccggcggcguccuccucucccucuacgucuccgccucccucuccuaccuccucuacuccgacauccuccucaaguucucccccaccgagaucaccgcccccaccaugccccucgacugcgccaacgccuccaacguccaggccgucaaccgcuccgccaccaagggcgucacccucauccuccccgagcccgaguggaccuacccccgccucuccugccccggcuccaccuuccagaaggcccuccucaucuccccccaccgcuucggcgagaccaagggcaacuccgccccccucaucauccgcgagcccuucaucgccugcggccccaaggagugcaagcacuucgcccucacccacuacgccgcccagcccggcggcuacuacaacggcacccgcggcgaccgcaacaagcuccgccaccucaucuccgucaagcucggcaagauccccaccgucgagaacuccaucuuccacauggccgccugguccggcuccgccugccacgacggcaaggaguggaccuacaucggcgucgacggccccgacaacaacgcccuccucaagaucaaguacggcgaggccuacaccgacaccuaccacuccuacgccaacaacauccuccgcacccaggaguccgccugcaacugcaucggcggcaacugcuaccucaugaucaccgacggcuccgccuccggcaucuccgagugccgcuuccucaagauccgcgagggccgcaucaucaaggagaucuuccccaccggccgcgucaagcacaccgaggagugcaccugcggcuucgccuccaacaagaccaucgagugcgccugccgcgacaacuccuacaccgccaagcgccccuucgucaagcucaacgucgagaccgacaccgccgagauccgccucaugugcaccgagaccuaccucgacaccccccgccccgacgacggcuccaucaccggccccugcgaguccaacggcgacaagggcuccggcggcaucaagggcggcuucguccaccagcgcauggccuccaagaucggccgcugguacucccgcaccauguccaagaccaagcgcaugggcaugggccucuacgucaaguacgacggcgaccccugggccgacuccgacgcccucgcccucuccggcgucauggucuccgucgaggagcccggcugguacuccuucggcuucgagaucaaggacaagaagugcgacguccccugcaucggcaucgagaugguccacgacggcggcaaggagaccuggcacuccgccgccaccgccaucuacugccucaugggcuccggccagcuccucugggacaccgucaccggcgucgacauggcccucuga

SEQ ID NO: 125281 - RNA, 1401 nt, Artificial Sequence
  derived and/or modified CDS sequence (opt2) from neuraminidase__InfluenzaB__AGX17492
augcuccccuccaccauccagacccucacccucuuccucaccuccggcggcguccuccucucccucuacgucuccgccucccucuccuaccuccucuacuccgacauccuccucaaguucucccccaccgagaucaccgcccccaccaugccccucgacugcgccaacgccuccaacguccaggccgucaaccgcuccgccaccaagggcgucacccuccuccuccccgagcccgaguggaccuacccccgccucuccugccccggcuccaccuuccagaaggcccuccucaucuccccccaccgcuucggcgagaccaagggcaacuccgccccccucaucauccgcgagcccuucaucgccugcggccccaaggagugcaagcacuucgcccucacccacuacgccgcccagcccggcggcuacuacaacggcacccgcggcgaccgcaacaagcuccgccaccucaucuccgucaagcucggcaagauccccaccgucgagaacuccaucuuccacauggccgccugguccggcuccgccugccacgacggcaaggaguggaccuacaucggcgucgacggccccgacaacaacgcccuccucaagaucaaguacggcgaggccuacaccgacaccuaccacuccuacgccaacaacauccuccgcacccaggaguccgccugcaacugcaucggcggcaacugcuaccucaugaucaccgacggcuccgccuccggcaucuccgagugccgcuuccucaagauccgcgagggccgcaucaucaaggagaucuuccccaccggccgcgucaagcacaccgaggagugcaccugcggcuucgccuccaacaagaccaucgagugcgccugccgcgacaacuccuacaccgccaagcgccccuucgucaagcucaacgucgagaccgacaccgccgagauccgccucaugugcaccgagaccuaccucgacaccccccgccccgacgacggcuccaucaccggccccugcgaguccaacggcgacaagggcuccggcggcaucaagggcggcuucguccaccagcgcauggccuccaagaucggccgcugguacucccgcaccauguccaagaccaagcgcaugggcaugggccucuacgucaaguacgacggcgaccccugggccgacuccgacgcccucgcccucuccggcgucauggucuccauggaggagcccggcugguacuccuucggcuucgagaucaaggacaagaagugcgacguccccugcaucggcaucgagaugguccacgacggcggcaaggagaccuggcacuccgccgccaccgccaucuacugccucaugggcuccggccagcuccucugggacaccgucaccggcgucgacaucgcccucuga

SEQ ID NO: 125282 - RNA, 1401 nt, Artificial Sequence
  derived and/or modified CDS sequence (opt2) from neuraminidase__InfluenzaB__AGX17503
augcuccccuccaccauccagacccucacccucuuccucaccuccggcggcguccuccucucccucuacgucuccgccucccucuccuaccuccucuacuccgacauccuccucaaguucucccccaccgagaucaccgcccccaccaugccccucgacugcgccaacgccuccaacguccaggccgucaaccgcuccgccaccaagggcgucacccuccuccuccccgagcccgaguggaccuacccccgccucuccugccccggccucaccuuccagaaggcccuccucaucuccccccaccgcuucggcgagaccaagggcaacuccgccccccucaucauccgcgagcccuucaucgccugcggccccaaggagugcaagcacuucgcccucacccacuacgccgcccagcccggcggcuacuacaacggcacccgcggcgaccgcaacaagcuccgccaccucaucuccgucaagcucggcaagauccccaccgucgagaacuccaucuuccacauggccgccugguccggcuccgccugccacgacggcaaggaguggaccuacaucggcgucgacggccccgacaacaacgcccuccucaagaucaaguacggcgaggccuacaccgacaccuaccacuccuacgccaacaacauccuccgcacccaggaguccgccugcaacugcaucggcggcaacugcuaccucaugaucaccgacggcuccgccuccggcaucuccgagugccgcuuccucaagauccgcgagggccgcaucaucaaggagaucuuccccaccggccgcgucaagcacaccgaggagugcaccugcggcuucgccuccaacaagaccaucgagugcgccugccgcgacaacuccuacaccgccaagcgccccuucgucaagcucaacgucgagaccgacaccgccgagauccgccucaugugcaccgagaccuaccucgacaccccccgccccgacgacggcuccaucaccggccccugcgaguccaacggcgacaagggcuccggcggcaucaagggcggcuucguccaccagcgcauggccuccaagaucggccgcugguacucccgcaccauguccaagaccaagcgcaugggcaugggccucuacgucaaguacgacggcgaccccugggccgacuccgacgcccucgcccucuccggcgucauggucuccauggaggagcccggcugguacuccuucggcuucgagaucaaggacaagaagugcgacguccccugcaucggcaucgagaugguccacgacggcggcaaggagaccuggcacuccgccgccaccgccaucuacugccucaugggcuccggccagcuccucugggacaccgucaccggcgucgacauggcccucuga

SEQ ID NO: 125283 - RNA, 1401 nt, Artificial Sequence; identical to SEQ ID NO: 124650
  derived and/or modified CDS sequence (opt2) from neuraminidase__InfluenzaB__AGX17514

SEQ ID NO: 125284 - RNA, 1401 nt, Artificial Sequence
  derived and/or modified CDS sequence (opt2) from neuraminidase__InfluenzaB__AGX17525
augcuccccuccaccauccagacccucacccucuuccucaccuccggcggcguccuccucucccucuacgucuccgccucccucuccuaccuccucuacuccgacauccuccucaaguucucccccaccgagaucaccgcccccaccaugccccucgacugcgccaacgccuccaacguccaggccgucaaccgcuccgccaccaagggcgucacccuccuccuccccgagcccgaguggaccuacccccgccucuccugccccggcuccaccuuccagaaggcccuccucaucuccccccaccgcuucggcgagaccaagggcaacuccgccccccucaucauccgcgagcccuucaucgccugcggccccaaggagugcaagcacuucgcccucacccacuacgccgcccagcccggcggcuacuacaacggcaagcgcggcgaccgcaacaagcuccgccaccucaucuccgucaagcucggcaagauccccaccgucgagaacuccaucuuccacauggccgccugguccggcuccgccugccacgacggcaaggaguggaccuacaucggcgucgacggccccgacaacaacgcccuccucaagaucaaguacggcgaggccuacaccgacaccuaccacuccuacgccaacaacauccuccgcacccaggaguccgccugcaacugcaucggcggcaacugcuaccucaugaucaccgacggcuccgccuccggcaucuccgagugccgcuuccucaagauccgcgagggccgcaucaucaaggagaucuuccccaccggccgcgucaagcacaccgaggagugcaccugcggcuucgccuccaacaagaccaucgagugcgccugccgcgacaacuccuacaccgccaagcgccccuucgucaagcucaacgucgagaccgacaccgccgagauccgccucaugugcaccgagaccuaccucgacaccccccgccccgacgacggcuccaucaccggccccugcgaguccaacggcgacaagggcuccggcggcaucaagggcggcuucguccaccagcgcauggccuccaagaucggccgcugguacucccgcaccauguccaagaccaagcgcaugggcaugggccucuacgucaaguacgacggcgaccccugggccgacuccgacgcccucgcccucuccggcgucauggucuccauggaggagcccggcugguacuccuucggcuucgagauccgcgacaagaagugcgacguccccugcaucggcaucgagaugguccacgacggcggcaaggagaccuggcacuccgccgccaccgccaucuacugccucaugggcuccggccagcuccucugggacaccgucaccggcgucgacauggcccucuga

SEQ ID NO: 125285 - RNA, 1401 nt, Artificial Sequence; identical to SEQ ID NO: 125229
  derived and/or modified CDS sequence (opt2) from neuraminidase__InfluenzaB__AGX17536

SEQ ID NO: 125286 - RNA, 1401 nt, Artificial Sequence; identical to SEQ ID NO: 125260
  derived and/or modified CDS sequence (opt2) from neuraminidase__InfluenzaB__AGX17547

SEQ ID NO: 125287 - RNA, 1401 nt, Artificial Sequence
  derived and/or modified CDS sequence (opt2) from neuraminidase__InfluenzaB__AGX17558
augcuccccuccaccauccagacccucacccucuuccucaccuccggcggcguccuccucucccucuacgucuccgccucccucuccuaccuccucuacuccgacguccuccucaaguucucccccgccgagaucaccgcccccaccaugccccucgacugcgccaacgccuccaacguccaggccgucaaccgcuccgccaccaagggcgucacccuccuccuccccgagcccgaguggaccuacccccgccucuccugccccggcuccaccuuccagaaggcccuccucaucuccccccaccgcuucggcgagaccaagggcaacuccgccccccucaucauccgcgagcccuucaucgccugcggccccaaggagugcaagcacuucgcccucacccacuacgccgcccagcccggcggcuacuacaacggcacccgcggcgaccgcaacaagcuccgccaccucaucuccgucaagcucggcaagauccccaccgucgagaacuccaucuuccacauggccgccugguccggcuccgccugccacgacggcaaggaguggaccuacaucggcgucgacggccccgacaacaacgcccuccucaagaucaaguacggcgaggccuacaccgacaccuaccacuccuacgccaacaacauccuccgcacccaggaguccgccugcaacugcaucggcggcaacugcuaccucaugaucaccgacggcuccgccuccggcgucuccgagugccgcuuccucaagauccgcgagggccgcaucaucaaggagaucuuccccaccggccgcgucaagcacaccgaggagugcaccugcggcuucgccuccaacaagaccaucgagugcgccugccgcgacaacuccuacaccgccaagcgccccuucgucaagcucaacgucgagaccgacaccgccgagauccgccucaugugcaccgagaccuaccucgacaccccccgccccgacgacggcuccaucaccggccccugcgaguccaacggcgacaagggcuccggcggcaucaagggcggcuucguccaccagcgcauggccuccaagaucggccgcugguacucccgcaccauguccaagaccaagcgcaugggcaugggccucuacgucaaguacgacggcgaccccugggccgacuccgacgcccucgcccucuccggcgucauggucuccauggaggagcccggcugguacuccuucggcuucgagaucaaggacaagaagugcgacguccccugcaucggcaucgagaugguccacgacggcggcaaggagaccuggcacuccgccgccaccgccaucuacugccucaugggcuccggccagcuccucugggacaccgucaccggcgucgacauggcccucuga

SEQ ID NO: 125288 - RNA, 1401 nt, Artificial Sequence; identical to SEQ ID NO: 124779
  derived and/or modified CDS sequence (opt2) from neuraminidase__InfluenzaB__AGX17569

SEQ ID NO: 125289 - RNA, 1401 nt, Artificial Sequence; identical to SEQ ID NO: 124706
  derived and/or modified CDS sequence (opt2) from neuraminidase__InfluenzaB__AGX17580

SEQ ID NO: 125290 - RNA, 1401 nt, Artificial Sequence
  derived and/or modified CDS sequence (opt2) from neuraminidase__InfluenzaB__AGX17591
augcuccccuccaccauccagacccucacccucuuccucaccuccggcggcguccuccucucccucuacgucuccgccucccucuccuaccuccucuacuccgacauccuccucaaguucccccccaccgagaucaccgcccccaccaugccccucgacugcgccaacgccuccaacguccaggccgucaaccgcuccgccaccaagggcgucacccuccuccuccccgagcccgaguggaccuacccccgccucuccugccccggcuccaccuuccagaaggcccuccucaucuccccccaccgcuucggcgagaccaagggcaacuccgccccccucaucauccgcgagcccuucaucgccugcggccccaaggagugcaagcacuucgcccucacccacuacgccgcccagcccggcggcuacuacaacggcacccgcggcgaccgcaacaagcuccgccaccucaucuccgucaagcucggcaagauccccaccgucgagaacuccaucuuccacauggccgccugguccggcuccgccugccacgacggcaaggaguggaccuacaucggcgucgacggccccgacaacaacgcccuccucaagaucaaguacggcgaggccuacaccgacaccuaccacuccuacgccaacaacauccuccgcacccaggaguccgccugcaacugcaucggcggcaacugcuaccucaugaucaccgacggcuccgccuccggcgucuccgagugccgcuuccucaagauccgcgagggccgcaucaucaaggagaucuuccccaccggccgcgucaagcacaccgaggagugcaccugcggcuucgccuccaacaagaccaucgagugcgccugccgcgacaacuccuacaccgccaagcgccccuucgucaagcucaacgucgagaccgacaccgccgagauccgccucaugugcaccgagaccuaccucgacaccccccgccccgacgacggcuccaucaccggccccugcgaguccaacggcgacaagggcuccggcggcaucaagggcggcuucguccaccagcgcauggccuccaagaucggccgcugguacucccgcaccauguccaagaccaagcgcaugggcaugggccucuacgucaaguacgacggcgaccccugggccgacuccgacgcccucgccuucuccggcgucauggucuccauggaggagcccggcugguacuccuucggcuucgagaucaaggacaagaagugcgacguccccugcaucggcaucgagaugguccacgacggcggcaaggagaccuggcacuccgccgccaccgccaucuacugccucaugggcuccggccagcuccucugggacaccgucaccggcgucaacauggcccucuga

SEQ ID NO: 125291 - RNA, 1401 nt, Artificial Sequence; identical to SEQ ID NO: 124704
  derived and/or modified CDS sequence (opt2) from neuraminidase__InfluenzaB__AGX17602

SEQ ID NO: 125292 - RNA, 1401 nt, Artificial Sequence; identical to SEQ ID NO: 125290
  derived and/or modified CDS sequence (opt2) from neuraminidase__InfluenzaB__AGX17613

SEQ ID NO: 125293 - RNA, 1401 nt, Artificial Sequence; identical to SEQ ID NO: 124877
  derived and/or modified CDS sequence (opt2) from neuraminidase__InfluenzaB__AGX17624

SEQ ID NO: 125294 - RNA, 1401 nt, Artificial Sequence
  derived and/or modified CDS sequence (opt2) from neuraminidase__InfluenzaB__AGX17635
augcuccccuccaccauccagacccucacccucuuccucaccuccggcggcguccuccucucccucuacgucuccgccucccucuccuaccuccucuacuccgacauccuccucaaguucccccccaccgagaucaccgcccccaccaugccccucgacugcgccaacgccuccaacguccaggccgucaaccgcuccgccaccaagggcgucacccuccuccuccccgagcccgaguggaccuacccccgccucuccugccccggcuccaccuuccagaaggcccuccucaucuccccccaccgcuucggcgagaccaagggcaacuccgccccccucaucauccgcgagcccuucaucgccugcggccccaaggagugcaagcacuucgcccucacccacuacgccgcccagcccggcggcuacuacaacggcacccgcggcgaccgcaacaagcuccgccaccucaucuccgucaagcucggcaagauccccaccgucgagaacuccaucuuccacauggccgccugguccggcuccgccugccacgacggcaaggaguggaccuacaucggcgucgacggccccgacaacaacgcccuccucaagaucaaguacggcgaggccuacaccgacaccuaccacuccuacgccaacaacauccuccgcacccaggaguccgccugcaacugcaucggcggcaacugcuaccucaugaucaccgacggcuccgccuccggcaucuccgagugccgcuuccucaagauccgcgagggccgcaucaucaaggagaucuuccccaccggccgcgucaagcacaccgaggagugcaccugcggcuucgccuccaacaagaccaucgagugcgccugccgcgacaacuccuacaccgccaagcgccccuucgucaagcucaacgucgagaccgacaccgccgagauccgccucaugugcaccgagaccuaccucgacaccccccgccccgacgacggcuccaucaccggccccugcgaguccaacggcgacaagggcuccggcggcaucaagggcggcuucguccaccagcgcauggccuccaagaucggccgcugguacucccgcaccauguccaagaccaagcgcaugggcaugggccucuacgucaaguacgacggcgaccccugggccgacuccgacgcccucgccuucuccggcgucauggucuccauggaggagcccggcugguacuccuucggcuucgagaucaaggacaagaagugcgacguccccugcaucggcaucgagaugguccacgacggcggcaaggagaccuggcacuccgccgccaccgccaucuacugccucaugggcuccggccagcuccucugggacaccgucaccggcgucaacauggcccucuga

SEQ ID NO: 125295 - RNA, 1401 nt, Artificial Sequence; identical to SEQ ID NO: 124877
  derived and/or modified CDS sequence (opt2) from neuraminidase__InfluenzaB__AGX17657

SEQ ID NO: 125296 - RNA, 1401 nt, Artificial Sequence; identical to SEQ ID NO: 125290
  derived and/or modified CDS sequence (opt2) from neuraminidase__InfluenzaB__AGX17668

SEQ ID NO: 125297 - RNA, 1401 nt, Artificial Sequence
  derived and/or modified CDS sequence (opt2) from neuraminidase__InfluenzaB__AGX17679
augcuccccuccaccauccagacccucacccucuuccucaccuccggcggcguccuccucucccucuacgucuccgccucccucuccuaccuccucuacuccgacauccuccucaaguucucccccaccgagaucaccgcccccaccaugccccucgacugcgccaacgccuccaacguccaggccgucaaccgcuccgccaccaagggcgucacccuccuccuccccgagcccgaguggaccuacccccgccucuccugccccggcuccaccuuccagaaggcccuccucaucuccccccaccgcuucggcgagaccaagggcaacuccgccccccucaucauccgcgagcccuucaucgccugcggccccaacgagugcaagcacuucgcccucacccacuacgccgcccagcccggcggcuacuacaacggcacccgcggcgaccgcaacaagcuccgccaccucaucuccgucaagcucggcaagauccccaccgucgagaacuccaucuuccacauggccgccugguccggcuccgccugccacgacggcaaggaguggaccuacaucggcgucgacggccccgacaacaacgcccuccucaagaucaaguacggcgaggccuacaccgacaccuaccacuccuacgccaacaacauccuccgcacccaggaguccgccugcaacugcaucggcggcaacugcuaccucaugaucaccgacggcuccgccuccggcgucuccgagugccgcuuccucaagauccgcgagggccgcaucaucaaggagaucuuccccaccggccgcgucaagcacaccgaggagugcaccugcggcuucgccuccaacaagaccaucgagugcgccugccgcgacaacuccuacaccgccaagcgccccuucgucaagcucaacgucgagaucgacaccgccgagauccgccucaugugcaccgacaccuaccucgacaccccccgccccgacgacggcuccaucaccggccccugcgaguccaacggcgacaagggcuccggcggcaucaagggcggcuucguccaccagcgcauggccuccaagaucggccgcugguacucccgcaccauguccaagaccgagcgcaugggcaugggccucuacgucaaguacgacggcgaccccugggccgacuccgacgcccucgccuucuccggcgucauggucuccaugaaggagcccggcugguacuccuucggcuucgagaucaaggacaagaagugcgacguccccugcaucggcaucgagaugguccacgacggcggcaaggagaccuggcacuccgccgccaccgccaucuacugccucaugggcuccggccagcuccucugggacaccgucaccggcgucgacauggcccucuga

SEQ ID NO: 125298 - RNA, 1401 nt, Artificial Sequence; identical to SEQ ID NO: 124877
  derived and/or modified CDS sequence (opt2) from neuraminidase__InfluenzaB__AGX17690

SEQ ID NO: 125299 - RNA, 1401 nt, Artificial Sequence
  derived and/or modified CDS sequence (opt2) from neuraminidase__InfluenzaB__AGX17701
augcuccccuccaccauccagacccucacccucuuccucaccuccggcggcguccuccucucccucuacgucuccgccucccucuccuaccuccucuacuccgacauccuccucaaguucccccccaccgagaucaccgcccccaccaugccccucgacugcgccaacgccuccaacguccaggccgucaaccgcuccgccaccaagggcgucacccuccuccuccccgagcccgaguggaccuacccccgccucuccugccccggcuccaccuuccagaaggcccuccucaucuccccccaccgcuucggcgagaccaagggcaacuccgccccccucaucauccgcgagcccuucaucgccugcggccccaaggagugcaagcacuucgcccucacccacuacgccgcccagcccggcggcuacuacaacggcaagcgcggcgaccgcaacaagcuccgccaccucaucuccgucaagcucggcaagauccccaccgucgagaacuccaucuuccacauggccgccugguccggcuccgccugccacgacggcaaggaguggaccuacaucggcgucgacggccccgacaacaacgcccuccucaagaucaaguacggcgaggccuacaccgacaccuaccacuccuacgccaacaacauccuccgcacccaggaguccgccugcaacugcaucggcggcaacugcuaccucaugaucaccgacggcuccgccuccggcgucuccgagugccgcuuccucaagauccgcgagggccgcaucaucaaggagaucuuccccaccggccgcgucaagcacaccgaggagugcaccugcggcuucgccuccaacaagaccaucgagugcgccugccgcgacaacuccuacaccgccaagcgccccuucgucaagcucaacgucgagaccgacaccgccgagauccgccucaugugcaccgagaccuaccucgacaccccccgccccgacgacggcuccaucaccggccccugcgaguccaacggcgacaagggcuccggcggcaucaagggcggcuucguccaccagcgcauggccuccaagaucggccgcugguacucccgcaccauguccaagaccaagcgcaugggcaugggccucuacgucaaguacgacggcgaccccugggccgacuccgacgcccucgccuucuccggcgucauggucuccauggaggagcccggcugguacuccuucggcuucgagaucaaggacaagaagugcgacguccccugcaucggcaucgagaugguccacgacggcggcaaggagaccuggcacuccgccgccaccgccaucuacugccucaugggcuccggccagcuccucugggacaccgucaccggcgucaacauggcccucuga

SEQ ID NO: 125300 - RNA, 1401 nt, Artificial Sequence; identical to SEQ ID NO: 124877
  derived and/or modified CDS sequence (opt2) from neuraminidase__InfluenzaB__AGX17723

SEQ ID NO: 125301 - RNA, 1401 nt, Artificial Sequence; identical to SEQ ID NO: 125297
  derived and/or modified CDS sequence (opt2) from neuraminidase__InfluenzaB__AGX17734

SEQ ID NO: 125302 - RNA, 1401 nt, Artificial Sequence
  derived and/or modified CDS sequence (opt2) from neuraminidase__InfluenzaB__AGX17745
augcuccccuccaccauccagacccucacccucuuccucaccuccggcggcguccuccucucccucuacgucuccgccucccucuccuaccuccucuacuccgacauccuccucaaguucccccccaccgagaucaccgcccccaccaugccccucgacugcgccaacgccuccaacguccaggccgucaaccgcuccgccaccaagggcgucacccuccuccuccccgagcccgaguggaccuacccccgccucuccugcuccggcuccaccuuccagaaggcccuccucaucuccccccaccgcuucggcgagaucaagggcaacuccgccccccucaucauccgcgagcccuucaucgccugcggccccaaggagugcaagcacuucgcccucacccacuacgccgcccagcccggcggcuacuacaacggcacccgcggcgaccgcaacaagcuccgccaccucaucuccgucaagcucggcaagauccccaccgucgagaacuccaucuuccacauggccgccugguccggcuccgccugccacgacggcaaggaguggaccuacaucggcgucgacggccccgacaacaacgcccuccucaagaucaaguacggcgaggccuacaccgacaccuaccacuccuacgccaacaacauccuccgcacccaggaguccgccugcaacugcaucggcggcaacugcuaccucaugaucaccgacggcuccgccuccggcgucuccgagugccgcuuccucaagauccgcgagggccgcaucaucaaggagaucuuccccaccggccgcgucaagcacaccgaggagugcaccugcggcuucgccuccaacaagaccaucgagugcgccugccgcgacaacuccuacaccgccaagcgccccuucgucaagcucaacgucgagaccgacaccgccgagauccgccucaugugcaccgagaccuaccucgacaccccccgccccgacgacggcuccaucaccggccccugcgaguccaacggcgacaagggcuccggcggcaucaagggcggcuucguccaccagcgcauggccuccaagaucggccgcugguacucccgcaccauguccaagaccaagcgcaugggcaugggccucuacgucaaguacgacggcgaccccugggccgacuccgacgcccucgccuucuccggcgucauggucuccauggaggagcccggcugguacuccuucggcuucgagaucaaggacaagaagugcgacguccccugcaucggcaucgagaugguccacgacggcggcaaggagaccuggcacuccgccgccaccgccaucuacugccucaugggcuccggccagcuccucugggacaccgucaccggcgucaacauggcccucuga

SEQ ID NO: 125303 - RNA, 1401 nt, Artificial Sequence
  derived and/or modified CDS sequence (opt2) from neuraminidase__InfluenzaB__AGX17756
augcuccccuccaccauccagacccucacccucuuccucaccuccggcggcguccuccucucccucuacgucuccgccucccucuccuaccuccucuacuccgacauccuccucaaguucucccccaccgagaucaccgcccccaccaugccccucgacugcgccaacgccuccaacguccacgccgucaaccgcuccgccaccaagggcgucacccuccuccuccccgagcccgaguggaccuacccccgccucuccugccccggcuccaccuuccagaaggcccuccucaucuccccccaccgcuucggcgagaccaagggcaacuccgccccccucaucauccgcgagcccuucaucgccugcggccccaacgagugcaagcacuucgcccucacccacuacgccgcccgccccggcggcuacuacaacggcacccgcggcgaccgcaacaagcuccgccaccucaucuccgucaagcucggcaagauccccaccgucgagaacuccaucuuccacauggccgccugguccggcuccgccugccacgacggcaaggaguggaccuacaucggcgucgacggccccgacaacaacgcccuccucaagaucaaguacggcgaggccuacaccgacaccuaccacuccuacgccaacaacauccuccgcacccaggaguccgccugcaacugcaucggcggcaacugcuaccucaugaucaccgacggcuccgccuccggcgucuccgagugccgcuuccucaagauccgcgagggccgcaucaucaaggagaucuuccccaccggccgcgucaagcacaccgaggagugcaccugcggcuucgccuccaacaagaccaucgagugcgccugccgcgacaacuccuacaccgccaagcgccccuucgucaagcucaacgucgagaccgacaccgccgagauccgccucaugugcaccgacaccuaccucgacaccccccgccccgacgacggcuccaucaccggccccugcgaguccaacggcgacaagggcuccggcggcaucaagggcggcuucguccaccagcgcauggccuccaagaucggccgcugguacucccgcaccauguccaagaccgagcgcaugggcaugggccucuacgucaaguacgacggcgaccccugggccgacuccgacgcccucgccuucuccggcgucauggucuccaugaaggagcccggcugguacuccuucggcuucgagaucaaggacaagaagugcgacguccccugcaucggcaucgagaugguccacgacggcggcaaggagaccuggcacuccgccgccaccgccaucuacugccucaugggcuccggccagcuccucugggacaccgucaccggcgucgacauggcccucuga

SEQ ID NO: 125304 - RNA, 1401 nt, Artificial Sequence; identical to SEQ ID NO: 124924
  derived and/or modified CDS sequence (opt2) from neuraminidase__InfluenzaB__AGX17767

SEQ ID NO: 125305 - RNA, 1401 nt, Artificial Sequence
  derived and/or modified CDS sequence (opt2) from neuraminidase__InfluenzaB__AGX17778
augcuccccuccaccauccagacccucacccucuuccucaccuccggcggcguccuccucucccucuacgucuccgccucccucuccuaccuccucuacuccgacauccuccucaaguucucccccaccgagaucaccgcccccaccaugccccucgacugcgccaacgccuccaacguccacgccgucaaccgcuccgccaccaagggcgucacccuccuccuccccgagcccgaguggaccuacccccgccucuccugccccggcuccaccuuccagaaggcccuccucaucuccccccaccgcuucggcgagaccaagggcaacuccgccccccucaucauccgcgagcccuucaucgccugcggccccaacgagugcaagcacuucgcccucacccacuacgccgcccagcccggcggcuacuacaacggcacccgcggcgaccgcaacaagcuccgccaccucaucuccgucaagcucggcaagauccccaccgucgagaacuccaucuuccacauggccgccugguccggcuccgccugccacgacggcaaggaguggaccuacaucggcgucgacggccccgacaacaacgcccuccucaagaucaaguacggcgaggccuacaccgacaccuaccacuccuacgccaacaacauccuccgcacccaggaguccgccugcaacugcaucggcggcaacugcuaccucaugaucaccgacggcuccgccuccggcgucuccgagugccgcuuccucaagauccgcgagggccgcaucaucaaggagaucuuccccaccggccgcgucaagcacaccgaggagugcaccugcggcuucgccuccaacaagaccaucgagugcgccugccgcgacaacuccuacaccgccaagcgccccuucgucaagcucaacgucgagaccgacaccgccgagauccgccucaugugcaccgacaccuaccucgacaccccccgccccgacgacggcuccaucaccggccccugcgaguccaacggcgacaagggcuccggcggcaucaagggcggcuucguccaccagcgcauggccuccaagaucggccgcugguacucccgcaccauguccaagaccgagcgcaugggcaugggccucuacgucaaguacgacggcgaccccugggccgaguccgacgcccucgccuucuccggcgucauggucuccaugaaggagcccggcugguacuccuucggcuucgagaucaaggacaagaagugcgacguccccugcaucggcaucgagaugguccacgacggcggcaaggagaccuggcacuccgccgccaccgccaucuacugccucaugggcuccggccagcuccucugggacaccgucaccggcgucgacauggcccucuga

SEQ ID NO: 125306 - RNA, 1401 nt, Artificial Sequence
  derived and/or modified CDS sequence (opt2) from neuraminidase__InfluenzaB__AGX17789
augcuccccuccaccauccagacccucacccucuuccucaccuccggcggcguccuccucucccucuacgucuccgccucccucuccuaccuccucuacuccgacauccuccucaaguucucccccaccgagaucaccgcccccaccaugccccucgacugcgccaacgccuccaacguccaggccgucaaccgcuccgccaccaagggcgucacccuccuccuccccgagcccgaguggaccuacccccgccucuccugccccggcuccaccuuccagaaggcccuccucaucuccccccaccgcuucggcgagaccaagggcaacuccgccccccucaucauccgcgagcccuucaucgccugcggccccaacgagugcaagcacuucgcccucacccacuacgccgcccagcccggcggcuacuacaacggcacccgcggcgaccgcaacaagcuccgccaccucaucuccgucaagcucggcaagauccccaccgucgagaacuccaucuuccacauggccgccugguccggcuccgccugccacgacggcaaggaguggaccuacaucggcgucgacggccccgacaacaacgcccuccucaagaucaaguacggcgaggccuacaccgacaccuaccacuccuacgccaacaacauccuccgcacccaggaguccgccugcaacugcaucggcggcaacugcuaccucaugaucaccgacggcuccgccuccggcgucuccgagugccgcuuccucaagauccgcgagggccgcaucaucaaggagaucuuccccaccggccgcgucaagcacaccgaggagugcaccugcggcuucgccuccaacaagaccaucgagugcgccugccgcgacaacuccuacaccgccaagcgccccuucgucaagcucaacgucgagaucgacaccgccgagauccgccucaugugcaccgacaccuaccucgacaccccccgccccgacgacggcuccaucaccggccccugcgaguccaacggcgacaagggcuccggcggcaucaagggcggcuucguccaccagcgcauggccuccaagaucggccgcugguacucccgcaccauguccaagaccgagcgcaugggcaugggccucuacgucaaguacgacggcgaccccugggccgacuccgacgcccucgucuucuccggcgucauggucuccaugaaggagcccggcugguacuccuucggcuucgagaucaaggacaagaagugcgacguccccugcaucggcaucgagaugguccacgacggcggcaaggagaccuggcacuccgccgccaccgccaucuacugccucaugggcuccggccagcuccucugggacaccgucaccggcgucgacauggcccucuga

SEQ ID NO: 125307 - RNA, 1401 nt, Artificial Sequence; identical to SEQ ID NO: 124877
  derived and/or modified CDS sequence (opt2) from neuraminidase__InfluenzaB__AGX17800

SEQ ID NO: 125308 - RNA, 1401 nt, Artificial Sequence
  derived and/or modified CDS sequence (opt2) from neuraminidase__InfluenzaB__AGX17811
augcuccccuccaccauccagacccucacccucuuccucaccuccggcggcguccuccucucccucuacgucuccgccucccucuccuaccuccucuacuccgacauccuccucaaguucccccccaccgagaucaccgcccccaccaugccccucgacugcgccaacgccuccaacguccaggccgucaaccgcuccgccaccaagggcgucacccuccuccuccccgagcccgaguggaccuacccccgccucuccugccccggcuccaccuuccagaaggcccuccucaucuccccccaccgcuucggcgagaccaagggcaacuccgccccccucaucauccgcgagcccuucaucgccugcggccccaaggagugcaagcacuucgcccucacccacuacgccgcccagcccggcggcuacuacaacggcacccgcggcgaccgcaacaagcuccgccaccucaucuccgucaagcucggcaagauccccaccgucgagaacuccaucuuccacauggccgccugguccggcuccgccugccacgacggcaaggaguggaccuacaucggcgucgacggccccgacaacaacgcccuccucaagaucaaguacggcgaggccuacaccgacaccuaccacuccuacgccaacaacauccuccgcacccaggaguccgccugcaacugcaucggcggcaacugcuaccucaugaucaccgacggcuccgccuccggcgucuccgagugccgcuuccucaagauccgcgagggccgcaucaucaaggagaucuuccccaccggccgcgucaagcacaccgaggagugcaccugcggcuucgccuccaacaagaccaucgagugcgccugccgcgacaacuccuacaccgccaagcgccccuucgucaagcucaacgucgagaccgacaccgccgagauccgccucaugugcaccgagaccuaccucgacaccccccgccccgacgacggcuccaucaccggccccugcgaguccaacggcgacaagggcuccggcggcaucaagggcggcuucguccaccagcgcauggccuccaagaucggccgcugguacucccgcaccauguccaagaccaagcgcaugggcaugggccucuacgucaaguacgacggcgaccccugggccgacuccgacgcccucgccuucuccggcgucauggucuccauggaggagcccggcugguacuccuucggcuucgagaucaaggacaagaagugcgacguccccugcaucggcaucgagaugguccacgacggcggcaaggagaccuggcacuccgccgccaccgccaucuacugccucaugggcuccggccagcuccucugggacaccgucaccggcgucaacauggcccaguga

SEQ ID NO: 125309 - RNA, 1401 nt, Artificial Sequence; identical to SEQ ID NO: 125290
  derived and/or modified CDS sequence (opt2) from neuraminidase__InfluenzaB__AGX17822

SEQ ID NO: 125310 - RNA, 1401 nt, Artificial Sequence
  derived and/or modified CDS sequence (opt2) from neuraminidase__InfluenzaB__AGX17833
augcuccccuccaccauccagacccucacccucuuccucaccuccggcggcguccuccucucccucuacgucuccgccucccucuccuaccuccucuacuccgacauccuccucaaguucccccccaccgagaucaccgcccccaccaugccccucgacugcgccaacgccuccaacguccaggccgucaaccgcuccgccaccaagggcgucacccuccuccuccccgagcccgaguggaccuacccccgccucuccugccccggcuccaccuuccagaaggcccuccucaucuccccccaccgcuucggcgagaccaagggcaacuccgccccccucaucauccgcgagcccuucaucgccugcggccccaaggagugcaagcacuucgcccucacccacuacgccgcccagcccggcggcuacuacaacggcacccgcggcgaccgcaacaagcuccgccaccucaucuccaucaagcucggcaagauccccaccgucgagaacuccaucuuccacauggccgccugguccggcuccgccugccacgacggcaaggaguggaccuacaucggcgucgacggccccgacaacaacgcccuccucaagaucaaguacggcgaggccuacaccgacaccuaccacuccuacgccaacaacauccuccgcacccaggaguccgccugcaacugcaucggcggcaacugcuaccucaugaucaccgacggcuccgccuccggcgucuccgagugccgcuuccucaagauccgcgagggccgcaucaucaaggagaucuuccccaccggccgcgucaagcacaccgaggagugcaccugcggcuucgccuccaacaagaccaucgagugcgccugccgcgacaacuccuacaccgccaagcgccccuucgucaagcucaacgucgagaccgacaccgccgagauccgccucaugugcaccgagaccuaccucgacaccccccgccccgacgacggcuccaucaccggccccugcgaguccaacggcgacaagggcuccggcggcaucaagggcggcuucguccaccagcgcauggccuccaagaucggccgcugguacucccgcaccauguccaagaccaagcgcaugggcaugggccucuacgucaaguacgacggcgaccccugggccgacuccgacgcccucgccuucuccggcgucauggucuccauggaggagcccggcugguacuccuucggcuucgagaucaaggacaagaagugcgacguccccugcaucggcaucgagaugguccacgacggcggcaaggagaccuggcacuccgccgccaccgccaucuacugccucaugggcuccggccagcuccucugggacaccgucaccggcgucaacauggcccucuga

SEQ ID NO: 125311 - RNA, 1401 nt, Artificial Sequence; identical to SEQ ID NO: 125297
  derived and/or modified CDS sequence (opt2) from neuraminidase__InfluenzaB__AGX17844

SEQ ID NO: 125312 - RNA, 1401 nt, Artificial Sequence; identical to SEQ ID NO: 125305
  derived and/or modified CDS sequence (opt2) from neuraminidase__InfluenzaB__AGX17855

SEQ ID NO: 125313 - RNA, 1401 nt, Artificial Sequence; identical to SEQ ID NO: 124924
  derived and/or modified CDS sequence (opt2) from neuraminidase__InfluenzaB__AGX17866

SEQ ID NO: 125314 - RNA, 1401 nt, Artificial Sequence; identical to SEQ ID NO: 125290
  derived and/or modified CDS sequence (opt2) from neuraminidase__InfluenzaB__AGX17877

SEQ ID NO: 125315 - RNA, 1401 nt, Artificial Sequence; identical to SEQ ID NO: 125297
  derived and/or modified CDS sequence (opt2) from neuraminidase__InfluenzaB__AGX17888

SEQ ID NO: 125316 - RNA, 1401 nt, Artificial Sequence; identical to SEQ ID NO: 125290
  derived and/or modified CDS sequence (opt2) from neuraminidase__InfluenzaB__AGX17899

SEQ ID NO: 125317 - RNA, 1401 nt, Artificial Sequence; identical to SEQ ID NO: 125297
  derived and/or modified CDS sequence (opt2) from neuraminidase__InfluenzaB__AGX17910

SEQ ID NO: 125318 - RNA, 1401 nt, Artificial Sequence; identical to SEQ ID NO: 125297
  derived and/or modified CDS sequence (opt2) from neuraminidase__InfluenzaB__AGX17921

SEQ ID NO: 125319 - RNA, 1401 nt, Artificial Sequence; identical to SEQ ID NO: 124924
  derived and/or modified CDS sequence (opt2) from neuraminidase__InfluenzaB__AGX17932

SEQ ID NO: 125320 - RNA, 1401 nt, Artificial Sequence
  derived and/or modified CDS sequence (opt2) from neuraminidase__InfluenzaB__AGX17943
augcuccccuccaccauccagacccucacccucuuccucaccuccggcggcguccuccucucccucuacgucuccgccucccucuccuaccuccucuacuccgacauccuccucaaguucccccccaccgagaucaccgcccccaccaugccccucgacugcgccaacgccuccaacguccaggccgucaaccgcuccgccaccaagggcgucacccuccuccuccccgagcccgaguggaccuacccccgccucuccugccccggcuccaccuuccagaaggcccuccucaucuccccccaccgcuucggcgagaccaagggcaacuccgccccccucaucauccgcgagcccuucaucgccugcggccccaaggagugcaagcacuucgcccucacccacuacgccgcccagcccggcggcuacuacaacggcacccgcggcgaccgcaacaagcuccgccaccucaucuccguccgccucggcaagauccccaccgucgagaacuccaucuuccacauggccgccugguccggcuccgccugccacgacggcaaggaguggaccuacaucggcgucgacggccccgacaacaacgcccuccucaagaucaaguacggcgaggccuacaccgacaccuaccacuccuacgccaacaacauccuccgcacccaggaguccgccugcaacugcaucggcggcaacugcuaccucaugaucaccgacggcuccgccuccggcgucuccgagugccgcuuccucaagauccgcgagggccgcaucaucaaggagaucuuccccaccggccgcgucaagcacaccgaggagugcaccugcggcuucgccuccaacaagaccaucgagugcgccugccgcgacaacuccuacaccgccaagcgccccuucgucaagcucaacgucgagaccgacaccgccgagauccgccucaugugcaccgagaccuaccucgacaccccccgccccgacgacggcuccaucaccggccccugcgaguccaacggcgacaagggcuccggcggcaucaagggcggcuucguccaccagcgcauggccuccaagaucggccgcugguacucccgcaccauguccaagaccaagcgcaugggcaugggccucuacgucaaguacgacggcgaccccugggccgacuccgacgcccucgccuucuccggcgucauggucuccauggaggagcccggcugguacuccuucggcuucgagaucaaggacaagaagugcgacguccccugcaucggcaucgagaugguccacgacggcggcaaggagaccuggcacuccgccgccaccgccaucuacugccucaugggcuccggccagcuccucugggacaccgucaccggcgucaacauggcccucuga

SEQ ID NO: 125321 - RNA, 1401 nt, Artificial Sequence; identical to SEQ ID NO: 125290
  derived and/or modified CDS sequence (opt2) from neuraminidase__InfluenzaB__AGX17954

SEQ ID NO: 125322 - RNA, 1401 nt, Artificial Sequence
  derived and/or modified CDS sequence (opt2) from neuraminidase__InfluenzaB__AGX17976
augcuccccuccaccauccagacccucacccucuuccucaccuccggcggcguccuccucucccucuacgucuccgccucccucuccuaccuccucuacuccgacauccuccucaaguucucccccaccgagaucaccgcccccaccaugccccucgacugcgccaacgccuccaacguccacgccgucaaccgcuccgccaccaagggcgucaccccccuccuccccgagcccgaguggaccuacccccgccucuccugccccggcuccaccuuccagaaggcccuccucaucuccccccaccgcuucggcgagaccaagggcaacuccgccccccucaucauccgcgagcccuucaucgccugcggccccaacgagugcaagcacuucgcccucacccacuacgccgcccagcccggcggcuacuacaacggcacccgcggcgaccgcaacaagcuccgccaccucaucuccgucaagcucggcaagauccccaccgucgagaacuccaucuuccacauggccgccugguccggcuccgccugccacgacggcaaggaguggaccuacaucggcgucgacggccccgacaacaacgcccuccucaagaucaaguacggcgaggccuacaccgacaccuaccacuccuacgccaacaacauccuccgcacccaggaguccgccugcaacugcaucggcggcaacugcuaccucaugaucaccgacggcuccgccuccggcgucuccgagugccgcuuccucaagauccgcgagggccgcaucaucaaggagaucuuccccaccggccgcgucaagcacaccgaggagugcaccugcggcuucgccuccaacaagaccaucgagugcgccugccgcgacaacuccuacaccgccaagcgccccuucgucaagcucaacgucgagaccgacaccgccgagauccgccucaugugcaccgacaccuaccucgacaccccccgccccgacgacggcuccaucaccggccccugcgaguccaacggcgacaagggcuccggcggcaucaagggcggcuucguccaccagcgcauggccuccaagaucggccgcugguacucccgcaccauguccaagaccgagcgcaugggcaugggccucuacgucaaguacgacggcgaccccugggccgacuccgacgcccucgccuucuccggcgucauggucuccaugaaggagcccggcugguacuccuucggcuucgagaucaaggacaagaagugcgacguccccugcaucggcaucgagaugguccacgacggcggcaaggagaccuggcacuccgccgccaccgccaucuacugccucaugggcuccggccagcuccucugggacaccgucaccggcgucgacauggcccucuga

SEQ ID NO: 125323 - RNA, 1401 nt, Artificial Sequence
  derived and/or modified CDS sequence (opt2) from neuraminidase__InfluenzaB__AGX17987
augcuccccuccaccauccagacccucacccucuuccucaccuccggcggcguccuccucucccucuacgucuccgucucccucuccuaccuccucuacuccgacauccuccucaaguucccccccaccgagaucaccgcccccaccaugccccucgacugcgccaacgccuccaacguccaggccgucaaccgcuccgccaccaagggcgucacccuccuccuccccgagcccgaguggaccuacccccgccucuccugccccggcuccaccuuccagaaggcccuccucaucuccccccaccgcuucggcgagaccaagggcaacuccgccccccucaucauccgcgagcccuucaucgccugcggccccaaggagugcaagcacuucgcccucacccacuacgccgcccagcccggcggcuacuacaacggcacccgcggcgaccgcaacaagcuccgccaccucaucuccgucaagcucggcaagauccccaccgucgagaacuccaucuuccacauggccgccugguccggcuccgccugccacgacggcaaggaguggaccuacaucggcgucgacggccccgacaacaacgcccuccucaagaucaaguacggcgaggccuacaccgacaccuaccacuccuacgccaacaacauccuccgcacccaggaguccgccugcaacugcaucggcggcaacugcuaccucaugaucaccgacggcuccgccuccggcgucuccgagugccgcuuccucaagauccgcgagggccgcaucaucaaggagaucuuccccaccggccgcgucaagcacaccgaggagugcaccugcggcuucgccuccaacaagaccaucgagugcgccugccgcgacaacuccuacaccgccaagcgccccuucgucaagcucaacgucgagaccgacaccgccgagauccgccucaugugcaccgagaccuaccucgacaccccccgccccgacgacggcuccaucaccggccccugcgaguccaacggcgacaagggcuccggcggcaucaagggcggcuucguccaccagcgcauggccuccaagaucggccgcugguacucccgcaccauguccaagaccaagcgcaugggcaugggccucuacgucaaguacgacggcgaccccugggccgacuccgacgcccucgccuucuccggcgucauggucuccauggaggagcccggcugguacuccuucggcuucgagaucaaggacaagaagugcgacguccccugcaucggcaucgagaugguccacgacggcggcaaggagaccuggcacuccgccgccaccgccaucuacugccucaugggcuccggccagcuccucugggacaccgucaccggcgucaacauggcccucuga

SEQ ID NO: 125324 - RNA, 1401 nt, Artificial Sequence; identical to SEQ ID NO: 125297
  derived and/or modified CDS sequence (opt2) from neuraminidase__InfluenzaB__AGX17998

SEQ ID NO: 125325 - RNA, 1401 nt, Artificial Sequence; identical to SEQ ID NO: 125290
  derived and/or modified CDS sequence (opt2) from neuraminidase__InfluenzaB__AGX18009

SEQ ID NO: 125326 - RNA, 1401 nt, Artificial Sequence; identical to SEQ ID NO: 125323
  derived and/or modified CDS sequence (opt2) from neuraminidase__InfluenzaB__AGX18020

SEQ ID NO: 125327 - RNA, 1401 nt, Artificial Sequence; identical to SEQ ID NO: 125290
  derived and/or modified CDS sequence (opt2) from neuraminidase__InfluenzaB__AGX18031

SEQ ID NO: 125328 - RNA, 1401 nt, Artificial Sequence
  derived and/or modified CDS sequence (opt2) from neuraminidase__InfluenzaB__AGX18042
augcuccccuccaccauccagacccucacccucuuccucaccuccggcggcguccuccucucccucuacgucuccgccucccucuccuaccuccucuacuccgacauccuccucaaguucucccccaccgagaucaccgcccccaccaugccccucaacugcgccaacgccuccaacguccaggccgucaaccgcuccgccaccaagggcgucacccuccuccuccccgagcccgaguggaccuacccccgccucuccugccccggcuccaccuuccagaaggcccuccucaucuccccccaccgcuucggcgagaccaagggcaacuccgccccccucaucauccgcgagcccuucaucgccugcggccccaacgagugcaagcacuucgcccucacccacuacgccgcccagcccggcggcuacuacaacggcacccgcggcgaccgcaacaagcuccgccaccucaucuccgucaagcucggcaagauccccaccgucgagaacuccaucuuccacauggccgccugguccggcuccgccugccacgacggcaaggaguggaccuacaucggcgucgacggccccgacaacaacgcccuccucaagaucaaguacggcgaggccuacaccgacaccuaccacuccuacgccaacaacauccuccgcacccaggaguccgccugcaacugcaucggcggcaacugcuaccucaugaucaccgacggcuccgccuccggcgucuccgagugccgcuuccucaagauccgcgagggccgcaucaucaaggagaucuuccccaccggccgcgucaagcacaccgaggagugcaccugcggcuucgccuccaacaagaccaucgagugcgccugccgcgacaacuccuacaccgccaagcgccccuucgucaagcucaacgucgagaucgacaccgccgagauccgccucaugugcaccgacaccuaccucgacaccccccgccccgacgacggcuccaucaccggccccugcgaguccaacggcgacaagggcuccggcggcaucaagggcggcuucguccaccagcgcauggccuccaagaucggccgcugguacucccgcaccauguccaagaccgagcgcaugggcaugggccucuacgucaaguacgacggcgaccccugggccgacuccgacgcccucgccuucuccggcgucauggucuccaugaaggagcccggcugguacuccuucggcuucgagaucaaggacaagaagugcgacguccccugcaucggcaucgagaugguccacgacggcggcaaggagaccuggcacuccgccgccaccgccaucuacugccucaugggcuccggccagcuccucugggacaccgucaccggcgucgacauggcccucuga

SEQ ID NO: 125329 - RNA, 1401 nt, Artificial Sequence; identical to SEQ ID NO: 125297
  derived and/or modified CDS sequence (opt2) from neuraminidase__InfluenzaB__AGX18053

SEQ ID NO: 125330 - RNA, 1401 nt, Artificial Sequence; identical to SEQ ID NO: 125297
  derived and/or modified CDS sequence (opt2) from neuraminidase__InfluenzaB__AGX18064

SEQ ID NO: 125331 - RNA, 1401 nt, Artificial Sequence
  derived and/or modified CDS sequence (opt2) from neuraminidase__InfluenzaB__AGX18075
augcuccccuccaccauccagacccucacccucuuccucaccuccggcggcguccuccucucccucuacgucuccgccucccucuccuaccuccucuacuccgacauccuccucaaguucccccccaccgagaucaccgcccccaccaugccccucgacugcgccaacgccuccaacguccaggccgucaaccgcuccgccaccaagggcgucacccuccuccuccccgagcccgaguggaccuacccccgccucuccugccccggcuccaccuuccagaaggcccuccucaucuccccccaccgcuucggcgagaccaagggcaacuccgccccccucaucauccgcgagcccuucaucgccugcggccccaaggagugcaagcacuucgcccucacccacuacgccgcccagcccggcggcuacuacaacggcacccgcggcgaccgcaacaagcuccgccaccucaucuccgucaagcucggcaagauccccaccgucgagaacuccaucuuccacauggccgccugguccggcuccuccugccacgacggcaaggaguggaccuacaucggcgucgacggccccgacaacaacgcccuccucaagaucaaguacggcgaggccuacaccgacaccuaccacuccuacgccaacaacauccuccgcacccaggaguccgccugcaacugcaucggcggcaacugcuaccucaugaucaccgacggcuccgccuccggcgucuccgagugccgcuuccucaagauccgcgagggccgcaucaucaaggagaucuuccccaccggccgcgucaagcacaccgaggagugcaccugcggcuucgccuccaacaagaccaucgagugcgccugccgcgacaacuccuacaccgccaagcgccccuucgucaagcucaacgucgagaccgacaccgccgagauccgccucaugugcaccgagaccuaccucgacaccccccgccccgacgacggcuccaucaccggccccugcgaguccaacggcgacaagggcuccggcggcaucaagggcggcuucguccaccagcgcauggccuccaagaucggccgcugguacucccgcaccauguccaagaccaagcgcaugggcaugggccucuacgucaaguacgacggcgaccccugggccgacuccgacgcccucgccuucuccggcgucauggucuccauggaggagcccggcugguacuccuucggcuucgagaucaaggacaagaagugcgacguccccugcaucggcaucgagaugguccacgacggcggcaaggagaccuggcacuccgccgccaccgccaucuacugccucaugggcuccggccagcuccucugggacaccgucaccggcgucaacauggcccucuga

SEQ ID NO: 125332 - RNA, 1401 nt, Artificial Sequence; identical to SEQ ID NO: 124924
  derived and/or modified CDS sequence (opt2) from neuraminidase__InfluenzaB__AGX18086

SEQ ID NO: 125333 - RNA, 1401 nt, Artificial Sequence; identical to SEQ ID NO: 124924
  derived and/or modified CDS sequence (opt2) from neuraminidase__InfluenzaB__AGX18097

SEQ ID NO: 125334 - RNA, 1401 nt, Artificial Sequence; identical to SEQ ID NO: 124877
  derived and/or modified CDS sequence (opt2) from neuraminidase__InfluenzaB__AGX18108

SEQ ID NO: 125335 - RNA, 1401 nt, Artificial Sequence
  derived and/or modified CDS sequence (opt2) from neuraminidase__InfluenzaB__AGX18119
augcuccccuccaccauccagacccucacccucuuccucaccuccggcggcguccuccucucccucuacgucuccgccucccucuccuaccuccucuacuccgacauccuccucaaguucucccccaccgagaucaccgcccccaccaugccccucgacugcgccaacaccuccaacguccaggccgucaaccgcuccgccaccaagggcgucacccuccuccuccccgagcccgaguggaccuacccccgccucuccugccccggcuccaccuuccagaaggcccuccucaucuccccccaccgcuucggcgagaccaagggcaacuccgccccccucaucauccgcgagcccuucaucgccugcggccccaacgagugcaagcacuucgcccucacccacuacgccgcccagcccggcggcuacuacaacggcacccgcggcgaccgcaacaagcuccgccaccucaucuccgucaagcucggcaagauccccaccgucgagaacuccaucuuccacauggccgccugguccggcuccgccugccacgacggcaaggaguggaccuacaucggcgucgacggccccgacaacaacgcccuccucaagaucaaguacggcgaggccuacaccgacaccuaccacuccuacgccaacaacauccuccgcacccaggaguccgccugcaacugcaucggcggcaacugcuaccucaugaucaccgacggcuccgccuccggcgucuccgagugccgcuuccucaagauccgcgagggccgcaucaucaaggagaucuuccccaccggccgcgucaagcacaccgaggagugcaccugcggcuucgccuccaacaagaccaucgagugcgccugccgcgacaacuccuacaccgccaagcgccccuucgucaagcucaacauggagaccgacaccgccgagaucaagcucaugugcaccgacaccuaccucgacaccccccgccccgacgacggcuccaucaccggccccugcgaguccaacggcgacaagggcuccggcggcaucaagggcggcuucguccaccagcgcauggccuccaagaucggccgcugguacucccgcaccauguccaagaccgagcgcaugggcaugggccucuacgucaaguacgacggcgaccccugggccgacuccgacgcccucgccuucuccggcgucauggucuccaugaaggagcccggcugguacuccuucggcuucgagaucaaggacaagaagugcgacguccccugcaucggcaucgagaugguccacgacggcggcaaggagaccuggcacuccgccgccaccgccaucuacugccucaugggcuccggccagcuccucugggacaccgucaccggcgucgacauggcccucuga

SEQ ID NO: 125336 - RNA, 1401 nt, Artificial Sequence
  derived and/or modified CDS sequence (opt2) from neuraminidase__InfluenzaB__AGX18130
augcuccccuccaccauccagacccucacccucuuccucaccuccggcggcguccuccucucccucuacgucuccgccucccucuccuaccuccucuacuccgacauccuccucaaguucucccccaccgagaucaccgcccccaccaugccccucgacugcgccaacgccuccaacguccaggccgucaaccgcuccgccaccaagggcgucacccuccuccuccccgagcccgaguggaccuacccccgccucuccugccccggcuccaccuuccagaaggcccuccucaucuccccccaccgcuucggcgagaccaagggcaacuccgccccccucaucauccgcgagcccuucaucgccugcggccccaacgagugcaagcacuucgcccucacccacuacgccgcccagcccggcggcuacuacaacggcacccgcggcgaccgcaacaagcuccgccaccucaucuccgucaagcucggcaagauccccaccgucgagaacuccaucuuccacauggccgccugguccggcuccgccugccacgacggcaaggaguggaccuacaucggcgucgacggccccgacaacaacgcccuccucaagaucaaguacggcgaggccuacaccgacaccuaccacuccuacgccaacaacauccuccgcacccaggaguccgccugcaacugcaucggcggcaacugcuaccucaugaucaccgacggcuccgccuccggcgucuccgagugccgcuuccucaagauccgcgagggccgcaucaucaaggagaucuuccccaccggccgcgucaagcacaccgaggagugcaccugcggcuucgccuccaacaagaccaucgagugcgccugccgcgacaacuccuacaccgccaagcgccccuucgucaagcucaacgucgagaucgacaccgccgagauccgccucaugugcaccgacaccuaccucgacaccccccgccccgacgacggcuccaucaccggccccugcgaguccaacggcgacaagggcuccggcggcaucaagggcggcuucguccaccagcgcauggccuccaagaucggccgcugguacucccgcaccaugucccgcaccgagcgcaugggcaugggccucuacgucaaguacgacggcgaccccugggccgacuccgacgcccucgccuucuccggcgucauggucuccaugaaggagcccggcugguacuccuucggcuucgagaucaaggacaagaagugcgacguccccugcaucggcaucgagaugguccacgacggcggcaaggagaccuggcacuccgccgccaccgccaucuacugccucaugggcuccggccagcuccucugggacaccgucaccggcgucgacauggcccucuga

SEQ ID NO: 125337 - RNA, 1401 nt, Artificial Sequence
  derived and/or modified CDS sequence (opt2) from neuraminidase__InfluenzaB__AGX18141
augcuccccuccaccauccagacccucacccucuuccucaccuccggcggcguccuccucucccucuacgucuccgccucccucuccuaccuccucuacuccgacauccuccucaaguuccccuccaccgagaucaccgcccccaccaugccccucgacugcgccaacgccuccaacguccaggccgucaaccgcuccgccaccaagggcaugacccuccuccuccccgagcccgaguggaccuacccccgccucuccugccccggcuccaccuuccagaaggcccuccucaucuccccccaccgcuucggcgagaccaagggcaacuccgccccccucaucauccgcgagcccuucaucgccugcggccccaaggagugcaagcacuucgcccucacccacuacgccgcccagcccggcggcuacuacaacggcacccgcggcgaccgcaacaagcuccgccaccucaucuccgucaagcucggcaagauccccaccgucgagaacuccaucuuccacauggccgccugguccggcuccgccugccacgacggcaaggaguggaccuacaucggcgucgacggccccgacaacaacgcccuccucaagaucaaguacggcgaggccuacaccgacaccuaccacuccuacgccaacaacauccuccgcacccaggaguccgccugcaacugcaucggcggcaacugcuaccucaugaucaccgacggcuccgccuccggcgucuccgagugccgcuuccucaagauccgcgagggccgcaucaucaaggagaucuuccccaccggccgcaucaagcacaccgaggagugcaccugcggcuucgccuccaacaagaccaucgagugcgccugccgcgacaacuccuacaccgccaagcgccccuucgucaagcucaacgucgagaccgacaccgccgagauccgccucaugugcaccgagaccuaccucgacaccccccgccccgacgacggcuccaucaccggccccugcgaguccaacggcgacaagggcuccggcggcaucaagggcggcuucguccaccagcgcauggccuccaagaucggccgcugguacucccgcaccauguccaagaccgagcgcaugggcaugggccucuacgucaaguacgacggcgaccccugggccgaguccgacgcccucgccuucuccggcgucauggucuccauggaggagcccggcugguacuccuucggcuucgagaucaaggacaagaagugcgacguccccugcaucggcaucgagaugguccacgacggcggcaaggagaccuggcacuccgccgccaccgccaucuacugccucaugggcuccggccagcuccucugggacaccgucaccggcgucaacauggcccucuga

SEQ ID NO: 125338 - RNA, 1401 nt, Artificial Sequence; identical to SEQ ID NO: 124924
  derived and/or modified CDS sequence (opt2) from neuraminidase__InfluenzaB__AGX18152

SEQ ID NO: 125339 - RNA, 1401 nt, Artificial Sequence
  derived and/or modified CDS sequence (opt2) from neuraminidase__InfluenzaB__AGX18163
augcuccccuccaccauccagacccucacccucuuccucaccuccggcggcguccuccucucccucuacgucuccgccucccucuccuaccuccucuacuccgacauccuccucaaguuccccuccaccgagaucaccgcccccaccaugccccucgacugcgccaacgccuccaacguccaggccgucaaccgcuccgccaccaagggcgucacccuccuccuccccgagcccgaguggaccuacccccgccucuccugccccggcuccaccuuccagaaggcccuccucaucuccccccaccgcuucggcgagaccaagggcaacuccgccccccucaucauccgcgagcccuucaucgccugcggccccaaggagugcaagcacuucgcccucacccacuacgccgcccagcccggcggcuacuacaacggcaagcgcggcgaccgcaacaagcuccgccaccucaucuccgucaagcucggcaagauccccaccgucgagaacuccaucuuccacauggccgccugguccggcuccgccugccacgacggcaaggaguggaccuacaucggcgucgacggccccgacaacaacgcccuccucaagaucaaguacggcgaggccuacaccgacaccuaccacuccuacgccaacaacauccuccgcacccaggaguccgccugcaacugcaucggcggcaacugcuaccucaugaucaccgacggcuccgccuccggcgucuccgagugccgcuuccucaagauccgcgagggccgcaucaucaaggagaucuuccccaccggccgcaucaagcacaccgaggagugcaccugcggcuucgccuccaacaagaccaucgagugcgccugccgcgacaacuccuacaccgccaagcgccccuucgucaagcucaacgucgagaccgacaccgccgagauccgccucaugugcaccgagaccuaccucgacaccccccgccccgacgacggcuccaucaccggccccugcgaguccaacggcgacaagggcuccggcggcaucaagggcggcuucguccaccagcgcauggccuccaagaucggccgcugguacucccgcaccauguccaagaccgagcgcaugggcaugggccucuacgucaaguacgacggcgaccccugggccgacuccgacgcccucgccuucuccggcgucauggucuccauggaggagcccggcugguacuccuucggcuucgagaucaaggacaagaagugcgacguccccugcaucggcaucgagaugguccacgacggcggcaaggagaccuggcacuccgccgccaccgccaucuacugccucaugggcuccggccagcuccucugggacaccgucaccggcgucaacauggcccucuga

SEQ ID NO: 125340 - RNA, 1401 nt, Artificial Sequence; identical to SEQ ID NO: 125290
  derived and/or modified CDS sequence (opt2) from neuraminidase__InfluenzaB__AGX18174

SEQ ID NO: 125341 - RNA, 1401 nt, Artificial Sequence; identical to SEQ ID NO: 124924
  derived and/or modified CDS sequence (opt2) from neuraminidase__InfluenzaB__AGX18185

SEQ ID NO: 125342 - RNA, 1401 nt, Artificial Sequence; identical to SEQ ID NO: 124877
  derived and/or modified CDS sequence (opt2) from neuraminidase__InfluenzaB__AGX18196

SEQ ID NO: 125343 - RNA, 1401 nt, Artificial Sequence
  derived and/or modified CDS sequence (opt2) from neuraminidase__InfluenzaB__AGX18207
augcuccccuccaccauccagacccucacccucuuccucaccuccggcggcguccuccucucccucuacgucuccgccucccucuccuaccuccucuacuccgacauccuccucaaguucccccccaccgagaucaccgcccccaccaugccccucgacugcgccaacgccuccaacguccaggccgucaaccgcuccgccaccaagggcgucacccuccuccuccccgagcccgaguggaccuacccccgccucuccugccccggcuccaccuuccagaaggcccuccucaucuccccccaccgcuucggcgagaccaagggcaacuccgccccccucaucauccgcgagcccuucaucgccugcggccccaaggagugcaagcacuucgcccucacccacuacgccgcccagcccggcggcuacuacaacggcacccgcggcgaccgcaacaagcuccgccaccucaucuccgucaagcucggcaagauccccaccgucgagaccuccaucuuccacauggccgccugguccggcuccgccugccacgacggcaaggaguggaccuacaucggcgucgacggccccgacaacaacgcccuccucaagaucaaguacggcgaggccuacaccgacaccuaccacuccuacgccaacaacauccuccgcacccaggaguccgccugcaacugcaucggcggcaacugcuaccucaugaucaccgacggcuccgccuccggcgucuccgagugccgcuuccucaagauccgcgagggccgcaucaucaaggagaucuuccccaccggccgcgucaagcacaccgaggagugcaccugcggcuucgccuccaacaagaccaucgagugcgccugccgcgacaacuccuacaccgccaagcgccccuucgucaagcucaacgucgagaccgacaccgccgagauccgccucaugugcaccgagaccuaccucgacaccccccgccccgacgacggcuccaucaccggccccugcgaguccaacggcgacaagggcuccggcggcaucaagggcggcuucguccaccagcgcauggccuccaagaucggccgcugguacucccgcaccauguccaagaccaagcgcaugggcaugggccucuacgucaaguacgacggcgaccccugggccgacuccgacgcccucgccuucuccggcgucauggucuccauggaggagcccggcugguacuccuucggcuucgagaucaaggacaagaagugcgacguccccugcaucggcaucgagaugguccacgacggcggcaaggagaccuggcacuccgccgccaccgccaucuacugccucaugggcuccggccagcuccucugggacaccgucaccggcgucaacauggcccucuga

SEQ ID NO: 125344 - RNA, 1401 nt, Artificial Sequence
  derived and/or modified CDS sequence (opt2) from neuraminidase__InfluenzaB__AGX18218
augcuccccuccaccauccagacccucacccucuuccucaccuccggcggcguccuccucucccucuacgucuccgccucccucuccuaccuccucuacuccgacauccuccucaagcucucccccaccgagaucaccgcccccaccaugccccucgacugcgccaacaccuccaacguccaggccgucaaccgcuccgccaccaagggcgucacccuccuccuccccgagcccgaguggaccuacccccgccucuccugccccggcuccaccuuccagaaggcccuccucaucuccccccaccgcuucggcgagaccaagggcaacuccgccccccucaucauccgcgagcccuucaucgccugcggccccaacgagugcaagcacuucgcccucacccacuacgccgcccagcccggcggcuacuacaaccgcacccgcggcgaccgcaacaagcuccgccaccucaucuccgucaagcucggcaagauccccaccgucgagaacuccaucuuccacauggccgccugguccggcuccgccugccacgacggcaaggaguggaccuacaucggcgucgacggccccgacaacaacgcccuccucaagaucaaguacggcgaggccuacaccgacaccuaccacuccuacgccaacaacauccuccgcacccaggaguccgccugcaacugcaucggcggcaacugcuaccucaugaucaccgacggcuccgccuccggcgucuccgagugccgcuuccucaagauccgcgagggccgcaucaucaaggagaucuuccccaccggccgcgucaagcacaccgaggagugcaccugcggcuucgccuccaacaagaccaucgagugcgccugccgcgacaacuccuacaccgccaagcgccccuucgucaagcucaacauggagaccgacaccgccgagauccgccucaugugcaccgacaccuaccucgacaccccccgccccgacgacggcuccaucaccggccccugcgaguccaacggcgacaagggcuccggcggcaucaagggcggcuucguccaccagcgcauggccuccaagaucggccgcugguacucccgcaccauguccaagaccgagcgcaugggcaugggccucuacgucaaguacgacggcgaccccugggccgacuccgacgcccucgccuucuccggcgucauggucuccaugaaggagcccggcugguacuccuucggcuucgagaucaaggacaagaagugcgacguccccugcaucggcaucgagaugguccacgacggcggcaaggagaccuggcacuccgccgccaccgccaucuacugccucaugggcuccggccagcuccucugggacaccgucaccggcgucgacauggcccucuga

SEQ ID NO: 125345 - RNA, 1401 nt, Artificial Sequence; identical to SEQ ID NO: 125297
  derived and/or modified CDS sequence (opt2) from neuraminidase__InfluenzaB__AGX18229

SEQ ID NO: 125346 - RNA, 1401 nt, Artificial Sequence
  derived and/or modified CDS sequence (opt2) from neuraminidase__InfluenzaB__AGX18240
augcuccccuccaccauccagacccucacccucuuccucaccuccggcggcguccuccucucccucuacgucuccgccucccucuccuaccuccucuacuccgacauccuccucaaguucucccccaccgagaucaccgcccccaccaugccccucgacugcgccaacgccuccaacguccagaccgucaaccgcuccgccaccaagggcgucacccuccuccuccccgagcccgaguggaccuacccccgccucuccugccccggcuccaccuuccagaaggcccuccucaucuccccccaccgcuucggcgagaccaagggcaacuccgccccccucaucauccgcgagcccuucaucgccugcggccccaacgagugcaagcacuucgcccucacccacuacgccgcccagcccggcggcuacuacaacggcacccgcggcgaccgcaacaagcuccgccaccucaucuccgucaagcucggcaagauccccaccgucgagaacuccaucuuccacauggccgccugguccggcuccgccugccacgacggcaaggaguggaccuacaucggcgucgacggccccgacaacaacgcccuccucaagaucaaguacggcgaggccuacaccgacaccuaccacuccuacgccaacaacauccuccgcacccaggaguccgccugcaacugcaucggcggcaacugcuaccucaugaucaccgacggcuccgccuccggcgucuccgagugccgcuuccucaagauccgcgagggccgcaucaucaaggagaucuuccccaccggccgcgucaagcacaccgaggagugcaccugcggcuucgccuccaacaagaccaucgagugcgccugccgcgacaacuccuacaccgccaagcgccccuucgucaagcucaacgucgagaucgacaccgccgagauccgccucaugugcaccgacaccuaccucgacaccccccgccccgacgacggcuccaucaccggccccugcgaguccaacggcgacaagggcuccggcggcaucaagggcggcuucguccaccagcgcauggccuccaagaucggccgcugguacucccgcaccauguccaagaccgagcgcaugggcaugggccucuacgucaaguacgacggcgaccccugggccgacuccgacgcccucgccuucuccggcgucauggucuccaugaaggagcccggcugguacuccuucggcuucgagaucaaggacaagaagugcgacguccccugcaucggcaucgagaugguccacgacggcggcaaggagaccuggcacuccgccgccaccgccaucuacugccucaugggcuccggccagcuccucugggacaccgucaccggcgucgacauggcccucuga

SEQ ID NO: 125347 - RNA, 1401 nt, Artificial Sequence; identical to SEQ ID NO: 125290
  derived and/or modified CDS sequence (opt2) from neuraminidase__InfluenzaB__AGX18251

SEQ ID NO: 125348 - RNA, 1401 nt, Artificial Sequence
  derived and/or modified CDS sequence (opt2) from neuraminidase__InfluenzaB__AGX18262
augcuccccuccaccauccagacccucacccucuuccucaccuccggcggcguccuccucucccucuacgucuccgccucccucuccuaccuccucuacuccaacauccuccucaaguucucccccaccgagaucaccgcccccaccaugccccucgacugcgccaacgccuccaacguccaggccgucaaccgcuccgccaccaagggcgucacccuccuccuccccgagcccgaguggaccuacccccgccucuccugccccggcuccaccuuccagaaggcccuccucaucuccccccaccgcuucggcgagaccaagggcaacuccgccccccucaucauccgcgagcccuucaucgccugcggccccaacgagugcaagcacuucgcccucacccacuacgccgcccagcccggcggcuacuacaacggcacccgcggcgaccgcaacaagcuccgccaccucaucuccgucaagcucggcaagauccccaccgucgagaacuccaucuuccacauggccgccugguccggcuccgccugccacgacggcaaggaguggaccuacaucggcgucgacggccccgacaacaacgcccuccucaagaucaaguacggcgaggccuacaccgacaccuaccacuccuacgccaacaacauccuccgcacccaggaguccgccugcaacugcaucggcggcaacugcuaccucaugaucaccgacggcuccgccuccggcgucuccgagugccgcuuccucaagauccgcgagggccgcaucaucaaggagaucuuccccaccggccgcgucaagcacaccgaggagugcaccugcggcuucgccuccaacaagaccaucgagugcgccugccgcgacaacuccuacaccgccaagcgccccuucgucaagcucaacgucgagaccgacaccgccgagauccgccucaugugcaccgacaccuaccucgacaccccccgccccgacgacggcuccaucaccggccccugcgaguccaacggcgacaagggcuccggcggcaucaagggcggcuucguccaccagcgcauggccuccaaggucggccgcugguacucccgcaccauguccaagaccgagcgcaugggcaugggccucuacgucaaguacgacggcgaccccugggccgacuccgacgcccucgccuucuccggcgucauggucuccaugaaggagcccggcugguacuccuucggcuucgagaucaaggacaagaagugcgacguccccugcaucggcaucgagaugguccacgacggcggcaaggagaccuggcacuccgccgccaccgccaucuacugccucaugggcuccggccagcuccucugggacaccgucaccggcgucgacauggcccucuga

SEQ ID NO: 125349 - RNA, 1401 nt, Artificial Sequence; identical to SEQ ID NO: 125297
  derived and/or modified CDS sequence (opt2) from neuraminidase__InfluenzaB__AGX18273

SEQ ID NO: 125350 - RNA, 1401 nt, Artificial Sequence; identical to SEQ ID NO: 125322
  derived and/or modified CDS sequence (opt2) from neuraminidase__InfluenzaB__AGX18284

SEQ ID NO: 125351 - RNA, 1401 nt, Artificial Sequence; identical to SEQ ID NO: 125297
  derived and/or modified CDS sequence (opt2) from neuraminidase__InfluenzaB__AGX18295

SEQ ID NO: 125352 - RNA, 1401 nt, Artificial Sequence; identical to SEQ ID NO: 124924
  derived and/or modified CDS sequence (opt2) from neuraminidase__InfluenzaB__AGX18306

SEQ ID NO: 125353 - RNA, 1401 nt, Artificial Sequence
  derived and/or modified CDS sequence (opt2) from neuraminidase__InfluenzaB__AGX18317
augcuccccuccaccauccagacccucacccucuuccucaccuccggcggcguccuccucucccucuacgucuccgccucccucuccuaccuccucuacuccgacauccuccucaaguuccccuccaccgagaucaccgcccccaccaugccccucgacugcgccaacgccuccaacguccaggccgucaaccgcuccgccaccaagggcgucacccuccuccuccccgagcccgaguggaccuacccccgccucuccugccccggcuccaccuuccagaaggcccuccucaucuccccccaccgcuucggcgagaccaagggcaacuccgccccccucaucauccgcgagcccuucaucgccugcggccccaaggagugcaagcacuucgcccucacccacuacgccgcccagcccggcggcuacuacaacgagacccgcggcgaccgcaacaagcuccgccaccucaucuccgucaagcucggcaagauccccaccgucgagaacuccaucuuccacauggccgccugguccggcuccgccugccacgacggcaaggaguggaccuacaucggcgucgacggccccgacaacaacgcccuccucaagaucaaguacggcgaggccuacaccgacaccuaccacuccuacgccaacaacauccuccgcacccaggaguccgccugcaacugcaucggcggcaacugcuaccucaugaucaccgacggcuccgccuccggcgucuccgagugccgcuuccucaagauccgcgagggccgcaucaucaaggagaucuuccccaccggccgcaucaagcacaccgaggagugcaccugcggcuucgccuccaacaagaccaucgagugcgccugccgcgacaacuccuacaccgccaagcgccccuucgucaagcucaacgucgagaccgacaccgccgagauccgccucaugugcaccgagaccuaccucgacaccccccgccccgacgacggcuccaucaccggccccugcgaguccaacggcgacaagggcuccggcggcaucaagggcggcuucguccaccagcgcauggccuccaagaucggccgcugguacucccgcaccauguccaagaccaagcgcaugggcaugggccucuacgucaaguacgacggcgaccccugggccgacuccgacgcccucgccuucuccggcgucauggucuccauggaggagcccggcugguacuccuucggcuucgagaucaaggacaagaagugcgacguccccugcaucggcaucgagaugguccacgacggcggcaaggagaccuggcacuccgccgccaccgccaucuacugccucaugggcuccggccagcuccucugggacaccgucaccggcgucaacauggcccucuga

SEQ ID NO: 125354 - RNA, 1401 nt, Artificial Sequence; identical to SEQ ID NO: 125297
  derived and/or modified CDS sequence (opt2) from neuraminidase__InfluenzaB__AGX18328

SEQ ID NO: 125355 - RNA, 1401 nt, Artificial Sequence
  derived and/or modified CDS sequence (opt2) from neuraminidase__InfluenzaB__AGX18339
augcuccccuccaccauccagacccucacccucuuccucaccuccggcggcguccuccucucccucuacgucuccgccucccucuccuaccuccucuacuccgacauccuccucaaguucucccccaccgagaucaccgcccccaccaugccccucgacugcgccaacgccuccaacguccaggccgucaaccgcuccgccaccaagggcgucacccuccuccuccccgagcccgaguggaccuacccccgccucuccugccccggcuccaccuuccagaaggcccuccucaucuccccccaccgcuucggcgagaccaagggcaacuccgccccccucaucauccgcgagcccuucaucgccugcggccccaacgagugcaagcacuucgcccucacccacuacgccgcccagcccggcggcuacuacaacggcacccgcggcgaccgcaacaagcuccgccaccucaucuccgucaagcucggcaagauccccaccgucgagaacuccaucuuccacauggccgccugguccggcuccgccugccacgacggcaaggaguggaccuacaucggcgucgacggccccgacaacaacgcccuccucaagaucaaguacggcgaggccuacaccgacaccuaccacuccuacgccaacaacauccuccgcacccaggaguccgccugcaacugcaucggcggcaacugcuaccucaugaucaccgacggcuccgccuccggcgucuccgagugccgcuuccucaagauccgcgagggccgcaucaucaaggagaucuuccccaccggccgcgucaagcacaccgaggagugcaccugcggcuucgccuccaacaagaccaucgagugcgccugccgcgacaacuccuacaccgccaagcgccccuucgucaagcucaacgucgagaccgacaccgccgagauccgccucaugugcaccgacaccuaccucgacaccccccgccccgacgacggcuccaucaccggccccugcgaguccaacggcgacaagggcuccggcggcaucaagggcggcuucguccaccagcgcauggccuccaaggucggccgcugguacucccgcaccauguccaagaccgagcgcaugggcaugggccucuacgucaaguacgacggcgaccccugggccgacuccgacgcccucgccuucggcggcgucauggucuccaugaaggagcccggcugguacuccuucggcuucgagaucaaggacaagaagugcgacguccccugcaucggcaucgagaugguccacgacggcggcaaggagaccuggcacuccgccgccaccgccaucuacugccucaugggcuccggccagcuccucugggacaccgucaccggcgucgacauggcccucuga

SEQ ID NO: 125356 - RNA, 1401 nt, Artificial Sequence
  derived and/or modified CDS sequence (opt2) from neuraminidase__InfluenzaB__AGX18350
augcuccccuccaccauccagacccucacccucuuccucaccuccggcggcguccuccucucccucuacgucuccgccucccucuccuaccuccucuacuccgacauccuccucaaguucucccccaccgagaucaccgcccccaccaugccccucgacugcgccaacgccuccaacguccaggccaugaaccgcuccgccaccaagggcgucacccuccuccuccccgagcccgaguggaccuacccccgccucuccugccccggcuccaccuuccagaaggcccuccucaucuccccccaccgcuucggcgagaccaagggcaacuccgccccccucaucauccgcgagcccuucaucgccugcggccccaacgagugcaagcacuucgcccucacccacuacgccgcccagcccggcggcuacuacaacggcacccgcggcgaccgcaacaagcuccgccaccucaucuccgucaagcucggcaagauccccaccgucgagaacuccaucuuccacauggccgccugguccggcuccgccugccacgacggcaaggaguggaccuacaucggcgucgacggccccgacaacaacgcccuccucaagaucaaguacggcgaggccuacaccgacaccuaccacuccuacgccaacaacauccuccgcacccaggaguccgccugcaacugcaucggcggcaacugcuaccucaugaucaccgacggcuccgccuccggcgucuccgagugccgcuuccucaagauccgcgagggccgcaucaucaaggagaucuuccccaccggccgcgucaagcacaccgaggagugcaccugcggcuucgccuccaacaagaccaucgagugcgccugccgcgacaacuccuacaccgccaagcgccccuucgucaagcucaacgucgagaucgacaccgccgagauccgccucaugugcaccgacaccuaccucgacaccccccgccccgacgacggcuccaucaccggccccugcgaguccaacggcgacaagggcuccggcggcaucaagggcggcuucguccaccagcgcauggccuccaagaucggccgcugguacucccgcaccauguccaagaccgagcgcaugggcaugggccucuacgucaaguacgacggcgaccccugggccgacuccgacgcccucgccuucuccggcgucauggucuccaugaaggagcccggcugguacuccuucggcuucgagaucaaggacaagaagugcgacguccccugcaucggcaucgagaugguccacgacggcggcaaggagaccuggcacuccgccgccaccgccaucuacugccucaugggcuccggccagcuccucugggacaccgucaccggcgucgacauggcccucuga

SEQ ID NO: 125357 - RNA, 1401 nt, Artificial Sequence; identical to SEQ ID NO: 125322
  derived and/or modified CDS sequence (opt2) from neuraminidase__InfluenzaB__AGX18361

SEQ ID NO: 125358 - RNA, 1401 nt, Artificial Sequence
  derived and/or modified CDS sequence (opt2) from neuraminidase__InfluenzaB__AGX18383
augcuccccuccaccauccagacccucacccucuuccucaccuccggcggcguccuccucucccucuacgucuccgccucccucuccuaccuccucuacuccgacauccuccucaaguucucccccaccgagaucaccgcccccaccaugccccucgacugcgccaacaccuccaacguccaggccgucaaccgcuccgccaccaagggcgucacccuccuccuccccgagcccgaguggaccuacccccgccucuccugccccggcuccaccuuccagaaggcccuccucaucuccccccaccgcuucggcgagaccaagggcaacuccgccccccucaucauccgcgagcccuucaucgccugcggccccaacgagugcaagcacuucgcccucacccacuacgccgcccagcccggcggcuacuacaacggcacccgcggcgaccgcaacaagcuccgccaccucaucuccgucaagcucggcaagauccccaccgucgagaacuccaucuuccacauggccgccugguccggcuccgccugccacgacggcaaggaguggaccuacaucggcgucgacggccccgacaacaacgcccuccucaagaucaaguacggcgaggccuacaccgacaccuaccacuccuacgccaacaacauccuccgcacccaggaguccgccugcaacugcaucggcggcaacugcuaccucaugaucaccgacggcuccgccuccggcgucuccgagugccgcuuccucaagauccgcgagggccgcaucaucaaggagaucuuccccaccggccgcgucaagcacaccgaggagugcaccugcggcuucgccuccaacaagaccaucgagugcgccugccgcgacaacuccuacaccgccaagcgccccuucgucaagcucaacauggagaccgacaccgccgagauccgccucaugugcaccgacaccuaccucgacaccccccgccccgacgacggcuccaucaccggccccugcgaguccaacggcgacaagggcuccggcggcaucaagggcggcuucguccaccagcgcauggccuccaagaucggccgcugguacucccgcaccauguccaagaccgagcgcaugggcaugggccucuacgucaaguacgacggcgaccccugggccgacuccgacgcccucgucuucuccggcgucauggucuccaugaaggagcccggcugguacuccuucggcuucgagaucaaggacaagaagugcgacguccccugcaucggcaucgagaugguccacggcggcggcaaggagaccuggcacuccgccgccaccgccaucuacugccucaugggcuccggccagcuccucugggacaccgucaccggcgucgacauggcccucuga

SEQ ID NO: 125359 - RNA, 1401 nt, Artificial Sequence; identical to SEQ ID NO: 124924
  derived and/or modified CDS sequence (opt2) from neuraminidase__InfluenzaB__AGX18394

SEQ ID NO: 125360 - RNA, 1401 nt, Artificial Sequence
  derived and/or modified CDS sequence (opt2) from neuraminidase__InfluenzaB__AGX18405
augcuccccuccaccauccagacccucacccucuuccucaccuccggcggcguccuccucucccucuacgucuccgccucccucuccuaccuccucuacuccgacauccuccucaaguucucccccaccgagaucaccgcccccaccaugccccucgacugcgccaacgccuccaacguccacgccgucaaccgcuccgccaccaagggcgucaccccccuccuccccgagcccgaguggaccuacccccgccucuccugccccggcuccaccuuccagaaggcccuccucaucuccccccaccgcuucggcgagaccaagggcaacuccgccccccucaucauccgcgagcccuucaucgccugcggccccaacgagugcaagcacuucgcccucacccacuacgccgcccagcccggcggcuacuacaacggcacccgcggcgaccgcaacaagcuccgccaccucaucuccgucaagcucggcaagauccccaccgucgagaacuccaucuuccacauggccgccugguccggcuccgccugccacgacggcaaggaguggaccuacaucggcgucgacggccccgacaacaacgcccuccucaagaucaaguacggcgaggccuacaccgacaccuaccacuccuacgccaacaacauccuccgcacccaggaguccgccugcaacugcaucggcggcaacugcuaccucaugaucaccgacggcuccgccuccggcgucuccgagugccgcuuccucaagauccgcgagggccgcaucaucaaggagaucuuccccaccggccgcgucaagcacaccgaggagugcaccugcggcuucgccuccaacaagaccaucgagugcgucugccgcgacaacuccuacaccgccaagcgccccuucgucaagcucaacgucgagaccgacaccgccgagauccgccucaugugcaccgacaccuaccucgacaccccccgccccgacgacggcuccaucaccggccccugcgaguccaacggcgacaagggcuccggcggcaucaagggcggcuucguccaccagcgcauggccuccaagaucggccgcugguacucccgcaccauguccaagaccgagcgcaugggcaugggccucuacgucaaguacgacggcgaccccugggccgacuccgacgcccucgccuucuccggcgucauggucuccaugaaggagcccggcugguacuccuucggcuucgagaucaaggacaagaagugcgacguccccugcaucggcaucgagaugguccacgacggcggcaaggagaccuggcacuccgccgccaccgccaucuacugccucaugggcuccggccagcuccucugggacaccgucaccggcgucgacauggcccucuga

SEQ ID NO: 125361 - RNA, 1401 nt, Artificial Sequence
  derived and/or modified CDS sequence (opt2) from neuraminidase__InfluenzaB__AGX18416
augcuccccuccaccauccagacccucacccucuuccucaccuccggcggcguccuccucucccucuacgucuccgccucccucuccuaccuccucuacuccgacauccuccucaaguucucccccaccgagaucaccgcccccaccaugccccucgacugcgccaacgccuccaacguccaggccgucaaccgcuccgccaccaagggcgucacccuccuccuccccgagcccgaguggaccuacccccgccucuccugccccggcuccaccuuccagaaggcccuccucaucuccccccaccgcuucggcgagaccaagggcaacuccgccccccucaucauccgcgagcccuucaucgccugcggccccaacgagugcaagcacuucgcccucacccacuacgccgcccagcccggcggcuacuacaacggcacccgcggcgaccgcaacaagcuccgccaccucaucuccgucaagcucggcaagauccccaccgucgagaacuccaucuuccacauggccgccugguccggcuccgccugccacgacggcaaggaguggaccuacaucggcgucgacggccccgacaacaacgcccuccucaagaucaaguacggcgaggccuacaccgacaccuaccacuccuacgccaacaacauccuccgcacccaggaguccgccugcaacugcaucggcggcaacugcuaccucaugaucaccgacggcuccgccuccggcgucuccgagugccgcuuccucaagauccgcgagggccgcaucaucaaggagaucuuccccaccggccgcgucaagcacaccgaggagugcaccugcggcuucgccuccaacaagaccaucgagugcgccugccgcgacaacuccuacaccgccaagcgccccuucgucaagcucaacgucgagaucgacaccgccgagauccgccucaugugcaccgacaccuaccucgacaccccccgccccgacgacggcuccaucaccggcuccugcgaguccaacggcgacaagggcuccggcggcaucaagggcggcuucguccaccagcgcauggccuccaagaucggccgcugguacucccgcaccauguccaagaccgagcgcaugggcaugggccucuacgucaaguacgacggcgaccccugggccgacuccgacgcccucgccuucuccggcgucauggucuccaugaaggagcccggcugguacuccuucggcuucgagaucaaggacaagaagugcgacguccccugcaucggcaucgagaugguccacgacggcggcaaggagaccuggcacuccgccgccaccgccaucuacugccucaugggcuccggccagcuccucugggacaccgucaccggcgucgacauggcccucuga

SEQ ID NO: 125362 - RNA, 1401 nt, Artificial Sequence
  derived and/or modified CDS sequence (opt2) from neuraminidase__InfluenzaB__AGX18428
augcuccccuccaccauccagacccucacccucuuccucaccuccggcggcguccuccucucccucuacgucuccgccucccucuccuaccuccucuacuccgacauccuccucaaguucuccaccaccgagaucaccgcccccaccaugccccucgacugcgccaacgccuccaacguccaggccgucaaccgcuccgccaccaagggcgucacccuccuccuccccgagcccgaguggaccuacccccgccucuccugccccggcuccaccuuccagaaggcccuccucaucuccccccaccgcuucggcgagaccaagggcaacuccgccccccucaucauccgcgagcccuucaucgccugcggccccaaggagugcaagcacuucgcccucacccacuacgccgcccagcccggcggcuacuacaacggcacccgcgaggaccgcaacaagcuccgccaccucaucuccgucaagcucggcaagauccccaccgucgagaacuccaucuuccacauggccgccugguccggcuccgccugccacgacggcaaggaguggaccuacaucggcgucgacggccccgacuccaacgcccuccucaagaucaaguacggcgaggccuacaccgacaccuaccacuccuacgccaacaacauccuccgcacccaggaguccgccugcaacugcaucggcggcaacugcuaccucaugaucaccgacggcuccgccuccggcaucuccgagugccgcuuccucaagauccgcgagggccgcaucaucaaggagaucuuccccaccggccgcgucaagcacaccgaggagugcaccugcggcuucgccuccaacaagaccaucgagugcgccugccgcgacaacuccuacaccgccaagcgccccuucgucaagcucaacgucgagaccgacaccgccgagauccgccucaugugcaccgagaccuaccucgacaccccccgccccgacgacggcuccaucaccggccccugcgaguccaacggcaacaagggcuccggcggcaucaagggcggcuucguccaccagcgcauggccuccaagaucggccgcugguacucccgcaccauguccaagaccaagcgcaugggcaugggccucuacgucaaguacgacggcgaccccuggaucgacuccgacgcccucgcccucuccggcgucauggucuccauggaggagcccggcugguacuccuucggcuucgagaucaaggacaagaagugcgacguccccugcaucggcaucgagaugguccacgacggcggcaaggagaccuggcacuccgccgccaccgccaucuacugccucaugggcuccggccagcuccucugggacaccgucaccggcgucgacauggcccucuga

SEQ ID NO: 125363 - RNA, 1401 nt, Artificial Sequence
  derived and/or modified CDS sequence (opt2) from neuraminidase__InfluenzaB__AGX18439
augcuccccuccaccauccagacccucacccucuuccucaccuccggcggcguccuccucucccucuacgucuccgccucccucuccuaccuccucuacuccgacauccuccucaaguucucccccaccgagaucaccgcccccaccaugccccucgacugcgccaacgccuccaacguccaggccgucaaccgcuccgccaccaagggcgucacccuccuccuccccgagcccgaguggaccuacccccgccucuccugccccggcuccaccuuccagaaggcccuccucaucuccccccaccgcuucggcgagaccaagggcaacuccgccccccucaucauccgcgagcccuucaucgccugcggccccaacgagugcaagcacuucgcccucacccacuacgccgcccagcccggcggcuacuacaacggcacccgcggcgaccgcaacaagcuccgccaccucaucuccgucaagcucggcaagauccccaccgucgagaacuccaucuuccacauggccgccugguccggcuccgccugccacgacggcaaggaguggaccuacaucggcgucgacggccccgacaacaacgcccuccucaagaucaaguacggcgaggccuacaccgacaccuaccacuccuacgccaacaacauccuccgcacccaggaguccgccugcaacugcaucggcggcaacugcuaccucaugaucaccgacggcuccgccuccggcgucuccgagugccgcuuccucaagauccgcgagggccgcaucaucaaggagaucuuccccaccggccgcgucaagcacaccgaggagugcaccugcggcuucgccuccaacaagaccaucgagugcgccugccgcgacaacuccuacaccgccaagcgccccuucgucaagcucaacgucgagaucgacaccgccgagauccgccucaugugcaccgacaccuaccucgacaccccccgccccgacgacggcuccaucaccggccccugcgaguccaacggcgacaagggcuccggcggcaucaagggcggcuucguccaccagcgcauggccuccaagaucggccgcugguacucccgcaccauguccaagaccgagcgcaugggcaugggccucuacgucaaguacgacggcgaccccugggccgacuccgacgcccucgccuucuccggccucauggucuccaugaaggagcccggcugguacuccuucggcuucgagaucaaggacaagaagugcgacguccccugcaucggcaucgagaugguccacgacggcggcaaggagaccuggcacuccgccgccaccgccaucuacugccucaugggcuccggccagcuccucugggacaccgucaccggcgucgacauggcccucuga

SEQ ID NO: 125364 - RNA, 1401 nt, Artificial Sequence
  derived and/or modified CDS sequence (opt2) from neuraminidase__InfluenzaB__AGX18450
augcuccccuccaccauccagacccucacccucuuccucaccuccggcggcguccuccucucccucuacgucuccgccucccucuccuaccuccucuacuccgacauccuccucaaguucucccccaccgagaucaccgccuccaccaugccccucgacugcgccaacgccuccaacguccaggccgucaaccgcuccgccaccaagggcgucacccuccuccuccccgagcccgaguggaccuacccccgccucuccugccccggcuccaccuuccagaaggcccuccucaucuccccccaccgcuucggcgagaccaagggcaacuccgccccccucaucauccgcgagcccuucaucgccugcggccccaacgagugcaagcacuucgcccucacccacuacgccgcccagcccggcggcuacuacaacggcacccgcggcgaccgcaacaagcuccgccaccucaucuccgucaagcucggcaagauccccaccgucgagaacuccaucuuccacauggccgccugguccggcuccgccugccacgacggcaaggaguggaccuacaucggcgucgacggccccgacaacaacgcccuccucaagaucaaguacggcgaggccuacaccgacaccuaccacuccuacgccaacaacauccuccgcacccaggaguccgccugcaacugcaucggcggcaacugcuaccucaugaucaccgacggcuccgccuccggcgucuccgagugccgcuuccucaagauccgcgagggccgcaucaucaaggagaucuuccccaccggccgcgucaagcacaccgaggagugcaccugcggcuucgccuccaacaagaccaucgagugcgccugccgcgacaacuccuacaccgccaagcgccccuucgucaagcucaacgucgagaucgacaccgccgagauccgccucaugugcaccgacaccuaccucgacaccccccgccccgacgacggcuccaucaccggccccugcgaguccaacggcgacaagggcuccggcggcaucaagggcggcuucguccaccagcgcauggccuccaagaucggccgcugguacucccgcaccauguccaagaccgagcgcaugggcaugggccucuacgucaaguacgacggcgaccccugggccgacuccgacgcccucgccuucuccggcgucauggucuccaugaaggagcccggcugguacuccuucggcuucgagaucaaggacaagaagugcgacguccccugcaucggcaucgagaugguccacgacggcggcaaggagaccuggcacuccgccgccaccgccaucuacugccucaugggcuccggccagcuccucugggacaccgucaccggcgucgacauggcccucuga

SEQ ID NO: 125365 - RNA, 1401 nt, Artificial Sequence; identical to SEQ ID NO: 124924
  derived and/or modified CDS sequence (opt2) from neuraminidase__InfluenzaB__AGX18461

SEQ ID NO: 125366 - RNA, 1401 nt, Artificial Sequence
  derived and/or modified CDS sequence (opt2) from neuraminidase__InfluenzaB__AGX18472
augcuccccuccaccauccagacccucacccucuuccucaccuccggcggcguccuccucucccucuacgucuccgccucccucuccuaccuccucuacuccgacauccuccucaaguucucccccaccgagaucaccgcccccaccaugccccucgacugcgccaacgccuccaacguccacgccgucaaccacuccgccaccaagggcgucaccccccuccuccccgagcccgaguggaccuacccccgccucuccugccccggcuccaccuuccagaaggcccuccucaucuccccccaccgcuucggcgagaccaagggcaacuccgccccccucaucauccgcgagcccuucaucgccugcggccccaacgagugcaagcacuucgcccucacccacuacgccgcccagcccggcggcuacuacaacggcacccgcggcgaccgcaacaagcuccgccaccucaucuccgucaagcucggcaagauccccaccgucgagaacuccaucuuccacauggccgccugguccggcuccgccugccacgacggcaaggaguggaccuacaucggcgucgacggccccgacaacaacgcccuccucaagaucaaguacggcgaggccuacaccgacaccuaccacuccuacgccaacaacauccuccgcacccaggaguccgccugcaacugcaucggcggcaacugcuaccucaugaucaccgacggcuccgccuccggcgucuccgagugccgcuuccucaagauccgcgagggccgcaucaucaaggagaucuuccccaccggccgcgucaagcacaccgaggagugcaccugcggcuucgccuccaacaagaccaucgagugcgccugccgcgacaacuccuacaccgccaagcgccccuucgucaagcucaacgucgagaccgacaccgccgagauccgccucaugugcaccgacaccuaccucgacaccccccgccccgacgacggcuccaucaccggccccugcgaguccaacggcgacaagggcuccggcggcaucaagggcggcuucguccaccagcgcauggccuccaagaucggccgcugguacucccgcaccauguccaagaccgagcgcaugggcaugggccucuacgucaaguacgacggcgaccccugggccgacuccgacgcccucgccuucuccggcgucauggucuccaugaaggagcccggcugguacuccuucggcuucgagaucaaggacaagaagugcgacguccccugcaucggcaucgagaugguccacgacggcggcaaggagaccuggcacuccgccgccaccgccaucuacugccucaugggcuccggccagcuccucugggacaccgucaccggcgucgacauggcccucuga

SEQ ID NO: 125367 - RNA, 1401 nt, Artificial Sequence; identical to SEQ ID NO: 124924
  derived and/or modified CDS sequence (opt2) from neuraminidase__InfluenzaB__AGX18483

SEQ ID NO: 125368 - RNA, 1401 nt, Artificial Sequence; identical to SEQ ID NO: 124671
  derived and/or modified CDS sequence (opt2) from neuraminidase__InfluenzaB__AGX18494

SEQ ID NO: 125369 - RNA, 1401 nt, Artificial Sequence
  derived and/or modified CDS sequence (opt2) from neuraminidase__InfluenzaB__AGX18505
augcuccccuccaccauccagacccucacccucuuccucaccuccggcggcguccuccucucccucuacgucuccgccucccucuccuaccuccucuacuccgacauccuccucaaguucucccccaccgagaucaccgcccccaccaugccccucgacugcgccaacgccuccaacguccaggccgucaaccgcuccgccaccaagggcgucacccuccuccuccccgagcccgaguggaccuacccccgccucuccugccccggcuccaccuuccagaaggcccuccucaucuccccccaccgcuucggcgagaccaagggcaacuccgccccccucaucauccgcgagcccuucaucgccugcggccccaacgagugcaagcacuucgcccucacccacuacgccgcccagcccggcggcuacuacaacggcacccgcggcgaccgcaacaagcuccgccaccucaucuccgucaagcucggcaagauccccaccgucgagaacuccaucuuccacauggccgccugguccggcuccgccugccacgacggcaaggaguggaccuacaucggcgucgacggccccgacaacaacgcccuccucaagaucaaguacggcgaggccuacaccgacaccuaccacuccuacgccaacaagauccuccgcacccaggaguccgccugcaacugcaucggcggcaacugcuaccucaugaucaccgacggcuccgccuccggcgucuccgagugccgcuuccucaagauccgcgagggccgcaucaucaaggagaucuuccccaccggccgcgucaagcacaccgaggagugcaccugcggcuucgccuccaacaagaccaucgagugcgccugccgcgacaacuccuacaccgccaagcgccccuucgucaagcucaacgucgagaccgacaccgccgagauccgccucaugugcaccgacaccuaccucgacaccccccgccccgacgacggcuccaucaccggccccugcgaguccaacggcgacaagggcuccggcggcaucaagggcggcuucguccaccagcgcauggccuccaagaucggccgcugguacucccgcaccaucuccaagaccgagcgcaugggcaugggccucuacgucaaguacgacggcgaccccugggccgacuccgacgcccucgccuucuccggcgucauggucuccaugaaggagcccggcugguacuccuucggcuucgagaucaaggacaagaagugcgacguccccugcaucggcaucgagaugguccacgacggcggcaaggagaccuggcacuccgccgccaccgccaucuacugccucaugggcuccggccagcuccucugggacaccgucaccggcgucgacauggcccucuga

SEQ ID NO: 125370 - RNA, 1401 nt, Artificial Sequence
  derived and/or modified CDS sequence (opt2) from neuraminidase__InfluenzaB__AGX18516
augcuccccuccaccauccagacccucacccucuuccucaccuccggcggcguccuccucucccucuacgucuccgccucccucuccuaccuccucuacuccgacauccuccucaaguucucccccaccgagaucaccgcccccaccaugccccucgacugcgccaacgccuccaacguccaggccgucaaccgcuccgccaccaagggcgucacccuccuccuccccgagcccgaguggaccuacccccgccucuccugccccggcuccaccuuccagaaggcccuccucaucuccccccaccgcuucggcgagaccaagggcaacuccgccccccucaucauccgcgagcccuucaucgccugcggccccaacgagugcaagcacuucgcccucacccacuacgccgcccagcccggcggcuacuacaacggcacccgcggcgaccgcaacaagcuccgccaccucaucuccgucaagcucggcaagauccccaccgucgagaacuccaucuuccacauggccgccugguccggcuccgccugccacgacggcaaggaguggaccuacaucggcgucgacggccccgacaacaacgcccuccucaagaucaaguacggcgaggccuacaccgacaccuaccacuccuacgccaacaagauccuccgcacccaggaguccgccugcaacugcaucggcggcaacugcuaccucaugaucaccgacggcuccgccuccggcgucuccgagugccgcuuccucaagauccgcgagggccgcaucaucaaggagaucuuccccaccggccgcgucaagcacaccgaggagugcaccugcggcuucgccuccaacaagaccaucgagugcgccugccgcgacaacuccuacaccgccaagcgccccuucgucaagcucaacgucgagaccgacaccgccgagauccgccucaugugcaccgacaccuaccucgacaccccccgccccgacgacggcuccaucaccggccccugcgaguccaacggcgacaagggcuccggcggcaucaagggcggcuucguccaccagcgcauggccuccaagaucggccgcugguacucccgcaccaucuccaagaccgagcgcaugggcaugggccucuacgucaaguacgacggcgaccccugggccgacuccgacgcccucgccuucuccggcgucauggucuccaugaaggagcccggcugguacuccuucggcuucgagaucaaggacaagaagugcgacguccccugcaucggcaucgagaugguccacggcggcggcaaggagaccuggcacuccgccgccaccgccaucuacugccucaugggcuccggccagcuccucugggacaccgucaccggcgucgacauggcccucuga

SEQ ID NO: 125371 - RNA, 1401 nt, Artificial Sequence; identical to SEQ ID NO: 124671
  derived and/or modified CDS sequence (opt2) from neuraminidase__InfluenzaB__AGX18527

SEQ ID NO: 125372 - RNA, 1401 nt, Artificial Sequence; identical to SEQ ID NO: 124671
  derived and/or modified CDS sequence (opt2) from neuraminidase__InfluenzaB__AGX18538

SEQ ID NO: 125373 - RNA, 1401 nt, Artificial Sequence; identical to SEQ ID NO: 124671
  derived and/or modified CDS sequence (opt2) from neuraminidase__InfluenzaB__AGX18549

SEQ ID NO: 125374 - RNA, 1401 nt, Artificial Sequence; identical to SEQ ID NO: 124671
  derived and/or modified CDS sequence (opt2) from neuraminidase__InfluenzaB__AGX18560

SEQ ID NO: 125375 - RNA, 1401 nt, Artificial Sequence; identical to SEQ ID NO: 124671
  derived and/or modified CDS sequence (opt2) from neuraminidase__InfluenzaB__AGX18571

SEQ ID NO: 125376 - RNA, 1401 nt, Artificial Sequence
  derived and/or modified CDS sequence (opt2) from neuraminidase__InfluenzaB__AGX18582
augcuccccuccaccauccagacccucacccucuuccucaccuccggcggcguccuccucucccucuacguccucgccucccucuccuaccuccucuacuccgacauccuccucaaguucucccccaccgagaucaccgcccccaccaugccccucgacugcgccaacgccuccaacguccacgccgucaaccgcuccgccaccaagggcgucacccuccuccuccccgagcccgagugggccuacccccgccucuccugccccggcuccaccuuccagaaggcccuccucaucuccccccaccgcuucggcgagaccaagggcaacuccgccccccucaucauccgcgagcccuucaucgccugcggccccaacgagugcaagcacuucgcccucacccacuacgccgcccagcccggcggcuacuacaacggcacccgcggcgaccgcaacaagcuccgccaccucaucuccgucaagcucggcaagauccccaccgucgagaacuccaucuuccacauggccgccugguccggcuccgccugccacgacggcaaggaguggaccuacaucggcgucgacggccccgacaacaacgcccuccucaagaucaaguacggcgaggccuacaccgacaccuaccacuccuacgccaacaacauccuccgcacccaggaguccgccugcaacugcaucggcggcaacugcuaccucaugaucaccgacggcuccgccuccggcgucuccgagugccgcuuccucaagauccgcgagggccgcaucaucaaggagaucuuccccaccggccgcgucaagcacaccgaggagugcaccugcggcuucgccuccaacaagaccaucgagugcgccugccgcgacaacuccuacaccgccaagcgccccuucgucaagcucaacgucgagaccgacaccgccgagauccgccucaugugcaccgacaccuaccucgacaccccccgccccgacgacggcuccaucaccggccccugcgaguccaacggcgacaagggcuccggcggcaucaagggcggcuucguccaccagcgcauggccuccaagaucggccgcugguacucccgcaccauguccaagaccgagcgcaugggcaugggccucuacgucaaguacgacggcgaccccugggccgacuccgacgcccucgccuucuccggcgucauggucuccaugaaggagcccggcugguacuccuucggcuucgagaucaaggacaagaagugcgacguccccugcaucggcaucgagaugguccacgacggcggcaaggagaccuggcacuccgccgccaccgccaucuacugccucaugggcuccggccagcuccucugggacaccgucaccggcgucgacauggcccucuga

SEQ ID NO: 125377 - RNA, 1401 nt, Artificial Sequence; identical to SEQ ID NO: 124671
  derived and/or modified CDS sequence (opt2) from neuraminidase__InfluenzaB__AGX18593

SEQ ID NO: 125378 - RNA, 1401 nt, Artificial Sequence; identical to SEQ ID NO: 124671
  derived and/or modified CDS sequence (opt2) from neuraminidase__InfluenzaB__AGX18604

SEQ ID NO: 125379 - RNA, 1401 nt, Artificial Sequence
  derived and/or modified CDS sequence (opt2) from neuraminidase__InfluenzaB__AGX18615
augcuccccuccaccauccagacccucacccucuuccucaccuccggcggcguccuccucucccucuacgucuccgccucccucuccuaccuccucuacuccgacauccuccucaaguucucccccaccgagaucaccgcccccaccaugccccucgacugcgccaacgccuccaacguccaggccgucaaccgcuccgccaccaagggcgucacccuccuccuccccgagcccgaguggaccuacccccgccucuccugccccggcuccaccuuccagaaggcccuccucaucuccccccaccgcuucggcgagaccaagggcaacuccgccccccucaucauccgcgagcccuucaucgccugcggccccaacgagugcaagcacuucgcccucacccacuacgccgcccagcccggcggcuacuacaacggcacccgcggcgaccgcaacaagcuccgccaccucaucuccgucaagcucggcaagauccccaccgucgagaacuccaucuuccacauggccgccugguccggcuccgccugccacgacggcaaggaguggaccuacaucggcgucgacggccccgacaacaacgcccuccucaagaucaaguacggcgaggccuacaccgacaccuaccacuccuacgccaacaagauccuccgcacccaggaguccgccugcaacugcaucggcggcaacugcuaccucaugaucaccgacggcuccgccuccggcgucuccgagugccgcuuccucaagauccgcgagggccgcaucaucaaggagaucuuccccaccggccgcgucaagcacaccgaggagugcaccugcggcuucgccuccaacaagaccaucgagugcgccugccgcgacaacuccuacaccgccaagcgccccuucgucaagcucaacgucgagaccgacaccgccgagauccgccucaugugcaccgacaccuaccucgacaccccccgccccgacgacggcuccaucaccggccccugcgaguccaacggcaacaagggcuccggcggcaucaagggcggcuucguccaccagcgcauggccuccaagaucggccgcugguacucccgcaccauguccaagaccgagcgcaugggcaugggccucuacgucaaguacgacggcgaccccugggccgacuccgacgcccucgccuucuccggcgucauggucuccaugaaggagcccggcugguacuccuucggcuucgagaucaaggacaagaagugcgacguccccugcaucggcaucgagaugguccacgacggcggcaaggagaccuggcacuccgccgccaccgccaucuacugccucaugggcuccggccagcuccucugggacaccgucaccggcgucgacauggcccucuga

SEQ ID NO: 125380 - RNA, 1401 nt, Artificial Sequence
  derived and/or modified CDS sequence (opt2) from neuraminidase__InfluenzaB__AGX18626
augcuccccuccaccauccagacccucacccucuuccucaccuccggcggcguccuccucucccucuacgucuccgccucccucuccuaccuccucuacuccgacauccuccucaaguucucccccaccgagaucaccgcccccaccaugccccucgacugcgccaacgccuccaacguccaggccgucaaccgcuccgccaccaagggcgucacccuccuccuccccgagcccgaguggaccuacccccgccucuccugccccggcuccaccuuccagaaggcccuccucaucuccccccaccgcuucggcgagaccaagggcaacuccgccccccucauccuccgcgagcccuucaucgccugcggccccaacgagugcaagcacuucgcccucacccacuacgccgcccagcccggcggcuacuacaacggcacccgcggcgaccgcaacaagcuccgccaccucaucuccgucaagcucggcaagauccccaccgucgagaacuccaucuuccacauggccgccugguccggcuccgccugccacgacggcaaggaguggaccuacaucggcgucgacggccccgacaacaacgcccuccucaagaucaaguacggcgaggccuacaccgacaccuaccacuccuacgccaacaagauccuccgcacccaggaguccgccugcaacugcaucggcggcaacugcuaccucaugaucaccgacggcuccgccuccggcgucuccgagugccgcuuccucaagauccgcgagggccgcaucaucaaggagaucuuccccaccggccgcgucaagcacaccgaggagugcaccugcggcuucgccuccaacaagaccaucgagugcgccugccgcgacaacuccuacaccgccaagcgccccuucgucaagcucaacgucgagaccgacaccgccgagauccgccucaugugcaccgacaccuaccucgacaccccccgccccgacgacggcuccaucaccggccccugcgaguccaacggcgacaagggcuccggcggcaucaagggcggcuucguccaccagcgcauggccuccaagaucggccgcugguacucccgcaccauguccaagaccgagcgcaugggcaugggccucuacgucaaguacgacggcgaccccugggccgacuccgacgcccucgccuucuccggcgucauggucuccaugaaggagcccggcugguacuccuucggcuucgagaucaaggacaagaagugcgacguccccugcaucggcaucgagaugguccacgacggcggcaaggagaccuggcacuccgccgccaccgccaucuacugccucaugggcuccggccagcuccucugggacaccgucaccggcgucgacauggcccucuga

SEQ ID NO: 125381 - RNA, 1401 nt, Artificial Sequence; identical to SEQ ID NO: 124671
  derived and/or modified CDS sequence (opt2) from neuraminidase__InfluenzaB__AGX18637

SEQ ID NO: 125382 - RNA, 1401 nt, Artificial Sequence; identical to SEQ ID NO: 124671
  derived and/or modified CDS sequence (opt2) from neuraminidase__InfluenzaB__AGX18648

SEQ ID NO: 125383 - RNA, 1401 nt, Artificial Sequence; identical to SEQ ID NO: 124671
  derived and/or modified CDS sequence (opt2) from neuraminidase__InfluenzaB__AGX18659

SEQ ID NO: 125384 - RNA, 1401 nt, Artificial Sequence; identical to SEQ ID NO: 124671
  derived and/or modified CDS sequence (opt2) from neuraminidase__InfluenzaB__AGX18670

SEQ ID NO: 125385 - RNA, 1401 nt, Artificial Sequence
  derived and/or modified CDS sequence (opt2) from neuraminidase__InfluenzaB__AGX18681
augcuccccuccaccauccagacccucacccucuuccucaccuccggcggcguccuccucucccucuacgucuccgccucccucuccuaccuccucuacuccgacauccuccucaaguucucccccaccgagaucaccgcccccaccaugccccucgacugcgccaacgccuccaacguccaggccgucaaccgcuccgccaccaagggcgucacccuccuccuccccgagcccgaguggaccuacccccgccucuccugccccggcuccaccuuccagaaggcccuccucaucuccccccaccgcuucggcgagaccaagggcaacuccgccccccucaucguccgcgagcccuucaucgccugcggccccaacgagugcaagcacuucgcccucacccacuacgccgcccagcccggcggcuacuacaacggcacccgcggcgaccgcaacaagcuccgccaccucaucuccgucaagcucggcaagauccccaccgucgagaacuccaucuuccacauggccgccugguccggcuccgccugccacgacggcaaggaguggaccuacaucggcgucgacggccccgacaacaacgcccuccucaagaucaaguacggcgaggccuacaccgacaccuaccacuccuacgccaacaagauccuccgcacccaggaguccgccugcaacugcaucggcggcaacugcuaccucaugaucaccgacggcuccgccuccggcgucuccgagugccgcuuccucaagauccgcgagggccgcaucaucaaggagaucuuccccaccggccgcgucaagcacaccgaggagugcaccugcggcuucgccuccaacaagaccaucgagugcgccugccgcgacaacuccuacaccgccaagcgccccuucgucaagcucaacgucgagaccgacaccgccgagauccgccucaugugcaccgacaccuaccucgacaccccccgccccgacgacggcuccaucaccggccccugcgaguccaacggcgacaagggcuccggcggcaucaagggcggcuucguccaccagcgcauggccuccaagaucggccgcugguacucccgcaccauguccaagaccgagcgcaugggcaugggccucuacgucaaguacgacggcgaccccugggccgacuccgacgcccucgccuucuccggcgucauggucuccaugaaggagcccggcugguacuccuucggcuucgagaucaaggacaagaagugcgacguccccugcaucggcaucgagaugguccacgacggcggcaaggagaccuggcacuccgccgccaccgccaucuacugccucaugggcuccggccagcuccucugggacaccgucaccggcgucgacauggcccucuga

SEQ ID NO: 125386 - RNA, 1401 nt, Artificial Sequence; identical to SEQ ID NO: 124671
  derived and/or modified CDS sequence (opt2) from neuraminidase__InfluenzaB__AGX18692

SEQ ID NO: 125387 - RNA, 1401 nt, Artificial Sequence
  derived and/or modified CDS sequence (opt2) from neuraminidase__InfluenzaB__AGX18703
augcuccccuccaccauccagacccucacccucuuccucaccuccggcggcguccuccucucccucuacgucuccgccucccucuccuaccuccucuacuccgacauccuccucaaguuccccuccaccgagaucaccgcccccaccaugccccucgacugcgccaacgccuccaacguccaggccgucaaccucuccgccaccaagggcgucacccuccuccuccccgagcccgaguggaccuacccccgccucuccugccccggcuccaccuuccagaaggcccuccucaucuccccccaccgcuucggcgagaccaagggcaacuccgccccccucaucauccgcgagcccuucaucgccugcggccccaaggagugcaagcacuucgcccucacccacuacgccgcccagcccggcggcuacuacaacggcacccgcggcgaccgcaacaagcuccgccaccucaucuccgucaagcucggcaagauccccaccgucgagaacuccaucuuccacauggccgccugguccggcuccgccugccacgacggcaaggaguggaccuacaucggcgucgacggccccgacaacaacgcccuccucaagaucaaguacggcgaggccuacaccgacaccuaccacuccuacgccaacaacauccuccgcacccaggaguccgccugcaacugcaucggcggcaacugcuaccucaugaucaccgacggcuccgccuccggcgucuccgagugccgcuuccucaagauccgcgagggccgcaucaucaaggagaucuuccccaccggccgcaucaagcacaccgaggagugcaccugcggcuucgccuccaacaagaccaucgagugcgccugccgcgacaacuccuacaccgccaagcgccccuucgucaagcucaacgucgagaccgacaccgccgagauccgccucaugugcaccgagaccuaccucgacaccccccgccccgacgacggcuccaucaccggccccugcgaguccaacggcgacaagggcuccggcggcaucaagggcggcuucguccaccagcgcauggccuccaagaucggccgcugguacucccgcaccauguccaagaccgagcgcaugggcaugggccucuacgucaaguacgacggcgaccccugggccgacuccgacgcccucgccuucuccggcgucauggucuccauggaggagcccggcugguacuccuucggcuucgagaucaaggacaagaagugcgacguccccugcaucggcaucgagaugguccacgacggcggcaaggagaccuggcacuccgccgccaccgccaucuacugccucaugggcuccggccagcuccucugggacaccgucaccggcgucaacauggcccucuga

SEQ ID NO: 125388 - RNA, 1401 nt, Artificial Sequence; identical to SEQ ID NO: 124671
  derived and/or modified CDS sequence (opt2) from neuraminidase__InfluenzaB__AGX18714

SEQ ID NO: 125389 - RNA, 1401 nt, Artificial Sequence; identical to SEQ ID NO: 124671
  derived and/or modified CDS sequence (opt2) from neuraminidase__InfluenzaB__AGX18725

SEQ ID NO: 125390 - RNA, 1401 nt, Artificial Sequence
  derived and/or modified CDS sequence (opt2) from neuraminidase__InfluenzaB__AGX18736
augcuccccuccaccauccagacccucacccucuuccucaccuccggcggcguccuccucucccucuacgucuccgccucccucuccuaccuccucuacuccgacauccuccucaaguucucccccaccgagaucaccgcccccaccaugccccucgacugcgccaacgccuccaacguccaggccgucaaccgcuccgccaccaagggcgucacccuccuccuccccgagcccgaguggaccuacccccgccucuccugccccggcuccaccuuccagaaggcccuccucaucuccccccaccgcuucggcgagaccaagggcaacuccgccccccucaucauccgcgagcccuucaucgccugcggccccaacgagugcaagcacuucgcccucacccacuacgccgcccagcccggcggcuacuacaacggcaccggcggcgaccgcaacaagcuccgccaccucaucuccgucaagcucggcaagauccccaccgucgagaacuccaucuuccacauggccgccugguccggcuccgccugccacgacggcaaggaguggaccuacaucggcgucgacggccccgacaacaacgcccuccucaagaucaaguacggcgaggccuacaccgacaccuaccacuccuacgccaacaagauccuccgcacccaggaguccgccugcaacugcaucggcggcaacugcuaccucaugaucaccgacggcuccgccuccggcgucuccgagugccgcuuccucaagauccgcgagggccgcaucaucaaggagaucuuccccaccggccgcgucaagcacaccgaggagugcaccugcggcuucgccuccaacaagaccaucgagugcgccugccgcgacaacuccuacaccgccaagcgccccuucgucaagcucaacgucgagaccgacaccgccgagauccgccucaugugcaccgacaccuaccucgacaccccccgccccgacgacggcuccaucaccggccccugcgaguccaacggcgacaagggcuccggcggcaucaagggcggcuucguccaccagcgcauggccuccaagaucggccgcugguacucccgcaccauguccaagaccgagcgcaugggcaugggccucuacgucaaguacgacggcgaccccugggccgacuccgacgcccucgccuucuccggcgucauggucuccaugaaggagcccggcugguacuccuucggcuucgagaucaaggacaagaagugcgacguccccugcaucggcaucgagaugguccacgacggcggcaaggagaccuggcacuccgccgccaccgccaucuacugccucaugggcuccggccagcuccucugggacaccgucaccggcgucgacauggcccucuga

SEQ ID NO: 125391 - RNA, 1401 nt, Artificial Sequence; identical to SEQ ID NO: 124671
  derived and/or modified CDS sequence (opt2) from neuraminidase__InfluenzaB__AGX18758

SEQ ID NO: 125392 - RNA, 1401 nt, Artificial Sequence; identical to SEQ ID NO: 124671
  derived and/or modified CDS sequence (opt2) from neuraminidase__InfluenzaB__AGX18769

SEQ ID NO: 125393 - RNA, 1401 nt, Artificial Sequence; identical to SEQ ID NO: 125130
  derived and/or modified CDS sequence (opt2) from neuraminidase__InfluenzaB__AGX18780

SEQ ID NO: 125394 - RNA, 1401 nt, Artificial Sequence; identical to SEQ ID NO: 124671
  derived and/or modified CDS sequence (opt2) from neuraminidase__InfluenzaB__AGX18791

SEQ ID NO: 125395 - RNA, 1401 nt, Artificial Sequence; identical to SEQ ID NO: 124671
  derived and/or modified CDS sequence (opt2) from neuraminidase__InfluenzaB__AGX18802

SEQ ID NO: 125396 - RNA, 1401 nt, Artificial Sequence
  derived and/or modified CDS sequence (opt2) from neuraminidase__InfluenzaB__AGX18813
augcuccccuccaccauccagacccucacccucuuccucaccuccggcggcguccuccucucccucuacgucuccgccucccucuccuaccuccucuacuccgacauccuccucaaguuccccuccaccgagaucaccgcccccaccaugccccucgacugcgccaacgccuccaacguccaggccgucaaccgcuccgccaccaagggcgucacccuccuccuccccgagcccgaguggaccuacccccgccucuccugccccggcuccaccuuccagaaggcccuccucaucuccccccaccgcuucggcgagaccaagggcaacuccgccccccucaucauccgcgagcccuucaucgccugcggccccaaggagugcaagcacuucgcccucacccacuacgccgcccagcccggcggcuacuacaacggcacccgcggcgaccgcaacaagcuccgccaccucaucuccgucaagcucggcaagauccccaccgucgagaacuccaucuuccacauggccgccugguccggcuccgccugccacgacggcaaggaguggaccuacaucggcgucgacggccccgacaacaacgcccuccucaagaucaaguacggcgaggccuacaccgacaccuaccacuccuacgccaacaacauccuccgcacccaggaguccgccugcaacugcaucggcggcaacugcuaccucaugaucaccgacggcuccgccuccggcgucuccgagugccgcuuccucaagauccgcgagggccgcaucaucaaggagaucuuccccaccggccgcaucaagcacaccgaggagugcaccugcggcuucgccuccaacaagaccaucgagugcgccugccgcgacaacuccuacaccgccaagcgccccuucgucaagcucaacgucgagaccgacaccgccgagauccgccucaugugcaccgagaccuaccucgacaccccccgccccgacgacggcuccaucaccggccccugcgaguccaacggcgacaagggcuccggcggcaucaagggcggcuucguccaccagcgcauggccuccaagaucggccgcugguacucccgcaccauguccaagaccgagcgcaugggcaugggccucuacgucaaguacgacggcgaccccugggccgacuccgacgcccucgucuucuccggcgucauggucuccauggaggagcccggcugguacuccuucggcuucgagaucaaggacaagaagugcgacguccccugcaucggcaucgagaugguccacgacggcggcaaggagaccuggcacuccgccgccaccgccaucuacugccucaugggcuccggccagcuccucugggacaccgucaccggcgucaacauggcccucuga

SEQ ID NO: 125397 - RNA, 1401 nt, Artificial Sequence; identical to SEQ ID NO: 125130
  derived and/or modified CDS sequence (opt2) from neuraminidase__InfluenzaB__AGX18824

SEQ ID NO: 125398 - RNA, 1401 nt, Artificial Sequence
  derived and/or modified CDS sequence (opt2) from neuraminidase__InfluenzaB__AGX18846
augcuccccuccaccauccagacccucacccucuuccucaccuccggcggcguccuccucucccucuacgucuccgccucccucuccuaccuccucuacuccgacauccuccucaaguucucccccaccgagaucaccgcccccaccaugccccucgacugcgccaacgccuccaacguccaggccgucaaccgcuccgccaccaagggcgucacccuccuccucuccgagcccgaguggaccuacccccgccucuccugccccggcuccaccuuccagaaggcccuccucaucuccccccaccgcuucggcgagaccaagggcaacuccgccccccucaucauccgcgagcccuucaucgccugcggccccaacgagugcaagcacuucgcccucacccacuacgccgcccagcccggcggcuacuacaacggcacccgcggcgaccgcaacaagcuccgccaccucaucuccgucaagcucggcaagauccccaccgucgagaacuccaucuuccacauggccgccugguccggcuccgccugccacgacggcaaggaguggaccuacaucggcgucgacggccccgacaacaacgcccuccucaagaucaaguacggcgaggccuacaccgacaccuaccacuccuacgccaacaagauccuccgcacccaggaguccgccugcaacugcaucggcggcaacugcuaccucaugaucaccgacggcuccgccuccggcgucuccgagugccgcuuccucaagauccgcgagggccgcaucaucaaggagaucuuccccaccggccgcgucaagcacaccgaggagugcaccugcggcuucgccuccaacaagaccaucgagugcgccugccgcgacaacuccuacaccgccaagcgccccuucgucaagcucaacgucgagaccgacaccgccgagauccgccucaugugcaccgacaccuaccucgacaccccccgccccgacgacggcuccaucaccggccccugcgaguccaacggcgacaagggcuccggcggcaucaagggcggcuucguccaccagcgcauggccuccaagaucggccgcugguacucccgcaccauguccaagaccgagcgcaugggcaugggccucuacgucaaguacgacggcgaccccugggccgacuccgacgcccucgccuucuccggcgucauggucuccaugaaggagcccggcugguacuccuucggcuucgagaucaaggacaagaagugcgacguccccugcaucggcaucgagaugguccacgacggcggcaaggagaccuggcacuccgccgccaccgccaucuacugccucaugggcuccggccagcuccucugggacaccgucaccggcgucgacauggcccucuga

SEQ ID NO: 125399 - RNA, 1401 nt, Artificial Sequence; identical to SEQ ID NO: 124671
  derived and/or modified CDS sequence (opt2) from neuraminidase__InfluenzaB__AGX18857

SEQ ID NO: 125400 - RNA, 1401 nt, Artificial Sequence; identical to SEQ ID NO: 125398
  derived and/or modified CDS sequence (opt2) from neuraminidase__InfluenzaB__AGX18868

SEQ ID NO: 125401 - RNA, 1401 nt, Artificial Sequence; identical to SEQ ID NO: 125398
  derived and/or modified CDS sequence (opt2) from neuraminidase__InfluenzaB__AGX18879

SEQ ID NO: 125402 - RNA, 1401 nt, Artificial Sequence
  derived and/or modified CDS sequence (opt2) from neuraminidase__InfluenzaB__AGX18890
augcuccccuccaccauccagacccucacccucuuccucaccuccggcggcguccuccucucccucuacgucuccgccucccucuccuaccuccucuacuccgacauccuccucaaguuccccuccaccgagaucaccgcccccaccaugccccucgacugcgccaacgccuccaacguccaggccgucaaccgcuccgccaccaagggcgucacccuccuccuccccgagcccgaguggaccuacccccgccucuccugccccggcuccaccuuccagaaggcccuccucaucuccccccaccgcuucggcgagaccaagggcaacuccgccccccucaucauccgcgagcccuucaucgccugcggccccaaggagugcaagcacuucgcccucacccacuacgccgcccagcccggcggcuacuacaacggcacccgcggcgaccgcaacaagcuccgccaccucaucuccgucaagcucggcaagauccccaccgucgagaacuccaucuuccacauggccgccugguccggcuccgccugccacgacggcaaggaguggaccuacaucggcgucgacggccccgacaacaacgcccuccucaagaucaaguacggcgaggccuacaccgacaccuaccacuccuacgccaacaacauccuccgcacccaggaguccgccugcaacugcaucggcggcaacugcuaccucaugaucaccgacggcuccgccuccggcgucuccgagugccgcuuccucaagauccgcgagggccgcaucaucaaggagaucuuccccaccggccgcaucaagcacaccgaggagugcaccugcggcuucgccuccaacaagaccaucgagugcgccugccgcgacaacuccuacaccgccaagcgccccuucgucaagcucaacgucgagaccgacaccgccgagauccgccucaugugcaccgagaccuaccucgacaccccccgccccgacgacggcuccaucaccggccccugcgaguccaacggcgacaagggcuccggcggcaucaagggcggcuucguccaccagcgcauggccuccaagaucggccgcugguacucccgcaccauguccaagaccgagcgcaugggcaugggccucuacgucaaguacgacggcgaccccugggccgacuccgacgcccucgccuucuccggcgucauggucuccauggaggagcccggcugguacuccuucggcuucgagaucaaggacaagaagugcgacguccccugcaucggcaucgagaugguccacgacggcggcaaggagaccuggcacuccgccgccaccaccaucuacugccucaugggcuccggccagcuccucugggacaccgucaccggcgucaacauggcccucuga

SEQ ID NO: 125403 - RNA, 1401 nt, Artificial Sequence; identical to SEQ ID NO: 124671
  derived and/or modified CDS sequence (opt2) from neuraminidase__InfluenzaB__AGX18912

SEQ ID NO: 125404 - RNA, 1401 nt, Artificial Sequence
  derived and/or modified CDS sequence (opt2) from neuraminidase__InfluenzaB__AGX18923
augcuccccuccaccauccagacccucacccucuuccucaccuccggcggcguccuccucucccucuacgucuccgccucccucuccuaccuccucuacuccgacauccuccucaaguucucccccaccgagaucaccgcccccaccaugccccucgacugcgccaacgccuccaacguccaggccgucaaccgcuccgccaccaagggcgucacccuccuccuccccgagcccgaguggaccuacccccgccucuccugccccggcuccaccuuccagaaggcccuccucaucuccccccaccgcuucggcgagaccaagggcaacuccgccccccucaucauccgcgagcccuucaucgccugcggccccaacgagugcaagcacuucgcccucacccacuacgccgcccagcccggcggcuacuacaaccgcacccgcggcgaccgcaacaagcuccgccaccucaucuccgucaagcucggcaagauccccaccgucgagaacuccaucuuccacauggccgccugguccggcuccgccugccacgacggcaaggaguggaucuacaucggcgucgacggccccgacaacaacgcccuccucaagaucaaguacggcgaggccuacaccgacaccuaccacuccuacgccaacaagauccuccgcacccaggaguccgccugcaacugcaucggcggcaacugcuaccucaugaucaccgacggcuccgccuccggcgucuccgagugccgcuuccucaagauccgcgagggccgcaucaucaaggagaucuuccccaccggccgcgucaagcacaccgaggagugcaccugcggcuucgccuccaacaagaccaucgagugcgccugccgcgacaacuccuacaccgccaagcgccccuucgucaagcucaacgucgagaccgacaccgccgagauccgccucaugugcaccgacaccuaccucgacaccccccgccccgacgacggcuccaucaccggccccugcgaguccaacggcgacaagggcuccggcggcaucaagggcggcuucguccaccagcgcauggccuccaagaucggccgcugguacucccgcaccauguccaagaccgagcgcaugggcaugggccucuacgucaaguacgacggcgaccccugggccgacuccgacgcccucgccuucuccggcgucauggucuccaugaaggagcccggcugguacuccuucggcuucgagaucaaggacaagaagugcgacguccccugcaucggcaucgagaugguccacgacggcggcaaggagaccuggcacuccgccgccaccgccaucuacugccucaugggcuccggccagcuccucugggacaccgucaccggcgucgacauggcccucuga

SEQ ID NO: 125405 - RNA, 1401 nt, Artificial Sequence; identical to SEQ ID NO: 124671
  derived and/or modified CDS sequence (opt2) from neuraminidase__InfluenzaB__AGX18934

SEQ ID NO: 125406 - RNA, 1401 nt, Artificial Sequence
  derived and/or modified CDS sequence (opt2) from neuraminidase__InfluenzaB__AGX18956
augcuccccuccaccauccagacccucacccucuuccucaccuccggcggcguccuccucucccucuacgucuccgccucccucuccuaccuccucuacuccgacauccuccucaaguucucccccaccgagaucaccgcccccaccaugccccucgacugcgccaacgccuccaacguccaggccgucaaccgcuccgccaccaagggcgucacccuccuccuccccgagcccgaguggaccuacccccgccucuccugccccggcuccaccuuccagaaggcccuccucaucuccccccaccgcuucggcgagaccaagggcaacuccgccccccucaucauccgcgagcccuucaucgccugcggccccaacgagugcaagcacuucgcccucacccacuacgccgcccagcccggcggcuacuacaacggcacccgcggcgaccgcaacaagcuccgccaccucaucuccgucaagcucggcaagauccccaccgucgagaacuccaucuuccacgucgccgccugguccggcuccgccugccacgacggcaaggaguggaccuacaucggcgucgacggccccgacaacaacgcccuccucaagaucaaguacggcgaggccuacaccgacaccuaccacuccuacgccaacaagauccuccgcacccaggaguccgccugcaacugcaucggcggcaacugcuaccucaugaucaccgacggcuccgccuccggcgucuccgagugccgcuuccucaagauccgcgagggccgcaucaucaaggagaucuuccccaccggccgcgucaagcacaccgaggagugcaccugcggcuucgccuccaacaagaccaucgagugcgccugccgcgacaacuccuacaccgccaagcgccccuucgucaagcucaacgucgagaccgacaccgccgagauccgccucaugugcaccgacaccuaccucgacaccccccgccccgacgacggcuccaucaccggccccugcgaguccaacggcgacaagggcuccggcggcaucaagggcggcuucguccaccagcgcauggccuccaagaucggccgcugguacucccgcaccauguccaagaccgagcgcaugggcaugggccucuacgucaaguacgacggcgaccccugggccgacuccgacgcccucgccuucuccggcgucauggucuccaugaaggagcccggcugguacuccuucggcuucgagaucaaggacaagaagugcgacguccccugcaucggcaucgagaugguccacgacggcggcaaggagaccuggcacuccgccgccaccgccaucuacugccucaugggcuccggccagcuccucugggacaccgucaccggcgucgacauggcccucuga

SEQ ID NO: 125407 - RNA, 1401 nt, Artificial Sequence
  derived and/or modified CDS sequence (opt2) from neuraminidase__InfluenzaB__AGX18967
augcuccccuccaccauccagacccucacccucuuccucaccuccggcggcguccuccucucccucuacgucuccgccucccucuccuaccuccucuacuccgacauccuccucaaguucucccccaccgagaucaccgcccccaccaugccccucgacugcgccaacgccuccaacguccaggccgucaaccgcuccgccaccaagggcgucaccccccuccuccccgagcccgaguggaccuacccccgccucuccugccccggcuccaccuuccagaaggcccuccucaucuccccccaccgcuucggcgagaccaagggcaacuccgccccccucaucauccgcgagcccuucaucgccugcggccccaacgagugcaagcacuucgcccucacccacuacgccgcccagcccggcggcuacuacaacggcacccgcggcgaccgcaacaagcuccgccaccucaucuccgucaagcucggcaagauccccaccgucgagaacuccaucuuccacauggccgccugguccggcuccgccugccacgacggcaaggaguggaccuacaucggcgucgacggccccgacaacaacgcccuccucaagaucaaguacggcgaggccuacaccgacaccuaccacuccuacgccaacaagauccuccgcacccaggaguccgccugcaacugcaucggcggcaacugcuaccucaugaucaccgacggcuccgccuccggcgucuccgagugccgcuuccucaagauccgcgagggccgcaucaucaaggagaucuuccccaccggccgcgucaagcacaccgaggagugcaccugcggcuucgccuccaacaagaccaucgagugcgccugccgcgacaacuccuacaccgccaagcgccccuucgucaagcucaacgucgagaccgacaccgccgagauccgccucaugugcaccgacaccuaccucgacaccccccgccccgacgacggcuccaucaccggccccugcgaguccaacggcgacaagggcuccggcggcaucaagggcggcuucguccaccagcgcauggccuccaagaucggccgcugguacucccgcaccauguccaagaccgagcgcaugggcaugggccucuacgucaaguacgacggcgaccccugggccgacuccgacgcccucgccuucuccggcgucauggucuccaugaaggagcccggcugguacuccuucggcuucgagaucaaggacaagaagugcgacguccccugcaucggcaucgagaugguccacgacggcggcaaggagaccuggcacuccgccgccaccgccaucuacugccucaugggcuccggccagcuccucugggacaccgucaccggcgucgacauggcccucuga

SEQ ID NO: 125408 - RNA, 1401 nt, Artificial Sequence; identical to SEQ ID NO: 125130
  derived and/or modified CDS sequence (opt2) from neuraminidase__InfluenzaB__AGX18978

SEQ ID NO: 125409 - RNA, 1401 nt, Artificial Sequence
  derived and/or modified CDS sequence (opt2) from neuraminidase__InfluenzaB__AGX18989
augcuccccuccaccauccagacccucacccucuuccucaccuccggcggcguccuccucucccucuacgucuccgccucccucuccuaccuccucuacuccgacauccuccucaaguucucccccaccgagaucaccgcccccaccaugccccucgacuacgccaacgccuccaacguccaggccgucaaccgcuccgccaccaagggcgucacccuccuccuccccgagcccgaguggaccuacccccgccucuccugccccggcuccaccuuccagaaggcccuccucaucuccccccaccgcuucggcgagaccaagggcaacuccgccccccucaucauccgcgagcccuucaucgccugcggccccaacgagugcaagcacuucgcccucacccacuacgccgcccagcccggcggcuacuacaacggcacccgcggcgaccgcaacaagcuccgccaccucaucuccgucaagcucggcaagauccccaccgucgagaacuccaucuuccacauggccgccugguccggcuccgccugccacgacggcaaggaguggaccuacaucggcgucgacggccccgacaacaacgcccuccucaagaucaaguacggcgaggccuacaccgacaccuaccacuccuacgccaacaagauccuccgcacccaggaguccgccugcaacugcaucggcggcaacugcuaccucaugaucaccgacggcuccgccuccggcgucuccgagugccgcuuccucaagauccgcgagggccgcaucaccaaggagaucuuccccaccggccgcgucaagcacaccgaggagugcaccugcggcuucgccuccaacaagaccaucgagugcgccugccgcgacaacuccuacaccgccaagcgccccuucgucaagcucaacgucgagaccgacaccgccgagauccgccucaugugcaccgacaccuaccucgacaccccccgccccgacgacggcuccaucaccggccccugcgaguccaacggcgacaagggcuccggcggcaucaagggcggcuucguccaccagcgcauggccuccaagaucggccgcugguacucccgcaccauguccaagaccgagcgcaugggcaugggccucuacgucaaguacgacggcgaccccugggccgacuccgacgcccucgccuucuccggcgucauggucuccaugaaggagcccggcugguacuccuucggcuucgagaucaaggacaagaagugcgacguccccugcaucggcaucgagaugguccacgacggcggcaaggagaccuggcacuccgccgccaccgccaucuacugccucaugggcuccggccagcuccucugggacaccgucaccggcgucgacauggcccucuga

SEQ ID NO: 125410 - RNA, 1401 nt, Artificial Sequence
  derived and/or modified CDS sequence (opt2) from neuraminidase__InfluenzaB__AGX19000
augcuccccuccaccauccagacccucacccucuuccucaccuccggcggcguccuccucucccucuacgucuccgccucccucuccuaccuccucuacuccgacauccuccucaaguucucccccaccgagaucaccgcccccaccaugccccucgacugcgccaacgccuccaacguccacgccgucaaccgcuccgccaccaagggcgucacccuccuccuccccgagcccgaguggaccuacccccgccucuccugccccggcuccaccuuccagaaggcccuccucaucuccccccaccgcuucggcgagaccaagggcaacuccgccccccucaucauccgcgagcccuucaucgccugcggccccaacgagugcaagcacuucgcccucaccuacuacgccgcccagcccggcggcuacuacaacggcacccgcggcgaccgcaacaagcuccgccaccucaucuccgucaagcucggcaagauccccaccgucgagaacuccaucuuccacauggccgccugguccggcuccgccugccacgacggcaaggaguggaccuacaucggcgucgacggccccgacaacaacgcccuccucaagaucaaguacggcgaggccuacaccgacaccuaccacuccuacgccaacaacauccuccgcacccaggaguccgccugcaacugcaucggcggcaacugcuaccucaugaucaccgacggcuccgccuccggcgucuccgagugccgcuuccucaagauccgcgagggccgcaucaucaaggagaucuuccccaccggccgcgucaagcacaccgaggagugcaccugcggcuucgccuccaacaagaccaucgagugcgccugccgcgacaacuccuacaccgccaagcgccccuucgucaagcucaacgucgagaccgacaccgccgagauccgccucaugugcaccgacaccuaccucgacaccccccgccccgacgacggcuccaucaccggccccugcgaguccaacggcgacaagggcuccggcggcaucaagggcggcuucguccaccagcgcauggccuccaagaucggccgcugguacucccgcaccauguccaagaccgagcgcaugggcaugggccucuacgucaaguacgacggcgaccccugggccgacuccgacgcccucgccuucuccggcgucauggucuccaugaaggagcccggcugguacuccuucggcuucgagaucaaggacaagaagugcgacguccccugcaucggcaucgagaugguccacgacggcggcaaggagaccuggcacuccgccgccaccgccaucuacugccucaugggcuccggccagcuccucugggacaccgucaccggcgucgacauggcccucuga

SEQ ID NO: 125411 - RNA, 1401 nt, Artificial Sequence; identical to SEQ ID NO: 124671
  derived and/or modified CDS sequence (opt2) from neuraminidase__InfluenzaB__AGX19011

SEQ ID NO: 125412 - RNA, 1401 nt, Artificial Sequence; identical to SEQ ID NO: 124671
  derived and/or modified CDS sequence (opt2) from neuraminidase__InfluenzaB__AGX19022

SEQ ID NO: 125413 - RNA, 1401 nt, Artificial Sequence
  derived and/or modified CDS sequence (opt2) from neuraminidase__InfluenzaB__AGX19033
augcuccccuccaccauccagacccucacccucuuccucaccuccggcggcguccuccucucccucuacgucuccgccucccucuccuaccuccucuacuccgacauccuccucaaguuccccuccaccgagaucaccgcccccaccaugccccucaacugcgccaacgccuccaacguccaggccgucaaccgcuccgccaccaagggcgucacccuccuccuccccgagcccgaguggaccuacccccgccucuccugccccggcuccaccuuccagaaggcccuccucaucuccccccaccgcuucggcgagaccaagggcaacuccgccccccucaucauccgcgagcccuucaucgccugcggccccaaggagugcaagcacuucgcccucacccacuacgccgcccagcccggcggcuacuacaacggcacccgcggcgaccgcaacaagcuccgccaccucaucuccgucaagcucggcaagauccccaccgucgagaacuccaucuuccacauggccgccugguccggcuccgccugccacgacggcaaggaguggaccuacaucggcgucgacggccccgacaacaacgcccuccucaagaucaaguacggcgaggccuacaccgacaccuaccacuccuacgccaacaacauccuccgcacccaggaguccgccugcaacugcaucggcggcaacugcuaccucaugaucaccgacggcuccgccuccggcgucuccgagugccgcuuccucaagauccgcgagggccgcaucaucaaggagaucuuccccaccggccgcaucaagcacaccgaggagugcaccugcggcuucgccuccaacaagaccaucgagugcgccugccgcgacaacuccuacaccgccaagcgccccuucgucaagcucaacgucgagaccgacaccgccgagauccgccucaugugcaccgagaccuaccucgacaccccccgccccgacgacggcuccaucaccggccccugcgaguccaacggcgacaagggcuccgagggcaucaagggcggcuucguccaccagcgcauggccuccaagaucggccgcugguacucccgcaccauguccaagaccgagcgcaugggcaugggccucuacgucaaguacgacggcgaccccugggccgacuccgacgcccucgccuucuccggcgucauggucuccauggaggagcccggcugguacuccuucggcuucgagaucaaggacaagaagugcgacguccccugcaucggcaucgagaugguccacgacggcggcaaggagaccuggcacuccgccgccaccgccaucuacugccucaugggcuccggccagcuccucugggacaccgucaccggcgucaacauggcccucuga

SEQ ID NO: 125414 - RNA, 1401 nt, Artificial Sequence; identical to SEQ ID NO: 124671
  derived and/or modified CDS sequence (opt2) from neuraminidase__InfluenzaB__AGX19044

SEQ ID NO: 125415 - RNA, 1401 nt, Artificial Sequence; identical to SEQ ID NO: 124671
  derived and/or modified CDS sequence (opt2) from neuraminidase__InfluenzaB__AGX19055

SEQ ID NO: 125416 - RNA, 1401 nt, Artificial Sequence
  derived and/or modified CDS sequence (opt2) from neuraminidase__InfluenzaB__AGX19066
augcuccccuccaccauccagacccucacccucuuccucaccuccggcggcguccuccucucccucuacgucuccgccucccucuccuaccuccucuacuccgacauccuccucaaguucucccccaccgagaucaccgcccccaccaugccccucgacugcgccaacgccuccaacguccaggccgucaaccgcuccgccaccaagggcgucacccuccuccuccccgagcccgaguggaccuacccccgccucuccugccccggcuccaccuuccagaaggcccuccucaucuccccccaccgcuucggcgagaccaagggcaacuccgccccccucaucauccgcgagcccuucaucgccugcggccccaacgagugcaagcacuucgcccucacccacuacgccgcccagcccggcggcuacuacaacggcacccgcggcgaccgcaacaagcuccgccaccucaucuccgucaagcucggcaagauccccaccgucgagaacuccaucuuccacauggccgccugguccggcuccgccugccacgacggcaaggaguggaucuacaucggcgucgacggccccgacaacaacgcccuccucaagaucaaguacggcgaggccuacaccgacaccuaccacuccuacgccaacaagauccuccgcacccaggaguccgccugcaacugcaucggcggcaacugcuaccucaugaucaccgacggcuccgccuccggcgucuccgagugccgcuuccucaagauccgcgagggccgcaucaucaaggagaucuuccccaccggccgcgucaagcacaccgaggagugcaccugcggcuucgccuccaacaagaccaucgagugcgccugccgcgacaacuccuacaccgccaagcgccccuucgucaagcucaacgucgagaccgacaccgccgagauccgccucaugugcaccgacaccuaccucgacaccccccgccccgacgacggcuccaucaccggccccugcgaguccaacggcgacaagggcuccggcggcaucaagggcggcuucguccaccagcgcauggccuccaagaucggccgcugguacucccgcaccauguccaagaccgagcgcaugggcaugggccucuacgucaaguacgacggcgaccccugggccgacuccgacgcccucgccuucuccggcgucauggucuccaugaaggagcccggcugguacuccuucggcuucgagaucaaggacaagaagugcgacguccccugcaucggcaucgagaugguccacgacggcggcaaggagaccuggcacuccgccgccaccgccaucuacugccucaugggcuccggccagcuccucugggacaccgucaccggcgucgacauggcccucuga

SEQ ID NO: 125417 - RNA, 1401 nt, Artificial Sequence
  derived and/or modified CDS sequence (opt2) from neuraminidase__InfluenzaB__AGX19077
augcuccccuccaccauccagacccucacccucuuccucaccuccggcggcguccuccucucccucuacgucuccgccucccucuccuaccuccucuacuccgacauccuccucaaguucacccccaccgagaucaccgcccccaccaugccccucgacugcgccaacgccuccaacguccaggccgucaaccgcuccgccaccaagggcgucaccccccuccuccccgagcccgaguggaccuacccccgccucuccugccccggcuccaccuuccagaaggcccuccucaucuccccccaccgcuucggcgagaccaagggcaacuccgccccccucaucauccgcgagcccuucaucgccugcggccccaacgagugcaagcacuucgcccucacccacuacgccgcccagcccggcggcuacuacaacggcacccgcggcgaccgcaacaagcuccgccaccucaucuccgucaagcucggcaagauccccaccgucgagaacuccaucuuccacauggccgccugguccggcuccgccugccacgacggcaaggaguggaccuacaucggcgucgacggccccgacaacaacgcccuccucaagaucaaguacggcgaggccuacaccgacaccuaccacuccuacgccaacaagauccuccgcacccaggaguccgccugcaacugcaucggcggcaacugcuaccucaugaucaccgacggcuccgccuccggcgucuccgagugccgcuuccucaagauccgcgagggccgcaucaucaaggagaucuuccccaccggccgcgucaagcacaccgaggagugcaccugcggcuucgccuccaacaagaccaucgagugcgccugccgcgacaacuccuacaccgccaagcgccccuucgucaagcucaacgucgagaccgacaccgccgagauccgccucaugugcaccgacaccuaccucgacaccccccgccccgacgacggcuccaucaccggccccugcgaguccaacggcgacaagggcuccggcggcaucaagggcggcuucguccaccagcgcauggccuccaagaucggccgcugguacucccgcaccauguccaagaccgagcgcaugggcaugggccucuacgucaaguacgacggcgaccccugggccgacuccgacgcccucgccuucuccggcgucauggucuccaugaaggagcccggcugguacuccuucggcuucgagaucaaggacaagaagugcgacguccccugcaucggcaucgagaugguccacgacggcggcaaggagaccuggcacuccgccgccaccgccaucuacugccucaugggcuccggccagcuccucugggacaccgucaccggcgucgacauggcccucuga

SEQ ID NO: 125418 - RNA, 1401 nt, Artificial Sequence
  derived and/or modified CDS sequence (opt2) from neuraminidase__InfluenzaB__AGX19088
augcuccccuccaccauccagacccucacccucuuccucaccuccggcggcguccuccucucccucuacgucuccgccucccucuccuaccuccucuacuccgacauccuccucaaguucucccccaccgagaucaccgcccccaccaugccccucgacugcgccaacgccuccaacguccaggccgucaaccgcuccgccaccaagggcgucacccuccuccuccccgagcccgaguggaccuacccccgccucuccugccccggcuccaccuuccagaaggcccuccucaucuccccccaccgcuucggcgagaccaagggcaacuccgccccccucaucauccgcgagcccuucaucgccugcggccccaacgagugcaagcacuucgcccucacccacuacgccgcccagcccggcggcuacuacaacggcacccgcggcgaccgcaacaagcuccgccaccucaucuccgucaagcucggcaagauccccaccgucgagaacuccaucuuccacauggccgccugguccggcuccgccugccacgacggcaaggaguggaccuacaucggcgucgacggccccgacaacaacgcccuccucaagaucaaguacggcgaggccuacaccgacaccuaccacuccuacgccaacaagauccuccgcacccaggaguccgccugcaacugcaucggcggcaacugcuaccucaugaucaccgacggcuccgccuccggcgucuccgagugccgcuuccucaagauccgcgagggccgcaucgucaaggagaucuuccccaccggccgcgucaagcacaccgaggagugcaccugcggcuucgccuccaacaagaccaucgagugcgccugccgcgacaacuccuacaccgccaagcgccccuucgucaagcucaacgucgagaccgacaccgccgagauccgccucaugugcaccgacaccuaccucgacaccccccgccccgacgacggcuccaucaccggccccugcgaguccaacggcgacaagggcuccggcggcaucaagggcggcuucguccaccagcgcauggccuccaagaucggccgcugguacucccgcaccauguccaagaccgagcgcaugggcaugggccucuacgucaaguacgacggcgaccccugggccgacuccgacgcccucgccuucuccggcgucauggucuccaugaaggagcccggcugguacuccuucggcuucgagaucaaggacaagaagugcgacguccccugcaucggcaucgagaugguccacgacggcggcaaggagaccuggcacuccgccgccaccgccaucuacugccucaugggcuccggccagcuccucugggacaccgucaccggcgucgacauggcccucuga

SEQ ID NO: 125419 - RNA, 1401 nt, Artificial Sequence; identical to SEQ ID NO: 124671
  derived and/or modified CDS sequence (opt2) from neuraminidase__InfluenzaB__AGX19099

SEQ ID NO: 125420 - RNA, 1401 nt, Artificial Sequence
  derived and/or modified CDS sequence (opt2) from neuraminidase__InfluenzaB__AGX19110
augcuccccuccaccauccagacccucacccucuuccucaccuccggcggcguccuccucucccucuacgucuccgccucccucuccuaccuccucuacuccgacauccuccucaaguuccccuccaccgagaucaccgcccccaccaugccccucgacugcgccaacgccuccaacguccaggccgucaaccgcuccgccaccaagggcgucacccuccuccuccccgagcccgaguggaccuacccccgccucuccugccccggcuccaccuuccagaaggcccuccucaucuccccccaccgcuucggcgagaccaagggcaacuccgccccccucaucauccgcgagcccuucaucgccugcggccccaaggagugcaagcacuucgcccucacccacuacgccgcccagcccggcggcuacuacaacggcacccgcggcgaccgcaacaagcuccgccaccucaucuccgucaagcucggcaagauccccaccgucgagaacuccaucuuccacauggccgccugguccggcuccgccugccacgacggcaaggaguggaccuacaucggcgucgacggccccgacaacaacgcccuccucaagaucaaguacggcgaggccuacaccgacaccuaccacuccuacgccaacaacauccuccgcacccaggaguccgccugcaacugcaucggcggcaacugcuaccucaugaucaccgacggcuccgccuccggcgucuccgagugccgcuuccucaagauccgcgagggccgcaucaucaaggagaucuuccccaccggccgcaucaagcacaccgaggagugcaccugcggcuucgccuccaacaagaccaucgagugcgccugccgcgacaacuccuacaccgccaagcgccccuucaucaagcucaacgucgagaccgacaccgccgagauccgccucaugugcaccgagaccuaccucgacaccccccgccccgacgacggcuccaucaccggccccugcgaguccaacggcgacaagggcuccggcggcaucaagggcggcuucguccaccagcgcauggccuccaagaucggccgcugguacucccgcaccauguccaagaccgagcgcaugggcaugggccucuacgucaaguacgacggcgaccccugggccgacuccgacgcccucgucuucuccggcgucauggucuccauggaggagcccggcugguacuccuucggcuucgagaucaaggacaagaagugcgacguccccugcaucggcaucgagaugguccacgacggcggcaaggagaccuggcacuccgccgccaccgccaucuacugccucaugggcuccggccagcuccucugggacaccgucaccggcgucaacauggcccucuga

SEQ ID NO: 125421 - RNA, 1401 nt, Artificial Sequence
  derived and/or modified CDS sequence (opt2) from neuraminidase__InfluenzaB__AGX19121
augcuccccuccaccacccagacccucacccucuuccucaccuccggcggcguccuccucucccucuacgucuccgccucccucuccuaccuccucuacuccgacauccuccucaaguucucccccaccgagaucaccgcccccaccaugccccucgacugcgccaacgccuccaacguccaggccgucaaccgcuccgccaccaagggcgucacccuccuccuccccgagcccgaguggaccuacccccgccucuccugccccggcuccaccuuccagaaggcccuccucaucuccccccaccgcuucggcgagaccaagggcaacuccgccccccucaucauccgcgagcccuucaucgccugcggccccaacgagugcaagcacuucgcccucacccacuacgccgcccagcccggcggcuacuacaacggcacccgcggcgaccgcaacaagcuccgccaccucaucuccgucaagcucggcaagauccccaccgucgagaacuccaucuuccacauggccgccugguccggcuccgccugccacgacggcaaggaguggaccuacaucggcgucgacggccccgacaacaacgcccuccucaagaucaaguacggcgaggccuacaccgacaccuaccacuccuacgccaacaagauccuccgcacccaggaguccgccugcaacugcaucggcggcaacugcuaccucaugaucaccgacggcuccgccuccggcgucuccgagugccgcuuccucaagauccgcgagggccgcaucaucaaggagaucuuccccaccggccgcgucaagcacaccgaggagugcaccugcggcuucgccuccaacaagaccaucgagugcgccugccgcgacaacuccuacaccgccaagcgccccuucgucaagcucaacgucgagaccgacaccgccgagauccgccucaugugcaccgacaccuaccucgacaccccccgccccgacgacggcuccaucaccggccccugcgaguccaacggcgacaagggcuccggcggcaucaagggcggcuucguccaccagcgcauggccuccaagaucggccgcugguacucccgcaccauguccaagaccgagcgcaugggcaugggccucuacgucaaguacgacggcgaccccugggccgacuccgacgcccucgccuuccgcggcgucauggucuccaugaaggagcccggcugguacuccuucggcuucgagaucaaggacaagaagugcgacguccccugcaucggcaucgagaugguccacgacggcggcaaggagaccuggcacuccgccgccaccgccaucuacugccucaugggcuccggccagcuccucugggacaccgucaccggcgucgacauggcccucuga

SEQ ID NO: 125422 - RNA, 1401 nt, Artificial Sequence; identical to SEQ ID NO: 125305
  derived and/or modified CDS sequence (opt2) from neuraminidase__InfluenzaB__AGX19132

SEQ ID NO: 125423 - RNA, 1401 nt, Artificial Sequence; identical to SEQ ID NO: 125409
  derived and/or modified CDS sequence (opt2) from neuraminidase__InfluenzaB__AGX19143

SEQ ID NO: 125424 - RNA, 1401 nt, Artificial Sequence
  derived and/or modified CDS sequence (opt2) from neuraminidase__InfluenzaB__AGX19154
augcuccccuccaccauccagacccucacccucuuccucaccuccggcggcguccuccucucccucuacgucuccgccucccucuccuaccuccucuacuccaacauccuccucaaguucucccccaccgagaucaccgcccccaccaugccccucgacugcgccaacgccuccaacguccacgccgucaaccgcuccgccaccaagggcgucacccuccuccuccccgagcccgaguggaccuacccccgccucuccugccccggcuccaccuuccagaaggcccuccucaucuccccccaccgcuucggcgagaccaagggcaacuccgccccccucaucauccgcgagcccuucaucgccugcggccccaacgagugcaagcacuucgcccucacccacuacgccgcccagcccggcggcuacuacaacggcacccgcggcgaccgcaacaagcuccgccaccucaucuccgucaagcucggcaagauccccaccgucgagaacuccaucuuccacauggccgccugguccggcuccgccugccacgacggcaaggaguggaccuacaucggcgucgacggccccgacaacaacgcccuccucaagaucaaguacggcgaggccuacaccgacaccuaccacuccuacgccaacaacauccuccgcacccaggaguccgccugcaacugcaucggcggcaacugcuaccucaugaucaccgacggcuccgccuccggcgucuccgagugccgcuuccucaagauccgcgagggccgcaucaucaaggagaucuuccccaccggccgcgucaagcacaccgaggagugcaccugcggcuucgccuccaacaagaccaucgagugcgccugccgcgacaacuccuacaccgccaagcgccccuucgucaagcucaacgucgagaccgacaccgccgagauccgccucaugugcaccgacaccuaccucgacaccccccgccccgacgacggcuccaucaccggccccugcgaguccaacggcgacaagggcuccggcggcaucaagggcggcuucguccaccagcgcauggccuccaagaucggccgcugguacucccgcaccauguccaagaccgagcgcaugggcaugggccucuacgucaaguacgacggcgaccccugggccgacuccgacgcccucgccuucuccggcgucauggucuccaugaaggagcccggcugguacuccuucggcuucgagaucaaggacaagaagugcgacguccccugcaucggcaucgagaugguccacgacggcggcaaggagaccuggcacuccgccgccaccgccaucuacugccucaugggcuccggccagcuccucugggacaccgucaccggcgucgacauggcccucuga

SEQ ID NO: 125425 - RNA, 1401 nt, Artificial Sequence; identical to SEQ ID NO: 124671
  derived and/or modified CDS sequence (opt2) from neuraminidase__InfluenzaB__AGX19165

SEQ ID NO: 125426 - RNA, 1401 nt, Artificial Sequence
  derived and/or modified CDS sequence (opt2) from neuraminidase__InfluenzaB__AGX19176
augcuccccuccaccauccagacccucacccucuuccucaccuccggcggcguccuccucucccucuacgucuccgccucccucuccuaccuccucuacuccgacauccuccucaaguucucccccaccgagaucaccgcccccaccaugccccucgacugcgccaacgccuccaacguccacgccgucaaccgcuccgccaccaagggcgucacccuccuccuccccgagcccgaguggaccuacccccgccucuccugccccggcuccaccuuccagaaggcccuccucaucuccccccaccgcuucggcgagaccaagggcaacuccgccccccucaucauccgcgagcccuucaucgccugcggccccaacgagugcaagcacuucgcccucacccacuacgccgcccagcccggcggcuacuacaaccgcacccgcggcgaccgcaacaagcuccgccaccucaucuccgucaagcucggcaagauccccaccgucgagaacuccaucuuccacauggccgccugguccggcuccgccugccacgacggcaaggaguggaccuacaucggcgucgacggccccgacaacaacgcccuccucaagaucaaguacggcgaggccuacaccgacaccuaccacuccuacgccaacaacauccuccgcacccaggaguccgccugcaacugcaucggcggcaacugcuaccucaugaucaccgacggcuccgccuccggcgucuccgagugccgcuuccucaagauccgcgagggccgcaucaucaaggagaucuuccccaccggccgcgucaagcacaccgaggagugcaccugcggcuucgccuccaacaagaccaucgagugcgccugccgcgacaacuccuacaccgccaagcgccccuucgucaagcucaacgucgagaccgacaccgccgagauccgccucaugugcaccgacaccuaccucgacaccccccgccccgacgacggcuccaucaccggccccugcgaguccaacggcgacaagggcuccggcggcaucaagggcggcuucguccaccagcgcauggccuccaagaucggccgcugguacucccgcaccauguccaagaccgagcgcaugggcaugggccucuacgucaaguacgacggcgaccccugggccgacuccgacgcccucgccuucuccggcgucauggucuccaugaaggagcccggcugguacuccuucggcuucgagaucaaggacaagaagugcgacguccccugcaucggcaucgagaugguccacgacggcggcaaggagaccuggcacuccgccgccaccgccaucuacugccucaugggcuccggccagcuccucugggacaccgucaccggcgucgacauggcccucuga

SEQ ID NO: 125427 - RNA, 1401 nt, Artificial Sequence
  derived and/or modified CDS sequence (opt2) from neuraminidase__InfluenzaB__AGX19187
augcuccccuccaccauccagacccucacccucuuccucaccuccggcggcguccuccucucccucuacgucuccgccucccucuccuaccuccucuacuccgacauccuccucaaguucucccccaccgagaucaccgcccccaccaugccccucgacugcgccaacgccuccaacguccaggccgucaaccgcuccgccaccaagggcgucacccuccuccuccccgagcccgaguggaccuacccccgccucuccugcuccggcuccaccuuccagaaggcccuccucaucuccccccaccgcuucggcgagaccaagggcaacuccgccccccucaucauccgcgagcccuucaucgccugcggccccaacgagugcaagcacuucgcccucacccacuacgccgcccagcccggcggcuacuacaacggcacccgcggcgaccgcaacaagcuccgccaccucaucuccgucaagcucggcaagauccccaccgucgagaacuccaucuuccacauggccgccugguccggcuccgccugccacgacggcaaggaguggaccuacaucggcgucgacggccccgacaacaacgcccuccucaagaucaaguacggcgaggccuacaccgacaccuaccacuccuacgccaacaagauccuccgcacccaggaguccgccugcaacugcaucggcggcaacugcuaccucaugaucaccgacggcuccgccuccggcgucuccgagugccgcuuccucaagauccgcgagggccgcaucaucaaggagaucuuccccaccggccgcgucaagcacaccgaggagugcaccugcggcuucgccuccaacaagaccaucgagugcgccugccgcgacaacuccuacaccgccaagcgccccuucgucaagcucaacgucgagaccgacaccgccgagauccgccucaugugcaccgacaccuaccucgacaccccccgccccgacgacggcuccaucaccggccccugcgaguccaacggcgacaagggcuccggcggcaucaagggcggcuucguccaccagcgcauggccuccaagaucggccgcugguacucccgcaccauguccaagaccgagcgcaugggcaugggccucuacgucaaguacgacggcgaccccugggccgacuccgacgcccucgccuucuccggcgucauggucuccaugaaggagcccggcugguacuccuucggcuucgagaucaaggacaagaagugcgacguccccugcaucggcaucgagaugguccacgacggcggcaaggagaccuggcacuccgccgccaccgccaucuacugccucaugggcuccggccagcuccucugggacaccgucaccggcgucgacauggcccucuga

SEQ ID NO: 125428 - RNA, 1401 nt, Artificial Sequence
  derived and/or modified CDS sequence (opt2) from neuraminidase__InfluenzaB__AGX19198
augcuccccuccaccauccagacccucacccucuuccucaccuccggcggcguccuccucucccucuacgucuccgccucccucuccuaccuccucuacuccgacauccuccucaaguucucccccaccgagaucaccgcccccaccaugccccucgacuacgccaacgccuccaacguccaggccgucaaccgcuccgccaccaagggcgucacccuccuccuccccgagcccgaguggaccuacccccgccucuccugccccggcuccaccuuccagaaggcccuccucaucuccccccaccgcuucggcgagaccaagggcaacuccgccccccucaucauccgcgagcccuucaucgccugcggccccaacgagugcaagcacuucgcccucacccacuacgccgcccagcccggcggcuacuacaacggcacccgcggcgaccgcaacaagcuccgccaccucaucuccgucaagcucggcaagauccccaccgucgagaacuccaucuuccacauggccgccugguccggcuccgccugccacgacggcaaggaguggaccuacaucggcgucgacggccccgacaacaacgcccuccucaagaucaaguacggcgaggccuacaccgacaccuaccacuccuacgccaacaagauccuccgcacccaggaguccgccugcaacugcaucggcggcaacugcuaccucaugaucaccgacggcuccgccuccggcgucuccgagugccgcuuccucaagauccgcgagggccgcaucaucaaggagaucuuccccaccggccgcgucaagcacaccgaggagugcaccugcggcuucgccuccaacaagaccaucgagugcgccugccgcgacaacuccuacaccgccaagcgccccuucgucaagcucaacgucgagaccgacaccgccgagauccgccucaugugcaccgacaccuaccucgacaccccccgccccgacgacggcuccaucaccggccccugcgaguccaacggcgacaagggcuccggcggcaucaagggcggcuucguccaccagcgcauggccuccaagaucggccgcugguacucccgcaccauguccaagaccgagcgcaugggcaugggccucuacgucaaguacgacggcgaccccugggccgacuccgacgcccucgccuucuccggcgucauggucuccaugaaggagcccggcugguacuccuucggcuucgagaucaaggacaagaagugcgacguccccugcaucggcaucgagaugguccacgacggcggcaaggagaccuggcacuccgccgccaccgccaucuacugccucaugggcuccggccagcuccucugggacaccgucaccggcgucgacauggcccucuga

SEQ ID NO: 125429 - RNA, 1401 nt, Artificial Sequence; identical to SEQ ID NO: 125409
  derived and/or modified CDS sequence (opt2) from neuraminidase__InfluenzaB__AGX19209

SEQ ID NO: 125430 - RNA, 1401 nt, Artificial Sequence
  derived and/or modified CDS sequence (opt2) from neuraminidase__InfluenzaB__AGX19220
augcuccccuccaccauccagacccucacccucuuccucaccuccggcggcguccuccucucccucuacgucuccgccucccucuccuaccuccucuacuccgacauccuccucaaguucucccccaccgagaucaccgcccccaccaugucccucgacugcgccaacgccuccaacguccaggccgucaaccgcuccgccaccaagggcgucacccuccuccuccccgagcccgaguggaccuacccccgccucuccugccccggcuccaccuuccagaaggcccuccucaucuccccccaccgcuucggcgagaccaagggcaacuccgccccccucaucauccgcgagcccuucaucgccugcggccccaacgagugcaagcacuucgcccucacccacuacgccgcccagcccggcggcuacuacaacggcacccgcggcgaccgcaacaagcuccgccaccucaucuccgucaagcucggcaagauccccaccgucgagaacuccaucuuccacauggccgccugguccggcuccgccugccacgacggcaaggaguggaccuacaucggcgucgacggccccgacaacaacgcccuccucaagaucaaguacggcgaggccuacaccgacaccuaccacuccuacgccaacaagauccuccgcacccaggaguccgccugcaacugcaucggcggcaacugcuaccucaugaucaccgacggcuccgccuccggcgucuccgagugccgcuuccucaagauccgcgagggccgcaucaucaaggagaucuuccccaccggccgcgucaagcacaccgaggagugcaccugcggcuucgccuccaacaagaccaucgagugcgccugccgcgacaacuccuacaccgccaagcgccccuucgucaagcucaacgucgagaccgacaccgccgagauccgccucaugugcaccgacaccuaccucgacaccccccgccccgacgacggcuccaucaccggccccugcgaguccaacggcgaccgcggcuccggcggcaucaagggcggcuucguccaccagcgcauggccuccaagaucggccgcugguacucccgcaccauguccaagaccgagcgcaugggcaugggccucuacgucaaguacgacggcgaccccugggccgacuccgacgcccucgccuucuccggcgucauggucuccaugaaggagcccggcugguacuccuucggcuucgagaucaaggacaagaagugcgacguccccugcaucggcaucgagaugguccacgacggcggcaaggagaccuggcacuccgccgccaccgccaucuacugccucaugggcuccggccagcuccucugggacaccgucaccggcgucgacauggcccucuga

SEQ ID NO: 125431 - RNA, 1401 nt, Artificial Sequence; identical to SEQ ID NO: 124877
  derived and/or modified CDS sequence (opt2) from neuraminidase__InfluenzaB__AGX19231

SEQ ID NO: 125432 - RNA, 1401 nt, Artificial Sequence
  derived and/or modified CDS sequence (opt2) from neuraminidase__InfluenzaB__AGX19253
augcuccccuccaccauccagacccucacccucuuccucaccuccggcggcguccuccucucccucuacgucuccgccucccucuccuaccuccucuacuccgacauccuccucaaguucucccccaccgagaucaccgcccccaccaugccccucgacugcgccaacgccuccaacguccaggccgucaaccacuccgccaccaagggcgucacccuccuccuccccgagcccgaguggaccuacccccgccucuccugccccggcuccaccuuccagaaggcccuccucaucuccccccaccgcuucggcgagaccaagggcaacuccgccccccucaucauccgcgagcccuucaucgccugcggccccaacgagugcaagcacuucgcccucacccacuacgccgcccagcccggcggcuacuacaacggcacccgcggcgaccgcaacaagcuccgccaccucaucuccgucaagcucggcaagauccccaccgucgagaacuccaucuuccacauggccgccugguccggcuccgccugccacgacggcaaggaguggaccuacaucggcgucgacggccccgacaacaacgcccuccucaagaucaaguacggcgaggccuacaccgacaccuaccacuccuacgccaacaagauccuccgcacccaggaguccgccugcaacugcaucggcggcaacugcuaccucaugaucaccgacggcuccgccuccggcgucuccgagugccgcuuccucaagauccgcgagggccgcaucaucaaggagaucuuccccaccggccgcgucaagcacaccgaggagugcaccugcggcuucgccuccaacaagaccaucgagugcgccugccgcgacaacuccuacaccgccaagcgccccuucgucaagcucaacgucgagaccgacaccgccgagauccgccucaugugcaccgacaccuaccucgacaccccccgccccgacgacggcuccaucaccggccccugcgaguccaacggcgacaagggcuccggcggcaucaagggcggcuucguccaccagcgcauggccuccaagaucggccgcugguacucccgcaccauguccaagaccgagcgcaugggcaugggccucuacgucaaguacgacggcgaccccugggccgacuccgacucccucgccuucuccggcgucauggucuccaugaaggagcccggcugguacuccuucggcuucgagaucaaggacaagaagugcgacguccccugcaucggcaucgagaugguccacgacggcggcaaggagaccuggcacuccgccgccaccgccaucuacugccucaugggcuccggccagcuccucugggacaccgucaccggcgucgacauggcccucuga

SEQ ID NO: 125433 - RNA, 1401 nt, Artificial Sequence; identical to SEQ ID NO: 125407
  derived and/or modified CDS sequence (opt2) from neuraminidase__InfluenzaB__AGX19264

SEQ ID NO: 125434 - RNA, 1401 nt, Artificial Sequence; identical to SEQ ID NO: 124671
  derived and/or modified CDS sequence (opt2) from neuraminidase__InfluenzaB__AGX19275

SEQ ID NO: 125435 - RNA, 1401 nt, Artificial Sequence
  derived and/or modified CDS sequence (opt2) from neuraminidase__InfluenzaB__AGX19286
augauccccuccaccauccagacccucacccucuuccucaccuccggcggcguccuccucucccucuacgucuccgccucccucuccuaccuccucuacuccgacauccuccucaaguucucccccaccgagaucaucgcccccaccaugccccucgacugcgccaacgccuccaacguccacgccgucaaccgcuccgccaccaagggcgucacccuccuccuccccgagcccgaguggaccuacccccgccucuccugccccggcuccaccuuccagaaggcccuccucaucuccccccaccgcuucggcgagaccaagggcaacuccgccccccucaucauccgcgagcccuucaucgccugcggccccaacgagugcaagcacuucgcccucacccacuacgccgcccagcccggcggcuacuacaacggcacccgcggcgaccgcaacaagcuccgccaccucaucuccgucaagcucggcaagauccccaccgucgagaacuccaucuuccacauggccgccugguccggcuccgccugccacgacggcaaggaguggaccuacaucggcgucgacggccccgacaacaacgcccuccucaagaucaaguacggcgaggccuacaccgacaccuaccacuccuacgccaacaacauccuccgcacccaggaguccgccugcaacugcaucggcggcaacugcuaccucaugaucaccgacggcuccgccuccggcgucuccgagugccgcuuccucaagauccgcgagggccgcaucaucaaggagaucuuccccaccggccgcgucaagcacaccgaggagugcaccugcggcuucgccuccaacaagaccaucgagugcgccugccgcgacaacuccuacaccgccaagcgccccuucgucaagcucaacgucgagaccgacaccgccgagauccgccucaugugcaccgacaccuaccucgacaccccccgccccgacgacggcuccaucaccggccccugcgaguccaacggcgacaagggcuccggcggcaucaagggcggcuucguccaccagcgcauggccuccaagaucggccgcugguacucccgcaccauguccaagaccgagcgcaugggcaugggccucuacgucaaguacgacggcgaccccugggccgacuccgacgcccucgccuucuccggcgucauggucuccaugaaggagcccggcugguacuccuucggcuucgagaucaaggacaagaagugcgacguccccugcaucggcaucgagaugguccacgacggcggcaaggagaccuggcacuccgccgccaccgccaucuacugccucaugggcuccggccagcuccucugggacaccgucaccggcgucgacauggcccucuga

SEQ ID NO: 125436 - RNA, 1401 nt, Artificial Sequence
  derived and/or modified CDS sequence (opt2) from neuraminidase__InfluenzaB__AGX19297
augcuccccuccaccauccagacccucacccucuuccucaccuccggcggcguccuccucucccucuacgucuccgccucccucuccuaccuccucuacuccgacauccuccucaaguucucccccaccgagaucaucgcccccaccaugccccucgacugcgccaacgccuccaacguccacgccgucaaccgcuccgccaccaagggcgucacccuccuccuccccgagcccgaguggaccuacccccgccucuccugccccggcuccaccuuccagaaggcccuccucaucuccccccaccgcuucggcgagaccaagggcaacuccgccccccucaucauccgcgagcccuucaucgccugcggccccaacgagugcaagcacuucgcccucacccacuacgccgcccagcccggcggcuacuacaacggcacccgcggcgaccgcaacaagcuccgccaccucaucuccgucaagcucggcaagauccccaccgucgagaacuccaucuuccacauggccgccugguccggcuccgccugccacgacggcaaggaguggaccuacaucggcgucgacggccccgacaacaacgcccuccucaagaucaaguacggcgaggccuacaccgacaccuaccacuccuacgccaacaacauccuccgcacccaggaguccgccugcaacugcaucggcggcaacugcuaccucaugaucaccgacggcuccgccuccggcgucuccgagugccgcuuccucaagauccgcgagggccgcaucaucaaggagaucuuccccaccggccgcgucaagcacaccgaggagugcaccugcggcuucgccuccaacaagaccaucgagugcgccugccgcgacaacuccuacaccgccaagcgccccuucgucaagcucaacgucgagaccgacaccgccgagauccgccucaugugcaccgacaccuaccucgacaccccccgccccgacgacggcuccaucaccggccccugcgaguccaacggcgacaagggcuccggcggcaucaagggcggcuucguccaccagcgcauggccuccaagaucggccgcugguacucccgcaccauguccaagaccgagcgcaugggcaugggccucuacgucaaguacgacggcgaccccugggccgacuccgacgcccucgccuucuccggcgucauggucuccaugaaggagcccggcugguacuccuucggcuucgagaucaaggacaagaagugcgacguccccugcaucggcaucgagaugguccacgacggcggcaaggagaccuggcacuccgccgccaccgccaucuacugccucaugggcuccggccagcuccucugggacaccgucaccggcgucgacauggcccucuga

SEQ ID NO: 125437 - RNA, 1401 nt, Artificial Sequence; identical to SEQ ID NO: 125436
  derived and/or modified CDS sequence (opt2) from neuraminidase__InfluenzaB__AGX19308

SEQ ID NO: 125438 - RNA, 1401 nt, Artificial Sequence; identical to SEQ ID NO: 125436
  derived and/or modified CDS sequence (opt2) from neuraminidase__InfluenzaB__AGX19319

SEQ ID NO: 125439 - RNA, 1401 nt, Artificial Sequence
  derived and/or modified CDS sequence (opt2) from neuraminidase__InfluenzaB__AGX19330
augcuccccuccaccauccagacccucacccucuuccucaccuccggcggcguccuccucucccucuacgucuccgccucccucuccuaccuccucuacuccgacauccuccucaaguucucccccaccgagaucaucgcccccaccaugccccucgacugcgccaacgccuccaacguccacgccgucaaccgcuccgccaccaagggcgucacccuccuccuccccgagcccgaguggaccuacccccgccucuccugccccggcuccaccuuccagaaggcccuccucaucuccccccaccgcuucggcgagaccaagggcaacuccgccccccucaucauccgcgagcccuucaucgccugcggccccaacgagugcaagcacuucgcccucacccacuacgccgcccagcccggcggcuacuacaacggcacccgcggcaaccgcaacaagcuccgccaccucaucuccgucaagcucggcaagauccccaccgucgagaacuccaucuuccacauggccgccugguccggcuccgccugccacgacggcaaggaguggaccuacaucggcgucgacggccccgacaacaacgcccuccucaagaucaaguacggcgaggccuacaccgacaccuaccacuccuacgccaacaacauccuccgcacccaggaguccgccugcaacugcaucggcggcaacugcuaccucaugaucaccgacggcuccgccuccggcgucuccgagugccgcuuccucaagauccgcgagggccgcaucaucaaggagaucuuccccaccggccgcgucaagcacaccgaggagugcaccugcggcuucgccuccaacaagaccaucgagugcgccugccgcgacaacuccuacaccgccaagcgccccuucgucaagcucaacgucgagaccgacaccgccgagauccgccucaugugcaccgacaccuaccucgacaccccccgccccgacgacggcuccaucaccggccccugcgaguccaacggcgacaagggcuccggcggcaucaagggcggcuucguccaccagcgcauggccuccaagaucggccgcugguacucccgcaccauguccaagaccgagcgcaugggcaugggccucuacgucaaguacgacggcgaccccugggccgacuccgacgcccucgccuucuccggcgucauggucuccaugaaggagcccggcugguacuccuucggcuucgagaucaaggacaagaagugcgacguccccugcaucggcaucgagaugguccacgacggcggcaaggagaccuggcacuccgccgccaccgccaucuacugccucaugggcuccggccagcuccucugggacaccgucaccggcgucgacauggcccucuga

SEQ ID NO: 125440 - RNA, 1401 nt, Artificial Sequence; identical to SEQ ID NO: 125436
  derived and/or modified CDS sequence (opt2) from neuraminidase__InfluenzaB__AGX19341

SEQ ID NO: 125441 - RNA, 1401 nt, Artificial Sequence; identical to SEQ ID NO: 125436
  derived and/or modified CDS sequence (opt2) from neuraminidase__InfluenzaB__AGX19352

SEQ ID NO: 125442 - RNA, 1401 nt, Artificial Sequence
  derived and/or modified CDS sequence (opt2) from neuraminidase__InfluenzaB__AGX19363
augcuccccuccaccauccagacccucacccucuuccucaccuccggcggcguccuccucucccucuacgucuccgccucccucuccuaccuccucuacuccgacauccuccucaaguucucccccaccgagaucaucgcccccaccaugccccucgacugcgccaacgccuccaacguccacgccgucaaccgcuccgccaccaagggcgucacccuccuccuccccgagcccgaguggaccuacccccgccucuccugccccggcuccaccuuccagaaggcccuccucaucuccccccaccgcuucggcgagaccaagggcaacuccgccccccucaucauccgcgagcccuucaucgccugcggccccaacgagugcaagcacuucgcccucaccuacuacgccgcccagcccggcggcuacuacaacggcacccgcggcgaccgcaacaagcuccgccaccucaucuccgucaagcucggcaagauccccaccgucgagaacuccaucuuccacauggccgccugguccggcuccgccugccacgacggcaaggaguggaccuacaucggcgucgacggccccgacaacaacgcccuccucaagaucaaguacggcgaggccuacaccgacaccuaccacuccuacgccaacaacauccuccgcacccaggaguccgccugcaacugcaucggcggcaacugcuaccucaugaucaccgacggcuccgccuccggcgucuccgagugccgcuuccucaagauccgcgagggccgcaucaucaaggagaucuuccccaccggccgcgucaagcacaccgaggagugcaccugcggcuucgccuccaacaagaccaucgagugcgccugccgcgacaacuccuacaccgccaagcgccccuucgucaagcucaacgucgagaccgacaccgccgagauccgccucaugugcaccgacaccuaccucgacaccccccgccccgacgacggcuccaucaccggccccugcgaguccaacggcgacaagggcuccggcggcaucaagggcggcuucguccaccagcgcauggccuccaagaucggccgcugguacucccgcaccauguccaagaccgagcgcaugggcaugggccucuacgucaaguacgacggcgaccccugggccgacuccgacgcccucgccuucuccggcgucauggucuccaugaaggagcccggcugguacuccuucggcuucgagaucaaggacaagaagugcgacguccccugcaucggcaucgagaugguccacgacggcggcaaggagaccuggcacuccgccgccaccgccaucuacugccucaugggcuccggccagcuccucugggacaccgucaccggcgucgacauggcccucuga

SEQ ID NO: 125443 - RNA, 1401 nt, Artificial Sequence
  derived and/or modified CDS sequence (opt2) from neuraminidase__InfluenzaB__AGX19374
augcuccccuccaccauccagacccucacccucuuccucaccuccggcggcguccuccucucccucuacgucuccgccucccucuccuaccuccucuacuccgacauccuccucaaguucucccagaccgagaucaccgcccccaucaugccccucgacugcgccaacgccuccaacguccaggccgucaaccgcuccgccgccaagggcgucacccuccuccucuccgagcccgaguggaccuacccccgccucuccugccccggcuccaccuuccagaaggcccuccucaucuccccccaccgcuucggcgagaccaagggcaacuccgccccccucaucauccgcgagcccuucaucgccugcggccccaccgagugcaagcacuucgcccucacccacuacgccgcccagcccggcggcuacuacaacggcacccgcgaggaccgcaacaagcuccgccaccucaucuccgucaagcucggcaagauccccaccgucgagaacuccaucuuccacauggccgccugguccggcuccgccugccacgacggcaaggaguggaccuacaucggcgucgacggccccgacuccaacgcccuccucaagaucaaguacggcgaggccuacaccgacaccuaccacuccuacgccaagaacauccuccgcacccaggaguccgccugcaacugcaucggcggcgacugcuaccucaugaucaccgacggccccgccuccggcgucuccgagugccgcuuccucaagauccgcgagggccgcaucaucaaggagaucuuccccaccggccgcgucaagcacaccgaggagugcaccugcggcuucgccuccaacaagaccaucgagugcgccugccgcgacaacuccuacaccgccaagcgccccuucgucaagcucaacgucgagaccgacaccgccgagauccgccucaugugcaccgagaccuaccucgacaccccccgccccaacgacggcuccaucaccggccccugcgaguccgacggcgacaagggcuccggcggcaucaagggcggcuucguccaccagcgcauggccuccaagaucggccgcugguacucccgcaccauguccaagaccaagcgcaugggcaugggccucuacgucaaguacgacggcgaccccuggaccgacuccgaggcccucgcccucuccggcgucauggucuccauggaggagcccggcugguacuccuucggcuucgagaucaaggacaagaagugcgacguccccugcaucggcaucgagaugguccacgacggcggcaagaccaccuggcacuccgccgccaccgccaucuacugccucaugggcuccggccagcuccucugggacaccgucaccggcgucgacauggcccucuga

SEQ ID NO: 125444 - RNA, 1401 nt, Artificial Sequence; identical to SEQ ID NO: 125436
  derived and/or modified CDS sequence (opt2) from neuraminidase__InfluenzaB__AGX19385

SEQ ID NO: 125445 - RNA, 1401 nt, Artificial Sequence
  derived and/or modified CDS sequence (opt2) from neuraminidase__InfluenzaB__AGX19396
augcuccccuccaccauccagacccucacccucuuccucaccuccggcggcguccuccucucccucuacgucuccgccucccucuccuaccuccucuacuccgacauccuccucaaguucucccccaccgagaucaucgcccccaccaugccccucgacugcgccaacgccuccaacguccacgccgucaaccgcuccgccaccaagggcgucacccuccuccuccccgagcccgaguggaccuacccccgccucuccugccccggcuccaccuuccagaaggcccuccucaucuccccccaccgcuucggcgagaccaagggcaacuccgccccccucaucauccgcgagcccuucaucgccugcggccccaacgagugcaagcacuucgcccucacccacuacgccgcccagcccggcggcuacuacaacggcccccgcggcgaccgcaacaagcuccgccaccucaucuccgucaagcucggcaagauccccaccgucgagaacuccaucuuccacauggccgccugguccggcuccgccugccacgacggcaaggaguggaccuacaucggcgucgacggccccgacaacaacgcccuccucaagaucaaguacggcgaggccuacaccgacaccuaccacuccuacgccaacaacauccuccgcacccaggaguccgccugcaacugcaucggcggcaacugcuaccucaugaucaccgacggcuccgccuccggcgucuccgagugccgcuuccucaagauccgcgagggccgcaucaucaaggagaucuuccccaccggccgcgucaagcacaccgaggagugcaccugcggcuucgccuccaacaagaccaucgagugcgccugccgcgacaacuccuacaccgccaagcgccccuucgucaagcucaacgucgagaccgacaccgccgagauccgccucaugugcaccgacaccuaccucgacaccccccgccccgacgacggcuccaucaccggccccugcgaguccaacggcgacaagggcuccggcggcaucaagggcggcuucguccaccagcgcauggccuccaagaucggccgcugguacucccgcaccauguccaagaccgagcgcaugggcaugggccucuacgucaaguacgacggcgaccccugggccgacuccgacgcccucgccuucuccggcgucauggucuccaugaaggagcccggcugguacuccuucggcuucgagaucaaggacaagaagugcgacguccccugcaucggcaucgagaugguccacgacggcggcaaggagaccuggcacuccgccgccaccgccaucuacugccucaugggcuccggccagcuccucugggacaccgucaccggcgucgacauggcccucuga

SEQ ID NO: 125446 - RNA, 1401 nt, Artificial Sequence; identical to SEQ ID NO: 125436
  derived and/or modified CDS sequence (opt2) from neuraminidase__InfluenzaB__AGX19407

SEQ ID NO: 125447 - RNA, 1401 nt, Artificial Sequence; identical to SEQ ID NO: 124997
  derived and/or modified CDS sequence (opt2) from neuraminidase__InfluenzaB__AGX19418

SEQ ID NO: 125448 - RNA, 1401 nt, Artificial Sequence
  derived and/or modified CDS sequence (opt2) from neuraminidase__InfluenzaB__AGX19429
augcuccccuccaccauccagacccucacccucuuccucaccuccggcggcguccuccucucccucuacgucuccgccucccucuccuaccuccucuacuccgacauccuccucaaguucucccagaccgagaucaccgcccccaucaugccccucgacugcgccaacgccuccaacguccaggccgucaaccgcuccgccgccaagggcgucacccuccuccuccccgagcccgaguggaccuacccccgccucuccugccccggcuccaccuuccagaaggcccuccucaucuccccccaccgcuucggcgagaccaagggcaacuccgccccccucaucauccgcgagcccuucaucgccugcggccccaccgagugcaagcacuucgcccucacccacuacgccgcccagcccggcggcuacuacaacggcacccgcgaggaccgcaacaagcuccgccaccucaucuccgucaagcucggcaagauccccaccgucgagaacuccaucuuccacauggccgccugguccggcuccgccugccacgacggcaaggaguggaccuacaucggcgucgacggccccgacuccaacgcccuccucaagaucaaguacggcgaggccuacaccgacaccuaccacuccuacgccaagaacauccuccgcacccaggaguccgccugcaacugcaucggcggcgacugcuaccucaugaucaccgacggccccgccuccggcaucuccgagugccgcuuccucaagauccgcgagggccgcaucaucaaggagaucuuccccaccggccgcgucaagcacaccgaggagugcaccugcggcuucgccuccaacaagaccaucgagugcgccugccgcgacaacuccuacaccgccaagcgccccuucgucaagcucaacgucgagaccgacaccgccgagauccgccucaugugcaccgagaccuaccucgacaccccccgccccaacgacggcuccaucaccggccccugcgaguccgacggcgacaagggcuccggcggcaucaagggcggcuucguccaccagcgcauggccuccaagaucggccgcugguacucccgcaccauguccaagacccgccgcaugggcaugggccucuacgucaaguacgacggcgaccccuggaccgacuccgaggcccucgcccucuccggcgucauggucuccauggaggagcccggcugguacuccuucggcuucgagaucaaggacaagaagugcgacguccccugcaucggcaucgagaugguccacgacggcggcaagaccaccuggcacuccgccgccaccgccaucuacugccucaugggcuccggccagcuccucugggacaccgucaccggcgucgacauggcccucuga

SEQ ID NO: 125449 - RNA, 1401 nt, Artificial Sequence
  derived and/or modified CDS sequence (opt2) from neuraminidase__InfluenzaB__AGX19451
augcuccccuccaccauccagacccucacccucuuccucaccuccggcggcguccuccucucccucuacgucuccgccucccucuccuaccuccucuacuccgacauccuccucaaguucucccccaccgagaucaccgcccccaccaugccccucgacugcgccaacgccuccaacguccacgccgucaaccacuccgccaccaagggcgucacccuccuccuccccgagcccgaguggaccuacccccgccucuccugccccggcuccaccuuccagaaggcccuccucaucuccccccaccgcuucggcgagaccaagggcaacuccgccccccucaucauccgcgagcccuucaucgccugcggccccaacgagugcaagcacuucgcccucacccacuacgccgcccagcccggcggcuacuacaacggcacccgcggcgaccgcaacaagcuccgccaccucaucuccgucaagcucggcaagauccccaccgucgagaacuccaucuuccacauggccgccugguccggcuccgccugccacgacggcaaggaguggaccuacaucggcgucgacggccccgacaacaacgcccuccucaagaucaaguacggcgaggccuacaccgacaccuaccacuccuacgccaacaacauccuccgcacccaggaguccgccugcaacugcaucggcggcaacugcuaccucauggucaccgacggcuccgccuccggcgucuccgagugccgcuuccucaagauccgcgagggccgcaucaucaaggagaucuuccccaccggccgcgucaagcacaccgaggagugcaccugcggcuucgccuccaacaagaccaucgagugcgccugccgcgacaacuccuacaccgccaagcgccccuucgucaagcucaacgucgagaccgacaccgccgagauccgccucaugugcaccgacaccuaccucgacaccccccgccccgacgacggcuccaucaccggccccugcgaguccaacggcgacaagggcuccggcggcaucaagggcggcuucguccaccagcgcauggccuccaagaucggccgcugguacucccgcaccauguccaagaccgagcgcaugggcaugggccucuacgucaaguacgacggcgaccccugggccgacuccgacgcccucgccuucuccggcgucauggucuccaugaaggagcccggcugguacuccuucggcuucgagaucaaggacaagaagugcgacguccccugcaucggcaucgagaugguccacgacggcggcaaggagaccuggcacuccgccgccaccgccaucuacugccucaugggcuccggccagcuccucugggacaccgucaccggcgucgacauggcccucuga

SEQ ID NO: 125450 - RNA, 1401 nt, Artificial Sequence; identical to SEQ ID NO: 125448
  derived and/or modified CDS sequence (opt2) from neuraminidase__InfluenzaB__AGX19462

SEQ ID NO: 125451 - RNA, 1401 nt, Artificial Sequence; identical to SEQ ID NO: 125448
  derived and/or modified CDS sequence (opt2) from neuraminidase__InfluenzaB__AGX19473

SEQ ID NO: 125452 - RNA, 1401 nt, Artificial Sequence; identical to SEQ ID NO: 124997
  derived and/or modified CDS sequence (opt2) from neuraminidase__InfluenzaB__AGX19484

SEQ ID NO: 125453 - RNA, 1401 nt, Artificial Sequence; identical to SEQ ID NO: 125449
  derived and/or modified CDS sequence (opt2) from neuraminidase__InfluenzaB__AGX19495

SEQ ID NO: 125454 - RNA, 1401 nt, Artificial Sequence; identical to SEQ ID NO: 124997
  derived and/or modified CDS sequence (opt2) from neuraminidase__InfluenzaB__AGX19506

SEQ ID NO: 125455 - RNA, 1401 nt, Artificial Sequence; identical to SEQ ID NO: 124997
  derived and/or modified CDS sequence (opt2) from neuraminidase__InfluenzaB__AGX19517

SEQ ID NO: 125456 - RNA, 1401 nt, Artificial Sequence; identical to SEQ ID NO: 124997
  derived and/or modified CDS sequence (opt2) from neuraminidase__InfluenzaB__AGX19528

SEQ ID NO: 125457 - RNA, 1401 nt, Artificial Sequence; identical to SEQ ID NO: 125449
  derived and/or modified CDS sequence (opt2) from neuraminidase__InfluenzaB__AGX19539

SEQ ID NO: 125458 - RNA, 1401 nt, Artificial Sequence
  derived and/or modified CDS sequence (opt2) from neuraminidase__InfluenzaB__AGX19550
augcuccccuccaccauccagacccucacccucuuccucaccuccggcggcguccuccucucccucuacgucuccgccucccucuccuaccuccucuacuccgacauccuccucaaguucucccccaccgagaucaccgcccccaccaugccccucgacugcgccaacgccuccaacguccacgccgucaaccacuccgccaccaagggcgucacccuccuccuccccgagcccgaguggaccuacccccgccucuccugccccggcuccaccuuccagaaggcccuccucaucuccccccaccgcuucggcgagaccaagggcaacuccgccccccucaucauccgcgagcccuucaucgccugcggccccaacgagugcaagcacuucgcccucacccacuacgccgcccagcccggcggcuacuacaacggcacccgcggcgaccgcaacaagcuccgccaccucaucuccgucaagcucggcaagauccccaccgucgagaacuccaucuuccacauggccgccugguccggcuccgccugccacgacggcaaggaguggaccuacaucggcgucgacggccccgacaacaacgcccuccucaagaucaaguacggcgaggccuacaccgacaccuaccacuccuacgccaacaacauccuccgcacccaggaguccgccugcaacugcaucggcggcaacugcuaccucauggucaccgacggcuccgccuccggcgucuccgagugccgcuuccucaagauccgcgagggccgcaucaucaaggagaucuuccccaccggccgcgucaagcacaccgaggagugcaccugcggcuucgccuccaacaagaccaucgagugcgccugccgcgacaacuccuacaccgccaagcgccccuucgucaagcucaacgucgagaccgacaccgccgagauccgccucaugugcaccgacaccuaccucgacaccccccgccccgacgacggcuccaucaccggccccugcgaguccaacggcgacaagggcuccggcggcaucaagggcggcuucguccaccagcgcauggccuccaagaucggccgcugguacucccgcaccauguccaagaccgagcgcaugggcaugggccucuacgucaaguacgacggcgaccccugggccgacuccgacgcccucgccuucuccggcgucauggucuccaugaacgagcccggcugguacuccuucggcuucgagaucaaggacaagaagugcgacguccccugcaucggcaucgagaugguccacgacggcggcaaggagaccuggcacuccgccgccaccgccaucuacugccucaugggcuccggccagcuccucugggacaccgucaccggcgucgacauggcccucuga

SEQ ID NO: 125459 - RNA, 1401 nt, Artificial Sequence
  derived and/or modified CDS sequence (opt2) from neuraminidase__InfluenzaB__AGX19561
augcuccccuccaccauccagacccucacccucuuccucaccuccggcggcguccuccucucccucuacgucuccgccucccucuccuaccuccucuacuccgacauccuccucaaguucucccccaccgagaucaccgcccccaccaugccccucgacugcgccaacgccuccaacguccacgccgucaaccacuccgccaccaagggcgucacccuccuccuccccgagcccgaguggaccuacccccgccucuccugccccggcuccaccuuccagaaggcccuccucaucuccccccaccgcuucggcgagaccaagggcaacuccgccccccucaucauccgcgagcccuucaucgccugcggccccaacgagugcaagcacuucgcccucacccacuacgccgcccagccccgcggcuacuacaacggcacccgcggcgaccgcaacaagcuccgccaccucaucuccgucaagcucggcaagauccccaccgucgagaacuccaucuuccacauggccgccugguccggcuccgccugccacgacggcaaggaguggaccuacaucggcgucgacggccccgacaacaacgcccuccucaagaucaaguacggcgaggccuacaccgacaccuaccacuccuacgccaacaacauccuccgcacccaggaguccgccugcaacugcaucggcggcaacugcuaccucauggucaccgacggcuccgccuccggcgucuccgagugccgcuuccucaagauccgcgagggccgcaucaucaaggagaucuuccccaccggccgcgucaagcacaccgaggagugcaccugcggcuucgccuccaacaagaccaucgagugcgccugccgcgacaacuccuacaccgccaagcgccccuucgucaagcucaacgucgagaccgacaccgccgagauccgccucaugugcaccgacaccuaccucgacaccccccgccccgacgacggcuccaucaccggccccugcgaguccaacggcgacaagggcuccggcggcaucaagggcggcuucguccaccagcgcauggccuccaagaucggccgcugguacucccgcaccauguccaagaccgagcgcaugggcaugggccucuacgucaaguacgacggcgaccccugggccgacuccgacgcccucgccuucuccggcgucauggucuccaugaaggagcccggcugguacuccuucggcuucgagaucaaggacaagaagugcgacguccccugcaucggcaucgagaugguccacgacggcggcaaggagaccuggcacuccgccgccaccgccaucuacugccucaugggcuccggccagcuccucugggacaccgucaccggcgucgacauggcccucuga

SEQ ID NO: 125460 - RNA, 1401 nt, Artificial Sequence
  derived and/or modified CDS sequence (opt2) from neuraminidase__InfluenzaB__AGX19572
augcuccccuccaccauccagacccucacccucuuccucaccuccggcggcguccuccucucccucuacgucuccgccucccucuccuaccuccucuacuccgacauccuccucaaguucucccccaccgagaucaccgcccccaccaugccccucgacugcgccaacgccuccaacguccaggccgucaaccgcuccgccaccaagggcgucacccuccuccuccccgagcccgaguggaccuacccccgccucuccugccccggcuccaccuuccagaaggcccuccucaucuccccccaccgcuucggcgagaccaagggcaacuccgccccccucaucauccgcgagcccuucaucgccugcggccccaacgagugcaagcacuucgcccucacccacuacgccgcccagcccggcggcuacuacaacggcacccgcggcgaccgcaacaagcuccgccaccucaucuccgucaagcucggcaagauccccaccgucgagaacuccaucuuccacauggccgccugguccggcuccgccugccacgacggcaaggaguggaccuacaucggcgucgacggccccgacaacaacgcccuccucaaggucaaguacggcgaggccuacaccgacaccuaccacuccuacgccaacaagauccuccgcacccaggaguccgccugcaacugcaucggcggcaacugcuaccucaugaucaccgacggcuccgccuccggcgucuccgagugccgcuuccucaagauccgcgagggccgcaucaucaaggagaucuuccccaccggccgcgucaagcacaccgaggagugcaccugcggcuucgccuccaacaagaccaucgagugcgccugccgcgacaacuccuacaccgccaagcgccccuucgucaagcucaacgucgagaccgacaccgccgagauccgccucaugugcaccgacaccuaccucgacaccccccgccccaacgacggcuccaucaccggccccugcgaguccaacggcgacaagggcuccggcggcaucaagggcggcuucguccaccagcgcauggaguccaagaucggccgcugguacucccgcaccauguccaagaccgagcgcaugggcaugggccucuacgucaaguacgacggcgaccccugggccgacuccgacgcccucgccuucuccggcgucauggucuccaugaaggagcccggcugguacuccuucggcuucgagaucaaggacaagaagugcgacguccccugcaucggcaucgagaugguccacgacggcggcaaggagaccuggcacuccgccgccaccgccaucuacugccucaugggcuccggccagcuccucugggacaccgucaccggcgucaacauggcccucuga

SEQ ID NO: 125461 - RNA, 1401 nt, Artificial Sequence; identical to SEQ ID NO: 124997
  derived and/or modified CDS sequence (opt2) from neuraminidase__InfluenzaB__AGX19583

SEQ ID NO: 125462 - RNA, 1401 nt, Artificial Sequence; identical to SEQ ID NO: 124997
  derived and/or modified CDS sequence (opt2) from neuraminidase__InfluenzaB__AGX19594

SEQ ID NO: 125463 - RNA, 1401 nt, Artificial Sequence; identical to SEQ ID NO: 124997
  derived and/or modified CDS sequence (opt2) from neuraminidase__InfluenzaB__AGX19605

SEQ ID NO: 125464 - RNA, 1401 nt, Artificial Sequence; identical to SEQ ID NO: 124997
  derived and/or modified CDS sequence (opt2) from neuraminidase__InfluenzaB__AGX19616

SEQ ID NO: 125465 - RNA, 1401 nt, Artificial Sequence; identical to SEQ ID NO: 125449
  derived and/or modified CDS sequence (opt2) from neuraminidase__InfluenzaB__AGX19627

SEQ ID NO: 125466 - RNA, 1401 nt, Artificial Sequence; identical to SEQ ID NO: 124997
  derived and/or modified CDS sequence (opt2) from neuraminidase__InfluenzaB__AGX19638

SEQ ID NO: 125467 - RNA, 1401 nt, Artificial Sequence; identical to SEQ ID NO: 125449
  derived and/or modified CDS sequence (opt2) from neuraminidase__InfluenzaB__AGX19649

SEQ ID NO: 125468 - RNA, 1401 nt, Artificial Sequence; identical to SEQ ID NO: 125449
  derived and/or modified CDS sequence (opt2) from neuraminidase__InfluenzaB__AGX19660

SEQ ID NO: 125469 - RNA, 1401 nt, Artificial Sequence; identical to SEQ ID NO: 124997
  derived and/or modified CDS sequence (opt2) from neuraminidase__InfluenzaB__AGX19671

SEQ ID NO: 125470 - RNA, 1401 nt, Artificial Sequence; identical to SEQ ID NO: 124997
  derived and/or modified CDS sequence (opt2) from neuraminidase__InfluenzaB__AGX19682

SEQ ID NO: 125471 - RNA, 1401 nt, Artificial Sequence; identical to SEQ ID NO: 125449
  derived and/or modified CDS sequence (opt2) from neuraminidase__InfluenzaB__AGX19704

SEQ ID NO: 125472 - RNA, 1401 nt, Artificial Sequence
  derived and/or modified CDS sequence (opt2) from neuraminidase__InfluenzaB__AGX19715
augcuccccuccaccauccagacccucacccucuuccucaccuccggcggcguccuccucucccucuacgucuccgccucccucuccuaccuccucuacuccgacauccuccucaaguucucccccaccgagaucaccgcccccaccaugccccucgacugcgccaacgccuccaacguccacgccgucaaccgcuccaccaccaagggcgucacccuccuccuccccgagcccgaguggaccuacccccgccucuccugccccggcuccaccuuccagaaggcccuccucaucuccccccaccgcuucggcgagaccaagggcaacuccgccccccucaucauccgcgagcccuucaucgccugcggccccaacgagugcaagcacuucgcccucacccacuacgccgcccagcccggcggcuacuacaacggcacccgcggcgaccgcaacaagcuccgccaccucaucuccgucaagcucggcaagauccccaccgucgagaacuccaucuuccacauggccgccugguccggcuccgccugccacgacggcaaggaguggaccuacaucggcgucgacggccccgacaacaacgcccuccucaagaucaaguacggcgaggccuacaccgacaccuaccacuccuacgccaacaacauccuccgcacccaggaguccgccugcaacugcaucggcggcaacugcuaccucaugaucaccgacggcuccgccuccggcgucuccgagugccgcuuccucaagauccgcgagggccgcaucaucaaggagaucuuccccaccggccgcgucaagcacaccgaggagugcaccugcggcuucgccuccaacaagaccaucgagugcgccugccgcgacaacuccuacaccgccaagcgccccuucgucaagcucaacgucgagaccgacaccgccgagauccgccucaugugcaccgacaccuaccucgacaccccccgccccgacgacggcuccaucaccggccccugcgaguccaacggcgacaagggcuccggcggcaucaagggcggcuucguccaccagcgcauggccuccaagaucggccgcugguacucccgcaccauguccaagaccgagcgcaugggcaugggccucuacgucaaguacgacggcgaccccugggccgacuccgacgcccucgccuucuccggcgucauggucuccaugaaggagcccggcugguacuccuucggcuucgagaucaaggacaagaagugcgacguccccugcaucggcaucgagaugguccacgacggcggcaaggagaccuggcacuccgccgccaccgccaucuacugccucaugggcuccggccagcuccucugggacaccgucaccggcgucgacauggcccucuga

SEQ ID NO: 125473 - RNA, 1401 nt, Artificial Sequence; identical to SEQ ID NO: 124997
  derived and/or modified CDS sequence (opt2) from neuraminidase__InfluenzaB__AGX19726

SEQ ID NO: 125474 - RNA, 1401 nt, Artificial Sequence; identical to SEQ ID NO: 124997
  derived and/or modified CDS sequence (opt2) from neuraminidase__InfluenzaB__AGX19737

SEQ ID NO: 125475 - RNA, 1401 nt, Artificial Sequence; identical to SEQ ID NO: 124997
  derived and/or modified CDS sequence (opt2) from neuraminidase__InfluenzaB__AGX19748

SEQ ID NO: 125476 - RNA, 1401 nt, Artificial Sequence; identical to SEQ ID NO: 125449
  derived and/or modified CDS sequence (opt2) from neuraminidase__InfluenzaB__AGX19759

SEQ ID NO: 125477 - RNA, 1401 nt, Artificial Sequence; identical to SEQ ID NO: 124997
  derived and/or modified CDS sequence (opt2) from neuraminidase__InfluenzaB__AGX19770

SEQ ID NO: 125478 - RNA, 1401 nt, Artificial Sequence; identical to SEQ ID NO: 124997
  derived and/or modified CDS sequence (opt2) from neuraminidase__InfluenzaB__AGX19781

SEQ ID NO: 125479 - RNA, 1401 nt, Artificial Sequence; identical to SEQ ID NO: 124997
  derived and/or modified CDS sequence (opt2) from neuraminidase__InfluenzaB__AGX19792

SEQ ID NO: 125480 - RNA, 1401 nt, Artificial Sequence; identical to SEQ ID NO: 124997
  derived and/or modified CDS sequence (opt2) from neuraminidase__InfluenzaB__AGX19803

SEQ ID NO: 125481 - RNA, 1401 nt, Artificial Sequence; identical to SEQ ID NO: 124997
  derived and/or modified CDS sequence (opt2) from neuraminidase__InfluenzaB__AGX19814

SEQ ID NO: 125482 - RNA, 1401 nt, Artificial Sequence
  derived and/or modified CDS sequence (opt2) from neuraminidase__InfluenzaB__AGX19825
augcuccccuccaccauccagacccucacccucuuccucaccuccggcggcguccuccucucccucuacgucuccgccucccucuccuaccuccucuacuccgacauccuccucaaguucucccccaccgagaucaccgcccccaccaugccccucgacugcgccaacgccuccaacguccacgccgucaaccacuccgccaccaagggcgucacccuccuccuccccgagcccgaguggaccuacccccgccucuccugccccggcuccaccuuccagaaggcccuccucaucuccccccaccgcuucggcgagaccaagggcaacuccgccccccucaucauccgcgagcccuucaucgccugcggccccaacgagugcaagcacuucgcccucacccacuacgccgcccagcccggcggcuacuacaacggcacccgcggcgaccgcaacaagcuccgccaccucaucuccgucaagcucggcaagauccccaccgucgagaacuccaucuuccacauggccgccugguccggcuccgccugccacgacggcaaggaguggaccuacaucggcgucgacggccccgacaacaacgcccuccucaagaucaaguacggcgaggccuacaccgacaccuaccacuccuacgccaacaacauccuccgcacccaggaguccgccugcaacugcaucggcggcaacugcuaccucauggucaccgacggcuccgccuccggcgucuccgagugccgcuuccucaagauccgcgagggccgcaucaucaaggagaucuuccccaccggccgcgucaagcacaccgaggagugcaccugcggcuucgccaacaacaagaccaucgagugcgccugccgcgacaacuccuacaccgccaagcgccccuucgucaagcucaacgucgagaccgacaccgccgagauccgccucaugugcaccgacaccuaccucgacaccccccgccccgacgacggcuccaucaccggccccugcgaguccaacggcgacaagggcuccggcggcaucaagggcggcuucguccaccagcgcauggccuccaagaucggccgcugguacucccgcaccauguccaagaccgagcgcaugggcaugggccucuacgucaaguacgacggcgaccccugggccgacuccgacgcccucgccuucuccggcgucauggucuccaugaaggagcccggcugguacuccuucggcuucgagaucaaggacaagaagugcgacguccccugcaucggcaucgagaugguccacgacggcggcaaggagaccuggcacuccgccgccaccgccaucuacugccucaugggcuccggccagcuccucugggacaccgucaccggcgucgacauggcccucuga

SEQ ID NO: 125483 - RNA, 1401 nt, Artificial Sequence; identical to SEQ ID NO: 124997
  derived and/or modified CDS sequence (opt2) from neuraminidase__InfluenzaB__AGX19836

SEQ ID NO: 125484 - RNA, 1401 nt, Artificial Sequence; identical to SEQ ID NO: 124997
  derived and/or modified CDS sequence (opt2) from neuraminidase__InfluenzaB__AGX19847

SEQ ID NO: 125485 - RNA, 1401 nt, Artificial Sequence; identical to SEQ ID NO: 124997
  derived and/or modified CDS sequence (opt2) from neuraminidase__InfluenzaB__AGX19858

SEQ ID NO: 125486 - RNA, 1401 nt, Artificial Sequence; identical to SEQ ID NO: 124997
  derived and/or modified CDS sequence (opt2) from neuraminidase__InfluenzaB__AGX19869

SEQ ID NO: 125487 - RNA, 1401 nt, Artificial Sequence; identical to SEQ ID NO: 124997
  derived and/or modified CDS sequence (opt2) from neuraminidase__InfluenzaB__AGX19880

SEQ ID NO: 125488 - RNA, 1401 nt, Artificial Sequence; identical to SEQ ID NO: 124997
  derived and/or modified CDS sequence (opt2) from neuraminidase__InfluenzaB__AGX19891

SEQ ID NO: 125489 - RNA, 1401 nt, Artificial Sequence; identical to SEQ ID NO: 124997
  derived and/or modified CDS sequence (opt2) from neuraminidase__InfluenzaB__AGX19902

SEQ ID NO: 125490 - RNA, 1401 nt, Artificial Sequence
  derived and/or modified CDS sequence (opt2) from neuraminidase__InfluenzaB__AGX19913
augcuccccuccaccauccagacccucacccucuuccucaccuccggcggcguccuccucucccucuacgucuccgccucccucuccuaccuccucuacuccgacauccuccucaaguucucccccaccgagaucaccgcccccaccaugccccucgacugcgccaacgccuccaacguccacgccaugaaccacuccgccaccaagggcgucacccuccuccuccccgagcccgaguggaccuacccccgccucuccugccccggcuccaccuuccagaaggcccuccucaucuccccccaccgcuucggcgagaccaagggcaacuccgccccccucaucauccgcgagcccuucaucgccugcggccccaacgagugcaagcacuucgcccucacccacuacgccgcccagcccggcggcuacuacaacggcacccgcggcgaccgcaacaagcuccgccaccucaucuccgucaagcucggcaagauccccaccgucgagaacuccaucuuccacauggccgccugguccggcuccgccugccacgacggcaaggaguggaccuacaucggcgucgacggccccgacaacaacgcccuccucaagaucaaguacggcgaggccuacaccgacaccuaccacuccuacgccaacaacauccuccgcacccaggaguccgccugcaacugcaucggcggcaacugcuaccucauggucaccgacggcuccgccuccggcgucuccgagugccgcuuccucaagauccgcgagggccgcaucaucaaggagaucuuccccaccggccgcgucaagcacaccgaggagugcaccugcggcuucgccuccaacaagaccaucgagugcgccugccgcgacaacuccuacaccgccaagcgccccuucgucaagcucaacgucgagaccgacaccgccgagauccgccucaugugcaccgacaccuaccucgacaccccccgccccgacgacggcuccaucaccggccccugcgaguccaacggcgacaagggcuccggcggcaucaagggcggcuucguccaccagcgcauggccuccaagaucggccgcugguacucccgcaccauguccaagaccgagcgcaugggcaugggccucuacgucaaguacgacggcgaccccugggccgacuccgacgcccucgccuucuccggcgucauggucuccaugaaggagcccggcugguacuccuucggcuucgagaucaaggacaagaagugcgacguccccugcaucggcaucgagaugguccacgacggcggcaaggagaccuggcacuccgccgccaccgccaucuacugccucaugggcuccggccagcuccucugggacaccgucaccggcgucgacauggcccucuga

SEQ ID NO: 125491 - RNA, 1401 nt, Artificial Sequence; identical to SEQ ID NO: 124997
  derived and/or modified CDS sequence (opt2) from neuraminidase__InfluenzaB__AGX19924

SEQ ID NO: 125492 - RNA, 1401 nt, Artificial Sequence; identical to SEQ ID NO: 124997
  derived and/or modified CDS sequence (opt2) from neuraminidase__InfluenzaB__AGX19935

SEQ ID NO: 125493 - RNA, 1401 nt, Artificial Sequence; identical to SEQ ID NO: 124997
  derived and/or modified CDS sequence (opt2) from neuraminidase__InfluenzaB__AGX19946

SEQ ID NO: 125494 - RNA, 1401 nt, Artificial Sequence; identical to SEQ ID NO: 124997
  derived and/or modified CDS sequence (opt2) from neuraminidase__InfluenzaB__AGX19957

SEQ ID NO: 125495 - RNA, 1401 nt, Artificial Sequence
  derived and/or modified CDS sequence (opt2) from neuraminidase__InfluenzaB__AGX19968
augcuccccuccaccauccagacccucacccucuuccucaccuccggcggcguccuccucucccucuacgucuccgccucccucuccuaccuccucuacuccgacauccuccucaaguucucccccaccgagaucaccgcccccaccaugccccucgacugcgccaacgccuccaacguccaggccgucaaccgcuccgccaccaagggcgucacccuccuccuccccgagcccgaguggaccuacccccgccucuccugccccggcuccaccuuccagaaggcccuccucaucuccccccaccgcuucggcgagaccaagggcaacuccgccccccucaucauccgcgagcccuucaucgccugcggccccaacgagugcaagcacuucgcccucacccacuacgccgcccagcccggcggcuacuacaacggcacccgcggcgaccgcaacaagcuccgccaccucaucuccgucaagcucggcaagauccccaccgucgagaacuccaucuuccacauggccgccugguccggcuccgccugccacgacggcaaggaguggaccuacaucggcgucgacggccccgacaacgacgcccuccucaaggucaaguacggcgaggccuacaccgacaccuaccacuccuacgccaacaagauccuccgcacccaggaguccgccugcaacugcaucggcggcaacugcuaccucaugaucaccgacggcuccgccuccggcgucuccgagugccgcuuccucaagauccgcgagggccgcaucaucaaggagaucuuccccaccggccgcgucaagcacaccgaggagugcaccugcggcuucgccuccaacaagaccaucgagugcgccugccgcgacaacuccuacaccgccaagcgccccuucgucaagcucaacgucgagaccgacaccgccgagauccgccucaugugcaccgacaccuaccucgacaccccccgccccaacgacggcuccaucaccggccccugcgaguccaacggcgacaagggcuccggcggcaucaagggcggcuucguccaccagcgcauggaguccaagaucggccgcugguacucccgcaccauguccaagaccgagcgcaugggcaugggccucuacgucaaguacgacggcgaccccugggccgacuccgacgcccucgccuucuccggcgucauggucuccaugaaggagcccggcugguacuccuucggcuucgagaucaaggacaagaagugcgacguccccugcaucggcaucgagaugguccacgacggcggcaaggagaccuggcacuccgccgccaccgccaucuacugccucaugggcuccggccagcuccucugggacaccgucaccggcgucaacauggcccucuga

SEQ ID NO: 125496 - RNA, 1401 nt, Artificial Sequence; identical to SEQ ID NO: 125449
  derived and/or modified CDS sequence (opt2) from neuraminidase__InfluenzaB__AGX19979

SEQ ID NO: 125497 - RNA, 1401 nt, Artificial Sequence; identical to SEQ ID NO: 125449
  derived and/or modified CDS sequence (opt2) from neuraminidase__InfluenzaB__AGX19990

SEQ ID NO: 125498 - RNA, 1401 nt, Artificial Sequence; identical to SEQ ID NO: 124997
  derived and/or modified CDS sequence (opt2) from neuraminidase__InfluenzaB__AGX20001

SEQ ID NO: 125499 - RNA, 1401 nt, Artificial Sequence; identical to SEQ ID NO: 124997
  derived and/or modified CDS sequence (opt2) from neuraminidase__InfluenzaB__AGX20012

SEQ ID NO: 125500 - RNA, 1401 nt, Artificial Sequence; identical to SEQ ID NO: 124997
  derived and/or modified CDS sequence (opt2) from neuraminidase__InfluenzaB__AGX20023

SEQ ID NO: 125501 - RNA, 1401 nt, Artificial Sequence; identical to SEQ ID NO: 124997
  derived and/or modified CDS sequence (opt2) from neuraminidase__InfluenzaB__AGX20034

SEQ ID NO: 125502 - RNA, 1401 nt, Artificial Sequence; identical to SEQ ID NO: 124997
  derived and/or modified CDS sequence (opt2) from neuraminidase__InfluenzaB__AGX20045

SEQ ID NO: 125503 - RNA, 1401 nt, Artificial Sequence
  derived and/or modified CDS sequence (opt2) from neuraminidase__InfluenzaB__AGX20056
augcuccccuccaccauccagacccucacccucuuccucaccuccggcggcguccuccucucccucuacgucuccgccucccucuccuaccuccucuacuccgacauccuccucaaguucucccccaccgagaucaccgcccccaccaugccccucgacugcgccaacgccuccaacguccaggccgucaaccgcuccgccaccaagggcgucacccuccuccuccccgagcccgaguggaccuacccccgccucuccugccccggcuccaccuuccagaaggcccuccucaucuccccccaccgcuucggcgagaccaagggcaacuccgccccccucaugauccgcgagcccuucaucgccugcggccccaacgagugcaagcacuucgcccucacccacuacgccgcccagcccggcggcuacuacaacggcacccgcggcgaccgcaacaagcuccgccaccucaucuccgucaagcucggcaagauccccaccgucgagaacuccaucuuccacauggccgccugguccggcuccgccugccacgacggcaaggaguggaccuacaucggcgucgacggccccgacaacaacgcccuccucaaggucaaguacggcgaggccuacaccgacaccuaccacuccuacgccaacaagauccuccgcacccaggaguccgccugcaacugcaucggcggcaacugcuaccucauggucaccgacggcuccgccuccggcgucuccgagugccgcuuccucaagauccgcgagggccgcaucaucaaggagaucuuccccaccggccgcgucaagcacaccgaggagugcaccugcggcuucgccuccaacaagaccaucgagugcgccugccgcgacaacuccuacaccgccaagcgccccuucgucaagcucaacgucgagaccgacaccgccgagauccgccucaugugcaccgacaccuaccucgacaccccccgccccaacgacggcuccaucaccggccccugcgaguccaacggcgacaagggcuccggcggcaucaagggcggcuucguccaccagcgcauggaguccaagaucggccgcugguacucccgcaccauguccaagaccgagcgcaugggcaugggccucuacgucaaguacgacggcgaccccugggccgacuccgacgcccucgccuucuccggcgucauggucuccaugaaggagcccggcugguacuccuucggcuucgagaucaaggacaagaagugcgacguccccugcaucggcaucgagaugguccacgacggcggcaaggagaccuggcacuccgccgccaccgccaucuacugccucaugggcuccggccagcuccucugggacaccgucaccggcgucgacauggcccucuga

SEQ ID NO: 125504 - RNA, 1401 nt, Artificial Sequence
  derived and/or modified CDS sequence (opt2) from neuraminidase__InfluenzaB__AGX20067
augcuccccuccaccauccagacccucacccucuuccucaccuccggcggcguccuccucucccucuacgucuccgccucccucuccuaccuccucuacuccgacauccuccucaaguucucccccaccgagaucaccgcccccaccaugccccucgacugcgccaacgccuccaacguccaggccgucaaccgcuccgccaccaagggcgucacccuccuccuccccgagcccgaguggaccuacccccgccucuccugccccggcuccaccuuccagaaggcccuccucaucuccccccaccgcuucggcgagaccaagggcaacuccgccccccucaucauccgcgagcccuucaucgccugcggccccaacgagugcaagcacuucgcccucacccacuacgccgcccagcccggcggcuacuacaacggcacccgcggcgaccgcaacaagcuccgccaccucaucuccgucaagcucggcaagauccccaccgucgagaacuccaucuuccacauggccgccugguccggcuccgccugccacgacggcaaggaguggaccuacaucggcgucgacggccccgacaacaacgcccuccucaaggucaaguacggcgaggccuacaccgacaccuaccacuccuacgccaacaagauccuccgcacccaggaguccgccugcaacugcaucggcggcaacugcuaccucauggucaccgacggcuccgccuccggcgucuccgagugccgcuuccucaagauccgcgagggccgcaucaucaaggagaucuuccccaccggccgcgucaagcacaccgaggagugcaccugcggcuucgccuccaacaagaccaucgagugcgccugccgcgacaacuccuacaccgccaagcgccccuucgucaagcucaacgucgagaccgacaccgccgagauccgccucaugugcaccgacaccuaccucgacaccccccgccccaacgacggcuccaucaccggccccugcgaguccaacggcgacaagggcuccggcggcaucaagggcggcuucguccaccagcgcauggaguccaagaucggccgcugguacucccgcaccauguccaagaccgagcgcaugggcaugggccucuacgucaaguacgacggcgaccccugggccgacuccgacgcccucgccuucuccggcgucauggucuccaugaaggagcccggcugguacuccuucggcuucgagaucaaggacaagaagugcgacguccccugcaucggcaucgagaugguccacgacggcggcaaggagaccuggcacuccgccgccaccgccaucuacugccucaugggcuccggccagcuccucugggacaccgucaccggcgucgacauggcccucuga

SEQ ID NO: 125505 - RNA, 1401 nt, Artificial Sequence; identical to SEQ ID NO: 124997
  derived and/or modified CDS sequence (opt2) from neuraminidase__InfluenzaB__AGX20078

SEQ ID NO: 125506 - RNA, 1401 nt, Artificial Sequence; identical to SEQ ID NO: 124997
  derived and/or modified CDS sequence (opt2) from neuraminidase__InfluenzaB__AGX20089

SEQ ID NO: 125507 - RNA, 1401 nt, Artificial Sequence
  derived and/or modified CDS sequence (opt2) from neuraminidase__InfluenzaB__AGX20100
augcuccccuccaccauccagacccucacccucuuccucaccuccggcggcguccuccucucccucuacgucuccgccucccucuccuaccuccucuacuccgacauccuccucaaguuccccuccaccgagaucaccgcccccaccaugccccucgacugcgccaacgccuccaacguccaggccgucaaccgcuccgccaccaagggcgucacccuccuccuccccgagcccgaguggaccuacccccgccucuccugccccggcuccaccuuccagaaggcccuccucaucuccccccaccgcuucggcgagaccaagggcaacuccgccccccucaucauccgcgagcccuucaucgccugcggccccaaggagugcaagcacuucgcccucacccacuacgccgcccagcccggcggcuacuacaacggcacccgcggcgaccgcaacaagcuccgccaccucaucuccgucaagcucggcaagauccccaccgucgagaacuccaucuuccacauggccgccugguccggcuccgccugccacgacggcaaggaguggaccuacaucggcgucgacggccccgacaacaacgccguccucaagaucaaguacggcgaggccuacaccgacaccuaccacuccuacgccaacaacauccuccgcacccaggaguccgccugcaacugcaucggcggcaacugcuaccucaugaucaccgacggcuccgccuccggcgucuccgagugccgcuuccucaagauccgcgagggccgcaucaucaaggagaucuuccccaccggccgcauccagcacaccgaggagugcaccugcggcuucgccuccaacaagaccaucgagugcgccugccgcgacaacuccuacaccgccaagcgccccuucgucaagcucaacgucgagaccgacaccgccgagauccgccucaugugcaccaagaccuaccucgacaccccccgccccgacgacggcuccaucaccggccccugcgaguccaacggcggcaagggcuccggcggcaucaagggcggcuucguccaccagcgcauggccuccaagaucggccgcugguacucccgcaccauguccaagaccgagcgcaagggcaugggccucuacgucaaguacgacggcgaccccugggccgacuccgacgcccucgccuucuccggcgucauggucuccauggaggagcccggcugguacuccuucggcuucgagaucaaggacaagaagugcgacguccccugcaucggcaucgagaugguccacgacggcggcaaggagaccuggcacuccgccgccaccgccaucuacugccucaugggcuccggccagcuccucugggacaccgucaccggcgucaacauggcccucuga

SEQ ID NO: 125508 - RNA, 1401 nt, Artificial Sequence
  derived and/or modified CDS sequence (opt2) from neuraminidase__InfluenzaB__AGX20111
augcuccccuccaccauccagacccucacccucuuccucaccuccggcggcguccuccucucccucuacgucuccgccucccucuccuaccuccucuacuccgacauccuccucaaguucucccccaccgagaucaccgcccccaccaugccccucgacugcgccaacgccuccaacguccaggccgucaaccgcuccgccaccaagggcgucacccuccuccuccccgagcccgaguggaccuacccccgccucuccugccccggcuccaccuuccagaaggcccuccucaucuccccccaccgcuucggcgagaccaagggcaacuccgccccccucaucauccgcgagcccuucaucgccugcggccccaacgagugcaagcacuucgcccucacccacuacgccgcccagcccggcggcuacuacaacggcacccgcggcgaccgcaacaagcuccgccaccucaucuccgucaagcucggcaagauccccaccgucgagaacuccaucuuccacauggccgccugguccggcuccgccugccacgacggcaaggaguggaccuacaucggcgucgacggccccgacaacaacgcccuccucaaggucaaguacggcgaggccuacaccgacaccuaccacuccuacgccaacaagauccuccgcacccaggaguccgccugcaacugcaucggcggcaacugcuaccucaugaucaccgacggcuccgccuccggcgucuccgagugccgcuuccucaagauccgcgagggccgcaucaucaaggagaucuuccccaccggccgcgucaagcacaccgaggagugcaccugcggcuucgccuccaacaagaccaucgagugcgccugccgcgacaacuccuacaccgccaagcgccccuucgucaagcucaacgucgagaccgacaccgccgagauccgccucaugugcaccgacaccuaccucgacaccccccgccccgacgacggcuccaucaccggccccugcgaguccaacggcgacaagggcuccggcggcaucaagggcggcuucguccaccagcgcauggaguccaagaucggccgcugguacucccgcaccauguccaagaccgagcgcaugggcaugggccucuacgucaaguacgacggcgaccccugggccgacuccgacgcccucaccuucuccggcgucauggucuccaugaaggagcccggcugguacuccuucggcuucgagaucaaggacaagaagugcgacguccccugcaucggcaucgagaugguccacgacggcggcaaggagaccuggcacuccgccgccaccgccaucuacugccucaugggcuccggccagcuccucugggacaccgucaccggcgucgacauggcccucuga

SEQ ID NO: 125509 - RNA, 1401 nt, Artificial Sequence
  derived and/or modified CDS sequence (opt2) from neuraminidase__InfluenzaB__AGX20122
augcuccccuccaccauccagacccucacccucuuccucaccuccggcggcguccuccucucccucuacgucuccgcccuccucuccuaccuccucuacuccgacauccuccucaaguucucccccaccgagaucaccgcccccaccaugucccucgacugcgccaacgccuccaacguccaggccgucaaccgcuccgccaccaagggcgucaccuuccuccuccccgagcccgaguggaccuacccccgccucuccugccccggcuccaccuuccagcgcgcccuccucaucuccccccaccgcuucggcgagaccaagggcaacuccgccccccucaucauccgcgagcccuucaucgccugcggccccaacgagugcaagcacuucgcccucacccacuacgccgcccagcccggcggcuacuacaacggcacccgcggcgaccgcaacaagcuccgccaccucaucuccgucaagcucggcaagauccccaccgucgagaacuccaucuuccacauggccgccugguccggcuccgccugccacgacggcaaggaguggaccuacaucggcgucgacggccccgacaacgacgcccuccucaaggucaaguacggcgaggccuacaccgacaccuaccacuccuacgccaacaagauccuccgcacccaggaguccgccugcaacugcaucggcggcaacugcuaccucaugaucaccgacggcuccgccuccggcgucuccgagugccgcuuccucaagauccgcgagggccgcaucaucaaggagaucuuccccaccggccgcgucaagcacaccgaggagugcaccugcggcuucgccuccaacaagaccaucgagugcgccugccgcgacaacuccuacaccgccaagcgccccuucgucaagcucaacgucgagaccgacaccgccgagauccgccucaugugcaccgacaccuaccucgacaccccccgccccgacgacggcuccaucaccggccccugcgaguccaacggcgacaagggcuccggcggcaucaagggcggcuucguccaccagcgcauggaguccaagaucggccgcugguacucccgcaccauguccaagaccgagcgcaugggcaugggccucuacgucaaguacgacggcgaccccugggccgacuccgacgcccucgccuucuccggcgucauggucuccaugaaggagcccggcugguacuccuucggcuucgagaucaaggacaagaagugcgacguccccugcaucggcaucgagaugguccacgacggcggcaaggagaccuggcacuccgccgccaccgccaucuacugccucaugggcuccggccagcuccucugggacaccgucaccggcgucgacauggcccucuga

SEQ ID NO: 125510 - RNA, 1401 nt, Artificial Sequence
  derived and/or modified CDS sequence (opt2) from neuraminidase__InfluenzaB__AGX20133
augcuccccuccaccauccagacccucacccucuuccucaccuccggcggcguccuccucucccucuacgucuccgcccuccucuccuaccuccucuacuccgacguccuccucaaguucucccccaccgagaucaccgcccccaccaugucccucgacugcgccaacgccuccaacguccaggccgucaaccgcuccgccaccaagggcgucaccuuccuccuccccgagcccgaguggaccuacccccgccucuccugccccggcuccaccuuccagaaggcccuccucaucuccccccaccgcuucggcgagaccaagggcaacuccgccccccucaucauccgcgagcccuucaucgccugcggccccaacgagugcaagcacuucgcccucacccacuacgccgcccagcccggcggcuacuacaacggcacccgcggcgaccgcaacaagcuccgccaccucaucuccgucaagcucggcaagauccccaccgucgagaacuccaucuuccacauggccgccugguccggcuccgccugccacgacggcaaggaguggaccuacaucggcgucgacggccccgacaacgacgcccuccucaaggucaaguacggcgaggccuacaccgacaccuaccacuccuacgccaacaagauccuccgcacccaggaguccgccugcaacugcaucggcggcaacugcuaccucaugaucaccgacggcuccgccuccggcgucuccgagugccgcuuccucaagauccgcgagggccgcaucaucaaggagaucuuccccaccggccgcgucaagcacaccgaggagugcaccugcggcuucgccuccaacaagaccaucgagugcgccugccgcgacaacuccuacaccgccaagcgccccuucgucaagcucaacgucgagaccgacaccgccgagauccgccucaugugcaccgacaccuaccucgacaccccccgccccgacgacggcuccaucaccggccccugcgaguccaacggcgacaagggcuccggcggcaucaagggcggcuucguccaccagcgcauggaguccaagaucggccgcugguacucccgcaccauguccaagaccgagcgcaugggcaugggccucuacgucaaguacgacggcgaccccugggccgacuccgacgcccucgccuucuccggcgucauggucuccaugaaggagcccggcugguacuccuucggcuucgagaucaaggacaagaagugcgacguccccugcaucggcaucgagaugguccacgacggcggcaaggagaccuggcacuccgccgccaccgccaucuacugccucaugggcuccggccagcuccucugggacaccgucaccggcgucgacauggcccucuga

SEQ ID NO: 125511 - RNA, 1401 nt, Artificial Sequence
  derived and/or modified CDS sequence (opt2) from neuraminidase__InfluenzaB__AGX20144
augcuccccuccaccauccagacccucacccucuuccucaccuccggcggcguccuccucucccucuacgucuccgcccuccucuccuaccuccucuacuccgacauccuccucaaguucucccccaccgagaucaccgcccccaccaugucccucgacugcgccaacgccuccaacguccaggccgucaaccgcuccgccaccaagggcgucaccuuccuccuccccgagcccgaguggaccuacccccgccucuccugccccggcuccaccuuccagaaggcccuccucaucuccccccaccgcuucggcgagaccaagggcaacuccgccccccucaucauccgcgagcccuucaucgccugcggccccaacgagugcaagcacuucgcccucacccacuacgccgcccagcccggcggcuacuacaacggcacccgcggcgaccgcaacaagcuccgccaccucaucuccgucaagcucggcaagauccccaccgucgagaacuccaucuuccacauggccgccugguccggcuccgccugccacgacggcaaggaguggaccuacaucggcgucgacggccccgacaacgacgcccuccucaaggucaaguacggcgaggccuacaccgacaccuaccacuccuacgccaacaagauccuccgcacccaggaguccgccugcaacugcaucggcggcaacugcuaccucaugaucaccgacggcuccgccuccggcaucuccgagugccgcuuccucaagauccgcgagggccgcaucaucaaggagaucuuccccaccggccgcgucaagcacaccgaggagugcaccugcggcuucgccuccaacaagaccaucgagugcgccugccgcgacaacuccuacaccgccaagcgccccuucgucaagcucaacgucgagaccgacaccgccgagauccgccucaugugcaccgacaccuaccucgacaccccccgccccgacgacggcuccaucaccggccccugcgaguccaacggcgacaagggcuccggcggcaucaagggcggcuucguccaccagcgcauggaguccaagaucggccgcugguacucccgcaccauguccaagaccgagcgcaugggcaugggccucuacgucaaguacgacggcgaccccugggccgacuccgacgcccucgccuucuccggcgucauggucuccaugaaggagcccggcugguacuccuucggcuucgagaucaaggacaagaagugcgacguccccugcaucggcaucgagaugguccacgacggcggcaaggagaccuggcacuccgccgccaccgccaucuacugccucaugggcuccggccagcuccucugggacaccgucaccggcgucgacauggcccucuga

SEQ ID NO: 125512 - RNA, 1401 nt, Artificial Sequence; identical to SEQ ID NO: 125511
  derived and/or modified CDS sequence (opt2) from neuraminidase__InfluenzaB__AGX20155

SEQ ID NO: 125513 - RNA, 1401 nt, Artificial Sequence; identical to SEQ ID NO: 125511
  derived and/or modified CDS sequence (opt2) from neuraminidase__InfluenzaB__AGX20166

SEQ ID NO: 125514 - RNA, 1401 nt, Artificial Sequence; identical to SEQ ID NO: 124931
  derived and/or modified CDS sequence (opt2) from neuraminidase__InfluenzaB__AGX20177

SEQ ID NO: 125515 - RNA, 1401 nt, Artificial Sequence; identical to SEQ ID NO: 124931
  derived and/or modified CDS sequence (opt2) from neuraminidase__InfluenzaB__AGX20188

SEQ ID NO: 125516 - RNA, 1401 nt, Artificial Sequence; identical to SEQ ID NO: 124908
  derived and/or modified CDS sequence (opt2) from neuraminidase__InfluenzaB__AGX20199

SEQ ID NO: 125517 - RNA, 1401 nt, Artificial Sequence; identical to SEQ ID NO: 124931
  derived and/or modified CDS sequence (opt2) from neuraminidase__InfluenzaB__AGX20210

SEQ ID NO: 125518 - RNA, 1401 nt, Artificial Sequence; identical to SEQ ID NO: 125511
  derived and/or modified CDS sequence (opt2) from neuraminidase__InfluenzaB__AGX20221

SEQ ID NO: 125519 - RNA, 1401 nt, Artificial Sequence
  derived and/or modified CDS sequence (opt2) from neuraminidase__InfluenzaB__AGX20232
augcuccccuccaccauccagacccucacccucuuccucaccuccggcggcguccuccucucccucuacgucuccgccucccucuccuaccuccucuacuccggcauccuccucaaguucucccccaccgagaucaccgcccccaccaugccccucgacugcgccaacgccuccaacguccaggccgucaaccgcuccgccaccaagggcgucaccuuccuccuccccgagcccgaguggaccuacccccgccucuccugccccggcuccaccuuccagaaggcccuccucaucuccccccaccgcuucggcgagaccaagggcaacuccgccccccucaucauccgcgagcccuucaucgccugcggccccaacgagugcaagcacuucgcccucacccacuacgccgcccagcccggcggcuacuacaacggcacccgcggcgaccgcaacaagcuccgccaccucaucuccgucaagcucggcaagauccccaccgucgagaacuccaucuuccacauggccgccugguccggcuccgccugccacgacggcaaggaguggaccuacaucggcgucgacggccccgacaacaacgcccuccucaaggucaaguacggcgaggccuacaccgacaccuaccacuccuacgccaacaagauccuccgcacccaggaguccgccugcaacugcaucggcggcaacugcuaccucaugaucaccgacggcuccgccuccggcgucuccgagugccgcuuccucaagauccgcgagggccgcaucaucaaggagaucuuccccaccggccgcgucaagcacaccgaggagugcaccugcggcuucgccuccaacgagaccaucgagugcgccugccgcgacaacuccuacaccgccaagcgccccuucgucaagcucaacgucgagaccgacaccgccgagauccgccucaugugcaccgacaccuaccucgacaccccccgccccaacgacggcuccaucaccggccccugcgaguccaacggcgacaagggcggcggcggcaucaagggcggcuucguccaccagcgcauggaguccaagaucggccgcugguacucccgcaccauguccaagaccgagcgcaugggcaugggccucuacgucaaguacgacggcgaccccugggccgacuccgacgcccucgccuucuccggcgucauggucuccaugaaggagcccggcugguacuccuucggcuucgagaucaaggacaagaagugcgacguccccugcaucggcaucgagaugguccacgacggcggcaaggagaccuggcacuccgccgccaccgccaucuacugccucaugggcuccggccagcuccucugggacaccgucaccggcgucgacauggcccucuga

SEQ ID NO: 125520 - RNA, 1401 nt, Artificial Sequence; identical to SEQ ID NO: 124931
  derived and/or modified CDS sequence (opt2) from neuraminidase__InfluenzaB__AGX20243

SEQ ID NO: 125521 - RNA, 1401 nt, Artificial Sequence; identical to SEQ ID NO: 125511
  derived and/or modified CDS sequence (opt2) from neuraminidase__InfluenzaB__AGX20254

SEQ ID NO: 125522 - RNA, 1401 nt, Artificial Sequence; identical to SEQ ID NO: 124908
  derived and/or modified CDS sequence (opt2) from neuraminidase__InfluenzaB__AGX20265

SEQ ID NO: 125523 - RNA, 1401 nt, Artificial Sequence; identical to SEQ ID NO: 125511
  derived and/or modified CDS sequence (opt2) from neuraminidase__InfluenzaB__AGX20276

SEQ ID NO: 125524 - RNA, 1401 nt, Artificial Sequence; identical to SEQ ID NO: 124931
  derived and/or modified CDS sequence (opt2) from neuraminidase__InfluenzaB__AGX20287

SEQ ID NO: 125525 - RNA, 1401 nt, Artificial Sequence
  derived and/or modified CDS sequence (opt2) from neuraminidase__InfluenzaB__AGX20298
augcuccccuccaccauccagacccucacccucuuccucaccuccggcggcguccuccucucccucuacgucuccgcccuccucuccuaccuccucuacuccgacauccuccucaaguucucccccaccgagaucaccgcccccaccaugucccucgacugcgccaacgccuccaacguccaggccgucaaccgcuccgccaccaagggcgucaccuuccuccuccccgagcccgaguggaccuacccccgccucuccugccccggcuccaccuuccagaaggcccuccucaucuccccccaccgcuucggcgagaccaagggcaacuccgccccccucaucauccgcgagcccuucaucgccugcggccccaacgagugcaagcacuucgcccucacccacuacgccgcccagcccggcggcuacuacaacggcacccgcggcgaccgcaacaagcuccgccaccucaucuccgucaagcucggcaagauccccaccgucgagaacuccaucuuccacauggccgccugguccggcuccgccugccacgacggcaaggaguggaccuacaucggcgucgacggccccgacaacgacgcccuccucaaggucaaguacggcgaggccuacaccgacaccuaccacuccuacgccaacaagauccuccgcacccaggaguccgccugcaacugcaucggcggcaacugcuaccucaugaucaccgacggcuccgccuccggcgucuccgagugccgcuuccucaagauccgcgagggccgcaucaucaaggagaucuuccccaccggccgcgucaagcacaccgaggagugcaccugcggcuucgccuccaacaagaccaucgagugcgccugccgcgacaacuccuacaccgccaagcgccccuucgucaagcucaacgucgagaccgacaccgccgagauccgccucaugugcaccgacaccuaccucgacaccccccgccccgacgacggcuccaucaccggccccugcgaguccaacggcgacaagggcuccggcggcaucaagggcggcuucguccaccagcgcauggaguccaagaucggccgcugguacucccgcaccauguccaagaccgagcgcaugggcaugggccucuacgucaaguacgacggcgaccccugggccgacuccgacgcccucgccuucuccggcgucauggucuccaugaaggagcccggcugguacuccuucggcuucgagaucaaggacaagaagugcgacguccccugcaucggcaucgagaugguccacgacggcggcaaggagaccuggcaguccgccgccaccgccaucuacugccucaugggcuccggccagcuccucugggacaccgucaccggcgucgacauggcccucuga

SEQ ID NO: 125526 - RNA, 1401 nt, Artificial Sequence; identical to SEQ ID NO: 124908
  derived and/or modified CDS sequence (opt2) from neuraminidase__InfluenzaB__AGX20320

SEQ ID NO: 125527 - RNA, 1401 nt, Artificial Sequence; identical to SEQ ID NO: 124931
  derived and/or modified CDS sequence (opt2) from neuraminidase__InfluenzaB__AGX20331

SEQ ID NO: 125528 - RNA, 1401 nt, Artificial Sequence
  derived and/or modified CDS sequence (opt2) from neuraminidase__InfluenzaB__AGX20342
augcuccccuccaccauccagacccucacccucuuccucaccuccggcggcguccuccucucccucuacgucuccgccucccucuccuaccuccucuacuccgacauccuccucaaguucucccccaccgagaucaccgcccccaccaugccccucgacugcgccaacgccuccaacguccaggccgucaaccgcuccgccaccaagggcgucacccuccuccuccccgagcccgaguggaccuacccccgccucuccugccccggcuccaccuuccagaaggcccuccucaucuccccccaccgcuucggcgagaccaagggcaacuccgccccccucaucauccgcgagcccuucaucgccugcggccccaacgagugcaagcacuucgcccucacccacuacgccgcccagcccggcggcuacuacaacggcacccgcggcgaccgcaacaagcuccgccaccucaucuccgucaagcucggcaagauccccaccgucgagaacuccaucuuccacauggccgccugguccggcuccgccugccacgacggcaaggaguggaccuacaucggcgucgacggccccgacaacaacgcccuccucaaggucaaguacggcgaggccuacaccgacaccuaccacuccuacgccaacaagauccuccgcacccaggaguccgccugcaacugcaucggcggcaacugcuaccucauggucaccgacggcuccgccuccggcgucuccgagugccgcuuccucaagauccgcgagggccgcaucaucaaggagaucuuccccaccggccgcgucaagcacaccgaggagugcaccugcggcuucgccuccaacaagaccaucgagugcgccugccgcgacaacuccuacaccgccaagcgccccuucgucaagcucaacgucgagaccgacaccgccgagauccgccucaugugcaccgacaccuaccucgacaccccccgccccgacgacggcuccaucaccggccccugcgaguccaacggcgacaagggcuccggcggcaucaagggcggcuucguccaccagcgcauggaguccaagaucggccgcugguacucccgcaccauguccaagaccgagcgcaugggcaugggccucuacgucaaguacgacggcgaccccugggccgacuccgacgcccucgccuucuccggcgucauggucuccaugaaggagcccggcugguacuccuucggcuucgagaucaaggacaagaagugcgacguccccugcaucggcaucgagaugguccacgacggcggcaaggagaccuggcacuccgccgccaccgccaucuacugccucaugggcuccggccagcuccucugggacaccgucaccggcgucgacauggcccucuga

SEQ ID NO: 125529 - RNA, 1401 nt, Artificial Sequence
  derived and/or modified CDS sequence (opt2) from neuraminidase__InfluenzaB__AGX20353
augcuccccuccaccauccagacccucacccucuuccucaccuccggcggcguccuccucucccucuacgucuccgcccuccucuccuaccuccucuacuccgacauccuccucaaguucucccccaccgagaucaucgcccccaccaugucccucgacugcgccaacgccuccaacguccaggccgucaaccgcuccgccaccaagggcgucaccuuccuccuccccgagcccgaguggaccuacccccgccucuccugccccggcuccaccuuccagaaggcccuccucaucuccccccaccgcuucggcgagaccaagggcaacuccgccccccucaucauccgcgagcccuucaucgccugcggccccaacgagugcaagcacuucgcccucacccacuacgccgcccagcccggcggcuacuacaaccgcacccgcggcgaccgcaacaagcuccgccaccucaucuccgucaagcucggcaagauccccaccgucgagaacuccaucuuccacauggccgccugguccggcuccgccugccacgacggcaaggaguggaccuacaucggcgucgacggccccgacaacgacgcccuccucaaggucaaguacggcgaggccuacaccgacaccuaccacuccuacgccaacaagauccuccgcacccaggaguccgccugcaacugcaucggcggcaacugcuaccucaugaucaccgacggcuccgccuccggcaucuccgagugccgcuuccucaagauccgcgagggccgcaucaucaaggagaucuuccccaccggccgcgucaagcacaccgaggagugcaccugcggcuucgccuccaacaagaccaucgagugcgccugccgcgacaacuccuacaccgccaagcgccccuucgucaagcucaacgucgagaccgacaccgccgagauccgccucaugugcaccgacaccuaccucgacaccccccgccccgacgacggcuccaucaccggccccugcgaguccaacggcgacaagggcuccggcggcaucaagggcggcuucguccaccagcgcauggaguccaagaucggccgcugguacucccgcaccauguccaagaccgagcgcaugggcaugggccucuacgucaaguacgacggcgaccccugggccgacuccgacgcccucgccuucuccggcgucauggucuccaugaaggagcccggcugguacuccuucggcuucgagaucaaggacaagaagugcgacguccccugcaucggcaucgagaugguccacgacggcggcaaggagaccuggcacuccgccgccaccgccaucuacugccucaugggcuccggccagcuccucugggacaccgucaccggcgucgacauggcccucuga

SEQ ID NO: 125530 - RNA, 1401 nt, Artificial Sequence; identical to SEQ ID NO: 124931
  derived and/or modified CDS sequence (opt2) from neuraminidase__InfluenzaB__AGX20364

SEQ ID NO: 125531 - RNA, 1401 nt, Artificial Sequence; identical to SEQ ID NO: 124926
  derived and/or modified CDS sequence (opt2) from neuraminidase__InfluenzaB__AGX20375

SEQ ID NO: 125532 - RNA, 1401 nt, Artificial Sequence
  derived and/or modified CDS sequence (opt2) from neuraminidase__InfluenzaB__AGX20386
augcuccccuccaccauccagacccucacccucuuccucaccuccggcggcguccuccucucccucuacgucuccgcccuccucuccuaccuccucuacuccgacauccuccucaaguucucccccaccgagaucaccgcccccaccaugucccucgacugcgccaacgccuccaacguccaggccgucaaccgcuccgccaccaagggcgucaccuuccuccuccccgagcccgaguggacccacccccgccucuccugccccggcuccaccuuccagaaggcccuccucaucuccccccaccgcuucggcgagaccaagggcaacuccgccccccucaucauccgcgagcccuucaucgccugcggccccaacgagugcaagcacuucgcccucacccacuacgccgcccagcccggcggcuacuacaacggcacccgcggcgaccgcaacaagcuccgccaccucaucuccgucaagcucggcaagauccccaccgucgagaacuccaucuuccacauggccgccugguccggcuccgccugccacgacggcaaggaguggaccuacaucggcgucgacggccccgacaacgacgcccuccucaaggucaaguacggcgaggccuacaccgacaccuaccacuccuacgccaacaagauccuccgcacccaggaguccgccugcaacugcaucggcggcaacugcuaccucaugaucaccgacggcuccgccuccggcaucuccgagugccgcuuccucaagauccgcgagggccgcaucaucaaggagaucuuccccaccggccgcgucaagcacaccgaggagugcaccugcggcuucgccuccaacaagaccaucgagugcgccugccgcgacaacuccuacaccgccaagcgccccuucgucaagcucaacgucgagaccgacaccgccgagauccgccucaugugcaccgacaccuaccucgacaccccccgccccgacgacggcuccaucaccggccccugcgaguccaacggcgacaagggcuccggcggcaucaagggcggcuucguccaccagcgcauggaguccaagaucggccgcugguacucccgcaccauguccaagaccgagcgcaugggcaugggccucuacgucaaguacgacggcgaccccugggccgacuccgacgcccucgccuucuccggcgucauggucuccaugaaggagcccggcugguacuccuucggcuucgagaucaaggacaagaagugcgacguccccugcaucggcaucgagaugguccacgacggcggcaaggagaccuggcacuccgccgccaccgccaucuacugccucaugggcuccggccagcuccucugggacaccgucaccggcgucgacauggcccucuga

SEQ ID NO: 125533 - RNA, 1401 nt, Artificial Sequence; identical to SEQ ID NO: 124931
  derived and/or modified CDS sequence (opt2) from neuraminidase__InfluenzaB__AGX20397

SEQ ID NO: 125534 - RNA, 1401 nt, Artificial Sequence; identical to SEQ ID NO: 124926
  derived and/or modified CDS sequence (opt2) from neuraminidase__InfluenzaB__AGX20408

SEQ ID NO: 125535 - RNA, 1401 nt, Artificial Sequence; identical to SEQ ID NO: 124908
  derived and/or modified CDS sequence (opt2) from neuraminidase__InfluenzaB__AGX20419

SEQ ID NO: 125536 - RNA, 1401 nt, Artificial Sequence
  derived and/or modified CDS sequence (opt2) from neuraminidase__InfluenzaB__AGX20430
augcuccccuccaccauccagacccucacccucuuccucaccuccggcggcguccuccucucccucuacgucuccgcccuccucuccuaccuccucuacuccgacauccuccucaaguucucccccaccgagaucaccgcccccaccaugucccucgacugcgccaacgccuccaacguccaggccgucaaccgcuccgccaccaagggcgucaccuuccuccuccccgagcccgaguggaccuacccccgccucuccugccccggcuccaccuuccagcgcgcccuccucaucuccccccaccgcuucggcgaggccaagggcaacuccgccccccucaucauccgcgagcccuucaucgccugcggccccaacgagugcaagcacuucgcccucacccacuacgccgcccagcccggcggcuacuacaacggcacccgcggcgaccgcaacaagcuccgccaccucaucuccgucaagcucggcaagauccccaccgucgagaacuccaucuuccacauggccgccugguccggcuccgccugccacgacggcaaggaguggaccuacaucggcgucgacggccccgacaacgacgcccuccucaaggucaaguacggcgaggccuacaccgacaccuaccacuccuacgccaacaagauccuccgcacccaggaguccgccugcaacugcaucggcggcaacugcuaccucaugaucaccgacggcuccgccuccggcgucuccgagugccgcuuccucaagauccgcgagggccgcaucaucaaggagaucuuccccaccggccgcgucaagcacaccgaggagugcaccugcggcuucgccuccaacaagaccaucgagugcgccugccgcgacaacuccuacaccgccaagcgccccuucgucaagcucaacgucgagaccgacaccgccgagauccgccucaugugcaccgacaccuaccucgacaccccccgccccgacgacggcuccaucaccggccccugcgaguccaacggcgacaagggcuccggcggcaucaagggcggcuucguccaccagcgcauggaguccaagaucggccgcugguacucccgcaccauguccaagaccgagcgcaugggcaugggccucuacgucaaguacgacggcgaccccugggccgacuccgacgcccucgccuucuccggcgucauggucuccaugaaggagcccggcugguacuccuucggcuucgagaucaaggacaagaagugcgacguccccugcaucggcaucgagaugguccacgacggcggcaaggagaccuggcacuccgccgccaccgccaucuacugccucaugggcuccggccagcuccucugggacaccgucaccggcgucgacauggcccucuga

SEQ ID NO: 125537 - RNA, 1401 nt, Artificial Sequence; identical to SEQ ID NO: 124908
  derived and/or modified CDS sequence (opt2) from neuraminidase__InfluenzaB__AGX20441

SEQ ID NO: 125538 - RNA, 1401 nt, Artificial Sequence
  derived and/or modified CDS sequence (opt2) from neuraminidase__InfluenzaB__AGX20452
augcuccccuccaccauccagacccucacccucuuccucaccuccggcggcguccuccucucccucuacgucuccgccucccucuccuaccuccucuacuccgacauccuccucaaguucucccccaccgagaucaccgcccccaccaugucccucgacugcgccaacgccuccaacguccaggccgucaaccgcuccgccaccaagggcgucaccuuccuccuccccgagcccgaguggaccuacccccgccucuccugccccggcuccaccuuccagaaggcccuccucaucuccccccaccgcuucggcgagaccaagggcaacuccgccccccucaucauccgcgagcccuucaucgccugcggccccaacgagugcaagcacuucgcccucacccacuacgccgcccagcccggcggcuacuacaacggcacccgcggcgaccgcaacaagcuccgccaccucaucuccgucaagcucggcaagauccccaccgucgagaacuccaucuuccacauggccgccugguccggcuccgccugccacgacggcaaggaguggaccuacaucggcgucgacggccccgacaacgacgcccuccucaaggucaaguacggcgaggccuacaccgacaccuaccacuccuacgccaacaagauccuccgcacccaggaguccgccugcaacugcaucggcggcaacugcuaccucaugaucaccgacggcuccgccuccggcgucuccgagugccgcuuccucaagauccgcgagggccgcaucaucaaggagaucuuccccaccggccgcgucaagcacaccgaggagugcaccugcggcuucgccuccaacaagaccaucgagugcgccugccgcgacaacuccuacaccgccaagcgccccuucgucaagcucaacgucgagaccgacaccgccgagauccgccucaugugcaccgacaccuaccucgacaccccccgccccgacgacggcuccaucaccggccccugcgaguccaacggcgacaagggcuccggcggcaucaagggcggcuucguccaccagcgcauggaguccaagaucggccgcugguacucccgcaccauguccaagaccgagcgcaugggcaugggccucuacgucaaguacgacggcgaccccugggccgacuccgacgcccucgccuucuccggcgucauggucuccaugaaggagcccggcugguacuccuucggcuucgagauccgcgacaagaagugcgacguccccugcaucggcaucgagaugguccacgacggcggcaaggagaccuggcacuccgccgccaccgccaucuacugccucaugggcuccggccagcuccucugggacaccgucaccggcgucgacauggcccucuga

SEQ ID NO: 125539 - RNA, 1401 nt, Artificial Sequence; identical to SEQ ID NO: 124931
  derived and/or modified CDS sequence (opt2) from neuraminidase__InfluenzaB__AGX20463

SEQ ID NO: 125540 - RNA, 1401 nt, Artificial Sequence; identical to SEQ ID NO: 124931
  derived and/or modified CDS sequence (opt2) from neuraminidase__InfluenzaB__AGX20474

SEQ ID NO: 125541 - RNA, 1401 nt, Artificial Sequence; identical to SEQ ID NO: 124931
  derived and/or modified CDS sequence (opt2) from neuraminidase__InfluenzaB__AGX20485

SEQ ID NO: 125542 - RNA, 1401 nt, Artificial Sequence; identical to SEQ ID NO: 125511
  derived and/or modified CDS sequence (opt2) from neuraminidase__InfluenzaB__AGX20496

SEQ ID NO: 125543 - RNA, 1401 nt, Artificial Sequence; identical to SEQ ID NO: 124931
  derived and/or modified CDS sequence (opt2) from neuraminidase__InfluenzaB__AGX20507

SEQ ID NO: 125544 - RNA, 1401 nt, Artificial Sequence; identical to SEQ ID NO: 124931
  derived and/or modified CDS sequence (opt2) from neuraminidase__InfluenzaB__AGX20518

SEQ ID NO: 125545 - RNA, 1401 nt, Artificial Sequence
  derived and/or modified CDS sequence (opt2) from neuraminidase__InfluenzaB__AGX20529
augcuccccuccaccauccagacccucacccucuuccucaccuccggcggcguccuccucucccucuacgucuccgcccuccucuccuaccuccucuacuccgacauccuccucaaguucucccccaccgagaucaccgcccccaccaugucccucgacugcgccaacgccuccaacguccaggccgucaaccgcuccgccaccaagggcgucaccuuccuccuccccgagcccgaguggaccuacccccgccucuccugccccggcuccaccuuccagaaggcccuccucaucuccccccaccgcuucggcgagaccaagggcaacuccgccccccucaucauccgcgagcccuucaucgccugcggccccaacgagugcaagcacuucgcccucacccacuacgccgcccagcccggcggcuacuacaacggcacccgcggcgaccgcaacaagcuccgccaccucaucuccgucaagcucggcaagauccccaccgucgagaacuccaucuuccacauggccgccugguccggcuccgccugccacgacggcaaggaguggaccuacaucggcgucgacggccccgacaacgacgcccuccucaaggucaaguacggcgaggccuacaccgacaccuaccacuccuacgccaacaagauccuccgcacccaggaguccgccugcaacugcaucggcggcaacugcuaccucaugaucaccgacggcuccgccuccggcgucuccgagugccgcuuccucaagauccgcgagggccgcaucaucaaggagaucuuccccaccggccgcgucaagcacaccgaggagugcaccugcggcuucgccuccaacaagaccaucgagugcaccugccgcgacaacuccuacaccgccaagcgccccuucgucaagcucaacgucgagaccgacaccgccgagauccgccucaugugcaccgacaccuaccucgacaccccccgccccgacgacggcuccaucaccggccccugcgaguccaacggcgacaagggcuccggcggcaucaagggcggcuucguccaccagcgcauggaguccaagaucggccgcugguacucccgcaccauguccaagaccgagcgcaugggcaugggccucuacgucaaguacgacggcgaccccugggccgacuccgacgcccucgccuucuccggcgucauggucuccaugaaggagcccggcugguacuccuucggcuucgagaucaaggacaagaagugcgacguccccugcaucggcaucgagaugguccacgacggcggcaaggagaccuggcacuccgccgccaccgccaucuacugccucaugggcuccggccagcuccucugggacaccgucaccggcgucgacauggcccucuga

SEQ ID NO: 125546 - RNA, 1401 nt, Artificial Sequence; identical to SEQ ID NO: 125509
  derived and/or modified CDS sequence (opt2) from neuraminidase__InfluenzaB__AGX20540

SEQ ID NO: 125547 - RNA, 1401 nt, Artificial Sequence; identical to SEQ ID NO: 125155
  derived and/or modified CDS sequence (opt2) from neuraminidase__InfluenzaB__AGX20551

SEQ ID NO: 125548 - RNA, 1401 nt, Artificial Sequence; identical to SEQ ID NO: 124908
  derived and/or modified CDS sequence (opt2) from neuraminidase__InfluenzaB__AGX20562

SEQ ID NO: 125549 - RNA, 1401 nt, Artificial Sequence; identical to SEQ ID NO: 124931
  derived and/or modified CDS sequence (opt2) from neuraminidase__InfluenzaB__AGX20573

SEQ ID NO: 125550 - RNA, 1401 nt, Artificial Sequence
  derived and/or modified CDS sequence (opt2) from neuraminidase__InfluenzaB__AGX20584
augcuccccuccaccauccagacccucacccucuuccucaccuccggcggcguccuccucucccucuacgucuccgccucccucuccuaccuccucuacuccgacauccuccucaaguucuccuccaccgagaucaccgcccccaccaugccccucgacugcgccaacgccuccaacguccaggccgucaaccgcuccgccaccaagggcgucacccuccuccuccccgagcccgaguggaccuacccccgccucuccugccccggcuccaccuuccagaaggcccuccucaucuccccccaccgcuucggcgagaccaagggcaacuccgccccccucaucauccgcgagcccuucaucgccugcggccccaacgagugcaagcacuucgcccucacccacuacgccgcccagcccggcggcuacuacaacggcacccgcggcgaccgcaacaagcuccgccaccucaucuccgucaagcucggcaagauccccaccgucgagaacuccaucuuccacauggccgccugguccggcuccgccugccacgacggcaaggaguggaccuacaucggcgucgacggccccgacaacaacgcccuccucaaggucaaguacggcgaggccuacaccgacaccuaccacuccuacgccaacaagauccuccgcacccaggaguccgccugcaacugcaucggcggcaacugcuaccucaugaucaccgacggcuccgccuccggcgucuccgagugccgcuuccucaagauccgcgagggccgcaucaucaaggagaucuuccccaccggccgcgucaagcacaccgaggagugcaccugcggcuucgccuccaacaagaccaucgagugcgccugccgcgacaacuccuacaccgccaagcgccccuucgucaagcucaacgucgagaccgacaccgccgagauccgccucaugugcaccgacaccuaccucgacaccccccgccccaacgacggcuccaucaccggccccugcgaguccaacggcgacaagggcuccggcggcaucaagggcggcuucguccaccagcgcauggagucccgcaucggccgcugguacucccgcaccauguccaagaccgagcgcaugggcaugggccucuacgucaaguacgacggcgaccccuggaccgacuccgacgcccucaccuucuccggcgucauggucuccaugaaggagcccggcugguacuccuucggcuucgagaucaaggacaagaagugcgacguccccugcaucggcaucgagaugguccacgacggcggcaaggagaccuggcacuccgccgccaccgccaucuacugccucaugggcuccggccagcuccucugggacaccgucaccggcgucgacauggcccucuga

SEQ ID NO: 125551 - RNA, 1401 nt, Artificial Sequence; identical to SEQ ID NO: 124931
  derived and/or modified CDS sequence (opt2) from neuraminidase__InfluenzaB__AGX20595

SEQ ID NO: 125552 - RNA, 1401 nt, Artificial Sequence; identical to SEQ ID NO: 125509
  derived and/or modified CDS sequence (opt2) from neuraminidase__InfluenzaB__AGX20606

SEQ ID NO: 125553 - RNA, 1401 nt, Artificial Sequence; identical to SEQ ID NO: 125509
  derived and/or modified CDS sequence (opt2) from neuraminidase__InfluenzaB__AGX20617

SEQ ID NO: 125554 - RNA, 1401 nt, Artificial Sequence; identical to SEQ ID NO: 125536
  derived and/or modified CDS sequence (opt2) from neuraminidase__InfluenzaB__AGX20628

SEQ ID NO: 125555 - RNA, 1401 nt, Artificial Sequence; identical to SEQ ID NO: 124936
  derived and/or modified CDS sequence (opt2) from neuraminidase__InfluenzaB__AGX20639

SEQ ID NO: 125556 - RNA, 1401 nt, Artificial Sequence
  derived and/or modified CDS sequence (opt2) from neuraminidase__InfluenzaB__AGX20650
augcuccccuccaccauccagacccucacccucuuccucaccuccggcggcguccuccucucccucuacgucuccgcccuccucuccuaccuccucuacuccgacauccuccucaaguucucccccaccgagaucaccgcccccaccaugucccucgacugcgccaacgccuccaacguccaggccgucaaccgcuccgccaccaagggcgucaccuuccuccuccccgagcccgaguggaccuacccccgccucuccugccccggcuccaccuuccagaaggcccuccucaucuccccccaccgcuucggcgagaccaagggcaacuccgccccccucaucauccgcgagcccuucaucgccugcggccccaacgagugcaagcacuucgcccucacccacuacgccgcccagcccggcggcuacuacaacggcacccgcggcgaccgcaacaagcuccgccaccucaucuccgucaagcucggcaagauccccaccgucgagaacuccaucuuccacauggccgccugguccggcuccgccugccacgacggcaaggaguggaccuacaucggcgucgacggccccgacaacgacgcccuccucaaggucaaguacggcgaggccuacaccgacaccuaccacuccuacgccaacaagauccuccgcacccaggaguccaccugcaacugcaucggcggcaacugcuaccucaugaucaccgacggcuccgccuccggcgucuccgagugccgcuuccucaagauccgcgagggccgcaucaucaaggagaucuuccccaccggccgcgucaagcacaccgaggagugcaccugcggcuucgccuccaacaagaccaucgagugcgccugccgcgacaacuccuacaccgccaagcgccccuucgucaagcucaacgucgagaccgacaccgccgagauccgccucaugugcaccgacaccuaccucgacaccccccgccccgacgacggcuccaucaccggccccugcgaguccaacggcgacaagggcuccggcggcaucaagggcggcuucguccaccagcgcauggaguccaagaucggccgcugguacucccgcaccauguccaagaccgagcgcaugggcaugggccucuacgucaaguacgacggcgaccccugggccgacuccgacgcccucgccuucuccggcgucauggucuccaugaaggagcccggcugguacuccuucggcuucgagaucaaggacaagaagugcgacguccccugcaucggcaucgagaugguccacgacggcggcaaggagaccuggcacuccgccgccaccgccaucuacugccucaugggcuccggccagcuccucugggacaccgucaccggcgucgacauggcccucuga

SEQ ID NO: 125557 - RNA, 1401 nt, Artificial Sequence
  derived and/or modified CDS sequence (opt2) from neuraminidase__InfluenzaB__AGX20661
augcuccccuccaccauccagacccucacccucuuccucaccuccggcggcguccuccucucccucuacgucuccgccucccucuccuaccuccucuacuccgacauccuccucaaguucucccccaccgagaucaccgcccccaccaugccccucgacugcgccaacgccuccaacguccaggccgucaaccgcuccgccaccaagggcgucacccuccuccuccccgagcccgaguggaccuacccccgccucuccugccccggcuccaccuuccagaaggcccuccucaucuccccccaccgcuucggcgagaccaagggcaacuccgccccccucaucauccgcgagcccuucaucgccugcggccccaacgagugcaagcacuucgcccucacccacuacgccgcccagcccggcggcuacuacaacggcacccgcggcgaccgcaacaagcuccgccaccucaucuccgucaaccucggcaagauccccaccgucgagaacuccaucuuccacauggccgccugguccggcuccgccugccacgacggcaaggaguggaccuacaucggcgucgacggccccgacaacaacgcccuccucaaggucaaguacggcgaggccuacaccgacaccuaccacuccuacgccaacaacauccuccgcacccaggaguccgccugcaacugcaucggcggcaacugcuaccucaugaucaccgacggcuccgccuccggcgucuccgagugccgcuuccucaagauccgcgagggccgcaucaucaaggagaucuuccccaccggccgcgucaagcacaccgaggagugcaccugcggcuucgccuccaacaagaccaucgagugcgccugccgcgacaacuccuacaccgccaagcgccccuucgucaagcucaacgucgagaccgacaccgccgagauccgccucaugugcaccgacaccuaccucgacaccccccgccccaacgacggcuccaucaccggccccugcgaguccaacggcgacaagggcuccggcggcaucaagggcggcuucguccaccagcgcauggaguccaagaucggccgcugguacucccgcaccauguccaagaccgagcgcaugggcaugggccucuacgucaaguacgacggcgaccccuggaccgacuccgacgcccucgccuucuccggcgucauggucuccaugaaggagcccggcugguacuccuucggcuucgagaucaaggacaagaagugcgacguccccugcaucggcaucgagaugguccacgacggcggcaaggagaccuggcacuccgccgccaccgccaucuacugccucaugggcuccggccagcuccucugggacaccgucaccggcgucgacauggcccucuga

SEQ ID NO: 125558 - RNA, 1401 nt, Artificial Sequence; identical to SEQ ID NO: 124992
  derived and/or modified CDS sequence (opt2) from neuraminidase__InfluenzaB__AGX20683

SEQ ID NO: 125559 - RNA, 1401 nt, Artificial Sequence; identical to SEQ ID NO: 125155
  derived and/or modified CDS sequence (opt2) from neuraminidase__InfluenzaB__AGX20694

SEQ ID NO: 125560 - RNA, 1401 nt, Artificial Sequence
  derived and/or modified CDS sequence (opt2) from neuraminidase__InfluenzaB__AGX20705
augcuccccuccaccauccagacccucacccucuuccucaccuccggcggcguccuccucucccucuacgucuccgccucccucuccuaccuccucuacuccggcauccuccucaaguucucccccaccgagaucaccgcccccaccaugccccucgacugcgccaacgccuccgacguccaggccgucaaccgcuccgccaccaagggcgucacccuccuccuccccgagcccgaguggaccuacccccgccucuccugccccggcuccaccuuccagaaggcccuccucaucuccccccaccgcuucggcgagaccaagggcaacuccgccccccucaucauccgcgagcccuucaucgccugcggccccaacgagugcaagcacuucgcccucacccacuacgccgcccagcccggcggcuacuacaacggcacccgcggcgaccgcaacaagcuccgccaccucaucuccgucaagcucggcaagauccccaccgucgagaacuccaucuuccacauggccgccugguccggcuccgccugccacgacggcaaggaguggaccuacaucggcgucgacggccccgacaacaacgcccuccucaaggucaaguacggcgaggccuacaccgacaccuaccacuccuacgccaacaagauccuccgcacccaggaguccgccugcaacugcaucggcggcaacugcuaccucaugaucaccgacggcuccgccuccggcgucuccgagugccgcuuccucaagauccgcgagggccgcaucaucaaggagaucuuccccaccggccgcgucaagcacaccgaggagugcaccugcggcuucgccuccaacaagaccaucgagugcgccugccgcgacaacuccuacaccgccaagcgccccuucgucaagcucaacgucgagaccgacaccgccgagauccgccucaugugcaccgacaccuaccucgacaccccccgccccaacgacggcuccaucaccggccccugcgaguccaacggcgacaagggcuccggcggcaucaagggcggcuucguccaccagcgcauggaguccaagaucggccgcugguacucccgcaccauguccaagaccgagcgcaugggcaugggccucuacgucaaguacgacggcgaccccugggccgacuccgacgcccucaccuucuccggcgucauggucuccaugaaggagcccggcugguacuccuucggcuucgagaucaaggacaagaagugcgacguccccugcaucggcaucgagaugguccacgacggcggcaaggagaccuggcacuccgccgccaccgccaucuacugccucaugggcuccggccagcuccucugggacaccgucaccggcgucgacauggcccucuga

SEQ ID NO: 125561 - RNA, 1401 nt, Artificial Sequence
  derived and/or modified CDS sequence (opt2) from neuraminidase__InfluenzaB__AGX20716
augcuccccuccaccauccagacccucacccucuuccucaccuccggcggcguccuccucucccucuacgucuccgccucccucuccuaccuccucuacuccgacauccuccucaaguucucccccaccgagaucaccgcccccaccaugccccucgacugcgccaacgccuccaacguccaggccgucaaccgcuccgccaccaagggcgucacccuccuccuccccgagcccgaguggaccuacccccgccucuccugccccggcuccaccuuccagaaggcccuccucaucuccccccaccgcuucggcgagaccaagggcaacuccgccccccucaucauccgcgagcccuucaucgccugcggccccaacgagugcaagcacuucgcccucacccacuacgccgcccagcccggcggcuacuacaacggcacccgcggcgaccgcaacaagcuccgccaccucaucuccgucaagcucggcaagauccccaccgucgagaacuccaucuuccacauggccgccugguccggcuccgccugccacgacggcaaggaguggaccuacaucggcgucgacggccccgacaacaacgcccuccucaaggucaaguacggcgaggccuacaccgacaccuaccacuccuacgccaacaagauccuccgcacccaggaguccgccugcaacugcaucggcggcaacugcuaccucaugaucaccgacggcuccgccuccggcgucuccgagugccgcuuccucaagauccgcgagggccgcaucaucaaggagaucuuccccaccggccgcgucaagcacaccgaggagugcaccugcggcuucgccuccaacaagaccaucgagugcgccugccgcgacaacuccuacaccgccaagcgccccuucgucaagcucaacgucgagaccgacaccgccgagauccgccucaugugcaccgacaccuaccucgacaccccccgccccaacgacggcuccaucaccggccccugcgaguccgacggcgacaagggcuccggcggcaucaagggcggcuucguccaccagcgcaucgagucccgcaucggccgcugguacucccgcaccauguccaagaccgagcgcaugggcaugggccucuacgucaaguacgacggcgaccccugggccgacuccgacgcccucgccuucuccggcgucauggucuccaugaaggagcccggcugguacuccuucggcuucgagaucaaggacaagaagugcgacguccccugcaucggcaucgagaugguccacgacggcggcaaggagaccuggcacuccgccgccaccgccaucuacugccucaugggcuccggccagcuccucugggacaccgucaccggcgucgacauggcccucuga

SEQ ID NO: 125562 - RNA, 1401 nt, Artificial Sequence
  derived and/or modified CDS sequence (opt2) from neuraminidase__InfluenzaB__AGX20727
augcuccccuccaccauccagacccucacccucuuccucaccuccggcggcguccuccucucccucuacgucuccgcccuccucuccuaccuccucuacuccgacauccuccucaaguucucccccaccgagaucaccgcccccaccaugucccucgacugcgccaacgccuccaacguccaggccgucaaccgcuccgccaccaagggcgucaccuuccuccuccccgagcccgaguggaccuacccccgccucuccugccccggcuccaccuuccagaaggcccuccucaucuccccccaccgcuucggcgagaccaagggcaacuccgccccccucaucauccgcgagcccuucaucgccugcggccccaacgagugcaagcacuucgcccucacccacuacgccgcccagcccggcggcuacuacaacggcacccgcggcgaccgcaacaagcuccgccaccucaucuccgucaagcucggcaagauccccaccgucgagaacuccaucuuccacauggccgccugguccggcuccgccugccacgacggcaaggaguggaccuacaucggcgucgacggccccgacaacgacgcccuccucaaggucaaguacggcgaggccuacaccgacaccuaccacuccuacgccaacaagauccuccgcacccaggaguccgccugcaacugcaucggcggcaacugcuaccucaugaucaccgacggcuccgccuccggcgucuccgagugccgcuuccucaagauccgcgagggccgcaucaucaaggagaucuuccccaccggccgcgucaagcacaccgaggagugcaccugcggcuucgccuccaacaagaccaucgagugcgccugccgcgacaacuccuacaccgccaagcgccccuucgucaagcucaacgucgagaccgacaccgccgagauccgccucaugugcaccgacaccuaccucgacaccccccgccccgacgacggcuccaccaccggccccugcgaguccaacggcgacaagggcuccggcggcaucaagggcggcuucguccaccagcgcauggaguccaagaucggccgcugguacucccgcaccauguccaagaccgagcgcaugggcaugggccucuacgucaaguacgacggcgaccccugggccgacuccgacgcccucgccuucuccggcgucauggucuccaugaaggagcccggcugguacuccuucggcuucgagaucaaggacaagaagugcgacguccccugcaucggcaucgagaugguccacgacggcggcaaggagaccuggcacuccgccgccaccgccaucuacugccucaugggcuccggccagcuccucugggacaccgucaccggcgucgacauggcccucuga

SEQ ID NO: 125563 - RNA, 1401 nt, Artificial Sequence; identical to SEQ ID NO: 125155
  derived and/or modified CDS sequence (opt2) from neuraminidase__InfluenzaB__AGX20738

SEQ ID NO: 125564 - RNA, 1401 nt, Artificial Sequence; identical to SEQ ID NO: 124931
  derived and/or modified CDS sequence (opt2) from neuraminidase__InfluenzaB__AGX20749

SEQ ID NO: 125565 - RNA, 1401 nt, Artificial Sequence
  derived and/or modified CDS sequence (opt2) from neuraminidase__InfluenzaB__AGX20760
augcuccccuccaccauccagacccucacccucuuccucaccuccggcggcguccuccucucccucuacgucuccgccucccucuccuaccuccucuacuccgacauccuccucaaguucucccccaccgagaucaccgcccccaccaugccccucgacugcgccaacgccuccaacguccaggccgucaaccgcuccgccaccaagggcgucacccuccuccuccccgagcccgaguggaccuacccccgccucuccugccccggcuccaccuuccagaaggcccuccucaucuccccccaccgcuucggcgagaccaagggcaacuccgccccccucaucauccgcgagcccuucaucgccugcggccccaacgagugcaagcacuucgcccucacccacuacgccgcccagcccggcggcuacuacaacggcacccgcggcgaccgcaacaagcuccgccaccucaucuccgucaagcucggcaagauccccaccgucgagaacuccaucuuccacauggccgccugguccggcuccgccugccacgacggcaaggaguggaccuacaucggcgucgacggccccgacaacaacgcccuccucaaggucaaguacggcgaggccuacaccgacaccuaccacuccuacgccaacaagauccuccgcacccaggaguccgccugcaacugcaucggcggcaacugcuaccucaugaucaccgacggcuccgccuccggcgucuccgagugccgcuuccucaagauccgcgagggccgcaucaucaaggagaucuuccccaccggccgcgucaagcacaccgaggagugcaccugcggcuucgccuccaacaagaccaucgagugcgccugccgcgacaacuccuacaccgccaagcgccccuucgucaagcucaacgucgagaccgacaccgccgagauccgccucaugugcaccgacaccuaccucgacaccccccgccccaacgacggcuccaucaccggccccugcgaguccgacggcgacaagggcuccggcggcaucaagggcggcuucguccaccagcgcauggagucccgcaucggccgcugguacucccgcaccauguccaagaccgagcgcaugggcaugggccucuacgucaaguacgacggcgaccccugggccgacuccgacgcccucgccuucuccggcgucauggucuccaugaaggagcccggcugguacuccuucggcuucgagaucaaggacaagaagugcgacguccccugcaucggcaucgagaugguccacgacggcggcaaggagaccuggcacuccgccgccaccgccaucuacugccucaugggcuccggccagcuccucugggacaccgucaccggcgucgacauggcccucuga

SEQ ID NO: 125566 - RNA, 1401 nt, Artificial Sequence; identical to SEQ ID NO: 124931
  derived and/or modified CDS sequence (opt2) from neuraminidase__InfluenzaB__AGX20771

SEQ ID NO: 125567 - RNA, 1401 nt, Artificial Sequence
  derived and/or modified CDS sequence (opt2) from neuraminidase__InfluenzaB__AGX20782
augcuccccuccaccauccagacccucacccucuuccucaccuccggcggcguccuccucucccucuacgucuccgccucccucuccuaccuccucuacuccgacauccuccucaaguucucccccaccgagaucaccgcccccaccaugccccucgacugcgccaacgccuccaacguccaggccgucaaccacuccgccaccaagggcgucacccuccuccuccccgagcccgaguggaccuacccccgccucuccugccccggcuccaccuuccagaaggcccuccucaucuccucccaccgcuucggcgagaccaagggcaacuccgccccccucaucauccgcgagcccuucgucgccugcggccccaacgagugcaagcacuucgcccucacccacuacgccgcccagcccggcggcuacuacaacggcacccgcggcgaccgcaacaagcuccgccaccucaucuccgucaagcucggcaagauccccaccgucgagaacuccaucuuccacauggccgccugguccggcuccgccugccacgacggcaaggaguggaccuacaucggcgucgacggccccgacaacaacgcccuccucaaggucaaguacggcgaggccuacaccgacaccuaccacuccuacgccaacaagauccuccgcacccaggaguccgccugcaacugcaucggcggcaacugcuaccucaugaucaccgacggcuccgccuccggcgucuccgagugccgcuuccucaagauccgcgagggccgcaucaucaaggagaucuuccccaccggccgcgucaagcacaccgaggagugcaccugcggcuucgccuccaacaagaccaucgagugcgccugccgcgacaacuccuacaccgccaagcgccccuucgucaagcucaacgucgagaccgacaccgccgagauccgccucaugugcaccgacaccuaccucgacaccccccgccccaacgacggcuccaucaccggccccugcgaguccgacggcgacaagggcuccggcggcaucaagggcggcuucguccaccagcgcauggaguccaagaucggccgcugguacucccgcaccaugucccgcaccgagcgcaugggcaugggccucuacgucaaguacgacggcgaccccugggccgacuccgacgcccucgccuucuccggcgucauggucuccaugaaggagcccggcugguacuccuucggcuucgagaucaaggacaagaagugcgacguccccugcaucggcaucgagaugguccacgacggcggcaaggagaccuggcacuccgccgccaccgccaucuacugccucaugggcuccggccagcuccucugggacaccgucaccggcgucgacauggcccucuga

SEQ ID NO: 125568 - RNA, 1401 nt, Artificial Sequence
  derived and/or modified CDS sequence (opt2) from neuraminidase__InfluenzaB__AGX20793
augcuccccuccaccauccagacccucacccucuuccucaccuccggcggcguccuccucucccucuacgucuccgcccuccucuccuaccuccucuacuccgacauccuccucaaguucucccccaccgagaucaccgcccccaccaugucccucgacugcgccaacaccuccaacguccaggccgucaaccgcuccgccaccaagggcgucaccuuccuccuccccgagcccgaguggaccuacccccgccucuccugccccggcuccaccuuccagaaggcccuccucaucuccccccaccgcuucggcgagaccaagggcaacuccgccccccucaucauccgcgagcccuucaucgccugcggccccaacgagugcaagcacuucgcccucacccacuacgccgcccagcccggcggcuacuacaacggcacccgcggcgaccgcaacaagcuccgccaccucaucuccgucaagcucggcaagauccccaccgucgagaacuccaucuuccacauggccgccugguccggcuccgccugccacgacggcaaggaguggaccuacaucggcgucgacggccccgacaacgacgcccuccucaaggucaaguacggcgaggccuacaccgacaccuaccacuccuacgccaacaagauccuccgcacccaggaguccgccugcaacugcaucggcggcaacugcuaccucaugaucaccgacggcuccgccuccggcgucuccgagugccgcuuccucaagauccgcgagggccgcaucaucaaggagaucuuccccaccggccgcgucaagcacaccgaggagugcaccugcggcuucgccuccaacaagaccaucgagugcgccugccgcgacaacuccuacaccgccaagcgccccuucgucaagcucaacgucgagaccgacaccgccgagauccgccucaugugcaccgacaccuaccucgacaccccccgccccgacgacggcuccaucaccggccccugcgaguccaacggcgacaagggcuccggcggcaucaagggcggcuucguccaccagcgcauggaguccaagaucggccgcugguacucccgcaccauguccaagaccgagcgcaugggcaugggccucuacgucaaguacgacggcgaccccugggccgacuccgacgcccucgccuucuccggcgucauggucuccaugaaggagcccggcugguacuccuucggcuucgagaucaaggacaagaagugcgacguccccugcaucggcaucgagaugguccacgacggcggcaaggagaccuggcacuccgccgccaccgccaucuacugccucaugggcuccggccagcuccucugggacaccgucaccggcgucaacauggcccucuga

SEQ ID NO: 125569 - RNA, 1401 nt, Artificial Sequence
  derived and/or modified CDS sequence (opt2) from neuraminidase__InfluenzaB__AGX20804
augcuccccuccaccauccagacccucacccucuucaucaccuccggcggcguccuccucucccucuacgucuccgcccuccucuccuaccuccucuacuccgacauccuccucaaguucucccccaccgagaucaccgcccccaccaugucccucgacugcgccaacgccuccaacguccaggccgucaaccgcuccgccaccaagggcgucaccuuccuccuccccgagcccgaguggaccuacccccgccucuccugccccggcuccaccuuccagaaggcccuccucaucuccccccaccgcuucggcgagaccaagggcaacuccgccccccucaucauccgcgagcccuucaucgccugcggccccaacgagugcaagcacuucgcccucacccacuacgccgcccagcccggcggcuacuacaacggcacccgcggcgaccgcaacaagcuccgccaccucaucuccgucaagcucggcaagauccccaccgucgagaacuccaucuuccacauggccgccugguccggcuccgccugccacgacggcaaggaguggaccuacaucggcgucgacggccccgacaacgacgcccuccucaaggucaaguacggcgaggccuacaccgacaccuaccacuccuacgccaacaagauccuccgcacccaggaguccgccugcaacugcaucggcggcaacugcuaccucaugaucaccgacggcuccgccuccggcgucuccgagugccgcuuccucaagauccgcgagggccgcaucaucaaggagaucuuccccaccggccgcgucaagcacaccgaggagugcaccugcggcuucgccuccaacaagaccaucgagugcgccugccgcgacaacuccuacaccgccaagcgccccuucgucaagcucaacgucgagaccgacaccgccgagauccgccucaugugcaccgacaccuaccucgacaccccccgccccgacgacggcuccaucaccggccccugcgaguccaacggcgacaagggcuccggcggcaucaagggcggcuucguccaccagcgcauggaguccaagaucggccgcugguacucccgcaccauguccaagaccgagcgcaugggcaugggccucuacgucaaguacgacggcgaccccugggccgacuccgacgcccucgccuucuccggcgucauggucuccaugaaggagcccggcugguacuccuucggcuucgagaucaaggacaagaagugcgacguccccugcaucggcaucgagaugguccacgacggcggcaaggagaccuggcacuccgccgccaccgccaucuacugccucaugggcuccggccagcuccucugggacaccgucaccggcgucgacauggcccucuga

SEQ ID NO: 125570 - RNA, 1401 nt, Artificial Sequence; identical to SEQ ID NO: 124992
  derived and/or modified CDS sequence (opt2) from neuraminidase__InfluenzaB__AGX20815

SEQ ID NO: 125571 - RNA, 1401 nt, Artificial Sequence; identical to SEQ ID NO: 124992
  derived and/or modified CDS sequence (opt2) from neuraminidase__InfluenzaB__AGX20826

SEQ ID NO: 125572 - RNA, 1401 nt, Artificial Sequence; identical to SEQ ID NO: 124992
  derived and/or modified CDS sequence (opt2) from neuraminidase__InfluenzaB__AGX20837

SEQ ID NO: 125573 - RNA, 1401 nt, Artificial Sequence; identical to SEQ ID NO: 124992
  derived and/or modified CDS sequence (opt2) from neuraminidase__InfluenzaB__AGX20848

SEQ ID NO: 125574 - RNA, 1401 nt, Artificial Sequence
  derived and/or modified CDS sequence (opt2) from neuraminidase__InfluenzaB__AGX20870
augcuccccuccaccauccagaugcucacccucuuccucaccuccggcggcguccuccucucccucuacgucuccgccucccucuccuaccuccucuacuccgacauccuccucaaguucucccccaccgagaucaccgcccccaccaugccccucgacugcgccaacgccuccaacguccacgccgucaaccgcuccgccaccaagggcgucaccuuccuccuccccgagcccgaguggaccuacccccgccucuccugccccggcuccaccuuccagaaggcccuccucaucuccccccaccgcuucggcgagaccaagggcaacuccgccccccucaucauccgcgagcccuucaucgccugcggccccaacgagugcaagcacuucgcccucacccacuacgccgcccagcccggcggcuacuacaacggcacccgcggcgaccgcaacaagcuccgccaccucaucuccgucaagcucggcaagauccccaccgucgagaacuccaucuuccacauggccgccugguccggcuccgccugccacgacggcaaggaguggaccuacaucggcgucgacggccccgacaacaacgcccuccucaagaucaaguacggcgaggccuacaccgacaccuaccacuccuacgccaacaacauccuccgcacccaggaguccgccugcaacugcaucggcggcaacugcuaccucaugaucaccgacggcuccgccuccggcgucuccgagugccgcuuccucaagauccgcgagggccgcaucaucaaggagaucuuccccaccggccgcgucaagcacaccgaggagugcaccugcggcuucgccuccaacaagaccaucgagugcgccugccgcgacaacuccuacaccgccaagcgccccuucgucaagcucaacgucgagaccgacaccgccgagauccgccucaugugcaccgacaccuaccucgacaccccccgccccgacgacggcuccaucaccggccccugcgaguccaacggcgacaagggcuccggcggcaucaagggcggcuucguccaccagcgcauggccuccaagaucggccgcugguacucccgcaccauguccaagaccgagcgcaagggcaugggccucuacgucaaguacgacggcgagcccuggaccgacuccgacgcccucgccuuccgcggcgucauggucuccaugaaggagcccggcugguacuccuucggcuucgagaucaaggacaagaagugcgacguccccugcaucggcaucgagaugguccacgacggcggcaaggagaccuggcacuccgccgccaccgccaucuacugccucaugggcuccggccagcuccucugggacaccgucaccggcgucgacauggcccucuga

SEQ ID NO: 125575 - RNA, 1401 nt, Artificial Sequence
  derived and/or modified CDS sequence (opt2) from neuraminidase__InfluenzaB__AGX20881
augcuccccuccaccauccagaugcucacccucuuccucaccuccggcggcguccuccucucccucuacgucuccgccucccucuccuaccuccucuacuccgacauccuccucaaguucucccccaccgagaucaccgcccccaccaugccccucgacugcgccaacgccuccaacguccacgccgucaaccgcuccgccaccaagggcgucaccuuccuccuccccgagcccgaguggaccuacccccgccucuccugccccggcuccaccuuccagaaggcccuccucaucuccccccaccgcuucggcgagaccaagggcaacuccgccccccucaucauccgcgagcccuucaucgccugcggccccaacgagugcaagcacuucgcccucacccacuacgccgcccagcccggcggcuacuacaacggcacccgcggcaaccgcaacaagcuccgccaccucaucuccgucaagcucggcaagauccccaccgucgagaacuccaucuuccacauggccgccugguccggcuccgccugccacgacggcaaggaguggaccuacaucggcgucgacggccccgacaacaacgcccuccucaagaucaaguacggcgaggccuacaccgacaccuaccacuccuacgccaacaacauccuccgcacccaggaguccgccugcaacugcaucggcggcaacugcuaccucaugaucaccgacggcuccgccuccggcgucuccgagugccgcuuccucaagauccgcgagggccgcaucaucaaggagaucuuccccaccggccgcgucaagcacaccgaggagugcaccugcggcuucgccuccaacaagaccaucgagugcgccugccgcgacaacuccuacaccgccaagcgccccuucgucaagcucaacgucgagaccgacaccgccgagauccgccucaugugcaccgacaccuaccucgacaccccccgccccgacgacggcuccaucaccggccccugcgaguccaacggcgacaagggcuccggcggcaucaagggcggcuucguccaccagcgcauggccuccaagaucggccgcugguacucccgcaccauguccaagaccgagcgcaagggcaugggccucuacgucaaguacgacggcgaccccuggaccgacuccgacgcccucgccuuccgcggcgucauggucuccaugaaggagcccggcugguacuccuucggcuucgagaucaaggacaagaagugcgacguccccugcaucggcaucgagaugguccacgacggcggcaaggagaccuggcacuccgccgccaccgccaucuacugccucaugggcuccggccagcuccucugggacaccgucaccggcgucgacauggcccucuga

SEQ ID NO: 125576 - RNA, 1401 nt, Artificial Sequence
  derived and/or modified CDS sequence (opt2) from neuraminidase__InfluenzaB__AGX20892
augcuccccuccaccauccagacccucacccucuuccucaccuccggcggcguccuccucucccucuacgucuccgcccuccucuccuaccuccucuacuccgacauccuccucaaguucucccccaccgagaucaccgcccccaccaugucccucgacugcgccaacgccuccaacguccaggccgucaaccgcuccgccaccaagggcgucaccuuccuccuccccgagcccgaguggaccuacccccgccucuccugccccggcuccaccuuccagcgcgcccuccucaucuccccccaccgcuucggcgaggccaagggcaacuccgccccccucaucauccgcgagcccuucaucgccugcggccccaacgagugcaagcacuucgcccucacccacuacgccgcccagcccggcggcuacuacaacggcacccgcggcgaccgcaacaagcuccgccaccucaucuccgucaagcucggcaagauccccaccgucgagaacuccaucuuccacauggccgccugguccggcuccgccugccacgacggcaaggaguggaccuacaucggcgucgacggccccgacaacgacgcccuccucaaggucaaguacggcgaggccuacaccgacaccuaccacuccuacgccaacaagauccuccgcacccaggaguccgccugcaacugcaucggcggcaacugcuaccucaugaucaccgacggcuccgccuccggcgucuccgagugccgcuuccucaagauccgcgagggccgcaucaucaaggagauccuccccaccggccgcgucaagcacaccgaggagugcaccugcggcuucgccuccaacaagaccaucgagugcgccugccgcgacaacuccuacaccgccaagcgccccuucgucaagcucaacgucgagaccgacaccgccgagauccgccucaugugcaccgacaccuaccucgacaccccccgccccgacgacggcuccaucaccggccccugcgaguccaacggcgacaagggcuccggcggcaucaagggcggcuucguccaccagcgcauggaguccaagaucggccgcugguacucccgcaccauguccaagaccgagcgcaugggcaugggccucuacgucaaguacgacggcgaccccugggccgacuccgacgcccucgccuucuccggcgucauggucuccaugaaggagcccggcugguacuccuucggcuucgagaucaaggacaagaagugcgacguccccugcaucggcaucgagaugguccacgacggcggcaaggagaccuggcacuccgccgccaccgccaucuacugccucaugggcuccggccagcuccucugggacaccgucaccggcgucgacauggcccucuga

SEQ ID NO: 125577 - RNA, 1401 nt, Artificial Sequence; identical to SEQ ID NO: 124992
  derived and/or modified CDS sequence (opt2) from neuraminidase__InfluenzaB__AGX20903

SEQ ID NO: 125578 - RNA, 1401 nt, Artificial Sequence; identical to SEQ ID NO: 124992
  derived and/or modified CDS sequence (opt2) from neuraminidase__InfluenzaB__AGX20914

SEQ ID NO: 125579 - RNA, 1401 nt, Artificial Sequence
  derived and/or modified CDS sequence (opt2) from neuraminidase__InfluenzaB__AGX20925
augcuccccuccaccauccagacccucacccucuuccucaccuccggcggcguccuccucucccucuacgucuccgcccuccucuccuaccuccucuacuccgacauccuccucaaguucucccccaccgagaucaccgcccccaccaugucccucgacugcgccaacgccuccaacguccaggccgucaaccgcuccgccaccaagggcgucaccuuccuccuccccgagcccgaguggaccuacccccgccucuccugccccggcuccaccuuccagaaggcccuccucaucuccccccaccgcuucggcgagaccaagggcaacuccgccccccucaucauccgcgagcccuucaucgccugcggccccaacgagugcaagcacuucgcccucacccacuacgccgcccagcccggcggcuacuacaacggcacccgcggcgaccgcaacaagcuccgccaccucaucuccgucaagcucggcaagauccccaccgucgagaacuccaucuuccacauggccgccugguccggcuccgccugccacgacggcaaggaguggaccuacaucggcgucgacggccccgacaacgacgcccuccucaaggucaaguacggcgaggccuacaccgacaccuaccacuccuacgccaacaagauccuccgcacccaggaguccgccugcaacugcaucggcggcaacugcuaccucaugaucaccgacggcuccgccuccggcgucuccgagugccgcuuccucaagauccaggagggccgcaucaucaaggagaucuuccccaccggccgcgucaagcacaccgaggagugcaccugcggcuucgccuccaacaagaccaucgagugcgccugccgcgacaacuccuacaccgccaagcgccccuucgucaagcucaacgucgagaccgacaccgccgagauccgccucaugugcaccgacaccuaccucgacaccccccgccccgacgacggcuccaucaccggccccugcgaguccaacggcgacaagggcuccggcggcaucaagggcggcuucguccaccagcgcauggaguccaagaucggccgcugguacucccgcaccauguccaagaccgagcgcaugggcaugggccucuacgucaaguacgacggcgaccccugggccgacuccgacgcccucgccuucuccggcgucauggucuccaugaaggagcccggcugguacuccuucggcuucgagaucaaggacaagaagugcgacguccccugcaucggcaucgagaugguccacgacggcggcaaggagaccuggcacuccgccgccaccgccaucuacugccucaugggcuccggccagcuccucugggacaccgucaccggcgucgacauggcccucuga

SEQ ID NO: 125580 - RNA, 1401 nt, Artificial Sequence
  derived and/or modified CDS sequence (opt2) from neuraminidase__InfluenzaB__AGX20936
augcuccccuccaccauccagacccucacccucuuccucaccuccggcggcguccuccucucccucuacgucuccgcccuccucuccuaccuccucuacuccgacauccuccccaaguucucccccaccgagaucaccgcccccaccaugucccucgacugcgccaacgccuccaacguccaggccgucaaccgcuccgccaccaagggcgucaccuuccuccuccccgagcccgaguggaccuacccccgccucuccugccccggcuccaccuuccagaaggcccuccucaucuccccccaccgcuucggcgagaccaagggcaacuccgccccccucaucauccgcgagcccuucaucgccugcggccccaacgagugcaagcacuucgcccucacccacuacgccgcccagcccggcggcuacuacaacggcacccgcggcgaccgcaacaagcuccgccaccucaucuccgucaagcucggcaagauccccaccgucgagaacuccaucuuccacauggccgccugguccggcuccgccugccacgacggcaaggaguggaccuacaucggcgucgacggccccgacaacgacgcccuccucaaggucaaguacggcgaggccuacaccgacaccuaccacuccuacgccaacaagauccuccgcacccaggaguccgccugcaacugcaucggcggcaacugcuaccucaugaucaccgacggcuccgccuccggcgucuccgagugccgcuuccucaagauccgcgagggccgcaucaucaaggagaucuuccccaccggccgcgucaagcacaccgaggagugcaccugcggcuucgccuccaacaagaccaucgagugcgccugccgcgacaacuccuacaccgccaagcgccccuucgucaagcucaacgucgagaccgacaccgccgagauccgccucaugugcaccgacaccuaccucgacaccccccgccccgacgacggcuccaucaccggccccugcgaguccaacggcgacaagggcuccggcggcaucaagggcggcuucguccaccagcgcauggaguccaagaucggccgcugguacucccgcaccauguccaagaccgagcgcaugggcaugggccucuacgucaaguacgacggcgaccccugggccgacuccgacgcccucgucuucuccggcgucauggucuccaugaaggagcccggcugguacuccuucggcuucgagaucaaggacaagaagugcgacguccccugcaucggcaucgagaugguccacgacggcggcaaggagaccuggcacuccgccgccaccgccaucuacugccucaugggcuccggccagcuccucugggacaccgucaccggcgucgacauggcccucuga

SEQ ID NO: 125581 - RNA, 1401 nt, Artificial Sequence; identical to SEQ ID NO: 124931
  derived and/or modified CDS sequence (opt2) from neuraminidase__InfluenzaB__AGX20947

SEQ ID NO: 125582 - RNA, 1401 nt, Artificial Sequence
  derived and/or modified CDS sequence (opt2) from neuraminidase__InfluenzaB__AGX20958
augcuccccuccaccauccagacccucacccucuuccucaccuccggcggcguccuccucucccucuacgucuccgcccuccucuccuaccuccucuacuccgacauccuccucaaguucucccccaccgagaucaccacccccaccaugucccucgacugcaccaacgccuccaacguccaggccgucaaccgcuccgccaccaagggcgucaccuuccuccuccccgagcccgaguggaccuacccccgccucuccugccccggcuccaccuuccagaaggcccuccucaucuccccccaccgcuucggcgagaccaagggcaacuccgccccccucaucauccgcgagcccuucaucgccugcggccccaacgagugcaagcacuucgcccucacccacuacgccgcccagcccggcggcuacuacaacggcacccgcggcgaccgcaacaagcuccgccaccucaucuccgucaagcucggcaagauccccaccgucgagaacuccaucuuccacauggccgccugguccggcuccgccugccacgacggcaaggaguggaccuacaucggcgucgacggccccgacaacgacgcccuccucaaggucaaguacggcgaggccuacaccgacaccuaccacuccuacgccaacaagauccuccgcacccaggaguccgccugcaacugcaucggcggcaacugcuaccucaugaucaccgacggcuccgccuccggcgucuccgagugccgcuuccucaagauccaggagggccgcaucaucaaggagaucuuccccaccggccgcgucaagcacaccgaggagugcaccugcggcuucgccuccaacaagaccaucgagugcgccugccgcgacaacuccuacaccgccaagcgccccuucgucaagcucaacgucgagaccgacaccgccgagauccgccucaugugcaccgacaccuaccucgacaccccccgccccgacgacggcuccaucaccggccccugcgaguccaacggcgacaagggcuccggcggcaucaagggcggcuucguccaccagcgcauggaguccaagaucggccgcugguacucccgcaccauguccaagaccgagcgcaugggcaugggccucuacgucaaguacgacggcgaccccugggccgacuccgacgcccucgccuucuccggcgucauggucuccaugaaggagcccggcugguacuccuucggcuucgagaucaaggacaagaagugcgacguccccugcaucggcaucgagaugguccacgacggcggcaaggagaccuggcacuccgccgccaccgccaucuacugccucaugggcuccggccagcuccucugggacaccgucaccggcgucgacauggcccucuga

SEQ ID NO: 125583 - RNA, 1401 nt, Artificial Sequence; identical to SEQ ID NO: 125155
  derived and/or modified CDS sequence (opt2) from neuraminidase__InfluenzaB__AGX20969

SEQ ID NO: 125584 - RNA, 1401 nt, Artificial Sequence; identical to SEQ ID NO: 125568
  derived and/or modified CDS sequence (opt2) from neuraminidase__InfluenzaB__AGX20980

SEQ ID NO: 125585 - RNA, 1401 nt, Artificial Sequence
  derived and/or modified CDS sequence (opt2) from neuraminidase__InfluenzaB__AGX20991
augcuccccuccaccauccagacccucacccucuuccucaccuccggcggcguccuccucucccucuacgucuccgcccuccucuccuaccuccucuacuccgacauccuccccaaguucucccccaccgagaucaccgcccccaccaugucccucgacugcgccaacgccuccaacguccaggccgucaaccgcuccgccaccaagggcgucaccuuccuccuccccgagcccgaguggaccuacccccgccucuccugccccggcuccaccuuccagaaggcccuccucaucuccccccaccgcuucggcgagaccaagggcaacuccgccccccucaucauccgcgagcccuucaucgccugcggccccaacgagugcaagcacuucgcccucacccacuacgccgcccagcccggcggcuacuacaacggcacccgcggcgaccgcaacaagcuccgccaccucaucuccgucaagcucggcaagauccccaccgucgagaacuccaucuuccacauggccgccugguccggcuccgccugccacgacggcaaggaguggaccuacaucggcgucgacggccccgacaacgacgcccuccucaaggucaaguacggcgaggccuacaccgacaccuaccacuccuacgccaacaagauccuccgcacccaggaguccgccugcaacugcaucggcggcaacugcuaccucaugaucaccgacggcuccgccuccggcgucuccgagugccgcuuccucaagauccgcaagggccgcaucaucaaggagaucuuccccaccggccgcgucaagcacaccgaggagugcaccugcggcuucgccuccaacaagaccaucgagugcgccugccgcgacaacuccuacaccgccaagcgccccuucgucaagcucaacgucgagaccgacaccgccgagauccgccucaugugcaccgacaccuaccucgacaccccccgccccgacgacggcuccaucaccggccccugcgaguccaacggcgacaagggcuccggcggcaucaagggcggcuucguccaccagcgcauggaguccaagaucggccgcugguacucccgcaccauguccaagaccgagcgcaugggcaugggccucuacgucaaguacgacggcgaccccugggccgacuccgacgcccucgucuucuccggcgucauggucuccaugaaggagcccggcugguacuccuucggcuucgagaucaaggacaagaagugcgacguccccugcaucggcaucgagaugguccacgacggcggcaaggagaccuggcacuccgccgccaccgccaucuacugccucaugggcuccggccagcuccucugggacaccgucaccggcgucgacauggcccucuga

SEQ ID NO: 125586 - RNA, 1401 nt, Artificial Sequence; identical to SEQ ID NO: 124992
  derived and/or modified CDS sequence (opt2) from neuraminidase__InfluenzaB__AGX21002

SEQ ID NO: 125587 - RNA, 1401 nt, Artificial Sequence
  derived and/or modified CDS sequence (opt2) from neuraminidase__InfluenzaB__AGX21013
augcuccccuccaccauccagacccucacccucuuccucaccuccggcggcguccuccucucccucuacgucuccgcccuccucuccuaccuccucuacuccgacauccuccucaaguucucccccaccgagaucaccgcccccaccaugucccucgacugcgccaacgccuccaacguccaggccgucaaccgcuccgccaccaagggcgucaccuuccuccuccccgagcccgaguggaccuacccccgccucuccugccccggcuccaccuuccagaaggcccuccucaucuccccccaccgcuucggcgagaccaagggcaacuccgccccccucaucauccgcgagcccuucaucgccugcggccccaacgagugcaagcacuucgcccucacccacuacgccgcccagcccggcggcuacuacaacggcacccgcggcgaccgcaacaagcuccgccaccucaucuccgucaagcucggcaagauccccaccgucgagaacuccaucuuccacauggccgccugguccggcuccgccugccacgacggcaaggaguggaccuacaucggcgucgacggccccgacaacgacgcccuccucaaggucaaguacggcgaggccuacaccgacaccuaccacuccuacgccaacaagauccuccgcacccaggaguccgccugcaacugcaucggcggcaacugcuaccucaugaucaccgacggcuccgccuccggcgucuccgagugccgcuuccucaagauccgcgagggccgcaucaucaaggagaucuuccccaccggccgcgucaagcacaccgaggagugcaccugcggcuucgccuccaacaagaccaucgagugcgccugccgcgacaacuccuacaccgccaagcgccccuucgucaagcucaacgucgagaccgacaccgccgagauccgccucaugugcaccaacaccuaccucgacaccccccgccccgacgacggcuccaucaccggccccugcgaguccaacggcgacaagggcuccggcggcaucaagggcggcuucguccaccagcgcauggaguccaagaucggccgcugguacucccgcaccauguccaagaccgagcgcaugggcaugggccucuacgucaaguacgacggcgaccccugggccgacuccgacgcccucgccuucuccggcgucauggucuccaugaaggagcccggcugguacuccuucggcuucgagaucaaggacaagaagugcgacguccccugcaucggcaucgagaugguccacgacggcggcaaggagaccuggcacuccgccgccaccgccaucuacugccucaugggcuccggccagcuccucugggacaccgucaccggcgucgacauggcccucuga

SEQ ID NO: 125588 - RNA, 1401 nt, Artificial Sequence
  derived and/or modified CDS sequence (opt2) from neuraminidase__InfluenzaB__AGX21024
augcuccccuccaccauccagacccucacccucuuccucaccuccggcggcguccuccucucccucuacgucuccgccucccucuccuaccuccucuacuccgacauccuccucaaguucucccccaccgagaucaccgcccccaccaugccccucgacugcgccaacgccuccaacguccaggccgucaaccgcuccgccaccaagggcgucacccuccuccuccccgagcccgaguggaccuacccccgccucuccugccccggcuccaccuuccagaaggcccuccucaucucccccaaccgcuucggcgagaccaagggcaacuccgccccccucaucauccgcgagcccuucaucgccugcggccccaacgagugcaagcacuucgcccucacccacuacgccgcccagcccggcggcuacuacaacggcacccgcggcgaccgcaacaagcuccgccaccucaucuccgucaagcucggcaagauccccaccgucgagaacuccaucuuccacauggccgccugguccggcuccgccugccacgacggcaaggaguggaccuacaucggcgucgacggccccgacaacaacgcccuccucaaggucaaguacggcgaggccuacaccgacaccuaccacuccuacgccaacaagauccuccgcacccaggaguccgccugcaacugcaucggcggcaacugcuaccucaugaucaccgacggcuccgccuccggcgucuccgagugccgcuuccucaagauccgcgagggccgcaucaucaaggagaucuuccccaccggccgcgucaagcacaccgaggagugcaccugcggcuucgccuccaacaagaccaucgagugcgccugccgcgacaacuccuacaccgccaagcgccccuucgucaagcucaacgucgagaccgacaccgccgagguccgccucaugugcaccgacaccuaccucgacaccccccgccccaacgacggcuccaucaccggccccugcgaguccgacggcgacaagggcuccggcggcaucaagggcggcuucguccaccagcgcauggaguccaagaucggccgcugguacucccgcaccauguccaagaccgagcgcaugggcaugggccucuacgucaaguacgacggcgaccccugggccgacuccgacgcccucaccuucuccggcgucauggucuccaugaaggagcccggcugguacuccuucggcuucgagaucaaggacaagaagugcgacguccccugcaucggcaucgagaugguccacgacggcggcaaggagaccuggcacuccgccgccaccgccaucuacugccucaugggcuccggccagcuccucugggacaccgucaccggcgucgacauggcccucuga

SEQ ID NO: 125589 - RNA, 1401 nt, Artificial Sequence; identical to SEQ ID NO: 124992
  derived and/or modified CDS sequence (opt2) from neuraminidase__InfluenzaB__AGX21035

SEQ ID NO: 125590 - RNA, 1401 nt, Artificial Sequence; identical to SEQ ID NO: 125155
  derived and/or modified CDS sequence (opt2) from neuraminidase__InfluenzaB__AGX21046

SEQ ID NO: 125591 - RNA, 1401 nt, Artificial Sequence; identical to SEQ ID NO: 125158
  derived and/or modified CDS sequence (opt2) from neuraminidase__InfluenzaB__AGX21057

SEQ ID NO: 125592 - RNA, 1401 nt, Artificial Sequence; identical to SEQ ID NO: 125576
  derived and/or modified CDS sequence (opt2) from neuraminidase__InfluenzaB__AGX21068

SEQ ID NO: 125593 - RNA, 1401 nt, Artificial Sequence
  derived and/or modified CDS sequence (opt2) from neuraminidase__InfluenzaB__AGX21079
augcuccccuccaccauccagacccucacccucuuccucaccuccggcggcguccuccucucccucuacgucuccgccucccucuccuaccuccucuacuccgacauccuccucaaguucucccccaccgagaucaccgcccccgccaugccccucgacugcgccaacgccuccaacguccaggccgucaaccgcuccgccaccaagggcgucacccuccuccuccccgagcccgaguggaccuacccccgccucuccugccccggcuccaccuuccagaaggcccuccucaucuccccccaccgcuucggcgagaccaagggcaacuccgccccccucaucauccgcgagcccuucaucgccugcggccccaacgagugcaagcacuucgcccucacccacuacgccgcccagcccggcggcuacuacaacggcacccgcggcgaccgcaacaagcuccgccaccucaucuccgucaagcucggcaagauccccaccgucgagaacuccaucuuccacauggccgccugguccggcuccgccugccacgacggcaaggaguggaccuacaucggcgucgacggccccgacaacaacgcccuccucaaggucaaguacggcgaggccuacaccgacaccuaccacuccuacgccuccaagauccuccgcacccaggaguccgccugcaacugcaucggcggcaacugcuaccucaugaucaccgacggcuccgccuccggcgucuccgagugccgcuuccucaagauccgcgagggccgcaucaucaaggagaucuuccccaccggccgcgucaagcacaccgaggagugcaccugcggcuucgccuccaacaagaccaucgagugcgccugccgcgacaacuccuacaccgccaagcgccccuucgucaagcucaacgucgagaccgacaccgccgagauccgccucaugugcaccgacaccuaccucgacaccccccgccccaacgacggcuccaucaccggccccugcgaguccgacggcgacaagggcuccggcggcaucaagggcggcuucguccaccagcgcauggaguccaagaucggccgcugguacucccgcaccauguccaagaccgagcgcaugggcaugggccucuacgucaaguacgacggcgaccccugggccgacuccgacgcccucgccuucuccggcgucauggucuccaugaaggagcccggcugguacuccuucggcuucgagaucaaggacaagaagugcgacguccccugcaucggcaucgagaugguccacgacggcggcaaggagaccuggcacuccgccgccaccgccaucuacugccucaugggcuccggccagcuccucugggacaccgucaccggcgucgacauggcccucuga

SEQ ID NO: 125594 - RNA, 1401 nt, Artificial Sequence; identical to SEQ ID NO: 125158
  derived and/or modified CDS sequence (opt2) from neuraminidase__InfluenzaB__AGX21088

SEQ ID NO: 125595 - RNA, 1401 nt, Artificial Sequence; identical to SEQ ID NO: 125158
  derived and/or modified CDS sequence (opt2) from neuraminidase__InfluenzaB__AGX21099

SEQ ID NO: 125596 - RNA, 1401 nt, Artificial Sequence
  derived and/or modified CDS sequence (opt2) from neuraminidase__InfluenzaB__AGX21110
augcuccccuccaccauccagacccucacccucuuccucaccuccggcggcguccuccucucccucuacgucuccgcccuccucuccuaccuccucuacuccgacauccuccucaaguucucccccaccgagaucaccgcccccaccaugucccucgacugcgccaacgccuccaacguccaggccgucaaccgcuucgccaccaagggcgucaccuuccuccuccccgagcccgaguggaccuacccccgccucuccugccccggcuccaccuuccagaaggcccuccucaucuccccccaccgcuucggcgagaccaagggcaacuccgccccccucaucauccgcgagcccuucaucgccugcggccccaacgagugcaagcacuucgcccucacccacuacgccgcccagcccggcggcuacuacaacggcacccgcggcgaccgcaacaagcuccgccaccucaucuccgucaagcucggcaagauccccaccgucgagaacuccaucuuccacauggccgccugguccggcuccgccugccacgacggcaaggaguggaccuacaucggcgucgacggccccgacaacgacgcccuccucaaggucaaguacggcgaggccuacaccgacaccuaccacuccuacgccaacaagauccuccgcacccaggaguccgccugcaacugcaucggcggcaacugcuaccucaugaucaccgacggcuccgccuccggcgucuccgagugccgcuuccucaagauccgcgagggccgcaucaucaaggagaucuuccccaccggccgcgucaagcacaccgaggagugcaccugcggcuucgccuccaacaagaccaucgagugcgccugccgcgacaacuccuacaccgccaagcgccccuucgucaagcucaacgucgagaccgacaccgccgagauccgccucaugugcaccgacaccuaccucgacaccccccgccccgacgacggcuccaucaccggccccugcgaguccaacggcgacaagggcuccggcggcaucaagggcggcuucguccaccagcgcauggaguccaagaucggccgcugguacucccgcaccauguccaagaccgagcgcaugggcaugggccucuacgucaaguacgacggcgaccccugggccgacuccgacgcccucgccuucuccggcgucauggucuccaugaaggagcccggcugguacuccuucggcuucgagaucaaggacaagaagugcgacguccccugcaucggcaucgagaugguccacgacggcggcaaggagaccuggcacuccgccgccaccgccaucuacugccucaugggcuccggccagcuccucugggacaccgucaccggcgucgacauggcccucuga

SEQ ID NO: 125597 - RNA, 1401 nt, Artificial Sequence
  derived and/or modified CDS sequence (opt2) from neuraminidase__InfluenzaB__AGX21121
augcuccccuccaccauccagacccucacccucuuccucaccuccggcggcguccuccucucccucuacgucuccgcccuccucuccuaccuccucuacuccgacauccuccucaaguucucccccaccgagaucaccgcccccaccaugucccucgacugcgccaacgccuccaacguccaggccgucaaccgcuccgccaccaagggcgucaccuuccuccuccccgagcccgaguggaccuacccccgccucuccugccccggcuccaccuuccagaaggcccuccucaucuccccccaccgcuucggcgagaccaagggcaacuccgccccccucaucauccgcgagcccuucaucgccugcggccccaacgagugcaagcacuucgcccucacccacuacgccgcccagcccggcggcuacuacaacggcacccgcggcgaccgcaacaagcuccgccaccucaucuccgucaagcucggcaagauccccaccgucgagaacuccaucuuccacauggccgccugguccggcuccgccugccacgacggcaaggaguggaccuacaucggcgucgacggccccgacaacgacgcccuccucaaggucaaguacggcgaggccuacaccgacaccuaccacuccuacgccaacaagauccuccgcacccaggaguccgccugcaacugcaucggcggcaacugcuaccucaugaucaccgacggcuccgccuccggcgucuccgagugccgcuuccucaagauccgcgagggccgcaucaccaaggagaucuuccccaccggccgcgucaagcacaccgaggagugcaccugcggcuucgccuccaacaagaccaucgagugcgccugccgcgacaacuccuacaccgccaagcgccccuucgucaagcucaacgucgagaccgacaccgccgagauccgccucaugugcaccgacaccuaccucgacaccccccgccccgacgacggcuccaucaccggccccugcgaguccaacggcgacaagggcuccggcggcaucaagggcggcuucguccaccagcgcauggaguccaagaucggccgcugguacucccgcaccauguccaagaccgagcgcaugggcaugggccucuacgucaaguacgacggcgaccccugggccgacuccgacgcccucgccuucuccggcgucauggucuccaugaaggagcccggcugguacuccuucggcuucgagaucaaggacaagaagugcgacguccccugcaucggcaucgagaugguccacgacggcggcaaggagaccuggcacuccgccgccaccgccaucuacugccucaugggcuccggccagcuccucugggacaccgucaccggcgucgacauggcccucuga

SEQ ID NO: 125598 - RNA, 1401 nt, Artificial Sequence; identical to SEQ ID NO: 125155
  derived and/or modified CDS sequence (opt2) from neuraminidase__InfluenzaB__AGX21132

SEQ ID NO: 125599 - RNA, 1401 nt, Artificial Sequence; identical to SEQ ID NO: 124931
  derived and/or modified CDS sequence (opt2) from neuraminidase__InfluenzaB__AGX21143

SEQ ID NO: 125600 - RNA, 1401 nt, Artificial Sequence; identical to SEQ ID NO: 124992
  derived and/or modified CDS sequence (opt2) from neuraminidase__InfluenzaB__AGX21154

SEQ ID NO: 125601 - RNA, 1401 nt, Artificial Sequence
  derived and/or modified CDS sequence (opt2) from neuraminidase__InfluenzaB__AGX21165
augcuccccuccaccauccagacccucacccucuuccucaccuccggcggcguccuccucucccucuacgucuccgcccuccucuccuaccuccucuacuccgacauccuccucaaguucucccccaccgagaucaccgcccccaccaugucccucgacugcgccaacgccuccaacguccaggccgucaaccgcuccgccaccaagggcgucaccuuccuccuccccgagcccgaguggaccuacccccgccucuccugccccggcuccaccuuccagaaggcccuccucaucuccccccaccgcuucggcgagaccaagggcaacuccgccccccucaucauccgcgagcccuucaucgccugcggccccaacgagugcaagcacuucgcccucacccacuacgccgcccagcccggcggcuacuacaacggcacccgcggcgaccgcaacaagcuccgccaccucaucuccgucaagcucggcaagauccccaccgucgagaacuccaucuuccacauggccgccugguccggcuccgccugccacgacggcaaggaguggaccuacaucggcgucgacggccccgacaacgacgcccuccucaaggucaaguacggcgaggccuacaccgacaccuaccacuccuacgccaacaagauccuccgcacccaggaguccgccugcaacugcaucggcggcaacugcuaccucaugaucaccgacggcuccgccuccggcgucuccgagugccgcuuccucaagauccgcgagggccgcaucaucaaggagaucuuccccaccggccgcgucaagcacaccgaggagugcaccugcggcuucgccuccaacaagaccaucgagugcgccugccgcgacaacuccuacaccgccaagcgccccuucgucaagcucaacauggagaccgacaccgccgagauccgccucaugugcaccgacaccuaccucgacaccccccgccccgacgacggcuccaucaccggccccugcgaguccaacggcgacaagggcuccggcggcaucaagggcggcuucguccaccagcgcauggaguccaagaucggccgcugguacucccgcaccauguccaagaccgagcgcaugggcaugggccucuacgucaaguacgacggcgaccccugggccgacuccgacgcccucgccuucuccggcgucauggucuccaugaaggagcccggcugguacuccuucggcuucgagaucaaggacaagaagugcgacguccccugcaucggcaucgagaugguccacgacggcggcaaggagaccuggcacuccgccgccaccgccaucuacugccucaugggcuccggccagcuccucugggacaccgucaccggcgucgacauggcccucuga

SEQ ID NO: 125602 - RNA, 1401 nt, Artificial Sequence; identical to SEQ ID NO: 124992
  derived and/or modified CDS sequence (opt2) from neuraminidase__InfluenzaB__AGX21176

SEQ ID NO: 125603 - RNA, 1401 nt, Artificial Sequence
  derived and/or modified CDS sequence (opt2) from neuraminidase__InfluenzaB__AGX21187
augcuccccuccaccauccagacccucacccucuuccucaccuccggcggcguccuccucucccucuacgucuccgccucccucuccuaccuccucuacuccgacauccuccucaaguucucccccaccgagaucaccgcccccaccaugccccucgacugcgccaacgccuccaacguccaggccgucaaccgcuccgccaccaagggcgucacccuccuccuccccgagcccgaguggaccuacccccgccucuccugccccggcuccaccuuccagaaggcccuccucaucuccccccaccgcuucggcgagaccaagggcaacuccgccccccucaucauccgcgagcccuucaucgccugcggccccaacgagugcaagcacuucgcccucacccacuacgccgcccagcccggcggcuacuacaacggcacccgcggcgaccgcaacaagcuccgccaccucaucuccgucaagcucggcaagauccccaccgucgagaacuccaucuuccacauggccgccugguccggcuccgccugccacgacggcaaggaguggaccuacaucggcgucgacggccccgacaacaacgcccuccucaaggucaaguacggcgaggccuacaccgacaccuaccacuccuacgccaacaagauccuccgcacccaggaguccgccugcaacugcaucggcggcaacugcuaccucaugaucaccgacggcuccgccuccggcgucuccgagugccgcuuccucaagauccgcgagggccgcaucaucaaggagaucuuccccaccggccgcgucaagcacaccgaggagugcaccugcggcuucgccuccaacaagaccaucgagugcgucugccgcgacaacuccuacaccgccaagcgccccuucgucaagcucaacgucgagaccgacaccgccgagguccgccucaugugcaccgacaccuaccucgacaccccccgccccaacgacggcuccaucaccggccccugcgaguccgacggcgacaagggcuccggcggcaucaagggcggcuucguccaccagcgcauggaguccaagaucggccgcugguacucccgcaccauguccaagaccgagcgcaugggcaugggccucuacgucaaguacgacggcgaccccugggccgacuccgacgcccucaccuucuccggcgucauggucuccaugaaggagcccggcugguacuccuucggcuucgagaucaaggacaagaagugcgacguccccugcaucggcaucgagaugguccacgacggcggcaaggagaccuggcacuccgccgccaccgccaucuacugccucaugggcuccggccagcuccucugggacaccgucaccggcgucgacauggcccucuga

SEQ ID NO: 125604 - RNA, 1401 nt, Artificial Sequence
  derived and/or modified CDS sequence (opt2) from neuraminidase__InfluenzaB__AGX21198
augcuccccuccaccauccagaugcucacccucuuccucaccuccggcggcguccuccucucccucuacgucuccgccucccucuccuaccuccucuacuccgacauccuccucaaguucucccccaccgagaucaccgcccccaccaugccccucgacugcgccaacgccuccaacguccacgccgucaaccgcuccgccaccaagggcgucaccuuccuccuccccgagcccgaguggaccuacccccgccucuccugccccggcuccaccuuccagaaggcccuccucaucuccccccaccgcuucggcgagaccaagggcaacuccgccccccucaucauccgcgagcccuucaucgccugcgagcccaacgagugcaagcacuucgcccucacccacuacgccgcccagcccggcggcuacuacaacggcacccgcggcgaccgcaacaagcuccgccaccucaucuccgucaagcucggcaagauccccaccgucgagaacuccaucuuccacauggccgccugguccggcuccgccugccacgacggcaaggaguggaccuacaucggcgucgacggccccgacaacaacgcccuccucaagaucaaguacggcgaggccuacaccgacaccuaccacuccuacgccaacaacauccuccgcacccaggaguccgccugcaacugcaucggcggcaacugcuaccucaugaucaccgacggcuccgccuccggcgucuccgagugccgcuuccucaagauccgcgagggccgcaucaucaaggagaucuuccccaccggccgcgucaagcacaccgaggagugcaccugcggcuucgccuccaacaagaccaucgagugcgccugccgcgacaacuccuacaccgccaagcgccccuucgucaagcucaacgucgagaccgacaccgccgagauccgccucaugugcaccgacaccuaccucgacaccccccgccccgacgacggcuccaucaccggccccugcgaguccaacggcgacaagggcuccggcggcaucaagggcggcuucguccaccagcgcauggccuccaagaucggccgcugguacucccgcaccauguccaagaccgagcgcaagggcaugggccucuacgucaaguacgacggcgaccccuggaccgacuccgacgcccucgccuuccgcggcgucauggucuccaugaaggagcccggcugguacuccuucggcuucgagaucaaggacaagaagugcgacguccccugcaucggcaucgagaugguccacgacggcggcaaggagaccuggcacuccgccgccaccgccaucuacugccucaugggcuccggccagcuccucugggacaccgucaccggcgucgacauggcccucuga

SEQ ID NO: 125605 - RNA, 1401 nt, Artificial Sequence; identical to SEQ ID NO: 124992
  derived and/or modified CDS sequence (opt2) from neuraminidase__InfluenzaB__AGX21209

SEQ ID NO: 125606 - RNA, 1401 nt, Artificial Sequence; identical to SEQ ID NO: 125155
  derived and/or modified CDS sequence (opt2) from neuraminidase__InfluenzaB__AGX21220

SEQ ID NO: 125607 - RNA, 1401 nt, Artificial Sequence
  derived and/or modified CDS sequence (opt2) from neuraminidase__InfluenzaB__AGX21231
augcuccccuccaccauccagacccucacccucuuccucaccuccggcggcguccuccucucccucuacgucuccgcccuccucuccuaccuccucuacuccgacauccuccucaaguucucccccaccgagaucaccgcccccaccaugucccucgacugcgccaacgccuccaacguccaggccgucaaccgcuccgccaccaagggcgucaccuuccuccuccccgaguccgaguggaccuacccccgccucuccugccccggcuccaccuuccagaaggcccuccucaucuccccccaccgcuucggcgagaccaagggcaacuccgccccccucaucauccgcgagcccuucaucgccugcggccccaacgagugcaagcacuucgcccucacccacuacgccgcccagcccggcggcuacuacaacggcacccgcggcgaccgcaacaagcuccgccaccucaucuccgucaagcucggcaagauccccaccgucgagaacuccaucuuccacauggccgccugguccggcuccgccugccacgacggcaaggaguggaccuacaucggcgucgacggccccgacaacgacgcccuccucaaggucaaguacggcgaggccuacaccgacaccuaccacuccuacgccaacaagauccuccgcacccaggaguccgccugcaacugcaucggcggcaacugcuaccucaugaucaccgacggcuccgccuccggcgucuccgagugccgcuuccucaagauccgcgagggccgcaucaucaaggagaucuuccccaccggccgcgucaagcacaccgaggagugcaccugcggcuucgccuccaacaagaccaucgagugcgccugccgcgacaacuccuacaccgccaagcgccccuucgucaagcucaacgucgagaccgacaccgccgagauccgccucaugugcaccgacaccuaccucgacaccccccgccccgacgacggcuccaucaccggccccugcgaguccaacggcgacaagggcuccggcggcaucaagggcggcuucguccaccagcgcauggaguccaagaucggccgcugguacucccgcaccauguccaagaccgagcgcaugggcaugggccucuacgucaaguacgacggcgaccccugggccgacuccgacgcccucgccuucuccggcgucauggucuccaugaaggagcccggcugguacuccuucggcuucgagaucaaggacaagaagugcgacguccccugcaucggcaucgagaugguccacgacggcggcaaggagaccuggcacuccgccgccaccgccaucuacugccucaugggcuccggccagcuccucugggacaccgucaccggcgucgacauggcccucuga

SEQ ID NO: 125608 - RNA, 1401 nt, Artificial Sequence; identical to SEQ ID NO: 125158
  derived and/or modified CDS sequence (opt2) from neuraminidase__InfluenzaB__AGX21242

SEQ ID NO: 125609 - RNA, 1401 nt, Artificial Sequence; identical to SEQ ID NO: 124992
  derived and/or modified CDS sequence (opt2) from neuraminidase__InfluenzaB__AGX21253

SEQ ID NO: 125610 - RNA, 1401 nt, Artificial Sequence
  derived and/or modified CDS sequence (opt2) from neuraminidase__InfluenzaB__AGX21264
augcuccccuccaccauccagacccucacccucuuccucaccuccggcggcguccuccucucccucuacgucuccgccucccucuccuaccuccucuacuccgacauccuccucaaguucuccaccaccgagaucaccgcccccaccaugccccucgacugcgccaacgccuccaacguccaggccgucaaccgcuccgccaccaagggcgucacccuccuccuccccgagcccgaguggaccuacccccgccucuccugccccggcuccaccuuccagaaggcccuccucaucuccccccaccgcuucggcgagaacaagggcaacuccgccccccucaucauccgcgagcccuucaucgccugcggccccaacgagugcaagcacuucgcccucacccacuacgccgcccagcccggcggcuacuacaacggcacccgcggcgaccgcaacaagcuccgccaccucaucuccgucaagcucggcaagauccccaccgucgagaacuccaucuuccacauggccgccugguccggcuccgccugccacgacggcaaggaguggaccuacaucggcgucgacggccccgacaacaacgcccuccucaaggucaaguacggcgaggccuacaccgacaccuaccacuccuacgccaacaagauccuccgcacccaggaguccgccugcaacugcaucggcggcaacugcuaccucaugaucaccgacggcuccgccuccggcgucuccgagugccgcuuccucaagauccgcgagggccgcaucaucaaggagaucuuccccaccggccgcgucaagcacaccgaggagugcaccugcggcuucgccuccaacaagaccaucgagugcgccugccgcgacaacuccuacaccgccaagcgccccuucgucaagcucaacgucgagaccgacaccgccgagauccgccucaugugcaccgacaccuaccucgacaccccccgccccaacgacggcuccaucaccggccccugcgaguccgacggcgacaagggcuccggcggcaucaagggcggcuucguccaccagcgcauggaguccaagaucggccgcugguacucccgcaccauguccaagaccgagcgcaugggcaugggccucuacgucaaguacgacggcgaccccugggccgacuccgacgcccucgccuucuccggcgucauggucuccaugaaggagcccuccugguacuccuucggcuucgagaucaaggacaagaagugcgacguccccugcaucggcaucgagaugguccacgacggcggcaaggagaccuggcacuccgccgccaccgccaucuacugccucaugggcuccggccagcuccucugggacaccgucaccggcgucgacauggcccucuga

SEQ ID NO: 125611 - RNA, 1401 nt, Artificial Sequence; identical to SEQ ID NO: 124931
  derived and/or modified CDS sequence (opt2) from neuraminidase__InfluenzaB__AGX21275

SEQ ID NO: 125612 - RNA, 1401 nt, Artificial Sequence; identical to SEQ ID NO: 124992
  derived and/or modified CDS sequence (opt2) from neuraminidase__InfluenzaB__AGX21286

SEQ ID NO: 125613 - RNA, 1401 nt, Artificial Sequence
  derived and/or modified CDS sequence (opt2) from neuraminidase__InfluenzaB__AGX21297
augcuccccuccaccauccagacccucacccucuuccucaccuccggcggcguccuccucucccucuacgucuccgccucccucuccuaccuccucuacuccgacauccuccucaaguucucccccaccgagaucaccgcccccaccaugccccucgacugcgccaacgccuccaacguccaggccgucaaccgcuccgccaccaagggcgucacccuccuccuccccgagcccgacuggaccuacccccgccucuccugccccggcuccaccuuccagaaggcccuccucaucuccccccaccgcuucggcgagaccaagggcaacuccgccccccucaucauccgcgagcccuucaucgccugcggccccaacgagugcaagcacuucgcccucacccacuacgccgcccagcccggcggcuacuacaacggcacccgcggcgaccgcaacaagcuccgccaccucaucuccgucaagcucggcaagauccccaccgucgagaacuccaucuuccacauggccgccugguccggcuccgccugccacgacggcaaggaguggaccuacaucggcgucgacggccccgacaacaacgcccuccucaaggucaaguacggcgaggccuacaccgacaccuaccacuccuacgccaacaagauccuccgcacccaggaguccgccugcaacugcaucggcggcaacugcuaccucaugaucaccgacggcuccgccuccggcgucuccgagugccgcuuccucaagauccgcgagggccgcaucaucaaggagaucuuccccaccggccgcgucaagcacaccgaggagugcaccugcggcuucgccuccaacaagaccaucgagugcgccugccgcgacaacuccuacaccgccaagcgccccuucgucaagcucaacgucgagaccgacaccgccgagguccgccucaugugcaccgacaccuaccucgacaccccccgccccaacgacggcuccaucaccggccccugcgaguccgacggcgacaagggcuccggcggcaucaagggcggcuucguccaccagcgcauggaguccaagaucggccgcugguacucccgcaccauguccaagaccgagcgcaugggcaugggccucuacgucaaguacgacggcgaccccugggccgacuccgacgcccucaccuucuccggcgucauggucuccaugaaggagcccggcugguacuccuucggcuucgagaucaaggacaagaagugcgacguccccugcaucggcaucgagaugguccacgacggcggcaaggagaccuggcacuccgccgccaccgccaucuacugccucaugggcuccggccagcuccucugggacaccgucaccggcgucgacauggcccucuga

SEQ ID NO: 125614 - RNA, 1401 nt, Artificial Sequence
  derived and/or modified CDS sequence (opt2) from neuraminidase__InfluenzaB__AGX21308
augcuccccuccaccauccagaugcucacccucuuccucaccuccggcggcguccuccucucccucuacgucuccgccucccucuccuaccuccucuacuccgacauccuccucaaguucucccccaccgagaucaccgcccccaccaugccccucgacugcgccaacgccuccaacguccacgccgucaaccgcuccgccaccaagggcgucaccuuccuccuccccgagcccgaguggaccuacccccgccucuccugccccggcuccaccuuccagaaggcccuccucaucuccccccaccgcuucggcgagaccaagggcaacuccgccccccucaucauccgcgagcccuucaucgccugcggccccaacgagugcaagcacuucgcccucacccacuacgccgcccagcccggcggcuacuacaacggcacccgcggcgaccgcaacaagcuccgccaccucaucuccgucaagcucggcaagauccccaccgucgagaacuccaucuuccacauggccgccugguccggcuccgccugccacgacggcaaggaguggaccuacaucggcgucgacggccccgacaacaacgcccuccucaagaucaaguacggcgaggccuacaccgacaccuaccacuccuacgccaacaacauccuccgcacccaggaguccgccugcaacugcaucggcggcaacugcuaccucaugaucaccgacggcuccgccuccggcgucuccgagugccgcuuccucaagauccgcgagggccgcaucaucaaggagaucuuccccaccggccgcgucaagcacaccgaggagugcaccugcggcuucgccuccaacaagaccaucgagugcgccugccgcgacaacuccuacaccgccaagcgccccuucgucaagcucaacgucgagaccgacaccgccgagauccgccucaugugcaccgacaccuaccucgacaccccccgccccgacgacggcuccaucaccggccccugcgaguccaacggcgacaagggcuccggcggcaucaagggcggcuucguccaccagcgcauggccuccaagaucggccgcugguacucccgcaccauguccaagaccgagcgcaagggcaugggccucuacgucaaguacgacggcgaccccuggaccgacuccgacgcccucgcccuccgcggcgucauggucuccaugaaggagcccggcugguacuccuucggcuucgagaucaaggacaagaagugcgacguccccugcaucggcaucgagaugguccacgacggcggcaaggagaccuggcacuccgccgccaccgccaucuacugccucaugggcuccggccagcuccucugggacaccgucaccggcgucgacauggcccucuga

SEQ ID NO: 125615 - RNA, 1401 nt, Artificial Sequence; identical to SEQ ID NO: 124936
  derived and/or modified CDS sequence (opt2) from neuraminidase__InfluenzaB__AGX21319

SEQ ID NO: 125616 - RNA, 1401 nt, Artificial Sequence; identical to SEQ ID NO: 124931
  derived and/or modified CDS sequence (opt2) from neuraminidase__InfluenzaB__AGX21330

SEQ ID NO: 125617 - RNA, 1401 nt, Artificial Sequence; identical to SEQ ID NO: 124931
  derived and/or modified CDS sequence (opt2) from neuraminidase__InfluenzaB__AGX21341

SEQ ID NO: 125618 - RNA, 1401 nt, Artificial Sequence; identical to SEQ ID NO: 125158
  derived and/or modified CDS sequence (opt2) from neuraminidase__InfluenzaB__AGX21352

SEQ ID NO: 125619 - RNA, 1401 nt, Artificial Sequence
  derived and/or modified CDS sequence (opt2) from neuraminidase__InfluenzaB__AGX21363
augcuccccuccaccauccagacccucacccucuuccucaccuccggcggcguccuccucucccucuacgucuccgccucccucuccuaccuccucuacuccgacauccuccucaaguucucccccaccgagaucaccgcccccaccaugccccucgacugcgccaacgccuccaacguccaggccgucaaccgcuccgccaccaagggcgucacccuccuccuccccgagcccgaguggaccuacccccgccucuccugccccggcuccaccuuccagaaggcccuccucaucuccucccaccgcuucggcgagaccaagggcaacuccgccccccucaucauccgcgagcccuucgucgccugcggccccaacgagugcaagcacuucgcccucacccacuacgccgcccagcccggcggcuacuacaacggcacccgcggcgaccgcaacaagcuccgccaccucaucuccgucaagcucggcaagauccccaccgucgagaacuccaucuuccacauggccgccugguccggcuccgccugccacgacggcaaggaguggaccuacaucggcgucgacggccccgacaacaacgcccuccucaaggucaaguacggcgaggccuacaccgacaccuaccacuccuacgccaacaagauccuccgcacccaggaguccgccugcaacugcaucggcggcaacugcuaccucaugaucaccgacggcuccgccuccggcgucuccgagugccgcuuccucaagauccgcgagggccgcaucaucaaggagaucuuccccaccggccgcgucaagcacaccgaggagugcaccugcggcuucgccuccaacaagaccaucgagugcgccugccgcgacaacuccuacaccgccaagcgccccuucgucaagcucaacgucgagaccgacaccgccgagauccgccucaugugcaccgacaccuaccucgacaccccccgccccaacgacggcuccaucaccggccccugcgaguccgacggcgacaagggcuccggcggcaucaagggcggcuucguccaccagcgcauggaguccaagaucggccgcugguacucccgcaccauguccaagaccgagcgcaugggcaugggccucuacgucaaguacgacggcgaccccugggccgacuccgacgcccucgccuucuccggcgucauggucuccaugaaggagcccggcugguacuccuucggcuucgagaucaaggacaagaagugcgacguccccugcaucggcaucgagaugguccacgacggcggcaaggagaccuggcacuccgccgccaccgccaucuacugccucaugggcuccggccagcuccucugggacaccgucaccggcgucgacauggcccucuga

SEQ ID NO: 125620 - RNA, 1401 nt, Artificial Sequence; identical to SEQ ID NO: 124931
  derived and/or modified CDS sequence (opt2) from neuraminidase__InfluenzaB__AGX21374

SEQ ID NO: 125621 - RNA, 1401 nt, Artificial Sequence; identical to SEQ ID NO: 124992
  derived and/or modified CDS sequence (opt2) from neuraminidase__InfluenzaB__AGX21385

SEQ ID NO: 125622 - RNA, 1401 nt, Artificial Sequence; identical to SEQ ID NO: 124992
  derived and/or modified CDS sequence (opt2) from neuraminidase__InfluenzaB__AGX21396

SEQ ID NO: 125623 - RNA, 1401 nt, Artificial Sequence; identical to SEQ ID NO: 124931
  derived and/or modified CDS sequence (opt2) from neuraminidase__InfluenzaB__AGX21407

SEQ ID NO: 125624 - RNA, 1401 nt, Artificial Sequence; identical to SEQ ID NO: 124931
  derived and/or modified CDS sequence (opt2) from neuraminidase__InfluenzaB__AGX21418

SEQ ID NO: 125625 - RNA, 1401 nt, Artificial Sequence
  derived and/or modified CDS sequence (opt2) from neuraminidase__InfluenzaB__AGX21429
augcuccccuccaccauccagacccucacccucuuccucaccuccggcggcguccuccucucccucuacgucuccgcccuccucuccuaccuccuccacuccgacauccuccucaaguucucccccaccgagaucaccgcccccaccaugucccucgacugcgccaacgccuccaacguccaggccgucaaccgcuccgucaccaagggcgucaccuuccuccuccccgagcccgaguggaccuacccccgccucuccugccccggcuccaccuuccagaaggcccuccucaucuccccccaccgcuucggcgagaccaagggcaacuccgccccccucaucauccgcgagcccuucaucgccugcggccccaacgagugcaagcacuucgcccucacccacuacgccgcccagcccggcggcuacuacaacggcacccgcggcgaccgcaacaagcuccgccaccucaucuccgucaagcucggcaagauccccaccgucgagaacuccaucuuccacauggccgccugguccggcuccgccugccacgacggcaaggaguggaccuacaucggcgucgacggccccgacaacgacgcccuccucaaggucaaguacggcgaggccuacaccgacaccuaccacuccuacgccaacaagauccuccgcacccaggaguccgccugcaacugcaucggcggcaacugcuaccucaugaucaccgacggcuccgccuccggcgucuccgagugccgcuuccucaagauccgcgagggccgcaucaucaaggagaucuuccccaccggccgcgucaagcacaccgaggagugcaccugcggcuucgccuccaacaagaccaucgagugcgccugccgcgacaacuccuacaccgccaagcgccccuucgucaagcucaacgucgagaccgacaccgccgagauccgccucaugugcaccgacaccuaccucgacaccccccgccccgacgacggcuccaucaccggccccugcgaguccaacggcgacaagggcuccggcggcaucaagggcggcuucguccaccagcgcauggaguccaagaucggccgcugguacucccgcaccauguccaagaccgagcgcaugggcaugggccucuacgucaaguacgacggcgaccccugggccgacuccgacgcccucgccuucuccggcgucauggucuccaugaaggagcccggcugguacuccuucggcuucgagaucaaggacaagaagugcgacguccccugcaucggcaucgagaugguccacgacggcggcaaggagaccuggcacuccgccgccaccgccaucuacugccucaugggcuccggccagcuccucugggacaccgucaccggcgucgacauggcccucuga

SEQ ID NO: 125626 - RNA, 1401 nt, Artificial Sequence; identical to SEQ ID NO: 124992
  derived and/or modified CDS sequence (opt2) from neuraminidase__InfluenzaB__AGX21440

SEQ ID NO: 125627 - RNA, 1401 nt, Artificial Sequence; identical to SEQ ID NO: 124992
  derived and/or modified CDS sequence (opt2) from neuraminidase__InfluenzaB__AGX21451

SEQ ID NO: 125628 - RNA, 1401 nt, Artificial Sequence; identical to SEQ ID NO: 125576
  derived and/or modified CDS sequence (opt2) from neuraminidase__InfluenzaB__AGX21462

SEQ ID NO: 125629 - RNA, 1401 nt, Artificial Sequence
  derived and/or modified CDS sequence (opt2) from neuraminidase__InfluenzaB__AGX21473
augcuccccuccaccauccagacccucacccucuuccucaccuccggcggcguccuccucucccucuacgucuccgcccuccucuccuaccuccucuacuccgacauccuccucaaguucucccccaccgagaucaccgcccccaccaugucccucgacugcgccaacgccuccaacguccaggccgucaaccgcuccgccaccaagggcgucaccuuccuccuccccgagcccgaguggaccuacccccgccucuccugccccggcuccaccuuccagcgcgcccuccucaucuccccccaccgcuucggcgaggccaagggcaacuccgccccccucaucauccgcgagcccuucaucgccugcggccccaacgagugcaagcacuucgcccucacccacuacgccgcccagcccggcggcuacuacaacggcacccgcggcgaccgcaacaagcuccgccaccucaucuccgucaagcucggcaagauccccaccgucgagaacuccaucuuccacauggccgccugguccggcuccgccugccacgacggcaaggaguggaccuacaucggcgucgacggccccgacaacgacgcccuccucaaggucaaguacggcgaggccuacaccgacaccuaccacuccuacgccaacaagauccuccgcacccaggaguccgccugcaacugcaucggcggcaacugcuaccucaugaucaccgacggcuccgccuccggcgucuccgagugccgcuuccucaagauccgcgagggccgcaucaucaaggagauccuccccaccggccgcgucaagcacaccgaggagugcaccugcggcuucgccuccaacaagaccaucgagugcgccugccgcgacaacuccuacaccgccaagcgccccuucgucaagcucaacgucgagaccgacaccgccgagauccgccucaugugcaccgacaccuaccucgacaccccccgccccgacgacggcuccaucaccggccccugcgaguccaacggcgacaagggcuccggcggcaucaagggcggcuucguccaccagcgcauggaguccaagaucggccgcugguacucccgcaccauguccaagaccgagcgcaugggcaugggccucuacgucaaguacgacggcgaccccugggccgacuccgacgcccucgucuucuccggcgucauggucuccaugaaggagcccggcugguacuccuucggcuucgagaucaaggacaagaagugcgacguccccugcaucggcaucgagaugguccacgacggcggcaaggagaccuggcacuccgccgccaccgccaucuacugccucaugggcuccggccagcuccucugggacaccgucaccggcgucgacauggcccucuga

SEQ ID NO: 125630 - RNA, 1401 nt, Artificial Sequence; identical to SEQ ID NO: 124936
  derived and/or modified CDS sequence (opt2) from neuraminidase__InfluenzaB__AGX21484

SEQ ID NO: 125631 - RNA, 1401 nt, Artificial Sequence; identical to SEQ ID NO: 124992
  derived and/or modified CDS sequence (opt2) from neuraminidase__InfluenzaB__AGX21495

SEQ ID NO: 125632 - RNA, 1401 nt, Artificial Sequence; identical to SEQ ID NO: 124992
  derived and/or modified CDS sequence (opt2) from neuraminidase__InfluenzaB__AGX21506

SEQ ID NO: 125633 - RNA, 1401 nt, Artificial Sequence
  derived and/or modified CDS sequence (opt2) from neuraminidase__InfluenzaB__AGX21517
augcuccccuccaccauccagacccucacccucuuccucaccuccggcggcguccuccucucccucuacgucuccgcccuccucuccuaccuccucuacuccaacauccuccucaaguucucccccaccgagaucaccgcccccaccaugucccucgacugcgccaacgccuccaacguccaggccgucaaccgcuccgccaccaagggcgucaccuuccuccuccccgagcccgaguggaccuacccccgccucuccugccccggcuccaccuuccagaaggcccuccucaucuccccccaccgcuucggcgagaccaagggcaacuccgccccccucaucauccgcgagcccuucaucgccugcggccccaacgagugcaagcacuucgcccucacccacuacgccgcccagcccggcggcuacuacaacggcacccgcggcgaccgcaacaagcuccgccaccucaucuccgucaagcucggcaagauccccaccgucgagaacuccaucuuccacauggccgccugguccggcuccgccugccacgacggcaaggaguggaccuacaucggcgucgacggccccgacaacgacgcccuccucaaggucaaguacggcgaggccuacaccgacaccuaccacuccuacgccaacaagauccuccgcacccaggaguccgccugcaacugcaucggcggcaacugcuaccucaugaucaccgacggcuccgccuccggcgucuccgagugccgcuuccucaagauccgcgagggccgcaucaucaaggagaucuuccccaccggccgcgucaagcacaccgaggagugcaccugcggcuucgccuccaacaagaccaucgagugcgccugccgcgacaacuccuacaccgccaagcgccccuucgucaagcucaacgucgagaccgacaccgccgagauccgccucaugugcaccgacaccuaccucgacaccccccgccccgacgacggcuccaucaccggccccugcgaguccaacggcgacaagggcuccggcggcaucaagggcggcuucguccaccagcgcauggaguccaagaucggccgcugguacucccgcaccauguccaagaccgagcgcaugggcaugggccucuacgucaaguacgacggcgaccccugggccgacuccgacgcccucgccuucuccggcgucauggucuccaugaaggagcccggcugguacuccuucggcuucgagaucaaggacaagaagugcgacguccccugcaucggcaucgagaugguccacgacggcggcaaggagaccuggcacuccgccgccaccgccaucuacugccucaugggcuccggccagcuccucugggacaccgucaccggcgucgacauggcccucuga

SEQ ID NO: 125634 - RNA, 1401 nt, Artificial Sequence
  derived and/or modified CDS sequence (opt2) from neuraminidase__InfluenzaB__AGX21528
augcuccccuccaccauccagacccucacccucuuccucaccuccggcggcguccuccucucccucuacgucuccgccucccucuccuaccuccucuacuccgacauccuccucaaguucucccccaccgagaucaccgcccccaccaugccccucgacugcgccaacgccuccaacguccaggccgucaaccgcuccgccaccaagggcgucacccuccuccuccccgagcccgaguggaccuacccccgccucuccugccccggcuccaccuuccagaaggcccuccucaucuccccccaccgcuucggcgagaccaagggcaacuccgccccccucaucauccgcgagcccuucaucgccugcggccccaacgagugcaagcacuucgcccucacccacuacgccgcccagcccggcggcuacuacaacggcacccgcggcgaccgcaacaagcuccgccaccucaucuccgucaagcucggcaagauccccaccgucgagaacuccaucuuccacauggccgccugguccggcuccgccugccacgacggcaaggaguggaccuacaucggcgucgacggccccgacaacaacgcccuccucaaggucaaguacggcgaggccuacaccgacaccuaccacuccuacgccaacaagauccuccgcacccaggaguccgccugcaacugcaucggcggcaacugcuaccucaugaucaccgacggcuccgccuccggcgucuccgagugccgcuuccucaagauccgcgagggccgcaucaucaaggagaucuuccccaccggccgcgucaagcacaccgaggagugcaccugcggcuucgccuccaacaagaccaucgagugcgccugccgcgacaacuccuacaccgccaagcgccccuucgucaagcucaacgucgagaccgacaccgccgagguccgccucaugugcaccgacaccuaccucgacaccccccgccccaacgacggcuccaucaccggccccugcgaguccgacggcgacaagggcuccggcggcaucaagggcggcuucguccaccagcgcauggaguccaagaucggccgcugguacucccgcaccauguccaagaccgagcgcaugggcaugggccucuacgucaaguacgacggcgaccccugggccgacuccgacgcccucaccuucuccggcgucauggucuccaugaaggagcccggcugguacuccuucggcuucgagaucaaggacaagaagugcgacguccccugcaucggcaucgagaugguccacgacuccggcaaggagaccuggcacuccgccgccaccgccaucuacugccucaugggcuccggccagcuccucugggacaccgucaccggcgucgacauggcccucuga

SEQ ID NO: 125635 - RNA, 1401 nt, Artificial Sequence; identical to SEQ ID NO: 124992
  derived and/or modified CDS sequence (opt2) from neuraminidase__InfluenzaB__AGX21539

SEQ ID NO: 125636 - RNA, 1401 nt, Artificial Sequence
  derived and/or modified CDS sequence (opt2) from neuraminidase__InfluenzaB__AGX21550
augcuccccuccaccauccagacccucacccucuuccucaccuccggcggcguccuccucucccucuacgucuccgccucccucuccuaccuccucuacuccgacauccuccucaaguucucccccaccgagaucaccgcccccaccaugccccucgacugcgccaacgccuccaacguccaggccgucaaccgcuccgccaccaagggcgucacccuccuccuccccgagcccgaguggaccuacccccgccucuccugccccggcuccaccuuccagaaggcccuccucaucuccccccaccgcuucggcgagaccaagggcaacuccgccccccucaucauccgcgagcccuucaucgccugcggccccaacgagugcaagcacuucgcccucacccacuacgccgcccagcccggcggcuacuacaacggcacccgcggcgaccgcaacaagcuccgccaccucaucuccgucaagcucggcaagauccccaccgucgagaacuccaucuuccacauggccgccugguccggcuccgccugccacgacggcaaggaguggaccuacaucggcgucgacggccccgacaacaacgcccuccucaaggucaaguacggcgaggccuacaccgacaccuaccacuccuacgccaacaagauccuccgcacccaggaguccgccugcaacugcaucggcggcaacugcuaccucaugaucaccgacggcuccgccuccggcgucuccgagugccgcuuccucaagauccgcgagggccgcaucaucaaggagaucuuccccgccggccgcgucaagcacaccgaggagugcaccugcggcuucgccuccaacaagaccaucgagugcgccugccgcgacaacuccuacaccgccaagcgccccuucgucaagcucaacgucgagaccgacaccgccgagguccgccucaugugcaccgacaccuaccucgacaccccccgccccaacgacggcuccaucaccggccccugcgaguccgacggcgacaagggcuccggcggcaucaagggcggcuucguccaccagcgcauggaguccaagaucggccgcugguacucccgcaccauguccaagaccgagcgcaugggcaugggccucuacgucaaguacgacggcgaccccugggccgacuccgacgcccucaccuucuccggcgucauggucuccaugaaggagcccggcugguacuccuucggcuucgagaucaaggacaagaagugcgacguccccugcaucggcaucgagaugguccacgacggcggcaaggagaccuggcacuccgccgccaccgccaucuacugccucaugggcuccggccagcuccucugggacaccgucaccggcgucgacauggcccucuga

SEQ ID NO: 125637 - RNA, 1401 nt, Artificial Sequence
  derived and/or modified CDS sequence (opt2) from neuraminidase__InfluenzaB__AGX21561
augcuccccuccaccauccagacccucacccucuuccucaccuccggcggcguccuccucucccucuacgucuccgccucccucuccuaccuccucuacuccgacauccuccucaaguucucccccaccgagaucaccgcccccaccaugccccucgacugcgccaacgccuccaacguccaggccgucaaccgcuccgccaccaagggcgucacccuccuccuccccgagcccgaguggaccuacccccgccucuccugccccggcuccaccuuccagaaggcccuccucaucuccccccaccgcuucggcgagaccaagggcaacuccgccccccucaucauccgcgagcccuucaucgccugcggccccaacgagugcaagcacuucgcccucacccacuacgccgcccagcccggcggcuacuacaacggcacccgcggcgaccgcaacaagcuccgccaccucaucuccgucaagcucggcaagauccccaccgucgagaacuccaucuuccacauggccgccugguccggcuccgccugccacgacggcaaggaguggaccuacaucggcgucgacggccccgacaacaacgcccuccucaaggucaaguacggcgaggccuacaccgacaccuaccacuccuacgccaacaagauccuccgcacccaggaguccgccugcaacugcaucggcggcaacugcuaccucaugaucaccgacggcuccgccuccggcgucuccgagugccgcuuccucaagguccgcgagggccgcaucaucaaggagaucuuccccaccggccgcgucaagcacaccgaggagugcaccugcggcuucgccuccaacaagaccaucgagugcgccugccgcgacaacuccuacaccgccaagcgccccuucgucaagcucaacgucgagaccgacaccgccgagguccgccucaugugcaccgacaccuaccucgacaccccccgccccaacgacggcuccaucaccggccccugcgaguccgacggcgacaagggcuccggcggcaucaagggcggcuucguccaccagcgcauggaguccaagaucggccgcugguacucccgcaccauguccaagaccgagcgcaugggcaugggccucuacgucaaguacgacggcgaccccugggccgacuccgacgcccucaccuucuccggcgucauggucuccaugaaggagcccggcugguacuccuucggcuucgagaucaaggacaagaagugcgacguccccugcaucggcaucgagaugguccacgacggcggcaaggagaccuggcacuccgccgccaccgccaucuacugccucaugggcuccggccagcuccucugggacaccgucaccggcgucgacauggcccucuga

SEQ ID NO: 125638 - RNA, 1401 nt, Artificial Sequence; identical to SEQ ID NO: 124936
  derived and/or modified CDS sequence (opt2) from neuraminidase__InfluenzaB__AGX21572

SEQ ID NO: 125639 - RNA, 1401 nt, Artificial Sequence
  derived and/or modified CDS sequence (opt2) from neuraminidase__InfluenzaB__AGX21583
augcuccccuccaccauccagacccucacccucuuccucaccuccggcggcguccuccucucccucuacgucuccgcccuccucuccuaccuccucuacuccgacauccuccucaaguucucccccaccgagaucaccgcccccaccaugucccucgacugcgccaacgccuccaacguccaggccgucaaccgcuccgccaccaagggcgucaccuuccuccuccccgagcccgaguggaccuacccccgccucuccugccccggcuccaccuuccagcgcgcccuccucaucuccccccaccgcuucggcgaggccaagggcaacuccgccccccucaucauccgcgagcccuucaucgccugcggccccaacgagugcaagcacuucgcccucacccacuacgccgcccagcccggcggcuacuacaacggcacccgcggcgaccgcaacaagcuccgccaccucaucuccgucaagcucggcaagauccccaccgucgagaacuccaucuuccacauggccgccugguccggcuccgccugccacgacggcaaggaguggaccuacaucggcgucgacggccccgacaacgacgcccuccucaaggucaaguacggcgaggccuacaccgacaccuaccacuccuacgccaacaagauccuccgcacccaggaguccgccugcaacugcaucggcggcaacugcuaccucaugaucaccgacggcuccgccuccggcgucuccgagugccgcuuccucaagauccgcgagggccgcaucaucaaggagauccuccccaccggccgcgucaagcacaccgaggagugcaccugcggcuucgccuccaacaagaccaucgagugcgccugccgcgacaacuccuacaccgccaagcgccccuucgucaagcucaacgucgagaccgacaccgccgagauccgccucaugugcaccgacaccuaccucgacaccccccgccccgacgacggcuccaucaccggccccugcgaguccaacggcgacaagggcuccggcggcaucaagggcggcuucguccaccagcgcauggaguccaagaucggccgcugguacucccgcaccauguccaagaccgagcgcaugggcauggagcucuacgucaaguacgacggcgaccccugggccgacuccgacgcccucgccuucuccggcgucauggucuccaugaaggagcccggcugguacuccuucggcuucgagaucaaggacaagaagugcgacguccccugcaucggcaucgagaugguccacgacggcggcaaggagaccuggcacuccgccgccaccgccaucuacugccucaugggcuccggccagcuccucugggacaccgucaccggcgucgacauggcccucuga

SEQ ID NO: 125640 - RNA, 1401 nt, Artificial Sequence; identical to SEQ ID NO: 124936
  derived and/or modified CDS sequence (opt2) from neuraminidase__InfluenzaB__AGX21594

SEQ ID NO: 125641 - RNA, 1401 nt, Artificial Sequence; identical to SEQ ID NO: 125158
  derived and/or modified CDS sequence (opt2) from neuraminidase__InfluenzaB__AGX21605

SEQ ID NO: 125642 - RNA, 1401 nt, Artificial Sequence
  derived and/or modified CDS sequence (opt2) from neuraminidase__InfluenzaB__AGX21615
augcuccccuccaccauccagacccucacccucuuccucaccuccggcggcguccuccucucccucuacgucuccgccucccucuccuaccuccucuacuccgacauccuccucaaguucuccaccaccgagaucaccgcccccaccaugccccucgacugcgccaacgccuccaacguccaggccgucaaccgcuccgccaccaagggcgucacccuccuccuccccgagcccgaguggaccuacccccgccucuccugccccggcuccaccuuccagaaggcccuccucaucuccccccaccgcuucggcgagaacaagggcaacuccgccccccucaucauccgcgagcccuucaucgccugcggccccaacgagugcaagcacuucgcccucacccacuacgccgcccagcccggcggcuacuacaacggcacccgcggcgaccgcaacaagcuccgccaccucaucuccgucaagcucggcaagauccccaccgucgagaacuccaucuuccacauggccgccugguccggcuccgccugccacgacggcaaggaguggaccuacaucggcgucgacggccccgacaacaacgcccuccucaaggucaaguacggcgaggccuacaccgacaccuaccacuccuacgccaacaagauccuccgcacccaggaguccgccugcaacugcaucggcggcaacugcuaccucaugaucaccgacggcuccgccuccggcgucuccgagugccgcuuccucaagauccgcgagggccgcaucaucaaggagaucuuccccaccggccgcgucaagcacaccgaggagugcaccugcggcuucgccuccaacaagaccaucgagugcgccugccgcgacaacuccuacaccgccaagcgccccuucgucaagcucaacgucgagaccgacaccgccgagauccgccucaugugcaccgacaccuaccucgacaccccccgccccaacgacggcuccaucaccggccccugcgaguccgacggcgacaagggcuccggcggcaucaagggcggcuucguccaccagcgcauggaguccaagaucggccgcugguacucccgcaccauguccaagaccgagcgcaugggcaugggccucuacgucaaguacgacggcgaccccugggccgacuccgacgcccucgccuucuccggcgucauggucuccaugaaggagcccggcugguacuccuucggcuucgagaucaaggacaagaagugcgacguccccugcaucggcaucgagaugguccacgacggcggcaaggagaccuggcacuccgccgccaccgccaucuacugccucaugggcuccggccagcuccucugggacaccgucaccggcgucgacauggcccucuga

SEQ ID NO: 125643 - RNA, 1401 nt, Artificial Sequence; identical to SEQ ID NO: 124992
  derived and/or modified CDS sequence (opt2) from neuraminidase__InfluenzaB__AGX21626

SEQ ID NO: 125644 - RNA, 1401 nt, Artificial Sequence; identical to SEQ ID NO: 124992
  derived and/or modified CDS sequence (opt2) from neuraminidase__InfluenzaB__AGX21637

SEQ ID NO: 125645 - RNA, 1401 nt, Artificial Sequence; identical to SEQ ID NO: 124992
  derived and/or modified CDS sequence (opt2) from neuraminidase__InfluenzaB__AGX21648

SEQ ID NO: 125646 - RNA, 1401 nt, Artificial Sequence
  derived and/or modified CDS sequence (opt2) from neuraminidase__InfluenzaB__AGX21659
augcuccccuccaccauccagacccucacccucuuccucaccuccggcggcguccuccucucccucuacgucuccgcccuccucuccuaccuccucuacuccgacauccuccucaaguucucccccaccgagaucaccgcccccaccaugucccucgacugcgccaacgccuccaacguccaggccgucaaccgcuccgccaccaagggcgucaccuuccuccuccccgagcccgaguggaccuacccccgccucuccugccccggcuccaccuuccagaaggcccuccucaucuccccccaccgcuucggcgagaccaagggcaacuccgccccccucaucauccgcgagcccuucaucgccugcggccccaacgagugcaagcacuucgcccucacccacuacgccgcccagcccggcggcuacuacaacggcacccgcggcgaccgcaacaagcuccgccaccucgucuccgucaagcucggcaagauccccaccgucgagaacuccaucuuccacauggccgccugguccggcuccgccugccacgacggcaaggaguggaccuacaucggcgucgacggccccgacaacgacgcccuccucaaggucaaguacggcgaggccuacaccgacaccuaccacuccuacgccaacaagauccuccgcacccaggaguccgccugcaacugcaucggcggcaacugcuaccucaugaucaccgacggcuccgccuccggcgucuccgagugccgcuuccucaagauccgcgagggccgcaucaucaaggagaucuuccccaccggccgcgucaagcacaccgaggagugcaccugcggcuucgccuccaacaagaccaucgagugcgccugccgcgacaacuccuacaccgccaagcgccccuucgucaagcucaacgucgagaccgacaccgccgagauccgccucaugugcaccgacaccuaccucgacaccccccgccccgacgacggcuccaucaccggccccugcgaguccaacggcgacaagggcuccggcggcaucaagggcggcuucguccaccagcgcauggaguccaagaucggccgcugguacucccgcaccauguccaagaccgagcgcaugggcaugggccucuacgucaaguacggcggcgaccccugggccgacuccgacgcccucgccuucuccggcgucauggucuccaugaaggagcccggcugguacuccuucggcuucgagaucaaggacaagaagugcgacguccccugcaucggcaucgagaugguccacgacggcggcaaggagaccuggcacuccgccgccaccgccaucuacugccucaugggcuccggccagcuccucugggacaccgucaccggcgucgacauggcccucuga

SEQ ID NO: 125647 - RNA, 1401 nt, Artificial Sequence
  derived and/or modified CDS sequence (opt2) from neuraminidase__InfluenzaB__AGX21670
augcuccccuccaccauccagacccucacccucuuccucaccuccggcggcguccuccucucccucuacgucuccgcccuccucuccuaccuccucuacuccgacauccuccucaaguucucccccaccgagaucaccgcccccaccaugucccucgacugcgccaacgccuccaacguccaggccgucaaccgcuccgccaccaagggcgucaccuuccuccuccccgagcccgaguggaccuacccccgccucuccugccccggcuccaccuuccagaaggcccuccucaucuccccccaccgcuucggcgagaccaagggcaacuccgccccccucaucauccgcgagcccuucaucgccugcggccccaacgagugcaagcacuucgcccucacccacuacgccgcccagcccggcggcuacuacaacggcacccgcggcgaccgcaacaagcuccgccaccucaucuccgucaagcucggcaagauccccaccgucgagaacuccaucuuccacauggccgccugguccggcuccgccugccacgacggcaaggaguggaccuacaucggcgucgacggccccgacaacgacgcccuccucaaggucaaguacggcgaggccuacaccgacaccuaccacuccuacgccaacaagauccuccgcacccaggaguccgccugcaacugcaucggcggcaacugcuaccucaugaucaccgacggcuccgccuccggcgucuccgagugccgcuuccucaagauccgcgagggccgcaucaucaaggagaucuuccccaccggccgcgucaagcacaccgaggagugcaccugcggcuucgccuccaacaagaccaucgagugcgccugccgcgacaacuccuacaccgccaagcgccccuucgucaagcucaacgucgagaccgacaccgccgagauccgccucaugugcaccgacaccuaccucgacaccccccgccccgacgacggcuccaucaccggccccugcgaguccaacggcgacaagggcuccggcggcaucaagggcggcuucguccaccagcgcauggaguccaagaucggccgcugguacucccgcaccauguccaagaccgagcgcaugggcaugggccucuacgucaaguacgacggcgaccccugggccgacuccgacgcccucgccuucuccggcgucauggucuccaugaaggagcccggcugguacuccuucggcuucgagaucaaggacaagaagugcgacguccccugcaucggcaccgagaugguccacgacggcggcaaggagaccuggcacuccgccgccaccgccaucuacugccucaugggcuccggccagcuccucugggacaccgucaccggcgucgacauggcccucuga

SEQ ID NO: 125648 - RNA, 1401 nt, Artificial Sequence
  derived and/or modified CDS sequence (opt2) from neuraminidase__InfluenzaB__AGX21681
augcuccccuccaccauccagaugcucacccucuuccucaccuccggcggcguccuccucucccucuacgucuccgccucccucuccuaccuccucuacuccgacauccuccucaaguucucccccaccgagaucaccgcccccaccaugccccucgacugcgccaacgccuccaacguccacgccgucaaccgcuccgccaccaagggcgucaccuuccuccuccccgagcccgaguggaccuacccccgccucuccugccccggcuccaccuuccagaaggcccuccucaucuccccccaccgcuucggcgagaccaagggcaacuccgccccccucaucauccgcgagcccuucaucgccugcggccccaacgagugcaagcacuucgcccucacccacuacgccgcccagcccggcggcuacuacaacggcacccgcggcgaccgcaacaagcuccgccaccucaucuccgucaagcucggcaagauccccaccgucgagaacuccaucuuccacauggccgccugguccggcuccgccugccacgacggcaaggaguggaccuacaucggcgucgacggccccgacaacaacgcccuccucaagaucaaguacggcgaggccuacaccgacaccuaccacuccuacgccaacaacauccuccgcacccaggaguccgccugcaacugcaucggcggcaacugcuaccucaugaucaccgacggcuccgccuccggcgucuccgagugccgcuuccucaagauccgcgagggccgcaucaucaaggagaucuuccccaccggccgcgucaagcacaccgaggagugcaccugcggcuucgccuccaacaagaccaucgagugcgccugccgcgacaacuccuacaccgccaagcgccccuucgucaagcucaacgucgagaccgacaccgccgagauccgccucaugugcaccgacaccuaccucgacaccccccgccccgacgacggcuccaucaccggccccugcgaguccaacggcgacaagggcaacggcggcaucaagggcggcuucguccaccagcgcauggccuccaagaucggccgcugguacucccgcaccauguccaagaccgagcgcaagggcaugggccucuacgucaaguacgacggcgaccccuggaccgacuccgacgcccucgccuuccgcggcgucauggucuccaugaaggagcccggcugguacuccuucggcuucgagaucaaggacaagaagugcgacguccccugcaucggcaucgagaugguccacgacggcggcaaggagaccuggcacuccgccgccaccgccaucuacugccucaugggcuccggccagcuccucugggacaccgucaccggcgucgacauggcccucuga

SEQ ID NO: 125649 - RNA, 1401 nt, Artificial Sequence; identical to SEQ ID NO: 124931
  derived and/or modified CDS sequence (opt2) from neuraminidase__InfluenzaB__AGX21692

SEQ ID NO: 125650 - RNA, 1401 nt, Artificial Sequence; identical to SEQ ID NO: 125158
  derived and/or modified CDS sequence (opt2) from neuraminidase__InfluenzaB__AGX21703

SEQ ID NO: 125651 - RNA, 1401 nt, Artificial Sequence
  derived and/or modified CDS sequence (opt2) from neuraminidase__InfluenzaB__AGX21714
augcuccccuccaccauccagacccucacccucuuccucaccuccggcggcguccuccucucccucuacgucuccgccucccucuccuaccuccucuacuccgacauccuccucaaguucucccccaccgagaucaccgcccccgccaugccccucgacugcgccaacgccuccaacguccaggccgucaaccgcuccgccaccaagggccucacccuccuccuccccgagcccgaguggaccuacccccgccucuccugccccggcuccaccuuccagaaggcccuccucaucuccccccaccgcuucggcgagaccaagggcaacuccgccccccucaucauccgcgagcccuucaucgccugcggccccaacgagugcaagcacuucgcccucacccacuacgccgcccagcccggcggcuacuacaacggcacccgcggcgaccgcaacaagcuccgccaccucaucuccgucaagcucggcaagauccccaccgucgagaacuccaucuuccacauggccgccugguccggcuccgccugccacgacggcaaggaguggaccuacaucggcgucgacggccccgacaacaacgcccuccucaaggucaaguacggcgaggccuacaccgacaccuaccacuccuacgccaacaagauccuccgcacccaggaguccgccugcaacugcaucggcggcaacugcuaccucaugaucaccgacggcuccgccuccggcgucuccgagugccgcuuccucaagauccgcgagggccgcaucaucaaggagaucuuccccaccggccgcgucaagcacaccgaggagugcaccugcggcuucgccuccaacaagaccaucgagugcgccugccgcgacaacuccuacaccgccaagcgccccuucgucaagcucaacgucgagaccgacaccgccgagauccgccucaugugcaccgacaccuaccucgacaccccccgccccaacgacggcuccaucaccggccccugcgaguccgacggcgacaagggcuccggcggcaucaagggcggcuucguccaccagcgcauggaguccaagaucggccgcugguacucccgcaccauguccaagaccgagcgcaugggcaugggccucuacgucaaguacgacggcgaccccugggccgacuccgacgcccucgccuucuccggcgucauggucuccaugaaggagcccggcugguacuccuucggcuucgagaucaaggacaagaagugcgacguccccugcaucggcaucgagaugguccacgacggcggcaaggagaccuggcacuccgccgccaccgccaucuacugccucaugggcuccggccagcuccucugggacaccgucaccggcgucgacauggcccucuga

SEQ ID NO: 125652 - RNA, 1401 nt, Artificial Sequence
  derived and/or modified CDS sequence (opt2) from neuraminidase__InfluenzaB__AGX21725
augcuccccuccaccauccagaugcucacccucuuccucaccuccggcggcguccuccucucccucuacgucuccgccucccucuccuaccuccucuacuccgacauccuccucaaguucucccccaccgagaucaccgcccccaccaugccccucgacugcgccaacgccuccaacguccacgccgucaaccgcuccgccaccaagggcgucaccuuccuccuccccgagcccgaguggaccuacccccgccucuccugccccggcuccaccuuccagcgcgcccuccucaucuccccccaccgcuucggcgagaccaagggcaacuccgccccccucaucauccgcgagcccuucaucgccugcggccccaacgagugcaagcacuucgcccucacccacuacgccgcccagcccggcggcuacuacaacggcacccgcggcgaccgcaacaagcuccgccaccucaucuccgucaagcucggcaagauccccaccgucgagaacuccaucuuccacauggccgccugguccggcuccgccugccacgacggcaaggaguggaccuacaucggcgucgacggccccgacaacaacgcccuccucaagaucaaguacggcgaggccuacaccgacaccuaccacuccuacgccaacaacauccuccgcacccaggaguccgccugcaacugcaucggcggcaacugcuaccucaugaucaccgacggcuccgccuccggcgucuccgagugccgcuuccucaagauccgcgagggccgcaucaucaaggagaucuuccccaccggccgcgucaagcacaccgaggagugcaccugcggcuucgccuccaacaagaccaucgagugcgccugccgcgacaacuccuacaccgccaagcgccccuucgucaagcucaacgucgagaccgacaccgccgagauccgccucaugugcaccgacaccuaccucgacaccccccgccccgacgacggcuccaucaccggccccugcgaguccaacggcgacaagggcuccggcggcaucaagggcggcuucguccaccagcgcauggccuccaagaucggccgcugguacucccgcaccauguccaagaccgagcgcaagggcaugggccucuacgucaaguacgacggcgaccccuggaccgacuccgacgcccucgccuuccgcggcgucauggucuccaugaaggagcccggcugguacuccuucggcuucgagaucaaggacaagaagugcgacguccccugcaucggcaucgagaugguccacgacggcggcaaggagaccuggcacuccgccgccaccgccaucuacugccucaugggcuccggccagcuccucugggacaccgucaccggcgucgacauggcccucuga

SEQ ID NO: 125653 - RNA, 1401 nt, Artificial Sequence
  derived and/or modified CDS sequence (opt2) from neuraminidase__InfluenzaB__AGX21747
augcuccccuccaccauccagacccucacccucuuccucaccuccggcggcguccuccucucccucuacgucuccgccucccucuccuaccuccucuacuccgacauccuccucaaggucucccagaccgagaucaccgcccccaccaugccccucgacugcgccaacgccuccaacguccaggccgucaaccgcuccgccaccaagggcgucacccuccuccuccccgagcccgaguggaccuacccccgccucuccugccccggcuccaccuuccagaaggcccuccucaucuccccccaccgcuucggcgagaccaagggcaacuccgccccccucaucauccgcgagcccuucaucgccugcggccccaaggagugcaagcacuucgcccucacccacuacgccgcccagcccggcggcuacuacaacggcacccgcgaggaccgcaacaagcuccgccaccucaucuccgucaagcucggcaagauccccaccgucgagaacuccaucuuccacauggccgccugguccggcuccgccugccacgacggccgcgaguggaccuacaucggcgucgacggccccgacuccaacgcccuccucaagaucaaguacggcgaggccuacaccgacaccuaccacuccuacgccaagaacauccuccgcacccaggaguccgccugcaacugcaucggcggcgacugcuaccucaugaucaccgacggcuccgccuccggcaucuccgagugccgcuuccucaagauccgcgagggccgcaucaucaaggagaucuuccccaccggccgcgucaagcacaccgaggagugcaccugcggcuucgccuccaacaagaccaucgagugcgccugccgcgacaacuccuacaccgccaagcgccccuucgucaagcucaacgucgagaccgacaccgccgagauccgccucaugugcaccgagaccuaccucgacaccccccgccccgacgacggcuccaucaccggccccugcgaguccaacggcgacaagggcuccggcggcaucaagggcggcuucguccaccagcgcauggccuccaagaucggccgcugguacucccgcaccauguccaagaccaagcgcaugggcaugggccucuacgucaaguacgacggcgaccccuggaccgacuccgaggcccucgcccucuccggcgucauggucuccauggaggagcccggcugguacuccuucggcuucgagaucaaggacaagaagugcgacguccccugcaucggcaucgagaugguccacgacggcggcaagaccaccuggcacuccgccgccaccgccaucuacugccucaugggcuccggccagcuccucugggacaccgucaccggcgucgacauggcccucuga

SEQ ID NO: 125654 - RNA, 1401 nt, Artificial Sequence
  derived and/or modified CDS sequence (opt2) from neuraminidase__InfluenzaB__AGX21758
augcuccccuccaccauccagacccucacccucuuccucaccuccggcggcguccuccucucccucuacgucuccgccucccucuccuaccuccucuacuccgacauccuccucaaguucacccccaccgagaucaccguccccaccaugccccucgacugcgccaacgccuccaacguccaggccgucaaccgcuccgccaccaagggcgucacccuccuccuccccgagcccgaguggaccuacccccgccucuccugccccggcuccaccuuccagaaggcccuccucaucuccccccaccgcuucggcgagaccaagggcaacuccgccccccucaucauccgcgagcccuucaucgccugcggccccaaggagugcaagcacuucgcccucacccacuacgccgcccagcccggcggcuacuacaacggcacccgcgaggaccgcaacaagcuccgccaccucaucuccgucaagcucggcaagauccccaccgucgagaacuccaucuuccacauggccgccugguccggcuccgccugccacgacggcaaggaguggaccuacaucggcgucgacggccccgacuccaacgcccuccucaagaucaaguacggcgaggccuacaccgacaccuaccacuccuacgccaacaacauccuccgcacccaggaguccgccugcaacugcaucggcggcaacugcuaccucaugaucaccgacggcuccgccuccggcaucuccgagugccgcuuccucaagauccgcgagggccgcaucaucaaggagaucuuccccaccggccgcgucaagcacaccgaggagugcaccugcggcuucgccuccaacaagaccaucgagugcgccugccgcgacaacuccuacaccgccaagcgccccuucgucaagcucaacgucgagaccgacaccgccgagauccgccucaugugcaccgagaccuaccucgacaccccccgccccgacgacggcuccaucaccggccccugcgaguccaacggcaacaagggcuccggcggcaucaagggcggcuucguccaccagcgcauggccuccaagaucggccgcugguacucccgcaccauguccaagaccaagcgcaugggcaugggccucuacgucaaguacgacggcgaccccuggaccgacuccgacgcccucgcccucuccggcgucauggucuccauggaggagcccggcugguacuccuucggcuucgagaucaaggacaagaagugcgacguccccugcaucggcaucgagaugguccacgacggcggcaaggagaccuggcacuccgccgccaccgccaucuacugccucaugggcuccggccagcuccucugggacaccgucaccggcgucgacauggcccucuga

SEQ ID NO: 125655 - RNA, 1401 nt, Artificial Sequence
  derived and/or modified CDS sequence (opt2) from neuraminidase__InfluenzaB__AGX21769
augcuccccuccaccauccagacccucacccucuuccucaccuccggcggcguccuccucucccucuacgucuccgccucccucuccuaccuccucuacuccgacauccuccucaaguucucccagaccgagaucaccgcccccaccaugccccucgacugcgccaacgccuccaacguccaggccgccaaccgcuccgccaccaagggcgucacccuccuccuccccgagcccgaguggaccuacccccgccucuccugccccggcuccaccuuccagaaggcccuccucaucuccccccaccgcuucggcgagaccaagggcaacuccgccccccucaucauccgcgagcccuucaucgccugcggccccaaggagugcaagcacuucgcccucacccacuacgccgcccagcccggcggcuacuacaacggcacccgcgaggaccgcaacaagcuccgccaccucaucuccgucaagcucggcaagauccccaccgucgagaacuccaucuuccacauggccgccugguccggcuccgccugccacgacggccgcgaguggaccuacaucggcgucgacggccccgacuccaacgcccuccucaagaucaaguacggcgaggccuacaccgacaccuaccacuccuacgccaagaacauccuccgcacccaggaguccgccugcaacugcaucggcggcgacugcuaccucaugaucaccgacggcuccgccuccggcaucuccgagugccgcuuccucaagauccgcgagggccgcaucaucaaggagaucuuccccaccggccgcgucaagcacaccgaggagugcaccugcggcuucgccuccaacaagaccaucgagugcgccugccgcgacaacuccuacaccgccaagcgccccuucgucaagcucaacgucgagaccgacaccgccgagauccgccucaugugcaccaagaccuaccucgacaccccccgccccaacgacggcuccaucaccggccccugcgaguccgacggcgacaagggcuccggcggcaucaagggcggcuucguccaccagcgcauggccuccaagaucggccgcugguacucccgcaccauguccaagaccaagcgcaugggcaugggccucuacgucaaguacgacggcgaccccuggaccgacuccgaggcccucgcccucuccggcgucauggucuccauggaggagcccggcugguacuccuucggcuucgagaucaaggacaagaagugcgacguccccugcaucggcaucgagaugguccacgacggcggcaagaccaccuggcacuccgccgccaccgccaucuacugccucaugggcuccggccagcuccucugggacaccgucaccggcgucgacauggcccucuga

SEQ ID NO: 125656 - RNA, 1401 nt, Artificial Sequence
  derived and/or modified CDS sequence (opt2) from neuraminidase__InfluenzaB__AGX21780
augcuccccuccaccauccagacccucacccucuuccucaccuccggcggcguccuccucucccucuacgucuccgccucccucuccuaccuccucuacuccgacauccuccucaaguucucccagaccgagaucaccgcccccaccaugccccucgacugcgccaacgccuccaacguccaggccgucaaccgcuccgccaccaagggcgucacccuccuccuccccgagcccgaguggaccuacccccgccucuccugccccggcuccaccuuccagaaggcccuccucaucuccccccaccgcuucggcgagaccaagggcaacuccgccccccucaucauccgcgagcccuucaucgccugcggccccaaggagugcaagcacuucgcccucacccacuacgccgcccagcccggcggcuacuacaacggcacccgcgaggaccgcaacaagcuccgccaccucaucuccgucaagcucggcaagauccccaccgucgagaacuccaucuuccacauggccgccugguccggcuccgccugccacgacggccgcgaguggaccuacaucggcgucgacggccccgacuccaacgcccuccucaagaucaaguacggcgaggccuacaccgacaccuaccacuccuacgccaagaacauccuccgcacccaggaguccgccugcaacugcaucggcggcgacugcuaccucaugaucaccgacggcuccgccuccggcaucuccgagugccgcuuccucaagauccgcgagggccgcaucaucaaggagaucuuccccaccggccgcgucaagcacaccgaggagugcaccugcggcuucgccuccaacaagaccaucgagugcgccugccgcgacaacuccuacaccgccaagcgccccuucgucaagcucaacgucgagaccgacaccgccgagauccgccucaugugcaccgagaccuaccucgacaccccccgccccaacgacggcuccaucaccggccccugcgaguccaacggcgacaagggcuccggcggcaucaagggcggcuucguccaccagcgcauggaguccaagaucggccgcugguacucccgcaccauguccaagaccaagcgcaugggcaugggccucuacgucaaguacgacggcgaccccuggaccgacuccgaggcccucgcccucuccggcgucauggucuccauggaggagcccggcugguacuccuucggcuucgagaucaaggacaagaagugcgacguccccugcaucggcaucgagaugguccacgacggcggcaagaccaccuggcacuccgccgccaccgccaucuacugccucaugggcuccggccagcuccucugggacaccgucaccggcgucgacaugacccucuga

SEQ ID NO: 125657 - RNA, 1401 nt, Artificial Sequence
  derived and/or modified CDS sequence (opt2) from neuraminidase__InfluenzaB__AGX21791
augcuccccuccaccauccagacccucacccucuuccucaccuccggcggcguccuccucucccucuacgucuccgccucccucuccuaccuccucuacuccgacauccuccucaaguucucccccaccgagaucaccgcccccaccaugccccucgacugcgccaacgccuccaacguccaggccgucaaccgcuccgccaccaagggcgucacccuccuccuccccgagcccgaguggaccuacccccgccucuccugccccggcuccaccuuccagaaggcccuccucaucuccccccaccgcuucggcgagaccaagggcaacuccgccccccucaucauccgcgagcccuucaucgccugcggccccaaggagugcaagcacuucgcccucacccacuacgccgcccagcccggcggcuacuacuccggcacccgcggcgaccgcaacaagcuccgccaccucaucuccgucaagcucggcaagauccccaccgucgagaacuccaucuuccacauggccgccugguccggcuccgccugccacgacggcaaggaguggaccuacaucggcgucgacggccccgacaacaacgcccuccucaagaucaaguacggcgaggccuacaccgacaccuaccacuccuacgccaacaacauccuccgcacccaggaguccgccugcaacugcaucggcggcaacugcuaccucaugaucaccgacggcuccgccuccggcaucuccgagugccgcuuccucaagauccgcgagggccgcaucaucaaggagaucuuccccaccggccgcgucaagcacaccgaggagugcaccugcggcuucgccuccaacaagaccaucgagugcgccugccgcgacaacaacuacaccgccaagcgccccuucgucaagcucaacgucgagaccgacaccgccgagauccgccucaugugcaccgagaccuaccucgacaccccccgccccgacgacggcuccaucaccggccccugcgaguccaacggcgacaagggcuccggcggcaucaagggcggcuucguccaccagcgcauggccuccaagaucggccgcugguacucccgcaccauguccaagaacaagcgcaugggcaugggccucuacgucaaguacgacggcgaccccugggccgacuccgacgcccucgcccucuccggcgucauggucuccauggaggagcccggcugguacuccuucggcuucgagaucaaggacaagaagugcgacguccccugcaucggcaucgagaugguccacgacggcggcaaggagaccuggcacuccgccgccaccgccaucuacugccucaugggcuccggccagcuccucugggacaccgucaccggcgucgacauggcccucuga

SEQ ID NO: 125658 - RNA, 1401 nt, Artificial Sequence
  derived and/or modified CDS sequence (opt2) from neuraminidase__InfluenzaB__AGX21802
augcuccccuccaccauccagacccucacccucuuccucaccuccggcggcguccuccucucccucuacgucuccgccucccucuccuaccuccucuacuccgacauccuccucaaguucucccagaccgagaucaccgcccccaccaugccccucgacugcgccaacgccuccaacguccaggccgccaaccgcuccgccaccaagggcgucacccuccuccuccccgagcccgaguggaccuacccccgccucuccugccccggcuccaccuuccagaaggcccuccucaucuccccccaccgcuucggcgagaccaagggcaacuccgccccccucaucauccgcgagcccuucaucgccugcggccccaaggagugcaagcacuucgcccucacccacuacgccgcccagcccggcggcuacuacaacggcacccgcgaggaccgcaacaagcuccgccaccucaucuccgucaagcucggcaagauccccaccgucgagaacuccaucuuccacauggccgccugguccggcuccgccugccacgacggccgcgaguggaccuacaucggcgucgacggccccgacuccaacgcccuccucaagaucaaguacggcgaggccuacaccgacaccuaccacuccuacgccaagaacauccuccgcacccaggaguccgccugcaacugcaucggcggcgacugcuaccucaugaucaccgacggcuccgccuccggcaucuccgagugccgcuuccucaagauccgcgagggccgcaucaucaaggagaucuuccccaccggccgcgucaagcacaccgaggagugcaccugcggcuucgccuccaacaagaccaucgagugcgccugccgcgacaacuccuacaccgccaagcgccccuucgucaagcucaacgucgagaccgacaccgccgagauccgccucaugugcaccgagaccuaccucgacaccccccgccccaacgacggcuccaucaccggccccugcgaguccgacggcgacaagggcuccggcggcaucaagggcggcuucguccaccagcgcauggccuccaagaucggccgcugguacucccgcaccauguccaagaccaagcgcaugggcaugggccucuacgucaaguacgacggcgaccccuggaccgacuccgaggcccucgcccucuccggcgucauggucuccauggaggagcccggcugguacuccuucggcuucgagaucaaggacaagaagugcgacguccccugcaucggcaucgagaugguccacgacggcggcaagaccaccuggcacuccgccgccaccgccaucuacugccucaugggcuccggccagcuccucugggacaccgucaccggcgucgacauggcccucuga

SEQ ID NO: 125659 - RNA, 1401 nt, Artificial Sequence
  derived and/or modified CDS sequence (opt2) from neuraminidase__InfluenzaB__AGX21813
augcuccccuccaccauccagacccucacccucuuccucaccuccggcggcguccuccucucccucuacgucuccgccucccucuccuaccuccucuacuccgacauccuccucaaguucucccagaccgagaucaccgcccccaagaugccccucgacugcgccaacgccuccaacguccaggccgccaaccgcuccgccaccaagggcgucacccuccuccuccccgagcccgaguggaccuacccccgccucuccugccccggcuccaccuuccagaaggcccuccucaucuccccccaccgcuucggcgagaccaagggcaacuccgccccccucaucauccgcgagcccuucaucgccugcggccccaaggagugcaagcacuucgcccucacccacuacgccgcccagcccggcggcuacuacaacggcacccgcgaggaccgcaacaagcuccgccaccucaucuccgucaagcucggcaagauccccaccgucgagaacuccaucuuccacauggccgccugguccggcuccgccugccacgacggccgcgaguggaccuacaucggcgucgacggccccgacuccaacgcccuccucaagaucaaguacggcgaggccuacaccgacaccuaccacuccuacgccaagaacauccuccgcacccaggaguccgccugcaacugcaucggcggcgacugcuaccucaugaucaccgacggcuccgccuccggcaucuccgagugccgcuuccucaagauccgcgagggccgcaucaucaaggagaucuuccccaccggccgcgucaagcacaccgaggagugcaccugcggcuucgccuccaacaagaccaucgagugcgccugccgcgacaacuccuacaccgccaagcgccccuucgucaagcucaacgucgagaccgacaccgccgagauccgccucaugugcaccgagaccuaccucgacaccccccgccccaacgacggcuccaucaccggccccugcgaguccgacggcgacaagggcuccggcggcaucaagggcggcuucguccaccagcgcauggccuccaagaucggccgcugguacucccgcaccauguccaagaccaagcgcaugggcaugggccucuacgucaaguacgacggcgaccccuggaccgacuccgaggcccucgcccucuccggcgucauggucuccauggaggagcccggcugguacuccuucggcuucgagaucaaggacaagaagugcgacguccccugcaucggcaucgagaugguccacgacggcggcaagaccaccuggcacuccgccgccaccgccaucuacugccucaugggcuccggccagcuccucugggacaccgucaccggcgucgacauggcccucuga

SEQ ID NO: 125660 - RNA, 1401 nt, Artificial Sequence
  derived and/or modified CDS sequence (opt2) from neuraminidase__InfluenzaB__AGX21824
augcuccccuccaccauccagacccucacccucuuccucaccuccggcggcguccuccucucccucuacgucuccgccucccucuccuaccuccucuacuccgacauccuccucaaguucucccagaccgagaucaccgcccccaucaugccccucgacugcgccaacgccuccaacguccaggccgucaaccgcuccgccaccaagggcgucacccuccuccuccccgagcccgaguggaccuacccccgccucuccugccccggcuccaccuuccagaaggcccuccucaucuccccccaccgcuucggcgagaccaagggcaacuccgccccccucaucauccgcgagcccuucaucgccugcggccccaaggagugcaagcacuucgcccucacccacuacgccgcccagcccggcggcuacuacaacggcacccgcgaggaccgcaacaagcuccgccaccucaucuccgucaagcucggcaagauccccaccgucgagaacuccaucuuccacauggccgccugguccggcuccgccugccacgacggccgcgaguggaccuacaucggcgucgacggccccgacuccaacgcccuccucaagaucaaguacggcgaggccuacaccgacaccuaccacuccuacgccaagaacauccuccgcacccaggaguccgccugcaacugcaucggcggcgacugcuaccucaugaucaccgacggccccgccuccggcaucuccgagugccgcuuccucaagauccgcgagggccgcaucaucaaggagaucuuccccaccggccgcgucaagaacaccgaggagugcaccugcggcuucgccuccaacaagaccaucgagugcgccugccgcgacaacuccuacaccgccaagcgccccuucgucaagcucaacgucgagaccgacaccgccgagauccgccucaugugcaccgagaccuaccucgacaccccccgccccaacgacggcuccaucaccggccccugcgaguccaacggcgacaagggcuccggcggcaucaagggcggcuucguccaccagcgcauggccuccaagaucggccgcugguacucccgcaccauguccaagaccaagcgcaugggcaugggccucuacgucaaguacgacggcgaccccuggaccgacuccgaggcccucgcccucuccggcgucauggucuccauggaggagcccggcugguacuccuucggcuucgagaucaaggacaagaagugcgacguccccugcaucggcaucgagaugguccacgacggcggcaagaccaccuggcacuccgccgccaccgccaucuacugccucaugggcuccggccagcuccucugggacaccgucaccggcgucgacauggcccucuga

SEQ ID NO: 125661 - RNA, 1401 nt, Artificial Sequence; identical to SEQ ID NO: 124779
  derived and/or modified CDS sequence (opt2) from neuraminidase__InfluenzaB__AGX21835

SEQ ID NO: 125662 - RNA, 1401 nt, Artificial Sequence; identical to SEQ ID NO: 125167
  derived and/or modified CDS sequence (opt2) from neuraminidase__InfluenzaB__AGX21846

SEQ ID NO: 125663 - RNA, 1401 nt, Artificial Sequence; identical to SEQ ID NO: 125167
  derived and/or modified CDS sequence (opt2) from neuraminidase__InfluenzaB__AGX21857

SEQ ID NO: 125664 - RNA, 1401 nt, Artificial Sequence; identical to SEQ ID NO: 124779
  derived and/or modified CDS sequence (opt2) from neuraminidase__InfluenzaB__AGX21868

SEQ ID NO: 125665 - RNA, 1401 nt, Artificial Sequence; identical to SEQ ID NO: 125165
  derived and/or modified CDS sequence (opt2) from neuraminidase__InfluenzaB__AGX21879

SEQ ID NO: 125666 - RNA, 1401 nt, Artificial Sequence
  derived and/or modified CDS sequence (opt2) from neuraminidase__InfluenzaB__AGX21890
augcuccccuccaccauccagacccucacccucuuccucaccuccggcggcguccuccucucccucuacgucuccgccucccucuccuaccuccucuacuccgacauccuccucaaguucucccagaccgagaucaucgcccccaucaugccccucgacugcgccaacgccuccaacguccaggccgucaaccacuccgccaccaagggcgucacccuccuccuccccgagcccgaguggaccuacccccgccucuccugccccggcuccaccuuccagaaggcccuccucaucuccccccaccgcuucggcgagaccaagggcaacuccgccccccucaucauccgcgagcccuucaucgccugcggccccaaggagugcaagcacuucgcccucacccacuacgccgcccagcccggcggcuacuacaacggcacccgcgaggaccgcaacaagcuccgccaccucaucuccgucaagcucggcaagauccccaccgucgagaacuccaucuuccacauggccgccugguccggcuccgccugccacgacggccgcgaguggaccuacaucggcgucgacggccccgacuccaacgcccuccucaagaucaaguacggcgaggccuacaccgacaccuaccacuccuacgccaagaacauccuccgcacccaggaguccgccugcaacugcaucggcggcgacugcuaccucaugaucaccgacggccccgccuccggcaucuccgagugccgcuuccucaagauccgcgagggccgcaucaucaaggagaucuuccccaccggccgcgucaagcacaccgaggagugcaccugcggcuucgccuccaacaagaccaucgagugcgccugccgcgacaacuccuacaccgccaagcgccccuucgucaagcucaacgucgagaccgacaccgccgagauccgccucaugugcaccgagaccuaccucgacaccccccgccccaacgacggcuccaucaccggccccugcgaguccaacggcgacaagggcuccggcggcaucaagggcggcuucguccaccagcgcauggccuccaagaucggccgcugguacucccgcaccauguccaagaccaagcgcaugggcaugggccucuacgucaaguacgacggcgaccccuggaccgacuccgaggcccucgcccucuccggcgucauggucuccauggaggagcccggcugguacuccuucggcuucgagaucaaggacaagaagugcgacguccccugcaucggcaucgagaugguccacgacggcggcaagaccaccuggcacuccgccgccaccgccaucuacugccucaugggcuccggccagcuccucugggacaccgucaccggcgucgacauggcccucuga

SEQ ID NO: 125667 - RNA, 1401 nt, Artificial Sequence; identical to SEQ ID NO: 124779
  derived and/or modified CDS sequence (opt2) from neuraminidase__InfluenzaB__AGX21901

SEQ ID NO: 125668 - RNA, 1401 nt, Artificial Sequence; identical to SEQ ID NO: 124779
  derived and/or modified CDS sequence (opt2) from neuraminidase__InfluenzaB__AGX21912

SEQ ID NO: 125669 - RNA, 1401 nt, Artificial Sequence
  derived and/or modified CDS sequence (opt2) from neuraminidase__InfluenzaB__AGX21923
augcuccccuccaccauccagacccucacccucuuccucaccuccggcggcguccuccucucccucuacgucuccgccucccucuccuaccuccucuacuccgacauccuccucaaguucucccagaccgagaucaccgcccccaucaugccccucgacugcaccaacgccuccaacguccaggccgucaaccgcuccgccaccaagggcgucacccuccuccuccccgagcccgaguggaccuacccccgccucuccugccccggcuccaccuuccagaaggcccuccucaucuccccccaccgcuucggcgagaccaagggcaacuccgccccccucaucauccgcgagcccuucaucgccugcggccccaaggagugcaagcacuucgcccucacccacuacgccgcccagcccggcggcuacuacaacggcacccgcgaggaccgcaacaagcuccgccaccucaucuccgucaagcucggcaagauccccaccgucgagaacuccaucuuccacauggccgccugguccggcuccgccugccacgacggccgcgaguggaccuacaucggcgucgacggccccgacuccaacgcccuccucaagaucaaguacggcgaggccuacaccgacaccuaccacuccuacgccaagaacauccuccgcacccaggaguccgccugcaacugcaucggcggcgacugcuaccucaugaucaccgacggccccgccuccggcaucuccgagugccgcuuccucaagauccgcgagggccgcaucaucaaggagaucuuccccaccggccgcgucaagcacaccgaggagugcaccugcggcuucgccuccaacaagaccaucgagugcgccugccgcgacaacuccuacaccgccaagcgccccuucgucaagcucaacgucgagaccgacaccgccgagauccgccucaugugcaccgagaccuaccucgacaccccccgccccaacgacggcuccaucaccggccccugcgaguccaacggcgacaagggcuccggcggcaucaagggcggcuucguccaccagcgcauggccuccaagaucggccgcugguacucccgcaccauguccaagaccaagcgcaugggcaugggccucuacgucaaguacgacggcgaccccuggaccgacuccgaggcccucgcccucuccggcgucauggucuccauggaggagcccggcugguacuccuucggcuucgagaucaaggacaagaagugcgacguccccugcaucggcaucgagaugguccacgacggcggcaagaccaccuggcacuccgccgccaccgccaucuacugccucaugggcuccggccagcuccucugggacaccgucaccggcgucgacauggcccucuga

SEQ ID NO: 125670 - RNA, 1401 nt, Artificial Sequence; identical to SEQ ID NO: 125666
  derived and/or modified CDS sequence (opt2) from neuraminidase__InfluenzaB__AGX21934

SEQ ID NO: 125671 - RNA, 1401 nt, Artificial Sequence; identical to SEQ ID NO: 125167
  derived and/or modified CDS sequence (opt2) from neuraminidase__InfluenzaB__AGX21945

SEQ ID NO: 125672 - RNA, 1401 nt, Artificial Sequence
  derived and/or modified CDS sequence (opt2) from neuraminidase__InfluenzaB__AGX21956
augcuccccuccaccauccagacccucacccucuuccucaccuccggcggcguccuccucucccucuacgucuccgccucccucuccuaccuccucuacuccgacauccuccucaaguucucccagaccgagaucaccgcccccaucaugccccucgacugcgccaacaccuccaacauccaggccgucaaccgcuccgccaccaagggcgucacccuccuccuccccgagcccgaguggaccuacccccgccucuccugccccggcuccaccuuccagaaggcccuccucaucuccccccaccgcuucggcgagaccaagggcaacuccgccccccucaucauccgcgagcccuucaucgccugcggccccaaggagugcaagcacuucgcccucacccacuacgccgcccagcccggcggcuacuacaacggcacccgcgaggaccgcaacaagcuccgccaccucaucuccgucaagcucggcaagauccccaccgucgagaacuccaucuuccacauggccgccugguccggcuccgccugccacgacggccgcgaguggaccuacaucggcgucgacggccccgacuccaacgcccuccucaagaucaaguacggcgaggccuacaccgacaccuaccacuccuacgccaagaacauccuccgcacccaggaguccgccugcaacugcaucggcggcgacugcuaccucaugaucaccgacggccccgccuccggcaucuccgagugccgcuuccucaagauccgcgagggccgcaucaucaaggagaucuuccccaccggccgcgucaagcacaccgaggagugcaccugcggcuucgccuccaacaagaccaucgagugcgccugccgcgacaacuccuacaccgccaagcgccccuucgucaagcucaacgucgagaccgacaccgccgagauccgccucaugugcaccgagaccuaccucgacaccccccgccccaacgacggcuccaucaccggccccugcgaguccaacggcgacaagggcuccggcggcaucaagggcggcuucguccaccagcgcauggccuccaagaucggccgcugguacucccgcaccauguccaagaccaagcgcaugggcaugggccucuacgucaaguacgacggcgaccccuggaccgacuccgaggcccucgcccucuccggcgucauggucuccauggaggagcccggcugguacuccuucggcuucgagaucaaggacaagaagugcgacguccccugcaucggcaucgagaugguccacgacggcggcaagaccaccuggcacuccgccgccaccgccaucuacugccucaugggcuccggccagcuccucugggacaccgucaccggcgucgacauggcccucuga

SEQ ID NO: 125673 - RNA, 1401 nt, Artificial Sequence; identical to SEQ ID NO: 125167
  derived and/or modified CDS sequence (opt2) from neuraminidase__InfluenzaB__AGX21967

SEQ ID NO: 125674 - RNA, 1401 nt, Artificial Sequence; identical to SEQ ID NO: 124779
  derived and/or modified CDS sequence (opt2) from neuraminidase__InfluenzaB__AGX21978

SEQ ID NO: 125675 - RNA, 1401 nt, Artificial Sequence; identical to SEQ ID NO: 125167
  derived and/or modified CDS sequence (opt2) from neuraminidase__InfluenzaB__AGX21989

SEQ ID NO: 125676 - RNA, 1401 nt, Artificial Sequence; identical to SEQ ID NO: 125165
  derived and/or modified CDS sequence (opt2) from neuraminidase__InfluenzaB__AGX22000

SEQ ID NO: 125677 - RNA, 1401 nt, Artificial Sequence
  derived and/or modified CDS sequence (opt2) from neuraminidase__InfluenzaB__AGX22011
augcuccccuccaccauccagacccucacccucuuccucaccuccggcggcguccuccucucccucuacgucuccgccucccucuccuaccuccucuacuccgacauccuccucaaguucucccagaccgagaucaccgcccccaucaugccccucgacugcgccaacgccuccaacguccaggccgucaaccgcuccgccaccaagggcgucacccuccuccuccccgagcccgaguggaccuacccccgccucuccugccccggcuccaccuuccagaaggcccuccucaucuccccccaccgcuucggcgagaccaagggcaacuccgccccccucaucauccgcgagcccuucaucgccugcggccccaaggagugcaagcacuucgcccucacccacuacgccgccaagcccggcggcuacuacaacggcacccgcgaggaccgcaacaagcuccgccaccucaucuccgucaagcucggcaagauccccaccgucgagaacuccaucuuccacauggccgccugguccggcuccgccugccacgacggccgcgaguggaccuacaucggcgucgacggccccgacuccaacgcccuccucaagaucaaguacggcgaggccuacaccgacaccuaccacuccuacgccaagaacauccuccgcacccaggaguccgccugcaacugcaucggcggcgacugcuaccucaugaucaccgacggccccgccuccggcaucuccgagugccgcuuccucaagauccgcgagggccgcaucaucaaggagaucuuccccaccggccgcgucaagcacaccgaggagugcaccugcggcuucgccuccaacaagaccaucgagugcgccugccgcgacaacaacuacaccgccaagcgccccuucgucaagcucaacgucgagaccgacaccgccgagauccgccucaugugcaccgagaccuaccucgacaccccccgccccaacgacggcuccaucaccggccccugcgaguccaacggcgacaagggcuccggcggcaucaagggcggcuucguccaccagcgcauggccuccaagaucggccgcugguacucccgcaccauguccaagaccaagcgcaugggcaugggccucuacgucaaguacgacggcgaccccuggaccgacuccgaggcccucgcccucuccggcgucauggucuccauggaggagcccggcugguacuccuucggcuucgagaucaaggacaagaagugcgacguccccugcaucggcaucgagaugguccacgacggcggcaagaccaccuggcacuccgccgccaccgccaucuacugccucaugggcuccggccagcuccucugggacaccgucaccggcgucgacauggcccucuga

SEQ ID NO: 125678 - RNA, 1401 nt, Artificial Sequence; identical to SEQ ID NO: 124779
  derived and/or modified CDS sequence (opt2) from neuraminidase__InfluenzaB__AGX22033

SEQ ID NO: 125679 - RNA, 1401 nt, Artificial Sequence; identical to SEQ ID NO: 124779
  derived and/or modified CDS sequence (opt2) from neuraminidase__InfluenzaB__AGX22044

SEQ ID NO: 125680 - RNA, 1401 nt, Artificial Sequence; identical to SEQ ID NO: 125165
  derived and/or modified CDS sequence (opt2) from neuraminidase__InfluenzaB__AGX22055

SEQ ID NO: 125681 - RNA, 1401 nt, Artificial Sequence; identical to SEQ ID NO: 124779
  derived and/or modified CDS sequence (opt2) from neuraminidase__InfluenzaB__AGX22066

SEQ ID NO: 125682 - RNA, 1401 nt, Artificial Sequence; identical to SEQ ID NO: 125666
  derived and/or modified CDS sequence (opt2) from neuraminidase__InfluenzaB__AGX22077

SEQ ID NO: 125683 - RNA, 1401 nt, Artificial Sequence; identical to SEQ ID NO: 124781
  derived and/or modified CDS sequence (opt2) from neuraminidase__InfluenzaB__AGX22088

SEQ ID NO: 125684 - RNA, 1401 nt, Artificial Sequence; identical to SEQ ID NO: 125167
  derived and/or modified CDS sequence (opt2) from neuraminidase__InfluenzaB__AGX22099

SEQ ID NO: 125685 - RNA, 1401 nt, Artificial Sequence; identical to SEQ ID NO: 125165
  derived and/or modified CDS sequence (opt2) from neuraminidase__InfluenzaB__AGX22110

SEQ ID NO: 125686 - RNA, 1401 nt, Artificial Sequence; identical to SEQ ID NO: 125167
  derived and/or modified CDS sequence (opt2) from neuraminidase__InfluenzaB__AGX22132

SEQ ID NO: 125687 - RNA, 1401 nt, Artificial Sequence
  derived and/or modified CDS sequence (opt2) from neuraminidase__InfluenzaB__AGX22143
augcuccccuccaccauccagacccucacccucuuccucaccuccggcggcguccuccucucccucuacgucuccgccucccucuccuaccuccucuacuccgacauccuccucaaguucucccagaccgagaucaccgcccccaucaugccccucgacugcgccaacgccuccaacguccaggccgucaaccgcuccgccaccaagggcgucacccuccuccuccccgagcccgaguggaccuacccccgccucuccugccccggcuccaccuuccagaaggcccuccucaucuccccccaccgcuucggcgagaccaagggcaacuccgccccccucaucauccgcgagcccuucaucgccugcggccccaaggagugcaagcacuucgcccucacccacuacgccgcccagcccggcggcuacuacaacggcacccgcgaggaccgcaacaagcuccgccaccucaucuccgucaagcucggcaagauccccaccgucgagaacuccaucuuccacauggccgccugguccggcuccgccugccacgacggccgcgaguggaccuacaucggcgucgacggccccgacuccaacgcccuccucaagaucaaguacggcgaggccuacaccgacaccuaccacuccuacgccaagaacauccuccgcacccaggaguccgccugcaacugcaucggcggcgacugcuaccucaugaucaccgacggccccgccuccggcaucuccgagugccgcuuccucaagauccgcgagggccgcaucaucaaggagaucuuccccaccggccgcgucaagcacaccgaggagugcaccugcggcuucgccuccaacaagaccaucgagugcgccugccgcgacaacuccuacaccgccaagcgccccuucgucaagcucaacgucgagaccgacaccgccgagauccgccucaugugcaccgagaccuaccucgacaccccccgccccaacgacggcuccaucaccggccccugcgaguccaacggcgacaagggcuccggcggcaucaagggcggcuucguccaccagcgcauggccuccaagaucggccgcugguacucccgcaccaucuccaagaccaagcgcaugggcaugggccucuacgucaaguacgacggcgaccccuggaccgacuccgaggcccucgcccucuccggcgucauggucuccauggaggagcccggcugguacuccuucggcuucgagaucaaggacaagaagugcgacguccccugcaucggcaucgagaugguccacgacggcggcaagaccaccuggcacuccgccgccaccgccaucuacugccucaugggcuccggccagcuccucugggacaccgucaccggcgucgacauggcccucuga

SEQ ID NO: 125688 - RNA, 1401 nt, Artificial Sequence; identical to SEQ ID NO: 125687
  derived and/or modified CDS sequence (opt2) from neuraminidase__InfluenzaB__AGX22154

SEQ ID NO: 125689 - RNA, 1401 nt, Artificial Sequence; identical to SEQ ID NO: 125687
  derived and/or modified CDS sequence (opt2) from neuraminidase__InfluenzaB__AGX22165

SEQ ID NO: 125690 - RNA, 1401 nt, Artificial Sequence; identical to SEQ ID NO: 125666
  derived and/or modified CDS sequence (opt2) from neuraminidase__InfluenzaB__AGX22176

SEQ ID NO: 125691 - RNA, 1401 nt, Artificial Sequence; identical to SEQ ID NO: 125687
  derived and/or modified CDS sequence (opt2) from neuraminidase__InfluenzaB__AGX22187

SEQ ID NO: 125692 - RNA, 1401 nt, Artificial Sequence; identical to SEQ ID NO: 125687
  derived and/or modified CDS sequence (opt2) from neuraminidase__InfluenzaB__AGX22198

SEQ ID NO: 125693 - RNA, 1401 nt, Artificial Sequence; identical to SEQ ID NO: 125687
  derived and/or modified CDS sequence (opt2) from neuraminidase__InfluenzaB__AGX22209

SEQ ID NO: 125694 - RNA, 1401 nt, Artificial Sequence; identical to SEQ ID NO: 125165
  derived and/or modified CDS sequence (opt2) from neuraminidase__InfluenzaB__AGX22220

SEQ ID NO: 125695 - RNA, 1401 nt, Artificial Sequence; identical to SEQ ID NO: 125167
  derived and/or modified CDS sequence (opt2) from neuraminidase__InfluenzaB__AGX22231

SEQ ID NO: 125696 - RNA, 1401 nt, Artificial Sequence; identical to SEQ ID NO: 125666
  derived and/or modified CDS sequence (opt2) from neuraminidase__InfluenzaB__AGX22242

SEQ ID NO: 125697 - RNA, 1401 nt, Artificial Sequence; identical to SEQ ID NO: 125165
  derived and/or modified CDS sequence (opt2) from neuraminidase__InfluenzaB__AGX22253

SEQ ID NO: 125698 - RNA, 1401 nt, Artificial Sequence; identical to SEQ ID NO: 124779
  derived and/or modified CDS sequence (opt2) from neuraminidase__InfluenzaB__AGX22264

SEQ ID NO: 125699 - RNA, 1401 nt, Artificial Sequence; identical to SEQ ID NO: 125165
  derived and/or modified CDS sequence (opt2) from neuraminidase__InfluenzaB__AGX22275

SEQ ID NO: 125700 - RNA, 1401 nt, Artificial Sequence; identical to SEQ ID NO: 124779
  derived and/or modified CDS sequence (opt2) from neuraminidase__InfluenzaB__AGX22286

SEQ ID NO: 125701 - RNA, 1401 nt, Artificial Sequence
  derived and/or modified CDS sequence (opt2) from neuraminidase__InfluenzaB__AGX22297
augcuccccuccaccauccagacccucacccucuuccucacccucggcggcguccuccucucccucuacgucuccgccucccucuccuaccuccucuacuccgacauccuccucaaguucucccagaccgagaucaccgcccccaucaugccccucgacugcgccaacgccuccaacguccaggccgucaaccgcuccgccaccaagggcgucacccuccuccuccccgagcccgaguggaccuacccccgccucuccugccccggcuccaccuuccagaaggcccuccucaucuccccccaccgcuucggcgagaccaagggcaacuccgccccccucaucauccgcgagcccuucaucgccugcggccccaaggagugcaagcacuucgcccucacccacuacgccgcccagcccggcggcuacuacaacggcacccgcgaggaccgcaacaagcuccgccaccucaucuccgucaagcucggcaagauccccaccgucgagaacuccaucuuccacauggccgccugguccggcuccgccugccacgacggccgcgaguggaccuacaucggcgucgacggccccgacuccaacgcccuccucaagaucaaguacggcgaggccuacaccgacaccuaccacuccuacgccaagaacauccuccgcacccaggaguccgccugcaacugcaucggcggcgacugcuaccucaugaucaccgacggccccgccuccggcaucuccgagugccgcuuccucaagauccgcgagggccgcaucaucaaggagaucuuccccaccggccgcgucaagcacaccgaggagugcaccugcggcuucgccuccaacaagaccaucgagugcgccugccgcgacaacuccuacaccgccaagcgccccuucgucaagcucaacgucgagaccgacaccgccgagauccgccucaugugcaccgagaccuaccucgacaccccccgccccaacgacggcuccaucaccggccccugcgaguccaacggcgacaagggcuccggcggcaucaagggcggcuucguccaccagcgcauggccuccaagaucggccgcugguacucccgcaccauguccaagaccaagcgcaugggcaugggccucuacgucaaguacgacggcgaccccuggaccgacuccgaggcccucgcccucuccggcgucauggucuccauggaggagcccggcugguacuccuucggcuucgagaucaaggacaagaagugcgacguccccugcaucggcaucgagaugguccacgacggcggcaagaccaccuggcacuccgccgccaccgccaucuacugccucaugggcuccggccagcuccucugggacaccgucaccggcgucgacauggcccucuga

SEQ ID NO: 125702 - RNA, 1401 nt, Artificial Sequence; identical to SEQ ID NO: 124779
  derived and/or modified CDS sequence (opt2) from neuraminidase__InfluenzaB__AGX22308

SEQ ID NO: 125703 - RNA, 1401 nt, Artificial Sequence
  derived and/or modified CDS sequence (opt2) from neuraminidase__InfluenzaB__AGX22330
augcuccccuccaccauccagacccucacccucuuccucaccuccggcggcguccuccucucccucuacgucuccgccucccucuccuaccuccucuacuccgacauccuccucaaguucucccagaccgagaucaccgcccccaucaugccccucgacugcgccaacgccuccaacguccaggccgucaaccgcuccgccaccaagggcgucacccuccuccuccccgagcccgaguggaccuacccccgccucuccugccccggcuccaccuuccagaaggcccuccucaucuccccccaccgcuucggcgagaccaagggcaacuccgccccccucaucauccgcgagcccuucaucgccugcggccccaaggagugcaagcacuucgcccucacccacuacgccgcccagcccggcggcuacuacaacggcacccgcgaggaccgcaacaagcuccgccaccucaucuccgucaagcucggcaagauccccaccgucgagaacuccaucuuccacaugaccgccugguccggcuccgccugccacgacggcaaggaguggaccuacaucggcgucgacggccccgacuccaacgcccuccucaagaucaaguacggcgaggccuacaccgacaccuaccacuccuacgccaagaacauccuccgcacccaggaguccgccugcaacugcaucggcggcgacugcuaccucaugaucaccgacggccccgccuccggcaucuccgagugccgcuuccucaagauccgcgagggccgcaucaucaaggagaucuuccccaccggccgcgucaagcacaccgaggagugcaccugcggcuucgccuccaacaagaccaucgagugcgccugccgcgacaacuccuacaccgccaagcgccccuucgucaagcucaacgucgagaccgacaccgccgagauccgccucaugugcaccgagaccuaccucgacaccccccgccccaacgacggcuccaucaccggccccugcgaguccgacggcgacaagggcuccggcggcaucaagggcggcuucguccaccagcgcauggccaccaagaucggccgcugguacucccgcaccauguccaagaccaagcgcaugggcaugggccucuacgucaaguacgacggcgaccccuggaccgacuccgaggcccucgcccucuccggcgucauggucuccauggaggagcccggcugguacuccuucggcuucgagaucaaggacaagaagugcgacguccccugcaucggcaucgagaugguccacgacggcggcaagaccaccuggcacuccgccgccaccgccaucuacugccucaugggcuccggccagcuccucugggacaccgucaccggcgucgacauggcccucuga

SEQ ID NO: 125704 - RNA, 1401 nt, Artificial Sequence; identical to SEQ ID NO: 125167
  derived and/or modified CDS sequence (opt2) from neuraminidase__InfluenzaB__AGX22341

SEQ ID NO: 125705 - RNA, 1401 nt, Artificial Sequence; identical to SEQ ID NO: 125167
  derived and/or modified CDS sequence (opt2) from neuraminidase__InfluenzaB__AGX22352

SEQ ID NO: 125706 - RNA, 1401 nt, Artificial Sequence; identical to SEQ ID NO: 125167
  derived and/or modified CDS sequence (opt2) from neuraminidase__InfluenzaB__AGX22363

SEQ ID NO: 125707 - RNA, 1401 nt, Artificial Sequence; identical to SEQ ID NO: 125165
  derived and/or modified CDS sequence (opt2) from neuraminidase__InfluenzaB__AGX22374

SEQ ID NO: 125708 - RNA, 1401 nt, Artificial Sequence; identical to SEQ ID NO: 124779
  derived and/or modified CDS sequence (opt2) from neuraminidase__InfluenzaB__AGX22385

SEQ ID NO: 125709 - RNA, 1401 nt, Artificial Sequence; identical to SEQ ID NO: 124779
  derived and/or modified CDS sequence (opt2) from neuraminidase__InfluenzaB__AGX22396

SEQ ID NO: 125710 - RNA, 1401 nt, Artificial Sequence; identical to SEQ ID NO: 125666
  derived and/or modified CDS sequence (opt2) from neuraminidase__InfluenzaB__AGX22407

SEQ ID NO: 125711 - RNA, 1401 nt, Artificial Sequence
  derived and/or modified CDS sequence (opt2) from neuraminidase__InfluenzaB__AGX22418
augcuccccuccaccauccagacccucacccucuuccucaccuccggcggcguccuccucucccucuacgucuccgccucccucuccuaccuccucuacuccgacauccuccucaaguucucccagaccgagaucaucgcccccaucaugccccucgacugcgccaacgccuccaacguccaggccgucaaccacuccgccaccaagggcgucacccuccuccuccccgagcccgaguggaccuacccccgccucuccugccccggcuccaccuuccagaaggcccuccucaucuccccccaccgcuucggcgagaccaagggcaacuccgccccccucaucauccgcgagcccuucaucgccugcggccccaaggagugcaagcacuucgcccucacccacuacgccgcccagcccggccgcuacuacaacggcacccgcgaggaccgcaacaagcuccgccaccucaucuccgucaagcucggcaagauccccaccgucgagaacuccaucuuccacauggccgccugguccggcuccgccugccacgacggccgcgaguggaccuacaucggcgucgacggccccgacuccaacgcccuccucaagaucaaguacggcgaggccuacaccgacaccuaccacuccuacgccaagaacauccuccgcacccaggaguccgccugcaacugcaucggcggcgacugcuaccucaugaucaccgacggccccgccuccggcaucuccgagugccgcuuccucaagauccgcgagggccgcaucaucaaggagaucuuccccaccggccgcgucaagcacaccgaggagugcaccugcggcuucgccuccaacaagaccaucgagugcgccugccgcgacaacuccuacaccgccaagcgccccuucgucaagcucaacgucgagaccgacaccgccgagauccgccucaugugcaccgagaccuaccucgacaccccccgccccaacgacggcuccaucaccggccccugcgaguccaacggcgacaagggcuccggcggcaucaagggcggcuucguccaccagcgcauggccuccaagaucggccgcugguacucccgcaccauguccaagaccaagcgcaugggcaugggccucuacgucaaguacgacggcgaccccuggaccgacuccgaggcccucgcccucuccggcgucauggucuccauggaggagcccggcugguacuccuucggcuucgagaucaaggacaagaagugcgacguccccugcaucggcaucgagaugguccacgacggcggcaagaccaccuggcacuccgccgccaccgccaucuacugccucaugggcuccggccagcuccucugggacaccgucaccggcgucgacauggcccucuga

SEQ ID NO: 125712 - RNA, 1401 nt, Artificial Sequence; identical to SEQ ID NO: 125165
  derived and/or modified CDS sequence (opt2) from neuraminidase__InfluenzaB__AGX22429

SEQ ID NO: 125713 - RNA, 1401 nt, Artificial Sequence; identical to SEQ ID NO: 125165
  derived and/or modified CDS sequence (opt2) from neuraminidase__InfluenzaB__AGX22440

SEQ ID NO: 125714 - RNA, 1401 nt, Artificial Sequence; identical to SEQ ID NO: 125165
  derived and/or modified CDS sequence (opt2) from neuraminidase__InfluenzaB__AGX22449

SEQ ID NO: 125715 - RNA, 1401 nt, Artificial Sequence
  derived and/or modified CDS sequence (opt2) from neuraminidase__InfluenzaB__AGX22460
augcuccccuccaccauccagacccucacccucuuccucaccuccggcggcguccuccucucccucuacgucuccgccucccucuccuaccuccucuacuccgacauccuccucaaguucucccagaccgagaucaccgcccccaccaugccccucgacugcgccaacgccuccaacguccaggccgucaaccgcuccgccaccaagggcgucacccuccuccuccccgagcucgaguggaccuacccccgccucuccugccccggcuccaccuuccagaaggcccuccucaucuccccccaccgcuucggcgagaccaagggcaacuccgccccccucaucauccgcgagcccuucaucgccugcggccccaaggagugcaagcacuucgcccucacccacuacgccgcccagcccggcggcuacuacaacggcacccgcgaggaccgcaacaagcuccgccaccucaucuccgucaagcucggcaagauccccaccgucgagaacuccaucuuccacauggccgccugguccggcuccgccugccacgacggccgcgaguggaccuacgucggcgucgacggccccgacuccaacgcccuccucaagaucaaguacggcgaggccuacaccgacaccuaccacuccuacgccaagaacauccuccgcacccaggaguccgccugcaacugcaucggcggcgacugcuaccucaugaucaccgacggccccgccuccggcaucuccgagugccgcuuccucaagauccgcgagggccgcaucaucaaggagaucuuccccaccggccgcgucaagcacaccgaggagugcaccugcggcuucgccuccaacaagaccaucgagugcgccugccgcgacaacuccuacaccgccaagcgccccuucgucaagcucgacgucgagaccgacaccgccgagauccgccucaugugcaccgagaccuaccucgacaccccccgccccaacgacggcuccaucaccggccccugcgaggccaacggcgacaagggcuccggcggcaucaagggcggcuucguccaccagcgcauggccuccaagaucggccgcugguacucccgcaccauguccaagaccaagcgcaugggcaugggccucuacgucaaguacgacggcgaccccuggaccgacuccgaggcccucgcccucuccggcgucauggucuccauggaggagcccggcugguacuccuucggcuucgagaucaaggacaagaagugcgacguccccugcaucggcaucgagaugguccacgacggcggcaagaccaccuggcacuccgccgccaccgccaucuacugccucaugggcuccggccagcuccucugggacaccgucaccggcgucgacauggcccucuga

SEQ ID NO: 125716 - RNA, 1401 nt, Artificial Sequence; identical to SEQ ID NO: 124779
  derived and/or modified CDS sequence (opt2) from neuraminidase__InfluenzaB__AGX22471

SEQ ID NO: 125717 - RNA, 1401 nt, Artificial Sequence; identical to SEQ ID NO: 124779
  derived and/or modified CDS sequence (opt2) from neuraminidase__InfluenzaB__AGX22482

SEQ ID NO: 125718 - RNA, 1401 nt, Artificial Sequence; identical to SEQ ID NO: 124779
  derived and/or modified CDS sequence (opt2) from neuraminidase__InfluenzaB__AGX22493

SEQ ID NO: 125719 - RNA, 1401 nt, Artificial Sequence
  derived and/or modified CDS sequence (opt2) from neuraminidase__InfluenzaB__AGX22504
augcuccccuccaccauccagacccucacccucuuccucaccuccggcggcguccuccucucccucuacgucuccgccucccucuccuaccuccucuacuccgacauccuccucaaguucuccaccaccgagaucaccgcccccaccaucccccucgacugcgccaacgccuccaacguccaggccgucaaccgcuccgccaccaagggcgucacccuccuccuccccgagcccgaguggaccuacccccgccucuccugccccggcuccaccuuccagaaggcccuccucaucuccccccaccgcuucggcgagaccaagggcaacuccgccccccucaucauccgcgagcccuucaucgccugcggccccaaggagugcaagcacuucgcccucacccacuacgccgcccagcccggcggcuacuacaacggcacccgcgaggaccgcaacaagcuccgccaccucaucuccgucaagcucggcaagauccccaccgucgagaacuccaucuuccacauggccgccugguccggcuccgccugccacgacggcaaggaguggaccuacaucggcgucgacggccccgacuccaacgcccuccucaagaucaaguacggcgaggccuacaccgacaccuaccacuccuacgccaacaacauccuccgcacccaggaguccgccugcaacugcaucggcggcaacugcuaccucaugaucaccgacggcuccgccuccggcaucuccgagugccgcuuccucaagauccgcgagggccgcaucaucaaggagaucuuccccaccggccgcgucaagcacaccgaggagugcaccugcggcuucgccuccaacaagaccaucgagugcgccugccgcgacaacuccuacaccgccaagcgccccuucgucaagcucaacgucgagaccgacaccgccgagauccgccucaugugcaccgagaccuaccucgacaccccccgccccgacgacggcuccaucaccggccccugcgaguccaacggcaacaagggcuccggcggcaucaagggcggcuucguccaccagcgcauggccuccaagaucggccgcugguacucccgcaccauguccaagaccaagcgcaugggcaugggccucuacgucaaguacgacggcgaccccuggaccgacuccgacgcccucgcccucuccggcgucauggucuccauggaggagcccggcugguacuccuucggcuucgagaucaaggacaagaagugcgacguccccugcaucggcaucgagaugguccacgacggcggcaaggagaccuggcacuccgccgccaccgccaucuacugccucaugggcuccggccagcuccucugggacaccgucaccggcgucgacauggcccucuga

SEQ ID NO: 125720 - RNA, 1401 nt, Artificial Sequence; identical to SEQ ID NO: 125165
  derived and/or modified CDS sequence (opt2) from neuraminidase__InfluenzaB__AGX22515

SEQ ID NO: 125721 - RNA, 1401 nt, Artificial Sequence
  derived and/or modified CDS sequence (opt2) from neuraminidase__InfluenzaB__AGX22526
augcuccccuccaccauccagacccucacccucuuccucaccuccggcggcguccuccucucccucuacgucuccgccucccucuccuaccuccucuacuccgacauccuccagaaguucucccagaccgagaucaccgcccccaucaugccccucgacugcgccaacgccuccaacguccaggccgucaaccgcuccgccaccaagggcgucacccuccuccuccccgagcccgaguggaccuacccccgccucuccugccccggcuccaccuuccagaaggcccuccucaucuccccccaccgcuucggcgagaccaagggcaacuccgccccccucaucauccgcgagcccuucaucgccugcggccccaccgagugcaagcacuucgcccucacccacuacgccgcccagcccggcggcuacuacaacggcacccgcgaggaccgcaacaagcuccgccaccucaucuccgucaagcucggcaagauccccaccgucgagaacuccaucuuccacauggccgccugguccggcuccgccugccacgacggcaaggaguggaccuacaucggcgucgacggccccgacuccaacgcccuccucaagaucaaguacggcgaggccuacaccgacaccuaccacuccuacgccaagaacauccuccgcacccaggaguccgccugcaacugcaucggcggcgacugcuaccucaugaucaccgacggccccgccuccggcaucuccgagugccgcuuccucaagauccgcgagggccgcaucaucaaggagaucuuccccaccggccgcgucaagcacaccgaggagugcaccugcggcuucgccuccaacaagaccaucgagugcgccugccgcgacaacuccuacaccgccaagcgccccuucgucaagcucaacgucgagaccgacaccgccgagauccgccucaugugcaccgagaccuaccucgacaccccccgccccaacgacggcuccaucaccggccccugcgaguccgacggcgacaagggcuccggcggcaucaagggcggcuucguccaccagcgcauggccuccaagaucggccgcugguacucccgcaccauguccaagaccaagcgcaugggcaugggccucuacgucaaguacgacggcgaccccuggaccgacuccgaggcccucgcccucuccggcgucauggucuccauggaggagcccggcugguacuccuucggcuucgagaucaaggacaagaagugcgacguccccugcaucggcaucgagaugguccacgacggcggcaagaccaccuggcacuccgccgccaccgccaucuacugccucaugggcuccggccagcuccucugggacaccgucaccggcgucgacauggcccucuga

SEQ ID NO: 125722 - RNA, 1401 nt, Artificial Sequence; identical to SEQ ID NO: 124824
  derived and/or modified CDS sequence (opt2) from neuraminidase__InfluenzaB__AGX22548

SEQ ID NO: 125723 - RNA, 1401 nt, Artificial Sequence; identical to SEQ ID NO: 124663
  derived and/or modified CDS sequence (opt2) from neuraminidase__InfluenzaB__AGX22559

SEQ ID NO: 125724 - RNA, 1401 nt, Artificial Sequence; identical to SEQ ID NO: 124824
  derived and/or modified CDS sequence (opt2) from neuraminidase__InfluenzaB__AGX22570

SEQ ID NO: 125725 - RNA, 1401 nt, Artificial Sequence
  derived and/or modified CDS sequence (opt2) from neuraminidase__InfluenzaB__AGX22581
augcuccccuccaccauccagacccucacccucuuccucaccuccggcggcguccuccucucccucuacgucuccgccucccucuccuaccuccucuacuccgacauccuccucaaguucucccagaccgagaucaccgcccccaucaugccccucgacugcgccaacgccuccaacguccaggccgucaaccgcuccgccaccaagggcgucacccuccuccuccccgagcccgaguggaccuacccccgccucuccugccccggcuccaccuuccagaaggcccuccucaucuccccccaccgcuucggcgagaccaagggcaacuccgccccccucaucauccgcgagcccuucaucgccugcggccccaaggagugcaagcacuucgcccucacccacuacgccgcccagcccggcggcuacuacaacggcacccgcgaggaccgcaacaagcuccgccaccucaucuccgucaagcucggcaagauccccaccgucgagaacuccaucuuccacauggccgccugguccggcuccgccugccacgacggccgcgaguggaccuacaucggcgucgacggccccgacaacaacgcccuccucaagaucaaguacggcgaggccuacaccgacaccuaccacuccuacgccaagaacauccuccgcacccaggaguccgccugcaacugcaucggcggcgacugcuaccucaugaucaccgacggccccgccuccggcaucuccgagugccgcuuccucaagauccgcgagggccgcaucaucaaggagaucuuccccaccggccgcgucaagcacaccgaggagugcaccugcggcuucgccuccaacaagaccaucgagugcgccugccgcgacaacaacuacaccgccaagcgccccuucgucaagcucaacgucgagaccgacaccgccgagauccgccucaugugcaccgagaccuaccucgacaccccccgccccaacgacggcuccaucaccggccccugcgaguccaacggcgacaagggcuccggcggcaucaagggcggcuucguccaccagcgcauggccuccaagaucggccgcugguacucccgcaccauguccaagaccaagcgcaugggcaugggccucuacgucaaguacgacggcgaccccuggaccgacuccgaggcccucgcccucuccggcgucauggucuccauggaggagcccggcugguacuccuucggcuucgagaucaaggacaagaagugcgacguccccugcaucggcaucgagaugguccacgacggcggcaagaccaccuggcacuccgccgccaccgccaucuacugccucaugggcuccggccagcuccucugggacaccgucaccggcgucgacauggcccucuga

SEQ ID NO: 125726 - RNA, 1401 nt, Artificial Sequence; identical to SEQ ID NO: 124824
  derived and/or modified CDS sequence (opt2) from neuraminidase__InfluenzaB__AGX22592

SEQ ID NO: 125727 - RNA, 1401 nt, Artificial Sequence; identical to SEQ ID NO: 124824
  derived and/or modified CDS sequence (opt2) from neuraminidase__InfluenzaB__AGX22603

SEQ ID NO: 125728 - RNA, 1401 nt, Artificial Sequence; identical to SEQ ID NO: 125064
  derived and/or modified CDS sequence (opt2) from neuraminidase__InfluenzaB__AGX22614

SEQ ID NO: 125729 - RNA, 1401 nt, Artificial Sequence; identical to SEQ ID NO: 124824
  derived and/or modified CDS sequence (opt2) from neuraminidase__InfluenzaB__AGX22625

SEQ ID NO: 125730 - RNA, 1401 nt, Artificial Sequence
  derived and/or modified CDS sequence (opt2) from neuraminidase__InfluenzaB__AGX22636
augcuccccuccaccauccagacccucacccucuuccucaccuccggcggcguccuccucucccucuacgucuccgccucccucuccuaccuccucuacuccgacauccuccucaaguucucccagaccgagaucaccgcccccaucaugccccucgacugcgccaacgccuccaacguccaggccgucaaccgcuccgccgccaagggcgucgcccuccuccuccccgagcccgaguggaccuacccccgccucuccugccccggcuccaccuuccagaaggcccuccucaucuccccccaccgcuucggcgagaccaagggcaacuccgccccccucaucauccgcgagcccuucaucgccugcggccccaccgagugcaagcacuucgcccucacccacuacgccgcccagcccggcggcuacuacaacggcacccgcgaggaccgcaacaagcuccgccaccucaucuccgucaagcucggcaagauccccaccgucgagaacuccaucuuccacauggccgccugguccggcuccgccugccacgacggcaaggaguggaccuacaucggcgucgacggccccgacuccaacgcccuccucaagaucaaguacggcgaggccuacaccgacaccuaccacuccuacgccaagaacauccuccgcacccaggaguccgccugcaacugcaucggcggcgacugcuaccucaugaucaccgacggccccgccuccggcaucuccgagugccgcuuccucaagauccgcgagggccgcaucaucaaggagaucuuccccaccggccgcgucaagcacaccgaggagugcaccugcggcuucgccuccaacaagaccaucgagugcgccugccgcgacaacuccuacaccgccaagcgccccuucgucaagcucaacgucgagaccgacaccgccgagauccgccucaugugcaccgagaccuaccucgacaccccccgccccaacgacggcuccaucaccggccccugcgaguccgacggcgacaagggcuccggcggcaucaagggcggcuucguccaccagcgcauggccuccaagaucggccgcugguacucccgcaccauguccaagaccaagcgcaugggcaugggccucuacgucaaguacgacggcgaccccuggaccgacuccgaggcccucgcccucuccggcgucauggucuccauggaggagcccggcugguacuccuucggcuucgagaucaaggacaagaagugcgacguccccugcaucggcaucgagaugguccacgacggcggcaagaccaccuggcacuccgccgccaccgccaucuacugccucaugggcuccggccagcuccucugggacaccgucaccggcgucgacauggcccucuga

SEQ ID NO: 125731 - RNA, 1401 nt, Artificial Sequence; identical to SEQ ID NO: 124824
  derived and/or modified CDS sequence (opt2) from neuraminidase__InfluenzaB__AGX22647

SEQ ID NO: 125732 - RNA, 1401 nt, Artificial Sequence; identical to SEQ ID NO: 124663
  derived and/or modified CDS sequence (opt2) from neuraminidase__InfluenzaB__AGX22658

SEQ ID NO: 125733 - RNA, 1401 nt, Artificial Sequence; identical to SEQ ID NO: 124824
  derived and/or modified CDS sequence (opt2) from neuraminidase__InfluenzaB__AGX22669

SEQ ID NO: 125734 - RNA, 1401 nt, Artificial Sequence; identical to SEQ ID NO: 124824
  derived and/or modified CDS sequence (opt2) from neuraminidase__InfluenzaB__AGX22680

SEQ ID NO: 125735 - RNA, 1401 nt, Artificial Sequence; identical to SEQ ID NO: 124824
  derived and/or modified CDS sequence (opt2) from neuraminidase__InfluenzaB__AGX22691

SEQ ID NO: 125736 - RNA, 1401 nt, Artificial Sequence; identical to SEQ ID NO: 124824
  derived and/or modified CDS sequence (opt2) from neuraminidase__InfluenzaB__AGX22702

SEQ ID NO: 125737 - RNA, 1401 nt, Artificial Sequence; identical to SEQ ID NO: 124824
  derived and/or modified CDS sequence (opt2) from neuraminidase__InfluenzaB__AGX22713

SEQ ID NO: 125738 - RNA, 1401 nt, Artificial Sequence
  derived and/or modified CDS sequence (opt2) from neuraminidase__InfluenzaB__AGX22724
augcuccccuccaccauccagacccucacccucuuccucaccuccggcggcguccuccucucccucuacgucuccgcccuccucuccuaccuccucuacuccgacauccuccucaaguucucccagaccgagaucaccgcccccaucaugccccucgacugcgccaacgccuccaacguccaggccgucaaccgcuccgccaccaagggcgucacccuccuccuccccgagcccgaguggaccuacccccgccucuccugccccggcuccaccuuccagaaggcccuccucaucuccccccaccgcuucggcgagaccaagggcaacuccgccccccucaucauccgcgagcccuucaucgccugcggccccaaggagugcaagcacuucgcccucacccacuacgccgcccagcccggcggcuacuacaacggcacccgcgaggaccgcaacaagcuccgccaccucaucuccgucaagcucggcaagauccccaccgucgagaacuccaucuuccacauggccgccugguccggcuccgccugccacgacggccgcgaguggaccuacaucggcgucgacggccccgacuccaacgcccuccucaagaucaaguacggcgaggccuacaccgacaccuaccacuccuacgccaagaacauccuccgcacccaggaguccgccugcaacugcaucggcggcgacugcuaccucaugaucaccgacggccccgccuccggcaucuccgagugccgcuuccucaagauccgcgagggccgcaucaucaaggagaucuuccccaccggccgcgucaagcacaccgaggagugcaccugcggcuucgccuccaacaagaccaucgagugcgccugccgcgacaacuccuacaccgccaagcgccccuucgucaagcucaacgucgagaccgacaccgccgagauccgccucaugugcaccgagaccuaccucgacaccccccgccccaacgacggcuccaucaccggccccugcgaguccaacggcgacaagggcuccggcggcaucaagggcggcuucguccaccagcgcauggccuccaagaucggccgcugguacucccgcaccauguccaagaccaagcgcaugggcaugggccucuacgucaaguacgacggcgaccccuggaccgacuccgaggcccucgcccucuccggcgucauggucuccauggaggagcccggcugguacuccuucggcuucgagaucaaggacaagaagugcgacguccccugcaucggcaucgagaugguccacgacggcggcaagaccaccuggcacuccgccgccaccgccaucuacugccucaugggcuccggccagcuccucugggacaccgucaccggcgucgacauggcccucuga

SEQ ID NO: 125739 - RNA, 1401 nt, Artificial Sequence; identical to SEQ ID NO: 124824
  derived and/or modified CDS sequence (opt2) from neuraminidase__InfluenzaB__AGX22735

SEQ ID NO: 125740 - RNA, 1401 nt, Artificial Sequence
  derived and/or modified CDS sequence (opt2) from neuraminidase__InfluenzaB__AGX22746
augcuccccuccaccauccagacccucacccucuuccucaccuccggcggcguccuccucucccucuacgucuccgccucccucuccuaccuccucuacuccgacauccuccucaaguucucccagaccgagaucaccgcccccaucaugccccucgacugcgccaacgccuccaacguccaggccgucaaccgcuccgccaccaagggcgucacccuccuccuccccgagcccgaguggaccuacccccgccucuccugccccggcuccaccuuccagaaggcccuccucaucuccccccaccgcuucggcgagaccaagggcaacuccgccccccucaucauccgcgagcccuucaucgccugcggccccaccgagugcaagcacuucgcccucacccacuacgccgcccagcccggcggcuacuacaaccgcacccgcgaggaccgcaacaagcuccgccaccucaucuccgucaagcucggcaagauccccaccgucgagaacuccaucuuccacauggccgccugguccggcuccgccugccacgacggcaaggaguggaccuacaucggcgucgacggccccgacuccaacgcccuccucaagaucaaguacggcgaggccuacaccgacaccuaccacuccuacgccaagaacauccuccgcacccaggaguccgccugcaacugcaucggcggcgacugcuaccucaugaucaccgacggccccgccuccggcaucuccgagugccgcuuccucaagauccgcgagggccgcaucaucaaggagaucuuccccaccggccgcgucaagcacaccgaggagugcaccugcggcuucgccuccaacaagaccaucgagugcgccugccgcgacaacuccuacaccgccaagcgccccuucgucaagcucaacgucgagaccgacaccgccgagauccgccucaugugcaccgagaccuaccucgacaccccccgccccaacgacggcuccaucaccggccccugcgaguccgacggcgacaagggcuccggcggcaucaagggcggcuucguccaccagcgcauggccuccaagaucggccgcugguacucccgcaccauguccaagaccaagcgcaugggcaugggccucuacgucaaguacgacggcgaccccuggaccgacuccgaggcccucgcccucuccggcgucauggucuccauggaggagcccggcugguacuccuucggcuucgagaucaaggacaagaagugcgacguccccugcaucggcaucgagaugguccacgacggcggcaagaccaccuggcacuccgccgccaccgccaucuacugccucaugggcuccggccagcuccucugggacaccgucaccggcgucgacauggcccucuga

SEQ ID NO: 125741 - RNA, 1401 nt, Artificial Sequence; identical to SEQ ID NO: 124824
  derived and/or modified CDS sequence (opt2) from neuraminidase__InfluenzaB__AGX22757

SEQ ID NO: 125742 - RNA, 1401 nt, Artificial Sequence; identical to SEQ ID NO: 124824
  derived and/or modified CDS sequence (opt2) from neuraminidase__InfluenzaB__AGX22768

SEQ ID NO: 125743 - RNA, 1401 nt, Artificial Sequence; identical to SEQ ID NO: 125165
  derived and/or modified CDS sequence (opt2) from neuraminidase__InfluenzaB__AGX22779

SEQ ID NO: 125744 - RNA, 1401 nt, Artificial Sequence; identical to SEQ ID NO: 124824
  derived and/or modified CDS sequence (opt2) from neuraminidase__InfluenzaB__AGX22790

SEQ ID NO: 125745 - RNA, 1401 nt, Artificial Sequence
  derived and/or modified CDS sequence (opt2) from neuraminidase__InfluenzaB__AGX22801
augcuccccuccaccauccagacccucacccucuuccucaccuccggcggcguccuccucucccucuacgucuccgccucccucuccuaccuccucuacuccgacauccuccucaaguucucccagaccgagaucaccgcccccaucaugccccucgacugcgccaacgccuccaacguccaggccgucaaccgcuccgccgccaagggcgucacccuccuccuccccgagcccgaguggaccuacccccgccucuccugccccggcuccaccuuccagaaggcccuccucaucuccccccaccgcuucggcgagaccaagggcaacuccgccccccucaucauccgcgagcccuucaucgccugcggccccaccgagugcaagcacuucgcccucacccacuacgccgcccagcccggcggcuacuacaacggcacccgcggcgaccgcaacaagcuccgccaccucaucuccgucaagcucggcaagauccccaccgucgagaacuccaucuuccacauggccgccugguccggcuccgccugccacgacggcaaggaguggaccuacaucggcgucgacggccccgacuccaacgcccuccucaagaucaaguacggcgaggccuacaccgacaccuaccacuccuacgccaagaacauccuccgcacccaggaguccgccugcaacugcaucggcggcaacugcuaccucaugaucaccgacggcuccgccuccggcgucuccgagugccgcuuccucaagauccgcgagggccgcaucaucaaggagaucuuccccaccggccgcgucaagcacaccgaggagugcaccugcggcuucgccuccaacaagaccaucgagugcgccugccgcgacaacuccuacaccgccaagcgccccuucgucaagcucaacgucgagaccgacaccgccgagauccgccucaugugcaccgagaccuaccucgacaccccccgccccaacgacggcuccaucaccggccccugcgaguccgacggcgacaagggcuccggcggcaucaagggcggcuucguccaccagcgcauggccuccaagaucggccgcugguacucccgcaccauguccaagaccaagcgcaugggcaugggccucuacgucaaguacgacggcgaccccuggaccgacuccgaggcccucgcccucuccggcgucauggucuccauggaggagcccggcugguacuccuucggcuucgagaucaaggacaagaagugcgacguccccugcaucggcaucgagaugguccacgacggcggcaagaccaccuggcacuccgccgccaccgccaucuacugccucaugggcuccggccagcuccucugggacaccgucaccggcgucgacauggcccucuga

SEQ ID NO: 125746 - RNA, 1401 nt, Artificial Sequence; identical to SEQ ID NO: 124824
  derived and/or modified CDS sequence (opt2) from neuraminidase__InfluenzaB__AGX22812

SEQ ID NO: 125747 - RNA, 1401 nt, Artificial Sequence; identical to SEQ ID NO: 124824
  derived and/or modified CDS sequence (opt2) from neuraminidase__InfluenzaB__AGX22823

SEQ ID NO: 125748 - RNA, 1401 nt, Artificial Sequence; identical to SEQ ID NO: 124824
  derived and/or modified CDS sequence (opt2) from neuraminidase__InfluenzaB__AGX22834

SEQ ID NO: 125749 - RNA, 1401 nt, Artificial Sequence; identical to SEQ ID NO: 124824
  derived and/or modified CDS sequence (opt2) from neuraminidase__InfluenzaB__AGX22845

SEQ ID NO: 125750 - RNA, 1401 nt, Artificial Sequence; identical to SEQ ID NO: 124824
  derived and/or modified CDS sequence (opt2) from neuraminidase__InfluenzaB__AGX22856

SEQ ID NO: 125751 - RNA, 1401 nt, Artificial Sequence; identical to SEQ ID NO: 124824
  derived and/or modified CDS sequence (opt2) from neuraminidase__InfluenzaB__AGX22867

SEQ ID NO: 125752 - RNA, 1401 nt, Artificial Sequence; identical to SEQ ID NO: 124824
  derived and/or modified CDS sequence (opt2) from neuraminidase__InfluenzaB__AGX22878

SEQ ID NO: 125753 - RNA, 1401 nt, Artificial Sequence
  derived and/or modified CDS sequence (opt2) from neuraminidase__InfluenzaB__AGX22889
augcuccccuccaccauccagacccucacccucuuccucaccuccggcggcguccuccucucccucuacgucuccgccucccucuccuaccuccucuacuccgacauccuccucaaguucucccagaccgagaucaccgcccccaucaugccccucgacugcgccaacgccuccaacguccaggccgucaaccgcuccgccgccaagggcgucacccuccuccuccccgagcccgaguggaccuacccccgccucuccugccccggcuccaccuuccagaaggcccuccucaucuccccccaccgcuucggcgagaccaagggcaacuccgccccccucaucauccgcgagcccuucaucgccugcggccccaccgagugcaagcacuucgcccucacccacuacgccgcccagcccggcggcuacuacaacggcacccgcgaggaccgcaacaagcuccgccaccucaucuccgucaagcucggcaagauccccaccgucgagaacuccaucuuccacauggccgccugguccggcuccgccugccacgacggcaaggaguggaccuacaucggcgucgacggccccgacuccaacgcccuccucaagaucaaguacggcgaggccuacaccgacaccuaccacuccuacgccaagaacauccuccgcacccaggaguccgccugcaacugcaucggcggcgacugcuaccucaugaucaccgacggccccgccuccggcaucuccgagugccgcuuccucaagauccgcgagggccgcaucaucaaggagaucuuccccaccggccgcgucaagcacaccgaggagugcaccugcggcuucgccuccaacaagaccaucgagugcgccugccgcgacaacucccacaccgccaagcgccccuucgucaagcucaacgucgagaccgacaccgccgagauccgccucaugugcaccgagaccuaccucgacaccccccgccccaacgacggcuccaucaccggccccugcgaguccgacggcgacaagggcuccggcggcaucaagggcggcuucguccaccagcgcauggccuccaagaucggccgcugguacucccgcaccauguccaagaccaagcgcaugggcaugggccucuacgucaaguacgacggcgaccccuggaccgacuccgaggcccucgcccucuccggcgucauggucuccauggaggagcccggcugguacuccuucggcuucgagaucaaggacaagaagugcgacguccccugcaucggcaucgagaugguccacgacggcggcaagaccaccuggcacuccgccgccaccgccaucuacugccucaugggcuccggccagcuccucugggacaccgucaccggcgucgacauggcccucuga

SEQ ID NO: 125754 - RNA, 1401 nt, Artificial Sequence; identical to SEQ ID NO: 124663
  derived and/or modified CDS sequence (opt2) from neuraminidase__InfluenzaB__AGX22900

SEQ ID NO: 125755 - RNA, 1401 nt, Artificial Sequence
  derived and/or modified CDS sequence (opt2) from neuraminidase__InfluenzaB__AGX22911
augcuccccuccaccauccagacccucacccucuuccucaccuccggcggcguccuccucucccucuacgucuccgccucccucuccuaccuccucuacuccgacauccuccucaaguucucccagaccgagaucaccgcccccaucaugccccucgacugcgccaacgccuccaacguccaggccgucaaccgcuccgccgccaagggcgucacccuccuccuccccgagcccgaguggaccuacccccgccucuccugccccggcuccaccuuccagaaggcccuccucaucuccccccaccgcuucggcgagaccaagggcaacuccgccccccucaucauccgcgagcccuucaucgccugcggccccaccgagugcaagcacuucgcccucacccacuacgccgcccagcccggcggcuacuacaacggcacccgcgaggaccgcaacaagcuccgccaccucaucuccgucaagcucggcaagauccccaccgucgagaacuccaucuuccacauggccgccugguccggcuccgccugccacgacggcaaggaguggaccuacaucggcgucgacggccccgacuccaacgcccuccucaagaucaaguacggcgaggccuacaccgacaccuaccacuccuacgccaagaacauccuccgcacccaggaguccgccugcaacugcaucggcggcgacugcuaccucaugaucaccgacggccccgccuccggcaccuccgagugccgcuuccucaagauccgcgagggccgcaucaucaaggagaucuuccccaccggccgcgucaagcacaccgaggagugcaccugcggcuucgccuccaacaagaccaucgagugcgccugccgcgacaacuccuacaccgccaagcgccccuucgucaagcucaacgucgagaccgacaccgccgagauccgccucaugugcaccgagaccuaccucgacaccccccgccccaacgacggcuccaucaccggccccugcgaguccgacggcgacaagggcuccggcggcaucaagggcggcuucguccaccagcgcauggccuccaagaucggccgcugguacucccgcaccauguccaagaccaagcgcaugggcaugggccucuacgucaaguacgacggcgaccccuggaccgacuccgaggcccucgcccucuccggcgucauggucuccauggaggagcccggcugguacuccuucggcuucgagaucaaggacaagaagugcgacguccccugcaucggcaucgagaugguccacgacggcggcaagaccaccuggcacuccgccgccaccgccaucuacugccucaugggcuccggccagcuccucugggacaccgucaccggcgucgacauggcccucuga

SEQ ID NO: 125756 - RNA, 1401 nt, Artificial Sequence
  derived and/or modified CDS sequence (opt2) from neuraminidase__InfluenzaB__AGX22922
augcuccccuccaccauccagacccucacccucuuccucaccuccggcggcguccuccucucccucuacgucuccgccucccucuccuaccuccucuacuccgacauccuccucaaguucucccagaccgagaucaccgcccccaucaugccccucgacugcgccaacgccuccaacguccaggccgucaaccgcuccgccaccaagggcgucacccuccuccuccccgagcccgaguggaccuacccccgccucuccugccccggcuccaccuuccagaaggcccuccucaucuccccccaccgcuucggcgagaccaagggcaacuccgccccccucaucauccgcgagcccuucaucgccugcggccccaccgagugcaagcacuucgcccucacccacuacgccgcccagcccggcggcuacuacaacggcacccgcgaggaccgcaacaagcuccgccaccucaucuccgucaagcucggcaagauccccaccgucgagaacuccaucuuccacauggccgccugguccggcuccgccugccacgacggcaaggaguggaccuacaucggcgucgacggccccgacuccaacgcccuccucaagaucaaguacggcgaggccuacaccgacaccuaccacuccuacgccaagaacauccuccgcacccaggaguccgccugcaacugcaucggcggcgacugcuaccucaugaucaccgacggccccgccuccggcaucuccgagugccgcuuccucaagauccgcgagggccgcaucaucaaggagaucuuccccaccggccgcgucaagcacaccgaggagugcaccugcggcuucgccuccaacaagaccaucgagugcgccugccgcgacaacuccuacaccgccaagcgccccuucgucaagcucaacgucgagaccgacaccgccgagauccgccucaugugcaccgagaccuaccucgacaccccccgccccaacgacggcuccaucaccggccccugcgaguccgacggcgacaagggcuccggcggcaucaagggcggcuucguccaccagcgcauggccuccaagaucggccgcugguacucccgcaccauguccaagaccaagcgcaugggcaugggccucuacgucaaguacgacggcgaccccuggaccgacaacgaggcccucgcccucuccggcgucauggucuccauggaggagcccggcugguacuccuucggcuucgagaucaaggacaagaagugcgacguccccugcaucggcaucgagaugguccacgacggcggcaagaccaccuggcacuccgccgccaccgccaucuacugccucaugggcuccggccagcuccucugggacaccgucaccggcgucgacauggcccucuga

SEQ ID NO: 125757 - RNA, 1401 nt, Artificial Sequence; identical to SEQ ID NO: 124824
  derived and/or modified CDS sequence (opt2) from neuraminidase__InfluenzaB__AGX22933

SEQ ID NO: 125758 - RNA, 1401 nt, Artificial Sequence; identical to SEQ ID NO: 124824
  derived and/or modified CDS sequence (opt2) from neuraminidase__InfluenzaB__AGX22944

SEQ ID NO: 125759 - RNA, 1401 nt, Artificial Sequence; identical to SEQ ID NO: 124824
  derived and/or modified CDS sequence (opt2) from neuraminidase__InfluenzaB__AGX22955

SEQ ID NO: 125760 - RNA, 1401 nt, Artificial Sequence; identical to SEQ ID NO: 124824
  derived and/or modified CDS sequence (opt2) from neuraminidase__InfluenzaB__AGX22966

SEQ ID NO: 125761 - RNA, 1401 nt, Artificial Sequence; identical to SEQ ID NO: 124663
  derived and/or modified CDS sequence (opt2) from neuraminidase__InfluenzaB__AGX22977

SEQ ID NO: 125762 - RNA, 1401 nt, Artificial Sequence; identical to SEQ ID NO: 125079
  derived and/or modified CDS sequence (opt2) from neuraminidase__InfluenzaB__AGX22988

SEQ ID NO: 125763 - RNA, 1401 nt, Artificial Sequence
  derived and/or modified CDS sequence (opt2) from neuraminidase__InfluenzaB__AGX22999
augcuccccuccaccauccagacccucacccucuuccucaccuccggcggcguccuccucucccucuacgucuccgccucccucuccuaccuccucuacuccgacauccuccucaaguucucccagaccgagaucaccgcccccaucaugccccucgacugcgccaacgccuccaacguccaggccgucaaccgcuccgccgccaagggcgucacccuccuccuccccgagcccgagugggccuacccccgccucuccugccccggcuccaccuuccagaaggcccuccucaucuccccccaccgcuucggcgagaccaagggcaacuccgccccccucaucauccgcgagcccuucaucgccugcggccccaccgagugcaagcacuucgcccucacccacuacgccgcccagcccggcggcuacuacaacggcacccgcgaggaccgcaacaagcuccgccaccucaucuccgucaagcucggcaagauccccaccgucgagaacuccaucuuccacauggccgccugguccggcuccgccugccacgacggcaaggaguggaccuacaucggcgucgacggccccgacuccaacgcccuccucaagaucaaguacggcgaggccuacaccgacaccuaccacuccuacgccaagaacauccuccgcacccaggaguccgccugcaacugcaucggcggcgacugcuaccucaugaucaccgacggccccgccuccggcaucuccgagugccgcuuccucaagauccgcgagggccgcaucaucaaggagaucuuccccaccggccgcgucaagcacaccgaggagugcaccugcggcuucgccuccaacaagaccaucgagugcgccugccgcgacaacuccuacaccgccaagcgccccuucgucaagcucaacgucgagaccgacaccgccgagauccgccucaugugcaccgagaccuaccucgacaccccccgccccaacgacggcuccaucaccggccccugcgaguccgacggcgacaagggcuccggcggcaucaagggcggcuucguccaccagcgcauggccuccaagaucggccgcugguacucccgcaccauguccaagaccaagcgcaugggcaugggccucuacgucaaguacgacggcgaccccuggaccgacuccgaggcccucgcccucuccggcgucauggucuccauggaggagcccggcugguacuccuucggcuucgagaucaaggacaagaagugcgacguccccugcaucggcaucgagaugguccacgacggcggcaagaccaccuggcacuccgccgccaccgccaucuacugccucaugggcuccggccagcuccucugggacaccgucaccggcgucgacauggcccucuga

SEQ ID NO: 125764 - RNA, 1401 nt, Artificial Sequence; identical to SEQ ID NO: 125763
  derived and/or modified CDS sequence (opt2) from neuraminidase__InfluenzaB__AGX23010

SEQ ID NO: 125765 - RNA, 1401 nt, Artificial Sequence; identical to SEQ ID NO: 124663
  derived and/or modified CDS sequence (opt2) from neuraminidase__InfluenzaB__AGX23021

SEQ ID NO: 125766 - RNA, 1401 nt, Artificial Sequence; identical to SEQ ID NO: 124824
  derived and/or modified CDS sequence (opt2) from neuraminidase__InfluenzaB__AGX23032

SEQ ID NO: 125767 - RNA, 1401 nt, Artificial Sequence
  derived and/or modified CDS sequence (opt2) from neuraminidase__InfluenzaB__AGX23043
augcuccccuccaccauccagacccucacccucuuccucaccuccggcggcguccuccucucccucuacgucuccgccucccucuccuaccuccucuacuccgacauccuccucaaguucucccagaccgagaucaccgcccccaucaugccccucgacugcgccaacgccuccaacguccaggccgucaaccgcuccgccgccaagggcgucacccuccuccuccccgagcccgaguggaccuacccccgccucuccugccccggcuccaccuuccagaaggcccuccucaucuccccccaccgcuucggcgagaccaagggcaacuccgccccccucaucauccgcgagcccuucaucgccugcggccccaccgagugcaagcacuucgcccucacccacuacgccgcccagcccggcggcuacuacaacggcacccgcgaggaccgcaacaagcuccgccaccucaucuccgucaagcucggcaagauccccaccgucgagaacuccaucuuccacauggccgccugguccggcuccgccugccacgacggcaaggaguggaccuacaucggcgucgacggccccgacuccaacgcccuccucaagaucaaguacggcgaggccuacaccgacaccuaccacuccuacgccaagaacauccuccgcacccaggaguccgccugcaacugcaucggcggcgacugcuaccucaugaucaccgacggccccgcccucggcaucuccgagugccgcuuccucaagauccgcgagggccgcaucaucaaggagaucuuccccaccggccgcgucaagcacaccgaggagugcaccugcggcuucgccuccaacaagaccaucgagugcgccugccgcgacaacuccuacaccgccaagcgccccuucgucaagcucaacgucgagaccgacaccgccgagauccgccucaugugcaccgagaccuaccucgacaccccccgccccaacgacggcuccaucaccggccccugcgaguccgacggcgacaagggcuccggcggcaucaagggcggcuucguccaccagcgcauggccuccaagaucggccgcugguacucccgcaccauguccaagaccaagcgcaugggcaugggccucuacgucaaguacgacggcgaccccuggaccgacuccgaggcccucgcccucuccggcgucauggucuccauggaggagcccggcugguacuccuucggcuucgagaucaaggacaagaagugcgacguccccugcaucggcaucgagaugguccacgacggcggcaagaccaccuggcacuccgccgccaccgccaucuacugccucaugggcuccggccagcuccucugggacaccgucaccggcgucgacauggcccucuga

SEQ ID NO: 125768 - RNA, 1401 nt, Artificial Sequence; identical to SEQ ID NO: 124663
  derived and/or modified CDS sequence (opt2) from neuraminidase__InfluenzaB__AGX23054

SEQ ID NO: 125769 - RNA, 1401 nt, Artificial Sequence; identical to SEQ ID NO: 124663
  derived and/or modified CDS sequence (opt2) from neuraminidase__InfluenzaB__AGX23065

SEQ ID NO: 125770 - RNA, 1401 nt, Artificial Sequence; identical to SEQ ID NO: 124663
  derived and/or modified CDS sequence (opt2) from neuraminidase__InfluenzaB__AGX23076

SEQ ID NO: 125771 - RNA, 1401 nt, Artificial Sequence; identical to SEQ ID NO: 124824
  derived and/or modified CDS sequence (opt2) from neuraminidase__InfluenzaB__AGX23087

SEQ ID NO: 125772 - RNA, 1401 nt, Artificial Sequence; identical to SEQ ID NO: 124663
  derived and/or modified CDS sequence (opt2) from neuraminidase__InfluenzaB__AGX23098

SEQ ID NO: 125773 - RNA, 1401 nt, Artificial Sequence
  derived and/or modified CDS sequence (opt2) from neuraminidase__InfluenzaB__AGX23109
augcuccccuccaccauccagacccucacccucuuccucaccuccggcggcguccuccucucccucuacgucuccgccucccucuccuaccuccucuacuccgacauccuccucaaguucucccagaccgagaucaccgcccccaucaugccccucgacugcgccaacgccuccaacguccaggccgucaaccgcuccgccaccaagggcgucacccuccuccuccccgagcccgaguggaccuacccccgccucuccugccccggcuccaccuuccagaaggcccuccucaucuccccccaccgcuucggcgagaccaagggcaacuccgccccccucaucauccgcgagcccuucaucgccugcggccccaccgagugcaagcacuucgcccucacccacuacgccgcccagcccggcggcuacuacaacggcacccgcgaggaccgcaacaagcuccgccaccucaucuccgucaagcucggcaagauccccaccgucgagaacuccaucuuccacauggccgccugguccggcuccgccugccacgacggcaaggaguggaccuacaucggcgucgacggccccgacuccaacgcccuccucaagaucaaguacggcgaggccuacaccgacaccuaccacuccuacgccaagaacauccuccgcacccaggaguccgccugcaacugcauccgcggcgacugcuaccucaugaucaccgacggccccgccuccggcaucuccgagugccgcuuccucaagauccgcgagggccgcaucaucaaggagaucuuccccaccggccgcgucaagcacaccgaggagugcaccugcggcuucgccuccaacaagaccaucgagugcgccugccgcgacaacuccuacaccgccaagcgccccuucgucaagcucaacgucgagaccgacaccgccgagauccgccucaugugcaccgagaccuaccucgacaccccccgccccaacgacggcuccaucaccggccccugcgaguccgacggcgacaagggcuccggcggcaucaagggcggcuucguccaccagcgcauggccuccaagaucggccgcugguacucccgcaccauguccaagaccaagcgcaugggcaugggccucuacgucaaguacgacggcgaccccuggaccgacuccgaggcccucgcccucuccggcgucauggucuccauggaggagcccggcugguacuccuucggcuucgagaucaaggacaagaagugcgacguccccugcaucggcaucgagaugguccacgacggcggcaagaccaccuggcacuccgccgccaccgccaucuacugccucaugggcuccggccagcuccucugggacaccgucaccggcgucgacauggcccucuga

SEQ ID NO: 125774 - RNA, 1401 nt, Artificial Sequence; identical to SEQ ID NO: 124824
  derived and/or modified CDS sequence (opt2) from neuraminidase__InfluenzaB__AGX23120

SEQ ID NO: 125775 - RNA, 1401 nt, Artificial Sequence
  derived and/or modified CDS sequence (opt2) from neuraminidase__InfluenzaB__AGX23131
augcuccccuccaccauccagacccucacccucuuccucaccuccggcggcguccuccucucccucuacgucuccgccucccucuccuaccuccucuacuccgacauccuccucaaguucucccagaccgagaucaucgcccccaucaugccccucgacugcgccaacgccuccaacguccaggccgucaaccgcuccgccgccaagggcgucacccuccuccuccccgagcccgaguggaccuacccccgccucuccugccccggcuccaccuuccagaaggcccuccucaucuccccccaccgcuucggcgagaccaagggcaacuccgccccccucaucauccgcgagcccuucaucgccugcggccccaccgagugcaagcacuucgcccucacccacuacgccgcccagcccggcggcuacuacaacggcacccgcgaggaccgcaacaagcuccgccaccucaucuccgucaagcucggcaagauccccaccgucgagaacuccaucuuccacauggccgccugguccggcuccgccugccacgacggcaaggaguggaccuacaucggcgucgacggccccgacuccaacgcccuccucaagaucaaguacggcgaggccuacaccgacaccuaccacuccuacgccaagaacauccuccgcacccaggaguccgccugcaacugcaucggcggcgacugcuaccucaugaucaccgacggccccgccuccggcaucuccgagugccgcuuccucaagauccgcgagggccgcaucaucaaggagaucuuccccaccggccgcgucaagcacaccgaggagugcaccugcggcuucgccuccaacaagaccaucgagugcgccugccgcgacaacuccuacaccgccaagcgccccuucgucaagcucaacgucgagaccgacaccgccgagauccgccucaugugcaccgagaccuaccucgacaccccccgccccaacgacggcuccaucaccggccccugcgaguccgacggcgacaagggcuccggcggcaucaagggcggcuucguccaccagcgcauggccuccaagaucggccgcugguacucccgcaccauguccaagaccaagcgcaugggcaugggccucuacgucaaguacgacggcgaccccuggaccgacuccgaggcccucgcccucuccggcgucauggucuccauggaggagcccggcugguacuccuucggcuucgagaucaaggacaagaagugcgacguccccugcaucggcaucgagaugguccacgacggcggcaagaccaccuggcacuccgccgccaccgccaucuacugccucaugggcuccggccagcuccucugggacaccgucaccggcgucgacauggcccucuga

SEQ ID NO: 125776 - RNA, 1401 nt, Artificial Sequence; identical to SEQ ID NO: 124824
  derived and/or modified CDS sequence (opt2) from neuraminidase__InfluenzaB__AGX23142

SEQ ID NO: 125777 - RNA, 1401 nt, Artificial Sequence; identical to SEQ ID NO: 124663
  derived and/or modified CDS sequence (opt2) from neuraminidase__InfluenzaB__AGX23153

SEQ ID NO: 125778 - RNA, 1401 nt, Artificial Sequence; identical to SEQ ID NO: 124663
  derived and/or modified CDS sequence (opt2) from neuraminidase__InfluenzaB__AGX23164

SEQ ID NO: 125779 - RNA, 1401 nt, Artificial Sequence; identical to SEQ ID NO: 124663
  derived and/or modified CDS sequence (opt2) from neuraminidase__InfluenzaB__AGX23175

SEQ ID NO: 125780 - RNA, 1401 nt, Artificial Sequence
  derived and/or modified CDS sequence (opt2) from neuraminidase__InfluenzaB__AGX23186
augcuccccuccaccacccagacccucacccucuuccucaccuccggcggcguccuccucucccucuacgucuccgccucccucuccuaccuccucuacuccgacauccuccucaaguucucccagaccgagaucaccgcccccaucaugccccucgacugcgccaacgccuccaacguccaggccgucaaccgcuccgccgccaagggcgucacccuccuccuccccgagcccgaguggaccuacccccgccucuccugccccggcuccaccuuccagaaggcccuccucaucuccccccaccgcuucggcgagaccaagggcaacuccgccccccucaucauccgcgagcccuucaucgccugcggccccaccgagugcaagcacuucgcccucacccacuacgccgcccagcccggcggcuacuacaacggcacccgcgaggaccgcaacaagcuccgccaccucaucuccgucaagcucggcaagauccccaccgucgagaacuccaucuuccacauggccgccugguccggcuccgccugccacgacggcaaggaguggaccuacaucggcgucgacggccccgacuccaacgcccuccucaagaucaaguacggcgaggccuacaccgacaccuaccacuccuacgccaagaacauccuccgcacccaggaguccgccugcaacugcaucggcggcgacugcuaccucaugaucaccgacggccccgccuccggcaucuccgagugccgcuuccucaagauccgcgagggccgcaucaucaaggagaucuuccccaccggccgcgucaagcacaccgaggagugcaccugcggcuucgccuccaacaagaccaucgagugcgccugccgcgacaacuccuacaccgccaagcgccccuucgucaagcucaacgucgagaccgacaccgccgagauccgccucaugugcaccgagaccuaccucgacaccccccgccccaacgacggcuccaucaccggccccugcgaguccgacggcgacaagggcuccggcggcaucaagggcggcuucguccaccagcgcauggccuccaagaucggccgcugguacucccgcaccauguccaagaccaagcgcaugggcaugggccucuacgucaaguacgacggcgaccccuggaccgacuccgaggcccucgcccucuccggcgucauggucuccauggaggagcccggcugguacuccuucggcuucgagaucaaggacaagaagugcgacguccccugcaucggcaucgagaugguccacgacggcggcaagaccaccuggcacuccgccgccaccgccaucuacugccucaugggcuccggccagcuccucugggacaccgucaccggcgucgacauggcccucuga

SEQ ID NO: 125781 - RNA, 1401 nt, Artificial Sequence; identical to SEQ ID NO: 124824
  derived and/or modified CDS sequence (opt2) from neuraminidase__InfluenzaB__AGX23197

SEQ ID NO: 125782 - RNA, 1401 nt, Artificial Sequence; identical to SEQ ID NO: 124824
  derived and/or modified CDS sequence (opt2) from neuraminidase__InfluenzaB__AGX23208

SEQ ID NO: 125783 - RNA, 1401 nt, Artificial Sequence; identical to SEQ ID NO: 124824
  derived and/or modified CDS sequence (opt2) from neuraminidase__InfluenzaB__AGX23219

SEQ ID NO: 125784 - RNA, 1401 nt, Artificial Sequence
  derived and/or modified CDS sequence (opt2) from neuraminidase__InfluenzaB__AGX23230
augcuccccuccaccauccagacccucacccucuuccucaccuccggcggcguccuccucucccucuacgucuccgccucccucuccuaccuccucuacuccgacauccuccucaaguucucccagaccgagaucaccgcccccaucaugccccucgacugcgccaacgccuccaacguccaggccgucaaccgcuccgccgccaagggcgucacccuccuccuccccgagcccgaguggaccuacccccgccucuccugccccggcuccaccuuccagaaggcccuccucaucuccccccaccgcuucggcgagaccaagggcaacuccgccccccucaucauccgcgagcccuucaucgccugcggccccaccgagugcaagcacuucgcccucacccacuacgccgcccagcccggcgaguacuacaacggcacccgcgaggaccgcaacaagcuccgccaccucaucuccgucaagcucggcaagauccccaccgucgagaacuccaucuuccacauggccgccugguccggcuccgccugccacgacggcaaggaguggaccuacaucggcgucgacggccccgacuccaacgcccuccucaagaucaaguacggcgaggccuacaccgacaccuaccacuccuacgccaagaacauccuccgcacccaggaguccgccugcaacugcaucggcggcgacugcuaccucaugaucaccgacggccccuccuccggcaucuccgagugccgcuuccucaagauccgcgagggccgcaucaucaaggagaucuuccccaccggccgcgucaagcacaccgaggagugcaccugcggcuucgccuccaacaagaccaucgagugcgccugccgcgacaacuccuacaccgccaagcgccccuucgucaagcucaacgucgagaccgacaccgccgagauccgccucaugugcaccgagaccuaccucgacaccccccgccccaacgacggcuccaucaccggccccugcgaguccgacggcgacaagggcuccggcggcaucaagggcggcuucguccaccagcgcauggccuccaagaucggccgcugguacucccgcaccauguccaagaccaagcgcaugggcaugggccucuacgucaaguacgacggcgaccccuggaccgacuccgaggcccucgcccucuccggcgucauggucuccauggaggagcccggcugguacuccuucggcuucgagaucaaggacaagaagugcgacguccccugcaucggcaucgagaugguccacgacggcggcaagaccaccuggcacuccgccgccaccgccaucuacugccucaugggcuccggccagcuccucugggacaccgucaccggcgucgacauggcccucuga

SEQ ID NO: 125785 - RNA, 1401 nt, Artificial Sequence; identical to SEQ ID NO: 124663
  derived and/or modified CDS sequence (opt2) from neuraminidase__InfluenzaB__AGX23241

SEQ ID NO: 125786 - RNA, 1401 nt, Artificial Sequence; identical to SEQ ID NO: 124824
  derived and/or modified CDS sequence (opt2) from neuraminidase__InfluenzaB__AGX23252

SEQ ID NO: 125787 - RNA, 1401 nt, Artificial Sequence; identical to SEQ ID NO: 124824
  derived and/or modified CDS sequence (opt2) from neuraminidase__InfluenzaB__AGX23263

SEQ ID NO: 125788 - RNA, 1401 nt, Artificial Sequence; identical to SEQ ID NO: 124824
  derived and/or modified CDS sequence (opt2) from neuraminidase__InfluenzaB__AGX23274

SEQ ID NO: 125789 - RNA, 1401 nt, Artificial Sequence; identical to SEQ ID NO: 124663
  derived and/or modified CDS sequence (opt2) from neuraminidase__InfluenzaB__AGX23285

SEQ ID NO: 125790 - RNA, 1401 nt, Artificial Sequence; identical to SEQ ID NO: 124824
  derived and/or modified CDS sequence (opt2) from neuraminidase__InfluenzaB__AGX23296

SEQ ID NO: 125791 - RNA, 1401 nt, Artificial Sequence
  derived and/or modified CDS sequence (opt2) from neuraminidase__InfluenzaB__AGX23307
augcuccccuccaccauccagacccucacccucuuccucaccuccggcggcguccuccucucccucuacgucuccgccucccucuccuaccuccucuacuccgacauccuccucaaguucucccagaccgagaucaccgcccccaucaugccccucgacugcgccaacgccuccaacguccaggccgucaaccgcuccgccgccaagggcgucacccuccuccuccccgagcccgaguggaccuacccccgccucuccugccccggcuccaccuuccagaaggcccuccucaucuccccccaccgcuucggcgagaccaagggcaacuccgccccccucaucauccgcgagcccuucaucgccugcggccccaccgagugcaagcacuucgcccucacccacuacgccgcccagcccggcggcuacuacaacggcacccgcgaggaccgcaacaagcuccgccaccucaucuccgucaagcucggcaagauccccaccgucgagaacuccaucuuccacauggccgccugguccggcuccgccugccacgacggcaaggaguggaccuacgucggcgucgacggccccgacuccaacgcccuccucaagaucaaguacggcgaggccuacaccgacaccuaccacuccuacgccaagaacauccuccgcacccaggaguccgccugcaacugcaucggcggcgacugcuaccucaugaucaccgacggccccgccuccggcaucuccgagugccgcuuccucaagauccgcgagggccgcaucaucaaggagaucuuccccaccggccgcgucaagcacaccgaggagugcaccugcggcuucgccuccaacaagaccaucgagugcgccugccgcgacaacuccuacaccgccaagcgccccuucgucaagcucaacgucgagaccgacaccgccgagauccgccucaugugcaccgagaccuaccucgacaccccccgccccaacgacggcuccaucaccggccccugcgaguccgacggcgacaagggcuccggcggcaucaagggcggcuucguccaccagcgcauggccuccaagaucggccgcugguacucccgcaccauguccaagaccaagcgcaugggcaugggccucuacgucaaguacgacggcgaccccuggaccgacuccgaggcccucgcccucuccggcgucauggucuccauggaggagcccggcugguacuccuucggcuucgagaucaaggacaagaagugcgacguccccugcaucggcaucgagaugguccacgacggcggcaagaccaccuggcacuccgccgccaccgccaucuacugccucaugggcuccggccagcuccucugggacaccgucaccggcgucgacauggcccucuga

SEQ ID NO: 125792 - RNA, 1401 nt, Artificial Sequence; identical to SEQ ID NO: 125791
  derived and/or modified CDS sequence (opt2) from neuraminidase__InfluenzaB__AGX23318

SEQ ID NO: 125793 - RNA, 1401 nt, Artificial Sequence; identical to SEQ ID NO: 125791
  derived and/or modified CDS sequence (opt2) from neuraminidase__InfluenzaB__AGX23329

SEQ ID NO: 125794 - RNA, 1401 nt, Artificial Sequence; identical to SEQ ID NO: 125791
  derived and/or modified CDS sequence (opt2) from neuraminidase__InfluenzaB__AGX23340

SEQ ID NO: 125795 - RNA, 1401 nt, Artificial Sequence; identical to SEQ ID NO: 125791
  derived and/or modified CDS sequence (opt2) from neuraminidase__InfluenzaB__AGX23351

SEQ ID NO: 125796 - RNA, 1401 nt, Artificial Sequence; identical to SEQ ID NO: 125791
  derived and/or modified CDS sequence (opt2) from neuraminidase__InfluenzaB__AGX23362

SEQ ID NO: 125797 - RNA, 1401 nt, Artificial Sequence; identical to SEQ ID NO: 125791
  derived and/or modified CDS sequence (opt2) from neuraminidase__InfluenzaB__AGX23373

SEQ ID NO: 125798 - RNA, 1401 nt, Artificial Sequence; identical to SEQ ID NO: 125791
  derived and/or modified CDS sequence (opt2) from neuraminidase__InfluenzaB__AGX23384

SEQ ID NO: 125799 - RNA, 1401 nt, Artificial Sequence
  derived and/or modified CDS sequence (opt2) from neuraminidase__InfluenzaB__AGX23395
augcuccccuccaccauccagacccucacccucuuccucaccuccggcggcguccuccucucccucuacgucuccgccucccucuccuaccuccucuacuccgacauccuccucaaguucucccagaccgagaucaccgcccccaucaugccccucgacugcgccaacgccuccaacguccaggccgucaaccgcuccgccgccaagggcgucacccuccuccuccccgagcccgaguggaccuacccccgccucuccugccccggcuccaccuuccagaaggcccuccucaucuccccccaccgcuucggcgagaccaagggcaacuccgccccccucaucauccgcgagcccuucaucgccugcggccccaccgagugcaagcacuucgcccucacccacuacgccgcccagcccggcggcuacuacaacggcacccgcgaggaccgcaacaagcuccgccaccucaucuccgucaagcucggcaagauccccaccgucgagaacuccaucuuccacauggccgccugguccggcuccgccugccacgacggcaaggaguggaccuacgucggcgucgacggccccgacuccaacgcccuccucaagaucaaguacggcgaggccuacaccgacaccuaccacuccuacgccaagaacauccuccgcacccaggaguccgccugcaacugcaucggcggcgacugcuaccucaugaucaccgacggccccgccuccggcaucuccgagugccgcuuccucaagauccgcgagggccgcaucaucaaggagaucuuccccaccggccgcgucaagcacaccgaggagugcaccugcggcuucgccuccaacaagaccaucgagugcgccugccgcgacaacuccuacaccgccaagcgccccuucgucaagcucaacgucgagaccgacaccgccgagauccgccucaugugcaccgagaccuaccucgacaccccccgccccaacgacggcuccaucaccggccccugcgaguccgacggcgacaagggcuccggcggcaucaagggcggcuucguccaccagcgcauggccuccaagaucggccgcugguacucccgcaccauguccaagaccaagcgcaugggcaugggccucuacgucaaguacgacggcgaccccuggaccgacuccgaggcccucgcccucuccggcgucauggucuccauggaggagcccggcugguacuccuucggcuucgagaucaaggacaagaagugcgacguccccugcaucggcaucgagaugguccacgacggcggcaagaccaccuggcacuccgccgccaccgccaucuacugccucaugggcuccggccagcuccucuggaacaccgucaccggcgucgacauggcccucuga

SEQ ID NO: 125800 - RNA, 1401 nt, Artificial Sequence
  derived and/or modified CDS sequence (opt2) from neuraminidase__InfluenzaB__AGX23417
augcuccccuccaccauccagacccucacccucuuccucaccuccggcggcguccuccucucccucuacgucuccgccucccucuccuaccuccucuacuccgacauccuccucaaguucucccagaccgagaucaccgcccccaucaugccccucgacugcgccaacgccuccaacguccaggccgucaaccgcuccgccgccaagggcgucaccuuccuccuccccgagcccgaguggaccuacccccgccucuccugccccggcuccaccuuccagaaggcccuccucaucuccccccaccgcuucggcgagaccaagggcaacuccgccccccucaucauccgcgagcccuucaucgccugcggccccaccgagugcaagcacuucgcccucacccacuacgccgcccagcccggcggcuacuacaacggcacccgcgaggaccgcaacaagcuccgccaccucaucuccgucaagcucggcaagauccccaccgucgagaacuccaucuuccacauggccgccugguccggcuccgccugccacgacggcaaggaguggaccuacaucggcgucgacggccccgacuccaacgcccuccucaagaucaaguacggcgaggccuacaccgacaccuaccacuccuacgccaagaacauccuccgcacccaggaguccgccugcaacugcaucggcggcgacugcuaccucaugaucaccgacggccccgccuccggcaucuccgagugccgcuuccucaagauccgcgagggccgcaucaucaaggagaucuuccccaccggccgcgucaagcacaccgaggagugcaccugcggcuucgccuccaacaagaccaucgagugcgccugccgcgacaacuccuacaccgccaagcgccccuucgucaagcucaacgucgagaccgacaccgccgagauccgccucaugugcaccgagaccuaccucgacaccccccgccccaacgacggcuccaucaccggccccugcgaguccgacggcgacaagggcuccggcggcaucaagggcggcuucguccaccagcgcauggccuccaagaucggccgcugguacucccgcaccauguccaagaccaagcgcaugggcaugggccucuacgucaaguacgacggcgaccccuggaccgacuccgaggcccucgcccucuccggcgucauggucuccauggaggagcccggcugguacuccuucggcuucgagaucaaggacaagaagugcgacguccccugcaucggcaucgagaugguccacgacggcggcaagaccaccuggcacuccgccgccaccgccaucuacugccucaugggcuccggccagcuccucugggacaccgucaccggcgucgacauggcccucuga

SEQ ID NO: 125801 - RNA, 1401 nt, Artificial Sequence; identical to SEQ ID NO: 125800
  derived and/or modified CDS sequence (opt2) from neuraminidase__InfluenzaB__AGX23428

SEQ ID NO: 125802 - RNA, 1401 nt, Artificial Sequence; identical to SEQ ID NO: 125183
  derived and/or modified CDS sequence (opt2) from neuraminidase__InfluenzaB__AGX23450

SEQ ID NO: 125803 - RNA, 1401 nt, Artificial Sequence
  derived and/or modified CDS sequence (opt2) from neuraminidase__InfluenzaB__AGX23461
augcuccccuccaccauccagacccucacccucuuccucaccuccggcggcguccuccucucccucuacgucuccgccucccucuccuaccuccucuacuccgacauccuccucaaguucucccgcaccgagaucaccgcccccaucaugccccucgacugcgccaacgccuccaacauccaggccgucaaccgcuccgccaccaagggcgucacccuccuccuccccgagcccgaguggaccuacccccgccucuccugccccggcuccaccuuccagaaggcccuccucaucuccccccaccgcuucggcgagaccaagggcaacuccgccccccucaucauccgcgagcccuucaucgccugcggccccaaggagugcaagcacuucgcccucacccacuacgccgcccagcccggcggcuacuacaacggcacccgcgaggaccgcaacaagcuccgccaccucaucuccgucaagcucggcaagauccccaccgucgagaacuccaucuuccacauggccgccugguccggcuccgccugccacgacggccgcgaguggaccuacaucggcgucgacggccccgacuccaacgcccuccucaagaucaaguacggcgaggccuacaccgacaccuaccacuccuacgccaagaacauccuccgcacccaggaguccgccugcaacugcaucggcggcgacugcuaccucaugaucaccgacggccccgccuccggcaucuccgagugccgcuuccucaagauccgcgagggccgcaucaucaaggagaucuuccccaccggccgcgucaagcacaccgaggagugcaccugcggcuucgccuccaacaagaccaucgagugcgccugccgcgacaacuccuacaccgccaagcgccccuucgucaagcucaacgucgagaccgacaccgccgagauccgccucaugugcaccgagaccuaccucgacaccccccgccccaacgacggcuccaucaccggccccugcgaguccaacggcgacaagggcuccggcggcaucaagggcggcuucguccaccagcgcauggccuccaagaucggccgcugguacucccgcaccauguccaagaccaagcgcaugggcaugggccucuacgucaaguacgacggcgaccccuggaccgacuccgaggcccucgcccucuccggcgucauggucuccaucgaggagcccggcugguacuccuucggcuucgagaucaaggacaagaagugcgacguccccugcaucggcaucgagaugguccacgacggcggcaagaccaccuggcacuccgccgccaccgccaucuacugccucaugggcuccggccagcuccucugggacaccgucaccggcgucgacauggcccucuga

SEQ ID NO: 125804 - RNA, 1401 nt, Artificial Sequence; identical to SEQ ID NO: 125183
  derived and/or modified CDS sequence (opt2) from neuraminidase__InfluenzaB__AGX23472

SEQ ID NO: 125805 - RNA, 1401 nt, Artificial Sequence; identical to SEQ ID NO: 124824
  derived and/or modified CDS sequence (opt2) from neuraminidase__InfluenzaB__AGX23483

SEQ ID NO: 125806 - RNA, 1401 nt, Artificial Sequence
  derived and/or modified CDS sequence (opt2) from neuraminidase__InfluenzaB__AGX23494
augcuccccuccaccauccagacccucacccucuuccucaccuccggcggcguccuccucucccucuacgucuccgccucccucuccuaccuccucuacuccgacauccuccucaaguucucccagaccgagaucaccgcccccaucaugccccucgacugcgccaacgccuccaacguccaggccgucaaccgcuccgccgccaagggcgucacccuccuccuccccgagcccgaguggaccuacccccgccucuccugccccggcuccaccuuccagaaggcccuccucaucuccccccaccgcuucggcgagaccaagggcaacuccgccccccucaucauccgcgagcccuucaucgccugcggccccaccgagugcaagcacuucgcccucacccacuacgccgcccagcccggcggcuacuacaacggcacccgcgaggaccgcaacaagcuccgccaccucaucuccgucaagcucggcaagauccccaccgucgagaacuccaucuuccacauggccgccugguccggcuccgccugccacgacggcaaggaguggaccuacgucggcgucgacggccccgacuccaacgcccuccucaagaucaaguacggcgaggccuacaccgacaccuaccacuccuacgccaagaacauccuccgcacccaggaguccgccugcaacugcaucggcggcgacugcuaccucaugaucaccgacggccccgccuccggcaucuccgagugccgcuuccucaagauccgcgagggccgcaucaucaaggagaucuuccccaccggccgcgucaagcacaccgaggagugcaccugcggcuucgccuccaacaagaccaucgagugcgccugccgcgacaacuccuacaccgccaagcgccccuucgucaagcucaacgucgagaccgacaccgccgagauccgccucaugugcaccgagaccuaccucgacaccccccgccccaacgacggcuccaucaccggccccugcggcuccgacggcgacaagggcuccggcggcaucaagggcggcuucguccaccagcgcauggccuccaagaucggccgcugguacucccgcaccauguccaagaccaagcgcaugggcaugggccucuacgucaaguacgacggcgaccccuggaccgacuccgaggcccucgcccucuccggcgucauggucuccauggacgagcccggcugguacuccuucggcuucgagaucaaggacaagaagugcgacguccccugcaucggcaucgagaugguccacgacggcggcaagaccaccuggcacuccgccgccaccgccaucuacugccucaugggcuccggccagcuccucugggacaccgucaccggcgucgacauggcccucuga

SEQ ID NO: 125807 - RNA, 1401 nt, Artificial Sequence
  derived and/or modified CDS sequence (opt2) from neuraminidase__InfluenzaB__AGX23505
augcuccccuccaccauccagacccucacccucuuccucaccuccggcggcguccuccucucccucuacgucuccgccucccucuccuaccuccucuacuccgacauccuccucaaguucucccagaccgagaucaccgcccccaucaugccccucgacugcgccaacgccuccaacguccaggccgucaaccgcuccgccgccaagggcgucacccuccuccuccccgagcccgaguggaccuacccccgccucuccugccccggcuccaccuuccagaaggcccuccucaucuccccccaccgcuucggcgagaccaagggcaacuccgccccccucaucauccgcgagcccuucaucgccugcggccccaccgagugcaagcacuucgcccucacccacuacgccgcccagcccggcggcuacuacaacggcacccgcgaggaccgcaacaagcuccgccaccucaucuccgucaagcucggcaagauccccaccgucgagaacuccaucuuccacauggccgccugguccggcuccgccugccacgacggcaaggaguggaccuacaucggcgucgacggccccgacaacaacgcccuccucaagaucaaguacggcgaggccuacaccgacaccuaccacuccuacgccaagaacauccuccgcacccaggaguccgccugcaacugcaucggcggcgacugcuaccucaugaucaccgacggccccgccuccggcaucuccgagugccgcuuccucaagauccgcgagggccgcaucaucaaggagaucuuccccaccggccgcgucaagcacaccgaggagugcaccugcggcuucgccuccaacaagaccaucgagugcgccugccgcgacaacuccuacaccgccaagcgccccuucgucaagcucaacgucgagaccgacaccgccgagauccgccucaugugcaccgagaccuaccucgacaccccccgccccaacgacggcuccaucaccggccccugcgaguccgacggcgacaagggcuccggcggcaucaagggcggcuucguccaccagcgcauggccuccaagaucggccgcugguacucccgcaccauguccaagaccaagcgcaugggcaugggccucuacgucaaguacgacggcgaccccuggaccgacuccgaggcccucgcccucuccggcgucauggucuccauggaggagcccggcugguacuccuucggcuucgagaucaaggacaagaagugcgacguccccugcaucggcaucgagaugguccacgacggcggcaagaccaccuggcacuccgccgccaccgccaucuacugccucaugggcuccggccagcuccucugggacaccgucaccggcgucgacauggcccucuga

SEQ ID NO: 125808 - RNA, 1401 nt, Artificial Sequence
  derived and/or modified CDS sequence (opt2) from neuraminidase__InfluenzaB__AGX23516
augcuccccuccaccauccagacccucacccucuuccucaccuccggcggcguccuccucucccucuacgucuccgccucccucuccuaccuccucuacuccgacauccuccucaaguucucccagaccgagaucaccgcccccaucaugccccucgacugcgccaacgccuccaacguccaggccgucaaccgcuccgccgccaagggcgucacccuccuccuccccgagcccgaguggaccuacccccgccucuccugccccggcuccaccuuccagaaggcccuccucaucuccccccaccgcuucggcgagaccaagggcaacuccgccccccucaucauccgcgagcccuucaucgccugcggccccaccgagugcaagcacuucgcccucacccacuacgccgcccagcccggcggcuacuacaacggcacccgcgaggaccgcaacaagcuccgccaccucaucuccgucaagcucggcaagauccccaccgucgagaacuccaucuuccacauggccgccugguccggcuccgccugccacgacggcaaggaguggaccuacaucggcgucgacggccccgacuccaacgcccuccucaagaucaaguacggcgaggccuacaccgacaccuaccacuccuacgccaagaacauccuccgcacccaggaguccgccugcaacugcaucggcggcgacugcuaccucaugaucaccgacggccccgccuccggcgucuccgagugccgcuuccucaagauccgcgagggccgcaucaucaaggagaucuuccccaccggccgcgucaagcacaccgaggagugcaccugcggcuucgccuccaacaagaccaucgagugcgccugccgcgacaacuccuacaccgccaagcgccccuucgucaagcucaacgucgagaccgacaccgccgagauccgccucaugugcaccgagaccuaccucgacaccccccgccccaacgacggcuccaucaccggccccugcgaguccgacggcgacaagggcuccggcggcaucaagggcggcuucguccaccagcgcauggccuccaagaucggccgcugguacucccgcaccauguccaaggccaagcgcaugggcaugggccucuacgucaaguacgacggcgaccccuggaccgacuccgaggcccucgcccucuccggcgucauggucuccauggaggagcccggcugguacuccuucggcuucgagaucaaggacaagaagugcgacguccccugcaucggcaucgagaugguccacgacggcggcaagaccaccuggcacuccgccgccaccgccaucuacugccucaugggcuccggccagcuccucugggacaccgucaccggcgucgacauggcccucuga

SEQ ID NO: 125809 - RNA, 1401 nt, Artificial Sequence; identical to SEQ ID NO: 124824
  derived and/or modified CDS sequence (opt2) from neuraminidase__InfluenzaB__AGX23527

SEQ ID NO: 125810 - RNA, 1401 nt, Artificial Sequence
  derived and/or modified CDS sequence (opt2) from neuraminidase__InfluenzaB__AGX23538
augcuccccuccaccauccagacccucacccucuuccucaccuccggcggcguccuccucucccucuacgucuccgccucccucuccuaccuccucuacuccgacauccuccucaaguucucccagaccgagaucaccgcccccaucaugccccucgacugcgccaacgccuccaacguccaggccgucaaccgcuccgccgccaagggcgucacccuccuccuccccaagcccgaguggaccuacccccgccucuccugccccggcuccaccuuccagaaggcccuccucaucuccccccaccgcuucggcgagaccaagggcaacuccgccccccucaucauccgcgagcccuucaucgccugcggccccaccgagugcaagcacuucgcccucacccacuacgccgcccagcccggcggcuacuacaacggcacccgcgaggaccgcaacaagcuccgccaccucaucuccgucaagcucggcaagauccccaccgucgagaacuccaucuuccacauggccgccugguccggcuccgccugccacgacggcaaggaguggaccuacaucggcgucgacggccccgacuccaacgcccuccucaagaucaaguacggcgaggccuacaccgacaccuaccacuccuacgccaagaacauccuccgcacccaggaguccgccugcaacugcaucggcggcgacugcuaccucaugaucaccgacggccccgccuccggcgucuccgagugccgcuuccucaagauccgcgagggccgcaucaucaaggagaucuuccccaccggccgcgucaagcacaccgaggagugcaccugcggcuucgccuccaacaagaccaucgagugcgccugccgcgacaacuccuacaccgccaagcgccccuucgucaagcucaacgucgagaccgacaccgccgagauccgccucaugugcaccgagaccuaccucgacaccccccgccccaacgacggcuccaucaccggccccugcgaguccgacggcgacaagggcuccggcggcaucaagggcggcuucguccaccagcgcauggccuccaagaucggccgcugguacucccgcaccauguccaccaccaagcgcaugggcaugggccucuacgucaaguacgacggcgaccccuggaccgacuccgaggcccucgcccucuccggcgucauggucuccauggaggagcccggcugguacuccuucggcuucgagaucaaggacaagaagugcgacguccccugcaucggcaucgagaugguccacgacggcggcaagaccaccuggcacuccgccgccaccgccaucuacugccucaugggcuccggccagcuccucugggacaccgucaccggcgucgacauggcccucuga

SEQ ID NO: 125811 - RNA, 1401 nt, Artificial Sequence
  derived and/or modified CDS sequence (opt2) from neuraminidase__InfluenzaB__AGX23549
augcuccccuccaccauccagacccucacccucuuccucaccuccggcggcguccuccucucccucuacgucuccgccucccucuccuaccuccucuacuccgacauccuccucaaguucucccagaccgagaucaccgcccccaucaugccccucgacugcgccaacgccuccaacguccaggccgucaaccgcuccgccgccaagggcgucacccuccuccuccccgagcccgaguggaccuacccccgccucuccugccccggcuccaccuuccagaaggcccuccucaucuccccccaccgcuucggcgagaccaagggcaacuccgccccccucaucauccgcgagcccuucaucgccugcggccccaccgagugcaagcacuucgcccucacccacuacgccgcccagcccggcggcuacuacaacggcacccgcgaggaccgcaacaagcuccgccaccucaucuccgucaagcucggcaagauccccaccgucgagaacuccaucuuccacauggccgccugguccggcuccgccugccacgacggcaaggaguggaccuacaucggcgucgacggccccgacuccaacgcccuccucaagaucaaguacggcgaggccuacaccgacaccuaccacuccuacgccaagaacauccuccgcacccaggaguccgccugcaacugcaucggcggcgacugcuaccucaugaucaccgacggccccgccuccggcgucuccgagugccgcuuccucaagauccgcgagggccgcaucaucaaggagaucuuccccaccggccgcgucaagcacaccgaggagugcaccugcggcuucgccuccaacaagaccaucgagugcgccugccgcgacaacuccuacaccgccaagcgccccuucgucaagcucaacgucgagaccgacaccgccgagauccgccucaugugcaccgagaccuaccucgacaccccccgccccaacgacggcuccaucaccggccccugcgaguccgacggcgacaagggcuccggcggcaucaagggcggcuucguccaccagcgcauggccuccaagaucggccgcugguacucccgcaccauguccaccaccaagcgcaugggcaugggccucuacgucaaguacgacggcgaccccuggaccgacuccgaggcccucgcccucuccggcgucauggucuccauggaggagcccggcugguacuccuucggcuucgagaucaaggacaagaagugcgacguccccugcaucggcaucgagaugguccacgacggcggcaagaccaccuggcacuccgccgccaccgccaucuacugccucaugggcuccggccagcuccucugggacaccgucaccggcgucgacauggcccucuga

SEQ ID NO: 125812 - RNA, 1401 nt, Artificial Sequence; identical to SEQ ID NO: 124824
  derived and/or modified CDS sequence (opt2) from neuraminidase__InfluenzaB__AGX23560

SEQ ID NO: 125813 - RNA, 1401 nt, Artificial Sequence; identical to SEQ ID NO: 125806
  derived and/or modified CDS sequence (opt2) from neuraminidase__InfluenzaB__AGX23571

SEQ ID NO: 125814 - RNA, 1401 nt, Artificial Sequence; identical to SEQ ID NO: 125806
  derived and/or modified CDS sequence (opt2) from neuraminidase__InfluenzaB__AGX23582

SEQ ID NO: 125815 - RNA, 1401 nt, Artificial Sequence
  derived and/or modified CDS sequence (opt2) from neuraminidase__InfluenzaB__AGX23593
augcuccccuccaccauccagacccucacccucuuccucaccuccggcggcguccuccucucccucuacgucuccgccucccucuccuaccuccucuacuccgacauccuccucaaguucucccagaccgagaucaccgcccccaucaugccccucgacugcgccaacgccuccaacguccaggccgucaaccgcuccgccgccaagggcgucacccuccuccuccccgagcccgaguggaccuacccccgccucuccugccccggcuccaccuuccagaaggcccuccucaucuccccccaccgcuucggcgagaccaagggcaacuccgccccccucaucauccgcgagcccuucaucgccugcggccccaccgagugcaagcacuucgcccucacccacuacgccgcccagcccggcggcuacuacaacggcacccgcgaggaccgcaacaagcuccgccaccucaucuccgucaagcucggcaagauccccaccgucgagaacuccaucuuccacauggccgccugguccggcuccgccugccacgacggcaaggaguggaccuacaucggcgucgacggccccgacuccaacgcccuccucaagaucaaguacggcgaggccuacaccgacaccuaccacuccuacgccaagaacauccuccgcacccaggaguccgccugcaacugcaucggcggcgacugcuaccucaugaucaccgacggccccgccuccggcaucuccgagugccgcuuccucaagauccgcgagggccgcaucaucaaggagaucuuccccaccggccgcgucaagcacaccgaggagugcaccugcggcuucgccuccaacaagaccaucgagugcgccugccgcgacaacuccuacaccgccaagcgccccuucgucaagcucaacgucgagaccgacaccgccgagauccgccucaugugcaccgagaccuaccucgacaccccccgccccaacgacggcuccaucaccggccccugcgaguccgacggcgacaagggcuccggcggcaucaagggcggcuucguccaccagcgcauggccuccaagaucggccgcugguacucccgcaccauguccaagaccaagcgcaugggcaugggccucuacgucaaguacgacggcgaccccuggaccgacuccgaggcccucacccucuccggcgucauggucuccauggaggagcccggcugguacuccuucggcuucgagaucaaggacaagaagugcgacguccccugcaucggcaucgagaugguccacgacggcggcaagaccaccuggcacuccgccgccaccgccaucuacugccucaugggcuccggccagcuccucugggacaccgucaccggcgucgacauggcccucuga

SEQ ID NO: 125816 - RNA, 1401 nt, Artificial Sequence; identical to SEQ ID NO: 124824
  derived and/or modified CDS sequence (opt2) from neuraminidase__InfluenzaB__AGX23604

SEQ ID NO: 125817 - RNA, 1401 nt, Artificial Sequence
  derived and/or modified CDS sequence (opt2) from neuraminidase__InfluenzaB__AGX23615
augcuccccuccaccauccagacccucacccucuuccucaccuccggcggcguccuccucucccucuacgucuccgccucccucuccuaccuccucuacuccgacauccuccucaaguucucccagaccgagaucaccacccccaucaugccccucgacugcgccaacgccuccaacguccaggccgucaaccgcuccgccgccaagggcgucacccuccuccuccccgagcccgaguggaccuacccccgccucuccugccccggcuccaccuuccagaaggcccuccucaucuccccccaccgcuucggcgagaccaagggcaacuccgccccccucaucauccgcgagcccuucaucgccugcggccccaccgagugcaagcacuucgcccucacccacuacgccgcccagcccggcggcuacuacaacggcacccgcgaggaccgcaacaagcuccgccaccucaucuccgucaagcucggcaagauccccaccgucgagaacuccaucuuccacauggccgccugguccggcuccgccugccacgacggcaaggaguggaccuacaucggcgucgacggccccgacuccaacgcccuccucaagaucaaguacggcgaggccuacaccgacaccuaccacuccuacgccaagaacauccuccgcacccaggaguccgccugcaacugcaucggcggcgacugcuaccucaugaucaccgacggccccgccuccggcaucuccgagugccgcuuccucaagauccgcgagggccgcaucaucaaggagaucuuccccaccggccgcgucaagcacaccgaggagugcaccugcggcuucgccuccaacaagaccaucgagugcgccugccgcgacaacuccuacaccgccaagcgccccuucgucaagcucaacgucgagaccgacaccgccgagauccgccucaugugcaccgagaccuaccucgacaccccccgccccaacgacggcuccaucaccggccccugcgaguccgacggcgacaagggcuccggcggcaucaagggcggcuucguccaccagcgcauggccuccaagaucggccgcugguacucccgcaccauguccaagaccaagcgcaugggcaugggccucuacgucaaguacgacggcgaccccuggaccgacuccgaggcccucgcccucuccggcgucauggucuccauggaggagcccggcugguacuccuucggcuucgagaucaaggacaagaagugcgacguccccugcaucggcaucgagaugguccacgacggcggcaagaccaccuggcacuccgccgccaccgccaucuacugccucaugggcuccggccagcuccucugggacaccgucaccggcgucgacauggcccucuga

SEQ ID NO: 125818 - RNA, 1401 nt, Artificial Sequence; identical to SEQ ID NO: 125806
  derived and/or modified CDS sequence (opt2) from neuraminidase__InfluenzaB__AGX23626

SEQ ID NO: 125819 - RNA, 1401 nt, Artificial Sequence; identical to SEQ ID NO: 125183
  derived and/or modified CDS sequence (opt2) from neuraminidase__InfluenzaB__AGX23637

SEQ ID NO: 125820 - RNA, 1401 nt, Artificial Sequence; identical to SEQ ID NO: 124824
  derived and/or modified CDS sequence (opt2) from neuraminidase__InfluenzaB__AGX23659

SEQ ID NO: 125821 - RNA, 1401 nt, Artificial Sequence; identical to SEQ ID NO: 125183
  derived and/or modified CDS sequence (opt2) from neuraminidase__InfluenzaB__AGX23670

SEQ ID NO: 125822 - RNA, 1401 nt, Artificial Sequence; identical to SEQ ID NO: 125183
  derived and/or modified CDS sequence (opt2) from neuraminidase__InfluenzaB__AGX23681

SEQ ID NO: 125823 - RNA, 1401 nt, Artificial Sequence; identical to SEQ ID NO: 125183
  derived and/or modified CDS sequence (opt2) from neuraminidase__InfluenzaB__AGX23692

SEQ ID NO: 125824 - RNA, 1401 nt, Artificial Sequence; identical to SEQ ID NO: 125183
  derived and/or modified CDS sequence (opt2) from neuraminidase__InfluenzaB__AGX23703

SEQ ID NO: 125825 - RNA, 1401 nt, Artificial Sequence
  derived and/or modified CDS sequence (opt2) from neuraminidase__InfluenzaB__AGX23714
augcuccccuccaccauccagacccucacccucuuccucaccuccggcggcguccuccucucccucuacgucuccgccucccucuccuaccuccucuacuccgacauccuccucaaguucucccagaccgagaucaccgcccccaucaugccccucgacugcgccaacgccuccaacguccaggccgucaaccgcuccgccgccaagggcgucacccuccuccuccccgagcccgaguggaccuacccccgccucuccugccccggcuccaccuuccagaaggcccuccucaucuccccccaccgcuucggcgagaccaagggcaacuccgccccccucaucauccgcgagcccuucaucgccugcggccccaccgagugcaagcacuucgcccucacccacuacgccgcccagcccggcggcuacuacaacggcacccgcgaggaccgcaacaagcuccgccaccucaucuccgucaagcucggcaagauccccaccgucgagaacuccaucuuccacauggccgccugguccggcuccgccugccacgacggcaaggaguggaccuacgucggcgucgacggccccgacuccaacgcccuccucaagaucaaguacggcgaggccuacaccgacaccuaccacuccuacgagaagaacauccuccgcacccaggaguccgccugcaacugcaucggcggcgacugcuaccucaugaucaccgacggccccgccuccggcaucuccgagugccgcuuccucaagauccgcgagggccgcaucaucaaggagaucuuccccaccggccgcgucaagcacaccgaggagugcaccugcggcuucgccuccaacaagaccaucgagugcgccugccgcgacaacuccuacaccgccaagcgccccuucgucaagcucaacgucgagaccgacaccgccgagauccgccucaugugcaccgagaccuaccucgacaccccccgccccaacgacggcuccaucaccggccccugcggcuccgacggcgacaagggcuccggcggcaucaagggcggcuucguccaccagcgcauggccuccaagaucggccgcugguacucccgcaccauguccaagaccaagcgcaugggcaugggccucuacgucaaguacgacggcgaccccuggaccgacuccgaggcccucgcccucuccggcgucauggucuccauggacgagcccggcugguacuccuucggcuucgagaucaaggacaagaagugcgacguccccugcaucggcaucgagaugguccacgacggcggcaagaccaccuggcacuccgccgccaccgccaucuacugccucaugggcuccggccagcuccucugggacaccgucaccggcgucgacauggcccucuga

SEQ ID NO: 125826 - RNA, 1401 nt, Artificial Sequence; identical to SEQ ID NO: 125183
  derived and/or modified CDS sequence (opt2) from neuraminidase__InfluenzaB__AGX23725

SEQ ID NO: 125827 - RNA, 1401 nt, Artificial Sequence; identical to SEQ ID NO: 125806
  derived and/or modified CDS sequence (opt2) from neuraminidase__InfluenzaB__AGX23736

SEQ ID NO: 125828 - RNA, 1401 nt, Artificial Sequence; identical to SEQ ID NO: 125183
  derived and/or modified CDS sequence (opt2) from neuraminidase__InfluenzaB__AGX23747

SEQ ID NO: 125829 - RNA, 1401 nt, Artificial Sequence; identical to SEQ ID NO: 125183
  derived and/or modified CDS sequence (opt2) from neuraminidase__InfluenzaB__AGX23758

SEQ ID NO: 125830 - RNA, 1401 nt, Artificial Sequence; identical to SEQ ID NO: 125806
  derived and/or modified CDS sequence (opt2) from neuraminidase__InfluenzaB__AGX23769

SEQ ID NO: 125831 - RNA, 1401 nt, Artificial Sequence
  derived and/or modified CDS sequence (opt2) from neuraminidase__InfluenzaB__AGX23780
augcuccccuccaccauccagacccucacccuccuccucaccuccggcggcguccuccucucccucuacgucuccgccucccucuccuaccuccucuacuccgacauccuccucaaguucucccagaccgagaucaccgcccccaucaugccccucgacugcgccaacgccuccaacguccaggccgucaaccgcuccgccgccaagggcgucacccuccuccuccccgagcccgaguggaccuacccccgccucuccugccccggcuccaccuuccagaaggcccuccucaucuccccccaccgcuucggcgagaccaagggcaacuccgccccccucaucauccgcgagcccuucaucgccugcggccccaccgagugcaagcacuucgcccucacccacuacgccgcccagcccggcggcuacuacaacggcacccgcgaggaccgcaacaagcuccgccaccucaucuccgucaagcucggcaagauccccaccgucgagaacuccaucuuccacauggccgccugguccggcuccgccugccacgacggcaaggaguggaccuacaucggcgucgacggccccgacuccaacgcccuccucaagaucaaguacggcgaggccuacaccgacaccuaccacuccuacgccaagaacauccuccgcacccaggaguccgccugcaacugcaucggcggcgacugcuaccucaugaucaccgacggccccgccuccggcgucuccgagugccgcuuccucaagauccgcgagggccgcaucaucaaggagaucuuccccaccggccgcgucaagcacaccgaggagugcaccugcggcuucgccuccaacaagaccaucgagugcgccugccgcgacaacuccuacaccgccaagcgccccuucgucaagcucaacgucgagaccgacaccgccgagauccgccucaugugcaccgagaccuaccucgacaccccccgccccaacgacggcuccaucaccggccccugcgaguccgacggcgacaagggcuccggcggcaucaagggcggcuucguccaccagcgcauggccuccaagaucggccgcugguacucccgcaccauguccaagaccaagcgcaugggcaugggccucuacgucaaguacgacggcgaccccuggaccgacuccgaggcccucgcccucuccggcgucauggucuccauggaggagcccggcugguacuccuucggcuucgagaucaaggacaagaagugcgacguccccugcaucggcaucgagaugguccacgacggcggcaagaccaccuggcacuccgccgccaccgccaucuacugccucaugggcuccggccagcuccucugggacaccgucaccggcgucgacauggcccucuga

SEQ ID NO: 125832 - RNA, 1401 nt, Artificial Sequence
  derived and/or modified CDS sequence (opt2) from neuraminidase__InfluenzaB__AGX23791
augcuccccuccaccauccagacccucacccucuuccucaccuccggcggcguccuccucucccucuacgucuccgccucccucuccuaccuccucuacuccgacauccuccucaaguucucccagaccgagaucaccgcccccaucaugccccucgacugcgccaacgccuccaacgcccaggccgucaaccgcuccgccgccaagggcgucacccuccuccuccccgagcccgaguggaccuacccccgccucuccugccccggcuccaccuuccagaaggcccuccucaucuccccccaccgcuucggcgagaccaagggcaacuccgccccccucaucauccgcgagcccuucaucgccugcggccccaccgagugcaagcacuucgcccucacccacuacgccgcccagcccggcggcuacuacaacggcacccgcgaggaccgcaacaagcuccgccaccucaucuccgucaagcucggcaagauccccaccgucgagaacuccaucuuccacauggccgccugguccggcuccgccugccacgacggcaaggaguggaccuacaucggcgucgacggccccgacuccaacgcccuccucaagaucaaguacggcgaggccuacaccgacaccuaccacuccuacgccaagaacauccuccgcacccaggaguccgccugcaacugcaucggcggcgacugcuaccucaugaucaccgacggccccgccuccggcgucuccgagugccgcuuccucaagauccgcgagggccgcaucaucaaggagaucuuccccaccggccgcgucaagcacaccgaggagugcaccugcggcuucgccuccaacaagaccaucgagugcgccugccgcgacaacuccuacaccgccaagcgccccuucgucaagcucaacgucgagaccgacaccgccgagauccgccucaugugcaccgagaccuaccucgacaccccccgccccaacgacggcuccaucaccggccccugcgaguccgacggcgacaagggcuccggcggcaucaagggcggcuucguccaccagcgcauggccuccaagaucggccgcugguacucccgcaccauguccaagaccaagcgcaugggcaugggccucuacgucaaguacgacggcgaccccuggaccgacuccgaggcccucgcccucuccggcgucauggucuccauggaggagcccggcugguacuccuucggcuucgagaucaaggacaagaagugcgacguccccugcaucggcaucgagaugguccacgacggcggcaagaccaccuggcacuccgccgccaccgccaucuacugccucaugggcuccggccagcuccucugggacaccgucaccggcgucgacauggcccucuga

SEQ ID NO: 125833 - RNA, 1401 nt, Artificial Sequence; identical to SEQ ID NO: 125806
  derived and/or modified CDS sequence (opt2) from neuraminidase__InfluenzaB__AGX23802

SEQ ID NO: 125834 - RNA, 1401 nt, Artificial Sequence; identical to SEQ ID NO: 125806
  derived and/or modified CDS sequence (opt2) from neuraminidase__InfluenzaB__AGX23813

SEQ ID NO: 125835 - RNA, 1401 nt, Artificial Sequence; identical to SEQ ID NO: 125806
  derived and/or modified CDS sequence (opt2) from neuraminidase__InfluenzaB__AGX23824

SEQ ID NO: 125836 - RNA, 1401 nt, Artificial Sequence; identical to SEQ ID NO: 125806
  derived and/or modified CDS sequence (opt2) from neuraminidase__InfluenzaB__AGX23846

SEQ ID NO: 125837 - RNA, 1401 nt, Artificial Sequence; identical to SEQ ID NO: 124824
  derived and/or modified CDS sequence (opt2) from neuraminidase__InfluenzaB__AGX23857

SEQ ID NO: 125838 - RNA, 1401 nt, Artificial Sequence; identical to SEQ ID NO: 125806
  derived and/or modified CDS sequence (opt2) from neuraminidase__InfluenzaB__AGX23868

SEQ ID NO: 125839 - RNA, 1401 nt, Artificial Sequence
  derived and/or modified CDS sequence (opt2) from neuraminidase__InfluenzaB__AGX23879
augcuccccuccaccauccagacccucacccucuuccucaccuccggcggcguccuccucucccucuacgucuccgccucccucuccuaccuccucuacuccgacauccuccucaaguucucccagaccgagaucaccgcccccaucaugccccucgacugcgccaacgccuccaacguccaggccgucaaccgcuccgccgccaagggcgucacccuccuccuccccgagcccgaguggaccuacccccgccucuccugccccggcuccaccuuccagaaggcccuccucaucuccccccaccgcuucggcgagaccaagggcaacuccgccccccucaucauccgcgagcccuucaucgccugcggccccaccgagugcaagcacuucgcccucacccacuacgccgcccagcccggcggcuacuacaacggcacccgcgaggaccgcaacaagcuccgccaccucaucuccgucaagcucggcaagauccccaccgucgagaccuccaucuuccacauggccgccugguccggcuccgccugccacgacggcaaggaguggaccuacaucggcgucgacggccccgacuccaacgcccuccucaagaucaaguacggcgaggccuacaccgacaccuaccacuccuacgccaagaacauccuccgcacccaggaguccgccugcaacugcaucggcggcgacugcuaccucaugaucaccgacggccccgccuccggcgucuccgagugccgcuuccucaagauccgcgagggccgcaucaucaaggagaucuuccccaccggccgcgucaagcacaccgaggagugcaccugcggcuucgccuccaacaagaccaucgagugcgccugccgcgacaacuccuacaccgccaagcgccccuucgucaagcucaacgucgagaccgacaccgccgagauccgccucaugugcaccgagaccuaccucgacaccccccgccccaacgacggcuccaucaccggccccugcgaguccgacggcgacaagggcuccggcggcaucaagggcggcuucguccaccagcgcauggccuccaagaucggccgcugguacucccgcaccauguccaagaccaagcgcaugggcaugggccucuacgucaaguacgacggcgaccccuggaccgacuccgaggcccucgcccucuccggcgucauggucuccauggaggagcccggcugguacuccuucggcuucgagaucaaggacaagaagugcgacguccccugcaucggcaucgagaugguccacgacggcggcaagaccaccuggcacuccgccgccaccgccaucuacugccucaugggcuccggccagcuccucugggacaccgucaccggcgucgacauggcccucuga

SEQ ID NO: 125840 - RNA, 1401 nt, Artificial Sequence; identical to SEQ ID NO: 125806
  derived and/or modified CDS sequence (opt2) from neuraminidase__InfluenzaB__AGX23890

SEQ ID NO: 125841 - RNA, 1401 nt, Artificial Sequence; identical to SEQ ID NO: 124824
  derived and/or modified CDS sequence (opt2) from neuraminidase__InfluenzaB__AGX23901

SEQ ID NO: 125842 - RNA, 1401 nt, Artificial Sequence
  derived and/or modified CDS sequence (opt2) from neuraminidase__InfluenzaB__AGX23912
augcuccccuccaccauccagacccucacccucuuccucaccuccggcggcguccuccucucccucuacgucuccgccucccucuccuaccuccucuacuccgacauccuccucaaguucucccagaccgagaucaccgcccccaucaugccccucgacugcgccaacgccuccaacguccaggccgucaaccgcuccgccgccaagggcgucacccuccuccuccccgagcccgaguggaccuacccccgccucuccugccccggcuccaccuuccagaaggcccuccucaucuccccccaccgcuucggcgagaccaagggcaacuccgccccccucaucauccgcgagcccuucaucgccugcggccccaccgagugcaagcacuucgcccucacccacuacgccgcccagcccggcggcuacuacaacggcacccgcgaggaccgcaaccgccuccgccaccucaucuccgucaagcucggcaagauccccaccgucgagaacuccaucuuccacauggccgccugguccggcuccgccugccacgacggcaaggaguggaccuacgucggcgucgacggccccgacuccaacgcccuccucaagaucaaguacggcgaggccuacaccgacaccuaccacuccuacgccaagaacauccuccgcacccaggaguccgccugcaacugcaucggcggcgacugcuaccucaugaucaccgacggccccgccuccggcaucuccgagugccgcuuccucaagauccgcgagggccgcaucaucaaggagaucuuccccaccggccgcgucaagcacaccgaggagugcaccugcggcuucgccuccaacaagaccaucgagugcgccugccgcgacaacuccuacaccgccaagcgccccuucgucaagcucaacgucgagaccgacaccgccgagauccgccucaugugcaccgagaccuaccucgacaccccccgccccaacgacggcuccaucaccggccccugcggcuccgacggcgacaagggcuccggcggcaucaagggcggcuucguccaccagcgcauggccuccaagaucggccgcugguacucccgcaccauguccaagaccaagcgcaugggcaugggccucuacgucaaguacgacggcgaccccuggaccgacuccgaggcccucgcccucuccggcgucauggucuccauggacgagcccggcugguacuccuucggcuucgagaucaaggacaagaagugcgacguccccugcaucggcaucgagaugguccacgacggcggcaagaccaccuggcacuccgccgccaccgccaucuacugccucaugggcuccggccagcuccucugggacaccgucaccggcgucgacauggcccucuga

SEQ ID NO: 125843 - RNA, 1401 nt, Artificial Sequence; identical to SEQ ID NO: 124996
  derived and/or modified CDS sequence (opt2) from neuraminidase__InfluenzaB__AGX23934

SEQ ID NO: 125844 - RNA, 1401 nt, Artificial Sequence
  derived and/or modified CDS sequence (opt2) from neuraminidase__InfluenzaB__AGX23945
augcuccccuccaccauccagacccucacccucuuccucaccuccggcggcguccuccucucccucuacgucuccgccucccucuccuaccuccucuacuccgacauccuccucaaguucucccagaccgagaucaccgcccccaucaugccccucgacugcgccaacgccuccaacguccaggccgucaaccgcuccgccgccaagggcgucacccuccuccuccccgagcccgaguggaccuacccccgccucuccugccccggcuccaccuuccagaaggcccuccucaucuccccccaccgcuucggcgagaccaagggcaacuccgccccccucaucauccgcgagcccuucaucgccugcggccccaccgagugcaagcacuucgcccucacccacuacgccgcccagcccggcggcuacuacaacggcacccgcgaggaccgcaacaagcuccgccaccucaucuccgucaagcucggcaagauccccaccgucgagaacuccaucuuccacauggccgccugguccggcuccgccugccacgacggcaaggaguggaccuacgucggcgucgacggccccgacuccaacgcccuccucaagaucaaguacggcgaggccuacaccgacaccuaccacuccuacgccaagaacauccuccgcacccaggaguccgccugcaacugcaucggcggcgacugcuaccucaugaucaccgacggccccgccuccggcaucuccgagugccgcuuccucaagauccgcgagggccgcaucaucaaggagaucuuccccaccggccgcaucaagcacaccgaggagugcaccugcggcuucgccuccaacaagaccaucgagugcgccugccgcgacaacuccuacaccgccaagcgccccuucgucaagcucaacgucgagaccgacaccgccgagauccgccucaugugcaccgagaccuaccucgacaccccccgccccaacgacggcuccaucaccggccccugcggcuccgacggcgacaagggcuccggcggcaucaagggcggcuucguccaccagcgcauggccuccaagaucggccgcugguacucccgcaccauguccaagaccaagcgcaugggcaugggccucuacgucaaguacgacggcgaccccuggaccgacuccgaggcccucgcccucuccggcgucauggucuccauggacgagcccggcugguacuccuucggcuucgagaucaaggacaagaagugcgacguccccugcaucggcaucgagaugguccacgacggcggcaagaccaccuggcacuccgccgccaccgccaucuacugccucaugggcuccggccagcuccucugggacaccgucaccggcgucgacauggcccucuga

SEQ ID NO: 125845 - RNA, 1401 nt, Artificial Sequence
  derived and/or modified CDS sequence (opt2) from neuraminidase__InfluenzaB__AGX23956
augcuccccuccaccauccagacccucacccucuuccucaccuccggcggcguccuccucucccucuacgucuccgccucccucuccuaccuccucuacuccgacauccuccucaaguucucccagaccgagaucaccgcccccaucaugccccucgacugcgccaacgccuccaacguccaggccgucaaccgcuccgccgccaagggcgucacccuccuccuccccgagcccgaguggaccuacccccgccucuccugccccggcuccaccuuccagaaggcccuccucaucuccccccaccgcuucggcgagaccaagggcaacuccgccccccucaucauccgcgagcccuucaucgccugcggccccaccgagugcaagcacuucgcccucacccacuacgccgcccagcccggcggcuacuacaacggcacccgcgaggaccgcaacaagcuccgccaccucaucuccgucaagcucggcaagauccccaccgucgagaacuccaucuuccacauggccgccugguccggcuccgccugccacgacggcaaggaguggaccuacaucggcaucgacggccccgacuccaacgcccuccucaagaucaaguacggcgaggccuacaccgacaccuaccacuccuacgccaagaacauccuccgcacccaggaguccgccugcaacugcaucggcggcgacugcuaccucaugaucaccgacggccccgccuccggcgucuccgagugccgcuuccucaagauccgcgagggccgcaucaucaaggagaucuuccccaccggccgcgucaagcacaccgaggagugcaccugcggcuucgccuccaacaagaccaucgagugcgccugccgcgacaacuccuacaccgccaagcgccccuucgucaagcucaacgucgagaccgacaccgccgagauccgccucaugugcaccgagaccuaccucgacaccccccgccccaacgacggcuccaucaccggccccugcgaguccgacggcgacaagggcuccggcggcaucaagggcggcuucguccaccagcgcauggccuccaagaucggccgcugguacucccgcaccauguccaagaccaagcgcaugggcaugggccucuacgucaaguacgacggcgaccccuggaccgacuccgaggcccucgcccucuccggcgucauggucuccauggaggagcccggcugguacuccuucggcuucgagaucaaggacaagaagugcgacguccccugcaucggcaucgagaugguccacgacggcggcaagaccaccuggcacuccgccgccaccgccaucuacugccucaugggcuccggccagcuccucugggacaccgucaccggcgucgacauggcccucuga

SEQ ID NO: 125846 - RNA, 1401 nt, Artificial Sequence; identical to SEQ ID NO: 125183
  derived and/or modified CDS sequence (opt2) from neuraminidase__InfluenzaB__AGX23967

SEQ ID NO: 125847 - RNA, 1401 nt, Artificial Sequence; identical to SEQ ID NO: 124996
  derived and/or modified CDS sequence (opt2) from neuraminidase__InfluenzaB__AGX23978

SEQ ID NO: 125848 - RNA, 1401 nt, Artificial Sequence
  derived and/or modified CDS sequence (opt2) from neuraminidase__InfluenzaB__AGX23989
augcuccccuccaccauccagacccucacccucuuccucaccuccggcggcguccuccucucccucuacgucuccgccucccucuccuaccuccucuacuccgacauccuccucaaguucucccagaccgagaucaccgcccccaucaugccccucgacugcgccaacgccuccaacguccaggccgucaaccgcuccgccgccaagggcgucacccuccuccuccccgagcccgaguggaccuacccccgccucuccugccccggcuccaccuuccagaaggcccuccucaucuccccccaccgcuucggcgagaccaagggcaacuccgccccccucaucauccgcgagcccuucaucgccugcggccccaccgagugcaagcacuucgcccucacccacuacgccgcccagcccggcggcuacuacaacggcacccgcgaggaccgcaacaagcuccgccaccucaucuccgucaagcucggcaagauccccaccgucgagaacuccaucuuccacauggccgccugguccggcuccgccugccacgacggcaaggaguggaccuacaucggcgucgacggccccgacuccaacgcccuccucaagaucaaguacggcgaggccuacaccgacaccuaccacuccuacgccaagaacauccuccgcacccaggaguccgccugcaacugcaucggcggcgacugcuaccucaugaucaccgacggccccgccuccggcaucuccgagugccgcuuccucaagauccgcgagggccgcaucaucaaggagaucuuccccaccggccgcgucaagcacaccgaggagugcaccugcggcuucgccuccaacaagaccaucgagugcgccugccgcgacaaccgcuacaccgccaagcgccccuucgucaagcucaacgucgagaccgacaaggccgagauccgccucaugugcaccgagaccuaccucgacaccccccgccccaacgacggcuccaucaccggccccugcgaguccgacggcgacaagggcuccggcggcaucaagggcggcuucguccaccagcgcauggccuccaagaucggccgcugguacucccgcaccauguccaagaccaagcgcaugggcaugggccucuacgucaaguacgacggcgaccccuggaccgacuccggcgcccucgcccucuccggcgucauggucuccaucgaggagcccggcugguacuccuucggcuucgagaucaaggacaagaagugcgacguccccugcaucggcaucgagaugguccacgacggcggcaagaccaccuggcacuccgccgccaccgccaucuacugccucaugggcuccggccagcuccucugggacaccgucaccggcgucgacauggcccucuga

SEQ ID NO: 125849 - RNA, 1401 nt, Artificial Sequence; identical to SEQ ID NO: 125806
  derived and/or modified CDS sequence (opt2) from neuraminidase__InfluenzaB__AGX24000

SEQ ID NO: 125850 - RNA, 1401 nt, Artificial Sequence
  derived and/or modified CDS sequence (opt2) from neuraminidase__InfluenzaB__AGX24011
augcuccccuccaccauccagacccucacccucuuccucaccuccggcggcguccuccucucccucuacgucuccgccucccucuccuaccuccucuacuccgacauccuccucaaguucucccagaccgagaucaccgcccccaucaugccccucgacuacgccaacgccuccaacguccaggccgucaaccacuccgccgccaagggcgucacccuccuccuccccgagcccgaguggaccuacccccgccucuccugccccggcuccaccuuccagaaggcccuccucaucuccccccaccgcuucggcgagaccaagggcaacuccgccccccucaucauccgcgagcccuucaucgccugcggccccaccgagugcaagcacuucgcccucacccacuacgccgcccagcccggcggcuacuacaacggcacccgcgaggaccgcaacaagcuccgccaccucaucuccgucaagcucggcaagauccccaccgucgagaacuccaucuuccacauggccgccugguccggcuccgccugccacgacggcaaggaguggaccuacaucggcgucgacggccccgacuccaacgcccuccucaagaucaaguacggcgaggccuacaucgacaccuaccacuccuacgccaagaacauccuccgcacccaggaguccgccugcaacugcaucggcggcgacugcuaccucaugaucaccgacggccccgccuccggcaucuccgagugccgcuuccucaagauccgcgagggccgcaucaucaaggagaucuuccccaccggccgcgucaagcacaccgaggagugcaccugcggcuucgccuccaacaagaccaucgagugcgccugccgcgacaacuccuacaccgccaagcgccccuucgucaagcucaacgucgagaccgacaccgccgagauccgccucaugugcaccgagaccuaccucgacaccccccgccccaacgacggcuccaucaccggccccugcgaguccgacggcgacaagggcuccggcggcaucaagggcggcuucguccaccagcgcauggccuccaagaucggccgcugguacucccgcaccauguccaagaccaagcgcaugggcaugggccucuacgucaaguacgacggcgaccccuggaccgacuccgaggcccucgcccucuccggcgucauggucuccauggaggagcccggcugguacuccuucggcuucgagaucaaggacaagaagugcgacguccccugcaucggcaucgagaugguccacgacggcggcaagaccaccuggcacuccgccgccaccgccaucuacugccucaugggcuccggccagcuccucugggacaccgucaccggcgucgacauggcccucuga

SEQ ID NO: 125851 - RNA, 1401 nt, Artificial Sequence; identical to SEQ ID NO: 124996
  derived and/or modified CDS sequence (opt2) from neuraminidase__InfluenzaB__AGX24022

SEQ ID NO: 125852 - RNA, 1401 nt, Artificial Sequence
  derived and/or modified CDS sequence (opt2) from neuraminidase__InfluenzaB__AGX24033
augcuccccuccaccauccagacccucacccucuuccucaccuccggcggcguccuccucucccucuacgucuccgccucccucuccuaccuccucuacuccgacauccuccucaaguucucccagaccgagaucaccgcccagaucaugccccucgacugcgccaacgccuccaacguccaggccgucaaccgcuccgccgccaagggcgucacccuccuccuccccgagcccgaguggaccuacccccgccucuccugccccggcuccaccuuccagaaggcccuccucaucuccccccaccgcuucggcgagaccaagggcaacuccgccccccucaucauccgcgagcccuucaucgccugcggccccaccgagugcaagcacuucgcccucacccacuacgccgcccagcccggcggcuacuacaacggcacccgcgaggaccgcaacaagcuccgccaccucaucuccgucaagcucggcaagauccccaccgucgagaacuccaucuuccacauggccgccugguccggcuccgccugccacgacggcaaggaguggaccuacaucggcgucgacggccccgacuccaacgcccuccucaagaucaaguacggcgaggccuacaccgacaccuaccacuccuacgccaagaacauccuccgcacccaggaguccgccugcaacugcaucggcggcgacugcuaccucaugaucaccgacggccccgccuccggcaucuccgagugccgcuuccucaagauccgcgagggccgcaucaucaaggagaucuuccccaccggccgcgucaagcacaccgaggagugcaccugcggcuucgccuccaacaagaccaucgagugcgccugccgcgacaaccgcuacaccgccaagcgccccuucgucaagcucaacgucgagaccgacaaggccgagauccgccucaugugcaccgagaccuaccucgacaccccccgccccaacgacggcuccaucaccggccccugcgaguccgacggcgacaagggcuccggcggcaucaagggcggcuucguccaccagcgcauggccuccaagaucggccgcugguacucccgcaccauguccaagaccaagcgcaugggcaugggccucuacgucaaguacgacggcgaccccuggaccgacuccggcgcccucgcccucuccggcgucauggucuccaucgaggagcccggcugguacuccuucggcuucgagaucaaggacaagaagugcgacguccccugcaucggcaucgagaugguccacgacggcggcaagaccaccuggcacuccgccgccaccgccaucuacugccucaugggcuccggccagcuccucugggacaccgucaccggcgucgacauggcccucuga

SEQ ID NO: 125853 - RNA, 1401 nt, Artificial Sequence; identical to SEQ ID NO: 124996
  derived and/or modified CDS sequence (opt2) from neuraminidase__InfluenzaB__AGX24044

SEQ ID NO: 125854 - RNA, 1401 nt, Artificial Sequence
  derived and/or modified CDS sequence (opt2) from neuraminidase__InfluenzaB__AGX24055
augcuccccuccaccauccagacccucacccucuuccucaccuccggcggcguccuccucucccucuacgucuccgccucccucuccuaccuccucuacuccgacauccuccucaaguucucccagaccgagaucaccgcccccaucaugccccucgacugcgccaacgccuccaacguccaggccgucaaccgcuccgccaccaagggcgucacccuccuccuccccgagcucgaguggaccuacccccgccucuccugccccggcuccaccuuccagaaggcccuccucaucuccccccaccgcuucggcgagaccaagggcaacuccgccccccucaucauccgcgagcccuucgucgccugcggccccaccgagugcaagcacuucgcccucacccacuacgccgcccagcccggcggcuacuacaacggcacccgcgaggaccgcaacaagcuccgccaccucaucuccgucaagcucggcaagauccccaccgucgagaacuccaucuuccacauggccgccugguccggcuccgccugccacgacggcaaggaguggaccuacaucggcgucgacggccccaacuccaacgcccuccucaagaucaaguacggcgaggccuacaccgacaccuaccacuccuacgccaagaacauccuccgcacccaggaguccgccugcaacugcaucggcggcgacugcuaccucaugaucaccgacggccccgccuccggcgucuccgagugccgcuuccucaagauccgcgagggccgcaucaucaaggagaucuuccccaccggccgcgucaagcacaccgaggagugcaccugcggcuucgccuccaacaagaccaucgagugcgccugccgcgacaacuccuacaccgccaagcgccccuucgucaagcucaacgucgagaccgacaccgccgagauccgccucaugugcaccgagaccuaccucgacaccccccgccccaacgacggcuccaucaccggccccugcgaguccgacggcgacaagggcuccggcggcaucaagggcggcuucguccaccagcgcauggccuccaagaucggccgcugguacucccgcaccauguccaagaccaagcgcaugggcaugggccucuacgucaaguacgacggcgaccccuggaccgacuccgaggcccucgcccucuccggcgucauggucuccauggaggagcccggcugguacuccuucggcuucgagaucaaggacaagaagugcgacguccccugcaucggcaucgagaugguccacgacggcggcaagaccaccuggcacuccgccgccaccgccaucuacugccucaugggcuccggccagcuccucugggacaccgucaccggcgucgacauggcccucuga

SEQ ID NO: 125855 - RNA, 1401 nt, Artificial Sequence; identical to SEQ ID NO: 124853
  derived and/or modified CDS sequence (opt2) from neuraminidase__InfluenzaB__AGX24066

SEQ ID NO: 125856 - RNA, 1401 nt, Artificial Sequence
  derived and/or modified CDS sequence (opt2) from neuraminidase__InfluenzaB__AGX24077
augcuccccuccaccauccagacccucacccucuuccucaccuccggcggcguccuccucucccucuacgucuccgccucccucuccuaccuccucuacuccgacauccuccucaaguucucccagaccgagaucaccgcccccaucaugccccucgacugcgccaacgccuccaacguccaggccgucaaccgcuccgccgccaagggcgucacccuccuccuccccgagcccgaguggaccuacccccgccucuccugccccggcuccaccuuccagaaggcccuccucaucuccccccaccgcuucggcgagaccaagggcaacuccgccccccucaucauccgcgagcccuucaucgccugcggccccaccgagugcaagcacuucgcccucacccacuacgccgcccagcccggcggcuacuacaacggcacccgcgaggaccgcaacaagcuccgccaccucaucuccgucaagcucggcaagauccccaccgucgagaacuccaucuuccacauggccgccugguccggcuccgccugccacgacggcaaggaguggaccuacaucggcgucgacggccccgacuccaacgcccuccucaagaucaaguacggcgaggccuacaccgacaccuaccacuccuacgccaagaacauccuccgcacccaggaguccgccugcaacugcaucggcggcaacugcuaccucaugaucaccgacggccccgccuccggcaucuccgagugccgcuuccucaagauccgcgagggccgcaucaucaaggagaucuuccccaccggccgcgucaagcacaccgaggagugcaccugcggcuucgccuccaacaagaccaucgagugcgccugccgcgacaaccgcuacaccgccaagcgccccuucgucaagcucaacgucgagaccgacaaggccgagauccgccucaugugcaccgagaccuaccucgacaccccccgccccaacgacggcuccaucaccggccccugcgaguccgacggcgacaagggcuccggcggcaucaagggcggcuucguccaccagcgcauggccuccaagaucggccgcugguacucccgcaccauguccaagaccaagcgcaugggcaugggccucuacgucaaguacgacggcgaccccugggccgacuccggcgcccucgcccucuccggcgucauggucuccaucgaggagcccggcugguacuccuucggcuucgagaucaaggacaagaagugcgacguccccugcaucggcaucgagaugguccacgacggcggcaagaccaccuggcacuccgccgccaccgccaucuacugccucaugggcuccggccagcuccucugggacaccgucaccggcgucgacauggcccucuga

SEQ ID NO: 125857 - RNA, 1401 nt, Artificial Sequence
  derived and/or modified CDS sequence (opt2) from neuraminidase__InfluenzaB__AGX24088
augcuccccuccaccauccagacccucacccucuucaucaccuccggcggcguccuccucucccucuacgucuccgccucccucuccuaccuccucuacuccgacauccuccucaaguucucccagaccgagaucaccgcccccaucaugccccucgacugcgccaacgccuccaacguccaggccgucaaccgcuccgccgccaagggcgucacccuccuccuccccgagcccgaguggaccuacccccgccucuccugccccggcuccaccuuccagaaggcccuccucaucuccccccaccgcuucggcgagaccaagggcaacuccgccccccucaucauccgcgagcccuucaucgccugcggccccaccgagugcaagcacuucgcccucacccacuacgccgcccagcccggcggcuacuacaacggcacccgcgaggaccgcaacaagcuccgccaccucaucuccgucaagcucggcaagauccccaccgucgagaacuccaucuuccacauggccgccugguccggcuccgccugccacgacggcaaggaguggaccuacgucggcgucgacggccccgacuccgacgcccuccucaagaucaaguacggcgaggccuacaccgacaccuaccacuccuacgccaagaacauccuccgcacccaggaguccgccugcaacugcaucggcggcgacugcuaccucaugaucaccgacggccccgccuccggcaucuccgagugccgcuuccucaagauccgcgagggccgcaucaucaaggagaucuuccccaccggccgcgucaagcacaccgaggagugcaccugcggcuucgccuccaacaagaccaucgagugcgccugccgcgacaacuccuacaccgccaagcgccccuucgucaagcucaacgucgagaccgacaccgccgagauccgccucaugugcaccgagaccuaccucgacaccccccgccccaacgacggcuccaucaccggccccugcggcuccgacggcgacaagggcuccggcggcaucaagggcggcuucguccaccagcgcauggccuccaagaucggccgcugguacucccgcaccauguccaagaccaagcgcaugggcaugggccucuacgucaaguacgacggcgaccccuggaccgacuccgaggcccucgcccucuccggcgucauggucuccauggacgagcccggcugguacuccuucggcuucgagaucaaggacaagaagugcgacguccccugcaucggcaucgagaugguccacgacggcggcaagaccaccuggcacuccgccgccaccgccaucuacugccucaugggcuccggccagcuccucugggacaccgucaccggcgucgacauggcccucuga

SEQ ID NO: 125858 - RNA, 1401 nt, Artificial Sequence; identical to SEQ ID NO: 124996
  derived and/or modified CDS sequence (opt2) from neuraminidase__InfluenzaB__AGX24099

SEQ ID NO: 125859 - RNA, 1401 nt, Artificial Sequence
  derived and/or modified CDS sequence (opt2) from neuraminidase__InfluenzaB__AGX24110
augcuccccuccaccauccagacccucacccucuuccucaccuccggcggcguccuccucucccucuacgucuccgccucccucuccuaccuccucuacuccgacauccuccucaaguucucccagaccgagaucaccgcccccaucaugccccucgacugcgccaacgccuccaacguccaggccgucaaccgcuccgccgccaagggcgucacccuccuccuccccgagcccgaguggaccuacccccgccucuccugccccggcuccaccuuccagaaggcccuccucaucuccccccaccgcuucggcgagaccaagggcaacuccgccccccucaucauccgcgagcccuucaucgccugcggccccaccgagugcaagcacuucgcccucacccacuacgccgcccagcccggcggcuacuacaacggcacccgcgaggaccgcaacaagcuccgccaccucaucuccgucaagcucggcaagauccccaccgucgagaacuccaucuuccacauggccgccugguccggcuccgccugccacgacggcaaggaguggaccuacgucggcgucgacggccccgacuccaacgcccuccucaagaucaaguacggcgaggccuacaccgacaccuaccacuccuacgccaagaacauccuccgcacccaggaguccgccugcaacugcaucggcggcgacugcuaccucaugaucaccgacggccccgccuccggcaucuccgagugccgcuuccucaagauccgcgagggccgcaucaucaaggagaucuuccccaccggccgcgucaagcacaccgaggagugcaccugcggcuucgccuccaacaagaccaucgagugcaccugccgcgacaacuccuacaccgccaagcgccccuucgucaagcucaacgucgagaccgacaccgccgagauccgccucaugugcaccgagaccuaccucgacaccccccgccccaacgacggcuccaucaccggccccugcggcuccgacggcgacaagggcuccggcggcaucaagggcggcuucguccaccagcgcauggccuccaagaucggccgcugguacucccgcaccauguccaagaccaagcgcaugggcaugggccucuacgucaaguacgacggcgaccccuggaccgacuccgaggcccucgcccucuccggcgucauggucuccauggacgagcccggcugguacuccuucggcuucgagaucaaggacaagaagugcgacguccccugcaucggcaucgagaugguccacgacggcggcaagaccaccuggcacuccgccgccaccgccaucuacugccucaugggcuccggccagcuccucugggacaccgucaccggcgucgacauggcccucuga

SEQ ID NO: 125860 - RNA, 1401 nt, Artificial Sequence
  derived and/or modified CDS sequence (opt2) from neuraminidase__InfluenzaB__AGX24121
augcuccccuccaccauccagacccucacccucuuccucaccuccggcggcguccuccucucccucuacgucuccgccucccucuccuaccuccucuacuccgacauccuccucaaguucucccagaccgagaucaccgcccccaucaugccccucgacuacgccaacgccuccaacguccaggccgucaaccacuccgccgccaagggcgucacccuccuccuccccgagcccgaguggaccuacccccgccucuccugccccggcuccaccuuccagaaggcccuccucaucuccccccaccgcuucggcgagaccaagggcaacuccgccccccucaucauccgcgagcccuucaucgccugcggccccaccgagugcaagcacuucgcccucacccacuacgccgccaagcccggcggcuacuacaacggcacccgcgaggaccgcaacaagcuccgccaccucaucuccgucaagcucggcaagauccccaccgucgagaacuccaucuuccacauggccgccugguccggcuccgccugccacgacggcaaggaguggaccuacaucggcgucgacggccccgacuccaacgcccuccucaagaucaaguacggcgaggccuacaccgacaccuaccacuccuacgccaagaacauccuccgcacccaggaguccgccugcaacugcaucggcggcgacugcuaccucaugaucaccgacggccccgccuccggcaucuccgagugccgcuuccucaagauccgcgagggccgcaucaucaaggagaucuuccccaccggccgcgucaagcacaccgaggagugcaccugcggcuucgccuccaacaagaccaucgagugcgccugccgcgacaacuccuacaccgccaagcgccccuucgucaagcucaacgucgagaccgacaccgccgagauccgccucaugugcaccgagaccuaccucgacaccccccgccccaacgacggcuccaucaccggccccugcgaguccgacggcgacaagggcuccggcggcaucaagggcggcuucguccaccagcgcauggccuccaagaucggccgcugguacucccgcaccauguccaagaccaagcgcaugggcaugggccucuacgucaaguacgacggcgaccccuggaccgacuccgaggcccucgcccucuccggcgucauggucuccauggaggagcccggcugguacuccuucggcuucgagaucaaggacaagaagugcgacguccccugcaucggcaucgagaugguccacgacggcggcaagaccaccuggcacuccgccgccaccgccaucuacugccucaugggcuccggccagcuccucugggacaccgucaccggcgucgacauggcccucuga

SEQ ID NO: 125861 - RNA, 1401 nt, Artificial Sequence
  derived and/or modified CDS sequence (opt2) from neuraminidase__InfluenzaB__AGX24132
augcuccccuccaccauccagacccucacccucuuccucaccuccggcggcguccuccucucccucuacgucuccgccucccucuccuaccuccucuacuccgacauccuccucaaguucucccgcaccgagaucaccgcccccaucaugccccucgacugcgccaacgccuccaacguccaggccgucaaccgcuccgccaccaagggcgucacccucccccuccccgagcccgaguggaccuacccccgccucuccugccccggcuccaccuuccagaaggcccuccucaucuccccccaccgcuucggcgagaccaagggcaacuccgccccccucaucauccgcgagcccuucaucgccugcggccccaaggagugcaagcacuucgcccucacccacuacgccgcccagcccggcggcuacuacaacggcacccgcgaggaccgcaacaagcuccgccaccucaucuccgucaagcucggcaagauccccaccgucgagaacuccaucuuccacauggccgccugguccggcuccgccugccacgacggccgcgaguggaccuacaucggcgucgacggccccgacuccaacgcccuccucaagaucaaguacggcgaggccuacaccgacaccuaccacuccuacgccaagaacauccuccgcacccaggaguccgccugcaacugcaucggcggcgacugcuaccucaugaucaccgacggccccgcccucggcaucuccgagugccgcuuccucaagauccgcgagggccgcaucaucaaggagaucuuccccaccggccgcgucaagcacaccgaggagugcaccugcggcuucgccuccaacaagaccaucgagugcgccugccgcgacaacuccuacaccgccaagcgccccuucgucaagcucaacgucgagaccgacaccgccgagauccgccucaugugcaccgagaccuaccucgacaccccccgccccaacgacggcuccaucaccggccccugcgaguccaacggcgacaagggcuccggcggcaucaagggcggcuucguccaccagcgcauggccuccaagaucggccgcugguacucccgcaccauguccaagaccaagcgcaugggcaugggccucuacgucaaguacgacggcgaccccuggaccgacuccgaggcccucgcccucuccggcgucauggucuccauggaggagcccggcugguacuccuucggcuucgagaucaaggacaagaagugcgacguccccugcaucggcaucgagaugguccacgacggcggcaagaccaccuggcacuccgccgccaccgccaucuacugccucaugggcuccggccagcuccucugggacaccgucaccggcgucaacaugacccucuga

SEQ ID NO: 125862 - RNA, 1401 nt, Artificial Sequence
  derived and/or modified CDS sequence (opt2) from neuraminidase__InfluenzaB__AGX24143
augcuccccuccaccauccagacccucacccucuuccucaccuccggcggcguccuccucucccucuacgucuccgccucccucuccuaccuccucuacuccgacauccuccucaaguucucccagaccgagaucaccgcccccaucaugccccucgacugcgccaacgccuccaacguccaggccgucaaccgcuccgccgccaagggcgucacccuccuccuccccgagcccgaguggaccuacccccgccucuccugccccggcuccaccuuccagaaggcccuccucaucuccccccaccgcuucggcgagaccaagggcaacuccgccccccucaucauccgcgagcccuucaucgccugcggccccaccgagugcaagcacuucgcccucacccacuacgccgcccagcccggcggcuacuacaacggcacccgcgaggaccgcaacaagcuccgccaccucaucuccgucaagcucggcaagauccccaccgucgagaacuccaucuuccacauggccgccugguccggcuccgccugccacgacggcaaggaguggaccuacaucggcgucgacggccccgacggcaacgcccuccucaagaucaaguacggcgaggccuacaccgacaccuaccacuccuacgccaagaacauccuccgcacccaggaguccgccugcaacugcaucggcggcgacugcuaccucaugaucaccgacggccccgccuccggcaucuccgagugccgcuuccucaagauccgcgagggccgcaucaucaaggagaucuuccccaccggccgcgucaagcacaccgaggagugcaccugcggcuucgccuccaacaagaccaucgagugcgccugccgcgacaacuccuacaccgccaagcgccccuucgucaagcucaacgucgagaccgacaccgccgagauccgccucaugugcaccgagaccuaccucgacaccccccgccccaacgacggcuccaucaccggccccugcgaguccgacggcgacaagggcuccggcggcaucaagggcggcuucguccaccagcgcauggccuccaagaucggccgcugguacucccgcaccauguccaagaccaagcgcaugggcaugggccucuacgucaaguacgacggcgaccccuggaccgacuccgaggcccucgcccucuccggcgucauggucuccauggaggagcccggcugguacuccuucggcuucgagaucaaggacaagaagugcgacguccccugcaucggcaucgagaugguccacgacggcggcaagaccaccuggcacuccgccgccaccgccaucuacugccucaugggcuccggccagcuccucugggacaccgucaccggcgucgacauggcccucuga

SEQ ID NO: 125863 - RNA, 1401 nt, Artificial Sequence; identical to SEQ ID NO: 124996
  derived and/or modified CDS sequence (opt2) from neuraminidase__InfluenzaB__AGX24154

SEQ ID NO: 125864 - RNA, 1401 nt, Artificial Sequence
  derived and/or modified CDS sequence (opt2) from neuraminidase__InfluenzaB__AGX24165
augcuccccuccaccauccagacccucacccucuuccucaccuccggcggcguccuccucucccucuacgucuccgccucccucuccuaccuccucuacuccgacauccuccucaaguucucccagaccgagaucaccgcccccaucaugccccucgacuacgccaacgccuccaacguccaggccgucaaccacuccgccgccaagggcgucacccuccuccuccccgagcccgaguggaccuacccccgccucuccugccccggcuccaccuuccagaaggcccuccucaucuccccccaccgcuucggcgagaccaagggcaacuccgccccccucaucauccgcgagcccuucaucgccugcggccccaccgagugcaagcacuucgcccucacccacuacgccgcccagcccggcggcuacuacaacggcacccgcgaggaccgcaacaagcuccgccaccucaucuccgucaagcucggcaagauccccaccgucgagaacuccaucuuccacauggccgccugguccggcuccgccugccacgacggcaaggaguggaccuacaucggcgucgacggccccgacuccaacgcccuccucaagaucaaguacggcgaggccuacaccgacaccuaccacuccuacgccaagaacauccuccgcacccaggaguccgccugcaacugcaucggcggcgacugcuaccucaugaucaccgacggccccgccuccggcaucuccgagugccgcuuccucaagauccgcgagggccgcaucaucaaggagaucuuccccaccggccgcgucaagcacaccgaggagugcaccugcggcuucgccuccaacaagaccaucgagugcgccugccgcgacaacuccuacaccgccaagcgccccuucgucaagcucaacgucgagaccgacaccgccgagauccgccucaugugcaccgagaccuaccucgacaccccccgccccaacgacggcuccaucaccggccccugcgaguccgacggcgacaagggcuccggcggcaucaagggcggcuucguccaccagcgcauggccuccaagaucggccgcugguacucccgcaccauguccaagaccaagcgcaugggcaugggccucuacgucaaguacgacggcgaccccuggaccgacuccgaggcccucgcccucaacggcgucauggucuccauggaggagcccggcugguacuccuucggcuucgagaucaaggacaagaagugcgacguccccugcaucggcaucgagaugguccacgacggcggcaagaccaccuggcacuccgccgccaccgccaucuacugccucaugggcuccggccagcuccucugggacaccgucaccggcgucgacauggcccucuga

SEQ ID NO: 125865 - RNA, 1401 nt, Artificial Sequence; identical to SEQ ID NO: 124853
  derived and/or modified CDS sequence (opt2) from neuraminidase__InfluenzaB__AGX24176

SEQ ID NO: 125866 - RNA, 1401 nt, Artificial Sequence; identical to SEQ ID NO: 124853
  derived and/or modified CDS sequence (opt2) from neuraminidase__InfluenzaB__AGX24187

SEQ ID NO: 125867 - RNA, 1401 nt, Artificial Sequence; identical to SEQ ID NO: 124853
  derived and/or modified CDS sequence (opt2) from neuraminidase__InfluenzaB__AGX24198

SEQ ID NO: 125868 - RNA, 1401 nt, Artificial Sequence; identical to SEQ ID NO: 125183
  derived and/or modified CDS sequence (opt2) from neuraminidase__InfluenzaB__AGX24231

SEQ ID NO: 125869 - RNA, 1401 nt, Artificial Sequence; identical to SEQ ID NO: 124853
  derived and/or modified CDS sequence (opt2) from neuraminidase__InfluenzaB__AGX24242

SEQ ID NO: 125870 - RNA, 1401 nt, Artificial Sequence
  derived and/or modified CDS sequence (opt2) from neuraminidase__InfluenzaB__AGX24275
augcuccccuccaccauccagacccucacccucuuccucaccuccggcggcguccuccucucccucuacgucuccgccucccucuccuaccuccucuacuccgacauccuccucaaguucucccagaccgagaucaccgcccccaucaugccccucgacugcgccaacgccuccaacguccaggccgucaaccgcuccgccgccaagggcgucacccuccuccuccccgagcccgaguggaccuacccccgccucuccugccccggcuccaccuuccagaaggcccuccucaucuccccccaccgcuucggcgagaccaagggcaacuccgccccccucaucauccgcgagcccuucaucgccugcggccccaccgagugcaagcacuucgcccucacccacuacgccgcccagcccggcggcuacuacaacggcacccgcgaggaccgcaacaagcuccgccaccucaucuccgucaagcucggcaagauccccaccgucgagaacuccaucuuccacauggccgccugguccggcuccgccugccacgacggcaaggaguggaccuacaucggcgucgacggccccgacuccaacgcccuccucaagaucaaguacggcgaggccuacaccgacaccuaccacuccuacgccaagaacauccuccgcacccaggaguccgccugcaacugcaucggcggcgacugcuaccucaugaucaccgacggccccgccuccggcaucuccgagugccgcuuccucaagauccgcgagggccgcaucaucaaggagaucuuccccaccggccgcgucaagcacaccgaggagugcaccugcggcuucgccuccaaccgcaccaucgagugcgccugccgcgacaacuccuacaccgccaagcgccccuucgucaagcucaacgucgagaccgacaccgccgagauccgccucaugugcaccgagaccuaccucgacaccccccgccccaacgacggcuccaucaccggccccugcgaguccgacggcgacaagggcuccggcggcaucaagggcggcuucguccaccagcgcauggccuccaagaucggccgcugguacucccgcaccauguccaagacccgccgcaugggcaugggccucuacgucaaguacgacggcgaccccuggaccgacuccgaggcccucgcccucuccggcgucauggucuccauggaggagcccggcugguacuccuucggcuucgagaucaaggacaagaagugcgacguccccugcaucggcaucgagaugguccacgacggcggcaagaccaccuggcacuccgccgccaccgccaucuacugccucaugggcuccggccagcuccucugggacaccgucaccggcgucgacauggcccucuga

SEQ ID NO: 125871 - RNA, 1401 nt, Artificial Sequence; identical to SEQ ID NO: 125448
  derived and/or modified CDS sequence (opt2) from neuraminidase__InfluenzaB__AGX24286

SEQ ID NO: 125872 - RNA, 1401 nt, Artificial Sequence
  derived and/or modified CDS sequence (opt2) from neuraminidase__InfluenzaB__AGX24297
augcuccccuccaccauccagacccucacccucuuccucaccuccggcggcguccuccucucccucuacgucuccgccucccucuccuaccuccucuacuccgacauccuccucaaguucucccagaccgagaucaccgcccccaucaugccccucgacugcgccaacgccuccaacguccaggccgucaaccgcuccgccgccaagggcgucacccuccuccuccccgagcccgaguggaccuacccccgccucuccugccccggcuccaccuuccagaaggcccuccucaucuccccccaccgcuucggcgagacccgcggcaacuccgccccccucaucauccgcgagcccuucaucgccugcggccccaccgagugcaagcacuucgcccucacccacuacgccgcccagcccggcggcuacuacaacggcacccgcgaggaccgcaacaagcuccgccaccucaucuccgucaagcucggcaagauccccaccgucgagaacuccaucuuccacauggccgccugguccggcuccgccugccacgacggcaaggaguggaccuacaucggcgucgacggccccgacuccaacgcccuccucaagaucaaguacggcgaggccuacaccgacaccuaccacuccuacgccaagaacauccuccgcacccaggaguccgccugcaacugcaucggcggcgacugcuaccucaugaucaccgacggccccgccuccggcaucuccgagugccgcuuccucaagauccgcgagggccgcaucaucaaggagaucuuccccaccggccgcgucaagcacaccgaggagugcaccugcggcuucgccuccaacaagaccaucgagugcgccugccgcgacaacuccuacaccgccaagcgccccuucgucaagcucaacgucgagaccgacaccgccgagauccgccucaugugcaccgagaccuaccucgacaccccccgccccaacgacggcuccaucaccggccccugcgaguccgacggcgacaagggcuccggcggcaucaagggcggcuucguccaccagcgcauggccuccaagaucggccgcugguacucccgcaccauguccaagaccaagcgcaugggcaugggccucuacgucaaguacgacggcgaccccuggaccgacuccgaggcccucgcccucuccggcgucauggucuccauggaggagcccggcugguacuccuucggcuucgagaucaaggacaagaagugcgacguccccugcaucggcaucgagaugguccacgacggcggcaagaccaccuggcacuccgccgccaccgccaucuacugccucaugggcuccggccagcuccucugggacaccgucaccggcgucgacauggcccucuga

SEQ ID NO: 125873 - RNA, 1401 nt, Artificial Sequence; identical to SEQ ID NO: 125448
  derived and/or modified CDS sequence (opt2) from neuraminidase__InfluenzaB__AGX24319

SEQ ID NO: 125874 - RNA, 1401 nt, Artificial Sequence
  derived and/or modified CDS sequence (opt2) from neuraminidase__InfluenzaB__AGX24330
augcuccccuccaccauccagacccucacccucuuccucaccuccggcggcguccuccucucccucuacgucuccgccucccucuccuaccuccucuacuccgacauccuccucaaguucucccagaccgagaucaccgcccccaucaugccccucgacuacgccaacgccuccaacguccaggccgucaaccacuccgccgccaagggcgucacccuccuccuccccgagcccgaguggaccuacccccgccucuccugccccggcuccaccuuccagaaggcccuccucaucuccccccaccgcuucggcgagaccaagggcaacuccgccccccucaucauccgcgagcccuucaucgccugcggccccaccgagugcaagcacuucgcccucacccacuacgccgcccagcccggcggcuacuacaacggcacccgcgaggaccgcaacaagcuccgccaccucaucuccgucaagcucggcaagauccccaccgucgagaacuccaucuuccacauggccgccugguccggcuccgccugccacgacggcaaggaguggaccuacaucggcgucgacggccccgacuccaacgcccuccucaagaucaaguacggcgaggccuacaccgacaccuaccacuccuacgccaagaacauccuccgcacccaggaguccgccugcaacugcaucggcggcgacugcuaccucaugaucaccgacggccccgccuccggcaucuccgagugccgcuuccucaagauccgcgagggccgcaucaucaaggagaucuuccccaccggccgcgucaagcacaccgaggagugcaccugcggcuucgccuccaacaagaccaucgagugcaccugccgcgacaacuccuacaccgccaagcgccccuucgucaagcucaacgucgagaccgacaccgccgagauccgccucaugugcaccgagaccuaccucgacaccccccgccccaacgacggcuccaucaccggccccugcgaguccgacggcgacaagggcuccggcggcaucaagggcggcuucguccaccagcgcauggccuccaagaucggccgcugguacucccgcaccauguccaagaccaagcgcaugggcaugggccucuacgucaaguacgacggcgaccccuggaccgacuccgaggcccucgcccucuccggcgucaugaucuccauggaggagcccggcugguacuccuucggcuucgagaucaaggacaagaagugcgacguccccugcaucggcaucgagaugguccacgacggcggcaagaccaccugguacuccgccgccaccgccaucuacugccucaugggcuccggccagcuccucugggacaccgucaccggcgucgacauggcccucuga

SEQ ID NO: 125875 - RNA, 1401 nt, Artificial Sequence
  derived and/or modified CDS sequence (opt2) from neuraminidase__InfluenzaB__AGX24341
augcuccccuccaccauccagacccucacccucuuccucaccuccggcggcguccuccucucccucuacgucuccgccucccucuccuaccuccucuacuccgacauccuccucaaguucucccgcaccgagaucaccgcccccaucaugccccucgacugcgccaacgccuccaacguccaggccgucaaccgcuccgccaccaagggcgucacccuccuccuccccgagcccgaguggaccuacccccgccucuccugccccggcuccaccuuccagaaggcccuccucaucuccccccaccgcuucggcgagaccaagggcaacuccgccccccucaucauccgcgagcccuucaucgccugcggccccaaggagugcaagcacuucgcccucacccacuacgccgcccagcccggcggcuacuacaacggcacccgcgaggaccgcaacaagcuccgccaccucaucuccgucaagcucggcaagauccccaccgucgagaacuccaucuuccacauggccgccugguccggcuccgccugccacgacggccgcgaguggaccuacaucggcgucgacggccccgacuccaacgcccuccucaagaucaaguacggcgaggccuacaccgacaccuaccacuccuacgccaagaacauccuccgcacccaggaguccgccugcaacugcaucggcggcgacugcuaccucaugaucaccgacggccccgccuccggcaucuccgagugccgcuuccucaagauccgcgagggccgcaucaucaaggagaucuuccccaccggccgcgucaagcacaccgaggagugcaccugcggcuucgccuccaacaagaccaucgagugcgccugccgcgacaacuccuacaccgccaagcgccccuucgucaagcucaacgucgagaccgacaccgccgagauccgccucaugugcaccgagaccuaccucgacaccccccgccccaacgacggcuccaucaccggccccugcgaguccaacggcgacaagggcuccggcggcaucaagggcggcuucguccaccagcgcauggccuccaagaucggccgcugguacucccgcaccauguccaagaccaagcgcaugggcaugggccucuacgucaaguacgacggcgaccccuggaccgacuccgaggcccucacccucuccggcgucauggucuccauggaggagcccggcugguacuccuucggcuucgagaucaaggacaagaagugcgacguccccugcaucggcaucgagaugguccacgacggcggcaagaccaccuggcacuccgccgccaccgccaucuacugccucaugggcuccggccagcuccucugggacaccgucaccggcgucaacaugacccucuga

SEQ ID NO: 125876 - RNA, 1401 nt, Artificial Sequence
  derived and/or modified CDS sequence (opt2) from neuraminidase__InfluenzaB__AGX24352
augcuccccuccaccauccagacccucacccucuuccucaccuccggcggcguccuccucucccucuacgucuccgccucccucuccuaccuccucuacuccgacauccuccucaaguucucccgcaccgagaucaccgcccccaucaugccccucgacugcgccaacgccuccaacguccaggccgucaaccgcuccgccaccaagggcgucacccuccuccuccccgagcccgaguggaccuacccccgccucuccugccccggcuccaccuuccagaaggcccuccucaucuccccccaccgcuucggcgagaccaagggcaacuccgccccccucaucauccgcgagcccuucaucgccugcggccccaaggagugcaagcacuucgcccucacccacuacgccgcccagcccggcggcuacuacaacggcacccgcgaggaccgcaacaagcuccgccaccucaucuccgucaagcucggcaagauccccaccgucgagaacuccaucuuccacauggccgccugguccggcuccgccugccacgacggccgcgaguggaccuacaucggcgucgacggccccgacaacaacgcccuccucaagaucaaguacggcgaggccuacaccgacaccuaccacuccuacgccaagaacauccuccgcacccaggaguccgccugcaacugcaucggcggcgacugcuaccucaugaucaccgacggccccgccuccggcaucuccgagugccgcuuccucaagauccgcgagggccgcaucaucaaggagaucuuccccaccggccgcgucaagcacaccgaggagugcaccugcggcuucgccuccaacaagaccaucgagugcgccugccgcgacaacuccuacaccgccaagcgccccuucgucaagcucaacgucgagaccgacaccgccgagauccgccucaugugcaccgagaccuaccucgacaccccccgccccaacgacggcuccaucaccggccccugcgaguccaacggcgacaagggcuccggcggcaucaagggcggcuucguccaccagcgcauggccuccaagaucggccgcugguacucccgcaccauguccaagaccaagcgcaugggcaugggccucuacgucaaguacgacggcgaccccuggaccgacuccgaggcccucgcccucuccggcgucauggucuccauggaggagcccggcugguacuccuucggcuucgagaucaaggacaagaagugcgacguccccugcaucggcaucgagaugguccacgacggcggcaagaccaccuggcacuccgccgccaccgccaucuacugccucaugggcuccggccagcuccucugggacaccgucaccggcgucaacaugacccucuga

SEQ ID NO: 125877 - RNA, 1401 nt, Artificial Sequence; identical to SEQ ID NO: 125872
  derived and/or modified CDS sequence (opt2) from neuraminidase__InfluenzaB__AGX24363

SEQ ID NO: 125878 - RNA, 1401 nt, Artificial Sequence; identical to SEQ ID NO: 125876
  derived and/or modified CDS sequence (opt2) from neuraminidase__InfluenzaB__AGX24374

SEQ ID NO: 125879 - RNA, 1401 nt, Artificial Sequence
  derived and/or modified CDS sequence (opt2) from neuraminidase__InfluenzaB__AGX24385
augcuccccuccaccauccagacccucacccucuuccucaccuccggcggcguccuccucucccucuacgucuccgccucccucuccuaccuccucuacuccgacauccuccucaaguucucccgcaccgagaucaccgcccccaccaugccccucgacugcgccaacgccuccaacguccaggccgucaaccgcuccgccaccaagggcgucacccuccuccuccccgagcccgaguggaccuacccccgccucuccugccccggcuccaccuuccagaaggcccuccucaucuccccccaccgcuucggcgagaccaagggcaacuccgccccccucaucauccgcgagcccuucaucgccugcggccccaaggagugcaagcacuucgcccucacccacuacgccgcccagcccggcggcuacuacaacggcacccgcgaggaccgcaacaagcuccgccaccucaucuccgucaagcucggcaagauccccaccgucgagaacuccaucuuccacauggccgccugguccggcuccgccugccacgacggccgcgaguggaccuacaucggcgucgacggccccgacuccaacgcccuccucaagaucaaguacggcgaggccuacaccgacaccuaccacuccuacgccaagaacauccuccgcacccaggaguccgccugcaacugcaucggcggcgacugcuaccucaugaucaccgacggccccgccuccggcaucuccgagugccgcuuccucaagauccgcgagggccgcaucaucaaggagaucuuccccaccggccgcgucaagcacaccgaggagugcaccugcggcuucgccuccaacaagaccaucgagugcgccugccgcgacaacuccuacaccgccaagcgccccuucgucaagcucaacgucgagaccgacaccgccgagauccgccucaugugcaccgagaccuaccucgacaccccccgccccaacgacggcuccaucaccggccccugcgaguccaacggcgacaagggcuccggcggcaucaagggcggcuucguccaccagcgcauggccuccaagaucggccgcugguacucccgcaccauguccaagaccaagcgcaugggcaugggccucuacgucaaguacgacggcgaccccuggaccgacuccgaggcccucgcccucuccggcgucauggucuccauggaggagcccggcugguacuccuucggcuucgagaucaaggacaagaagugcgacguccccugcaucggcaucgagaugguccacgacggcggcaagaccaccuggcacuccgccgccaccgccaucuacugccucaugggcuccggccagcuccucugggacaccgucaccggcgucaacaugacccucuga

SEQ ID NO: 125880 - RNA, 1401 nt, Artificial Sequence
  derived and/or modified CDS sequence (opt2) from neuraminidase__InfluenzaB__AGX24396
augcuccccuccaccauccagacccucacccucuuccucaccuccggcggcguccuccucucccucuacgucuccgccucccucuccuaccuccucuacuccgacauccuccucaaguucucccagaccgagaucaccgcccccaucaugccccucgacugcgccaacgccuccaacguccaggccgucaaccgcuccgccgccaagggcgucacccuccuccuccccgagcccgaguggaccuacccccgccucuccugccccggcuccaccuuccagaaggcccuccucaucuccccccaccgcuucggcgagaccaagggcaacuccgccccccucaucauccgcgagcccuucaucgccugcggccccaccgagugcaagcacuucgcccucacccacuacgccgcccagcccggcggcuacuacaacggcacccgcgaggaccgcaacaagcuccgccaccucaucuccgucaagcucggcaagauccccaccgucgagaacuccaucuuccacauggccgccugguccggcuccgccugccacgacggcaaggaguggaccuacaucggcgucgacggccccgacuccaacgcccuccucaagaucaaguacggcgaggccuacaccgacaccuaccacuccuacgccaagaacauccuccgcacccaggaguccgccugcaacugcaucggcggcgacugcuaccucaugaucaccgacggccccgccuccggcaucuccgagugccgcuuccucaagauccgcgagggccgcaucaucaaggagaucuuccccaccggccgcgucaagcacaccgaggagugcaccugcggcuucgccuccaacaagaccaucgagugcgccugccgcgacaaccgcuacaccgccaagcgccccuucgucaagcucaacgucgagaccgacaccgccgagauccgccucaugugcaccgagaccuaccucgacaccccccgccccaacgacggcuccaucaccggccccugcgaguccgacggcgacaagggcuccggcggcaucaagggcggcuucguccaccagcgcauggccuccaagaucggccgcugguacucccgcaccauguccaagaccaagcgcaugggcaugggccucuacgucaaguacgacggcgaccccuggaccgacuccggcgcccucgcccucuccggcgucauggucuccaucgaggagcccggcugguacuccuucggcuucgagaucaaggacaagaagugcgacguccccugcaucggcaucgagaugguccacgacggcggcaagaccaccuggcacuccgccgccaccgccaucuacugccucaugggcuccggccagcuccucugggacaccgucaccggcgucgacauggcccucuga

SEQ ID NO: 125881 - RNA, 1401 nt, Artificial Sequence; identical to SEQ ID NO: 125880
  derived and/or modified CDS sequence (opt2) from neuraminidase__InfluenzaB__AGX24407

SEQ ID NO: 125882 - RNA, 1401 nt, Artificial Sequence; identical to SEQ ID NO: 124853
  derived and/or modified CDS sequence (opt2) from neuraminidase__InfluenzaB__AGX24418

SEQ ID NO: 125883 - RNA, 1401 nt, Artificial Sequence; identical to SEQ ID NO: 124824
  derived and/or modified CDS sequence (opt2) from neuraminidase__InfluenzaB__AGX24429

SEQ ID NO: 125884 - RNA, 1401 nt, Artificial Sequence
  derived and/or modified CDS sequence (opt2) from neuraminidase__InfluenzaB__AGX24440
augcuccccuccaccauccagacccucacccucuuccucaccuccggcggcguccuccucucccucuacgucuccgccucccucuccuaccuccucuacuccgacauccuccucaaguucucccagaccgagaucaccgcccccaucaugccccucgacugcgccaacgccuccaacguccaggccgucaaccgcuccgccgccaagggcgucacccuccuccuccccgagcccgaguggaccuacccccgccucuccugccccggcuccaccuuccagaaggcccuccucaucuccccccaccgcuucggcgagaccaagggcaacuccgccccccucaucauccgcgagcccuucaucgccugcggcaccaccgagugcaagcacuucgcccucacccacuacgccgcccagcccggcggcuacuacaacggcacccgcgaggaccgcaacaagcuccgccaccucaucuccgucaagcucggcaagauccccaccgucgagaacuccaucuuccacauggccgccugguccggcuccgccugccacgacggcaaggaguggaccuacaucggcgucgacggccccgacuccaacgcccuccucaagaucaaguacggcgaggccuacaccgacaccuaccacuccuacgccaagaacauccuccgcacccaggaguccgccugcaacugcaucggcggcgacugcuaccucaugaucaccgacggccccgccuccggcaucuccgagugccgcuuccucaagauccgcgagggccgcaucaucaaggagaucuuccccaccggccgcgucaagcacaccgaggagugcaccugcggcuucgccuccaacaagaccaucgagugcgccugccgcgacaaccgcuacaccgccaagcgccccuucgucaagcucaacgucgagaccgacaccgccgagauccgccucaugugcaccgagaccuaccucgacaccccccgccccaacgacggcuccaucaccggccccugcgaguccgacggcgacaagggcuccggcggcaucaagggcggcuucguccaccagcgcauggccuccaagaucggccgcugguacucccgcaccauguccaagaccaagcgcaugggcaugggccucuacgucaaguacgacggcgaccccuggaccgacuccggcgcccucgcccucuccggcgucauggucuccaucgaggagcccggcugguacuccuucggcuucgagaucaaggacaagaagugcgacguccccugcaucggcaucgagaugguccacgacggcggcaagaccaccuggcacuccgccgccaccaccaucuacugccucaugggcuccggccagcuccucugggacaccgucaccggcgucgacauggcccucuga

SEQ ID NO: 125885 - RNA, 1401 nt, Artificial Sequence; identical to SEQ ID NO: 125448
  derived and/or modified CDS sequence (opt2) from neuraminidase__InfluenzaB__AGX24451

SEQ ID NO: 125886 - RNA, 1401 nt, Artificial Sequence
  derived and/or modified CDS sequence (opt2) from neuraminidase__InfluenzaB__AGX24462
augcuccccuccaccauccagacccucacccucuuccucaccuccggcggcguccuccucucccucuacgucuccgccucccucuccuaccuccucuacuccgacauccuccucaaguucucccagaccgagaucaccgcccccaucaugccccucgacuacgccaacgccuccaacguccaggccgucaaccacuccgccgccaagggcgucacccuccuccuccccgagcccgaguggaccuacccccgccucuccugccccggcuccaccuuccagaaggcccuccucaucuccccccaccgcuucggcgagaccaagggcaacuccgccccccucaucauccgcgagcccuucaucgccugcggccccaccgagugcaagcacuucgcccucacccacuacgccgcccagcccggcggcuacuacaacggcacccgcgaggaccgcaacaagcuccgccaccucaucuccgucaagcucggcaagauccccaccgucgagaacuccaucuuccacauggccgccugguccggcuccgccugccacgacggcaaggaguggaccuacaucggcgucgacggccccgacuccaacgcccuccucaagaucaaguacggcgaggccuacaccgacaccuaccacuccuacgccaagaacauccuccgcacccaggaguccgccugcaacugcaucggcggcgacugcuaccucaugaucaccgacggccccgccuccggcaucuccgagugccgcuuccucaagauccgcgagggccgcaucaucaaggagaucuuccccaccggccgcgucaagcacaccgaggagugcaccugcggcuucgccuccaacaagaccaucgagugcgccugccgcgacaacuccuacaccgccaagcgccccuucgucaagcucaacgucgagaccgacaccgccgagauccgccucaugugcaccgagaccuaccucgacaccccccgccccaacgacggcuccaucaccggccccugcgaguccgacggcgacaagggcuccggcggcaucaagggcggcuucguccaccagcgcauggccuccaagaucggccgcugguacucccgcaccauguccaagaccaagcgcaugggcaugggccucuacgucaaguacgacggcgaccccuggaccgacuccgaggcccucgcccucuccggcgucaugaucuccauggaggagcccggcugguacuccuucggcuucgagaucaaggacaagaagugcgacguccccugcaucggcaucgagaugguccacgacggcggcaagaccaccuggcacuccgccgccaccgccaucuacugccucaugggcuccggccagcuccucugggacaccgucaccggcgucgacauggcccucuga

SEQ ID NO: 125887 - RNA, 1401 nt, Artificial Sequence; identical to SEQ ID NO: 125886
  derived and/or modified CDS sequence (opt2) from neuraminidase__InfluenzaB__AGX24473

SEQ ID NO: 125888 - RNA, 1401 nt, Artificial Sequence
  derived and/or modified CDS sequence (opt2) from neuraminidase__InfluenzaB__AGX24484
augcuccccuccaccauccagacccucacccucuuccucaccuccggcggcguccuccucucccucuacgucuccgccucccucuccuaccuccucuacuccgacauccuccucaaguucucccagaccgagaucaccgcccccaucaugccccucgacugcgccaacgccuccaacguccaggccgucaaccgcuccgccgccaagggcgucacccuccuccuccccgagcccgaguggaccuacccccgccucuccugccccggcuccaccuuccagaaggcccuccucaucuccccccaccgcuucggcgagaccaagggcaacuccgccccccucaucauccgcgagcccuucaucgccugcggccccaccgagugcaagcacuucgcccucacccacuacgccgcccagcccggcggcuacuacaacggcacccgcgaggaccgcaacaagcuccgccaccucaucuccgucaagcucggcaagauccccaccgucgagaacuccaucuuccacauggccgccugguccggcuccgccugccacgacggcaaggaguggaccuacaucggcgucgacggccccgacuccaacgcccuccucaagaucaaguacggcgaggccuacaccgacaccuaccacuccuacgccaagaacauccuccgcacccaggaguccgccugcaacugcaucggcggcgacugcuaccucaugaucaccgacggccccgccuccggcaucuccgagugccgcuuccucaagauccgcgagggccgcaucaucaaggagaucuuccccaccggccgcgucaagcacaccgaggagugcaccugcggcuucgccuccaacaagaccaucgagugcgccugccgcgacaacggcuacaccgccaagcgccccuucgucaagcucaacgucgagaccgacaccgccgagauccgccucaugugcaccgagaccuaccucgacaccccccgccccaacgacggcuccaucaccggccccugcgaguccgacggcgacaagggcuccggcggcaucaagggcggcuucguccaccagcgcauggccuccaagaucggccgcugguacucccgcaccauguccaagacccgccgcaugggcaugggccucuacgucaaguacgacggcgaccccuggaccgacuccgaggcccucgcccucuccggcgucauggucuccauggaggagcccggcugguacuccuucggcuucgagaucaaggacaagaagugcgacguccccugcaucggcaucgagaugguccacgacggcggcaagaccaccuggcacuccgccgccaccgccaucuacugccucaugggcuccggccagcuccucugggacaccgucaccggcgucgacauggcccucuga

SEQ ID NO: 125889 - RNA, 1401 nt, Artificial Sequence
  derived and/or modified CDS sequence (opt2) from neuraminidase__InfluenzaB__AGX24495
augcuccccuccaccauccagacccucacccucuuccucaccuccggcggcguccuccucucccucuacgucuccgccucccucuccuaccuccucuacuccgacauccuccucaaguucucccagaccgagaucaccgcccccaucaugccccucgacugcgccaacgccuccaacguccaggucgucaaccgcuccgccgccaagggcgucacccuccuccuccccgagcccgaguggaccuacccccgccucuccugccccggcuccaccuuccagaaggcccuccucaucuccccccaccgcuucggcgagaccaagggcaacuccgccccccucaucauccgcgagcccuucaucgccugcggccccaccgagugcaagcacuucgcccucacccacuacgccgcccagcccggcggcuacuacaacggcacccgcgaggaccgcaacaagcuccgccaccucaucuccgucaagcucggcaagauccccaccgucgagaacuccaucuuccacauggccgccugguccggcuccgccugccacgacggcaaggaguggaccuacaucggcgucgacggccccgacuccaacgcccuccucaagaucaaguacggcgaggccuacaccgacaccuaccacuccuacgccaagaacauccuccgcacccaggaguccgccugcaacugcaucggcggcgacugcuaccucaugaucaccgacggccccgccuccggcaucuccgagugccgcuuccucaagauccgcgagggccgcaucaucaaggagaucuuccccaccggccgcgucaagcacaccgaggagugcaccugcggcuucgccuccaacaagaccaucgagugcgccugccgcgacaacuccuacaccgccaagcgccccuucgucaagcucaacgucgagaccgacaccgccgagauccgccucaugugcaccgagaccuaccucgacaccccccgccccaacgacggcuccaucaccggccccugcgaguccgacggcgacaagggcuccggcggcaucaagggcggcuucguccaccagcgcauggccuccaagaucggccgcugguacucccgcaccauguccaagacccgccgcaugggcaugggccucuacgucaaguacgacggcgaccccuggaccgacuccgaggcccucgcccucuccggcgucauggucuccauggaggagcccggcugguacuccuucggcuucgagaucaaggacaagaagugcgacguccccugcaucggcaucgagaugguccacgacggcggcaagaccaccuggcacuccgccgccaccgccaucuacugccucaugggcuccggccagcuccucugggacaccgucaccggcgucgacauggcccucuga

SEQ ID NO: 125890 - RNA, 1401 nt, Artificial Sequence; identical to SEQ ID NO: 125448
  derived and/or modified CDS sequence (opt2) from neuraminidase__InfluenzaB__AGX24506

SEQ ID NO: 125891 - RNA, 1401 nt, Artificial Sequence
  derived and/or modified CDS sequence (opt2) from neuraminidase__InfluenzaB__AGX24517
augcuccccuccaccauccagacccucacccucuuccucaccuccggcggcguccuccucucccucuacgucuccgccucccucuccuaccuccucuacuccgacauccuccucaaguucucccagaccgagaucaccgcccccaucaugccccucgacugcgccaacgccuccaacguccaggccgucaaccacuccgccgccaagggcgucacccuccuccuccccgagcccgaguggaccuacccccgccucuccugccccggcuccaccuuccagaaggcccuccucaucuccccccaccgcuucggcgagaccaagggcaacuccgccccccucaucauccgcgagcccuucaucgccugcggccccaccgagugcaagcacuucgcccucacccacuacgccgcccagcccggcggcuacuacaacggcacccgcgaggaccgcaacaagcuccgccaccucaucuccgucaagcucggcaagauccccaccgucgagaacuccaucuuccacauggccgccugguccggcuccgccugccacgacggcaaggaguggaccuacaucggcgucgacggccccgacuccaacgcccuccucaagaucaaguacggcgaggccuacaccgacaccuaccacuccuacgccaagaacauccuccgcacccaggaguccgccugcaacugcaucggcggcgacugcuaccucaugaucaccgacggccccgccuccggcgucuccgagugccgcuuccucaagauccgcgagggccgcaucaucaaggagaucuuccccaccggccgcgucaagcacaccgaggagugcaccugcggcuucgccuccaacaagaccaucgagugcgccugccgcgacaacuccuacaccgccaagcgccccuucgucaagcucaacgucgagaccgacaccgccgagauccgccucaugugcaccgagaccuaccucgacaccccccgccccaacgacggcuccaucaccggccccugcgaguccgacggcgacaagggcuccggcggcaucaagggcggcuucguccaccagcgcauggccuccaagaucggccgcugguacucccgcaccauguccaagaccaagcgcaugggcaugggccucuacgucaaguacgacggcgaccccuggaccgacuccgaggcccucgcccucuccggcgucauggucuccauggaggagcccggcugguacuccuucggcuucgagaucaaggacaagaagugcgacguccccugcaucggcaucgagaugguccacgacggcggcaagaccaccuggcacuccgccgccaccgccaucuacugccucaugggcuccggccagcuccucugggacaccgucaccggcgucgacauggcccucuga

SEQ ID NO: 125892 - RNA, 1401 nt, Artificial Sequence; identical to SEQ ID NO: 125448
  derived and/or modified CDS sequence (opt2) from neuraminidase__InfluenzaB__AGX24528

SEQ ID NO: 125893 - RNA, 1401 nt, Artificial Sequence; identical to SEQ ID NO: 125876
  derived and/or modified CDS sequence (opt2) from neuraminidase__InfluenzaB__AGX24539

SEQ ID NO: 125894 - RNA, 1401 nt, Artificial Sequence
  derived and/or modified CDS sequence (opt2) from neuraminidase__InfluenzaB__AGX24550
augcuccccuccaccauccagacccucacccucuuccucaccuccggcggcguccuccucucccucuacgucuccgccucccucuccuaccuccucuacuccgacauccuccucaaguucucccagaccgagaucaccgcccccaucaugccccucgacugcgccaacgccuccaacguccaggccgucaaccgcuccgccgccaagggcgucacccuccucauccccgagcccgaguggaccuacccccgccucuccugccccggcuccaccuuccagaaggcccuccucaucuccccccaccgcuucggcgagaccaagggcaacuccgccccccucaucauccgcgagcccuucaucgccugcggccccaccgagugcaagcacuucgcccucacccacuacgccgcccagcccggcggcuacuacaacggcacccgcgaggaccgcaacaagcuccgccaccucaucuccgucaagcucggcaagauccccaccgucgagaacuccaucuuccacauggccgccugguccggcuccgccugccacgacggcaaggaguggaccuacaucggcgucgacggccccgacuccaacgcccuccucaagaucaaguacggcgaggccuacaccgacaccuaccacuccuacgccaagaacauccuccgcacccaggaguccgccugcaacugcaucggcggcgacugcuaccucaugaucaccgacggccccgccuccggcaucuccgagugccgcuuccucaagauccgcgagggccgcaucaucaaggagaucuuccccaccggccgcgucaagcacaccgaggagugcaccugcggcuucgccuccaacaagaccaucgagugcgccugccgcgacaacuccuacaccgccaagcgccccuucgucaagcucaacgucgagaccgacaccgccgagauccgccucaugugcaccgagaccuaccucgacaccccccgccccaacgacggcuccaucaccggccccugcgaguccgacggcgacaagggcuccggcggcaucaagggcggcuucguccaccagcgcauggccuccaagaucggccgcugguacucccgcaccauguccaagaccaagcgcaugggcaugggccucuacgucaaguacgacggcgaccccuggaccgacuccgaggcccucgcccucuccggcgucauggucuccauggaggagcccggcugguacuccuucggcuucgagaucaaggacaagaagugcgacguccccugcaucggcaucgagaugguccacgacggcggcaagaccaccuggcacuccgccgccaccgccaucuacugccucaugggcuccggccagcuccucugggacaccgucaccggcgucgacauggcccucuga

SEQ ID NO: 125895 - RNA, 1401 nt, Artificial Sequence; identical to SEQ ID NO: 125886
  derived and/or modified CDS sequence (opt2) from neuraminidase__InfluenzaB__AGX24561

SEQ ID NO: 125896 - RNA, 1401 nt, Artificial Sequence; identical to SEQ ID NO: 124853
  derived and/or modified CDS sequence (opt2) from neuraminidase__InfluenzaB__AGX24572

SEQ ID NO: 125897 - RNA, 1401 nt, Artificial Sequence
  derived and/or modified CDS sequence (opt2) from neuraminidase__InfluenzaB__AGX24583
augcuccccuccaccauccagacccucacccucuuccucaccuccggcggcguccuccucucccucuacgucuccgccucccucuccuaccuccucuacuccgacauccuccucaaguucucccagaccgagaucaccgcccccaucaugccccucgacugcgccaacgccuccaacguccaggccgucaaccgcuccgccgccaagggcgucacccuccuccuccccgagcccgaguggaccuacccccgccucuccugccccggcuccaccuuccagaaggcccuccucaucuccccccaccgcuucggcgagaccaagggcaacuccgccccccucaucauccgcgagcccuucaucgccugcggccccaccgagugcaagcacuucgcccucacccacuacgccgcccagcccggcggcuacuacaacggcacccgcgaggaccgcaacaagcuccgccaccucaucuccgucaagcucggcaagauccccaccgucgagaacuccaucuuccacauggccgccugguccggcuccgccugccacgacggcaaggaguggaccuacaucggcgucgacggccccgacuccaacgcccuccucaagaucaaguacggcgaggccuacaccgacaccuaccacuccuacgccaagaacauccuccgcacccaggaguccgccugcaacugcaucggcggcgacugcuaccucaugaucaccgacggccccgccuccggcaucuccgagugccgcuuccucaagauccgcgagggccgcaucaucaaggagaucuuccccaccggccgcgucaagcacaccgaggagugcaccugcggcuucgccuccaacaagaccaucgagugcgccugccgcgacaacuccuacaccgccaagcgccccuucgucaagcucaacgucgagaccgacaccgccgagauccgccucaugugcaccgagaccuaccucgacaccccccgccccaacgacggcuccaucaccggccccugcgaguccgacggcgacaagggcuccggcggcaucaagggcggcuucguccaccagcgcauggccuccaagaucggccgcugguacucccgcaccauguccaagacccgccgcaugggcaugggccucuacgucaaguacgacggcgaccccuggaccgacuccggcgcccucgcccucuccggcgucauggucuccaucgaggagcccggcugguacuccuucggcuucgagaucaaggacaagaagugcgacguccccugcaucggcaucgagaugguccacgacggcggcaagaccaccuggcacuccgccgccaccgccaucuacugccucaugggcuccggccagcuccucugggacaccgucaccggcgucgacauggcccucuga

SEQ ID NO: 125898 - RNA, 1401 nt, Artificial Sequence; identical to SEQ ID NO: 125448
  derived and/or modified CDS sequence (opt2) from neuraminidase__InfluenzaB__AGX24594

SEQ ID NO: 125899 - RNA, 1401 nt, Artificial Sequence; identical to SEQ ID NO: 125448
  derived and/or modified CDS sequence (opt2) from neuraminidase__InfluenzaB__AGX24605

SEQ ID NO: 125900 - RNA, 1401 nt, Artificial Sequence; identical to SEQ ID NO: 125448
  derived and/or modified CDS sequence (opt2) from neuraminidase__InfluenzaB__AGX24616

SEQ ID NO: 125901 - RNA, 1401 nt, Artificial Sequence; identical to SEQ ID NO: 125872
  derived and/or modified CDS sequence (opt2) from neuraminidase__InfluenzaB__AGX24627

SEQ ID NO: 125902 - RNA, 1401 nt, Artificial Sequence; identical to SEQ ID NO: 125448
  derived and/or modified CDS sequence (opt2) from neuraminidase__InfluenzaB__AGX24638

SEQ ID NO: 125903 - RNA, 1401 nt, Artificial Sequence
  derived and/or modified CDS sequence (opt2) from neuraminidase__InfluenzaB__AGX24660
augcuccccuccaccauccagacccucacccucuuccucaccuccggcggcguccuccucucccucuacgucuccgccucccucuccuaccuccucuacuccgacauccuccucaaguucucccgcaccgagaucaccgcccccaucaugccccucgacugcgccaacgccuccaacguccaggccgucaaccgcuccgccaccaagggcgucacccuccuccuccccgagcccgaguggaccuacccccgccucuccugccccggcuccaccuuccagaaggcccuccucaucuccccccaccgcuucggcgagaccaagggcaacuccgccccccucaucauccgcgagcccuucaucgccugcggccccaaggagugcaagcacuucgcccucaccuacuacgccgcccagcccggcggcuacuacaacggcacccgcgaggaccgcaacaagcuccgccaccucaucuccgucaagcucggcaagauccccaccgucgagaacuccaucuuccacauggccgccugguccggcuccgccugccacgacggccgcgaguggaccuacaucggcgucgacggccccgacuccaacgcccuccucaagaucaaguacggcgaggccuacaccgacaccuaccacuccuacgccaagaacauccuccgcacccaggaguccgccugcaacugcaucggcggcgacugcuaccucaugaucaccgacggccccgccuccggcaucuccgagugccgcuuccucaagauccgcgagggccgcaucaucaaggagaucuuccccaccggccgcgucaagcacaccgaggagugcaccugcggcuucgccuccaacaagaccaucgagugcgccugccgcgacaacuccuacaccgccaagcgccccuucgucaagcucaacgucgagaccgacaccgccgagauccgccucaugugcaccgagaccuaccucgacaccccccgccccaacgacggcuccaucaccggccccugcgaguccaacggcgacaagggcuccggcggcaucaagggcggcuucguccaccagcgcauggccuccaagaucggccgcugguacucccgcaccauguccaagaccaagcgcaugggcaugggccucuacgucaaguacgacggcgaccccuggaccgacuccgaggcccucgcccucuccggcgucauggucuccauggaggagcccggcugguacuccuucggcuucgagaucaaggacaagaagugcgacguccccugcaucggcaucgagaugguccacgacggcggcaagaccaccuggcacuccgccgccaccgccaucuacugccucaugggcuccggccagcuccucugggacaccgucaccggcgucaacaugacccucuga

SEQ ID NO: 125904 - RNA, 1401 nt, Artificial Sequence
  derived and/or modified CDS sequence (opt2) from neuraminidase__InfluenzaB__AGX24671
augcuccccuccaccauccagacccucacccucuuccucaccuccggcggcguccuccuccuccucuacgucuccgccucccucuccuaccuccucuacuccgacauccuccucaaguucucccagaccgagaucaccgcccccaucaugccccucgacugcgccaacgccuccaacguccaggccgucaaccgcuccgccgccaagggcgucacccuccuccuccccgagcccgaguggaccuacccccgccucuccugccccggcuccaccuuccagaaggcccuccucaucuccccccaccgcuucggcgagaccaagggcaacuccgccccccucaucauccgcgagcccuucaucgccugcggccccaccgagugcaagcacuucgcccucacccacuacgccgcccagcccggcggcuacuacaacggcacccgcgaggaccgcaacaagcuccgccaccucaucuccgucaagcucggcaagauccccaccgucgagaacuccaucuuccacauggccgccugguccggcuccgccugccacgacggcaaggaguggaccuacaucggcgucgacggccccgacuccaacgcccuccucaagaucaaguacggcgaggccuacaccgacaccuaccacuccuacgccaagaacauccuccgcacccaggaguccgccugcaacugcaucggcggcgacugcuaccucaugaucaccgacggccccgccuccggcaucuccgagugccgcuuccucaagauccgcgagggccgcaucaucaaggagaucuuccccaccggccgcgucaagcacaccgaggagugcaccugcggcuucgccuccaacaagaccaucgagugcgccugccgcgacaacuccuacaccgccaagcgccccuucgucaagcucaacgucgagaccgacaccgccgagauccgccucaugugcaccgagaccuaccucgacaccccccgccccaacgacggcuccaucaccggccccugcgaguccgacggcgacaagggcuccggcggcaucaagggcggcuucguccaccagcgcauggccuccaagaucggccgcugguacucccgcaccauguccaagaccaagcgcaugggcaugggccucuacgucaaguacgacggcgaccccuggaccgacuccgaggcccucgcccucuccggcgucauggucuccauggaggagcccggcugguacuccuucggcuucgagaucaaggacaagaagugcgacauccccugcaucggcaucgagaugguccacgacggcggcaagaccaccuggcacuccgccgccaccgccaucuacugccucaugggcuccggccagcuccucugggacaccgucaccggcgucgacauggcccucuga

SEQ ID NO: 125905 - RNA, 1401 nt, Artificial Sequence
  derived and/or modified CDS sequence (opt2) from neuraminidase__InfluenzaB__AGX24682
augcuccccuccaccauccagacccucacccucuuccucaccuccggcggcguccuccucucccucuacgucuccgccucccucuccuaccuccucuacuccgacauccuccucaaguucucccgcaccgagaucaccgcccccaucaugccccucgacugcgccaacgccuccaacguccaggccgucaaccgcuccgccaccaagggcgucacccuccuccuccccgagcccgaguggaccuacccccgccucuccugccccggcuccaccuuccagaaggcccuccucaucuccccccaccgcuucggcgagaccaagggcaacuccgccccccucaucauccgcgagcccuucaucgccugcggccccaaggagugcaagcacuucgcccucacccacuacgccgcccagcccggcggcuacuacaacggcacccgcgaggaccgcaacaagcuccgccaccucaucuccgucaagcucggcaagauccccaccgucgagaacuccaucuuccacauggccgccugguccggcuccgccugccacgacggccgcgaguggaccuacaucggcgucgacggccccgacuccaacgcccuccucaagaucaaguacggcgaggccuacaccgacaccuaccacuccuacgccaagaacauccuccgcacccaggaguccgccugcaacugcaucggcggcgacugcuaccucaugaucaccgacggccccgccuccggcaucuccgagugccgcuuccucaagauccgcgagggccgcaucaucaaggagaucuuccccaccggccgcgucaagcacaccgaggagugcaccugcggcuucgccuccaacaagaccaucgagugcgccugccgcgacaacuccuacaccgccaagcgccccuucgucaagcucaacgucgagaccgacaccgccgagauccgccucaugugcaccgagaccuaccucgacaccccccgccccaacgacggcuccaucaccggccccugcgaguccaacggcgacaagggcuccggcggcaucaagggcggcuucguccaccagcgcauggccuccaagaucggccgcugguacucccgcaccauguccaagaccaagcgcaugggcaugggccucuacgucaaguacgacggcgaccccuggaccgacuccgaggcccucguccucuccggcgucauggucuccauggaggagcccggcugguacuccuucggcuucgagaucaaggacaagaagugcgacguccccugcaucggcaucgagaugguccacgacggcggcaagaccaccuggcacuccgccgccaccgccaucuacugccucaugggcuccggccagcuccucugggacaccgucaccggcgucaacaugacccucuga

SEQ ID NO: 125906 - RNA, 1401 nt, Artificial Sequence; identical to SEQ ID NO: 125448
  derived and/or modified CDS sequence (opt2) from neuraminidase__InfluenzaB__AGX24693

SEQ ID NO: 125907 - RNA, 1401 nt, Artificial Sequence; identical to SEQ ID NO: 125448
  derived and/or modified CDS sequence (opt2) from neuraminidase__InfluenzaB__AGX24704

SEQ ID NO: 125908 - RNA, 1401 nt, Artificial Sequence; identical to SEQ ID NO: 125448
  derived and/or modified CDS sequence (opt2) from neuraminidase__InfluenzaB__AGX24715

SEQ ID NO: 125909 - RNA, 1401 nt, Artificial Sequence
  derived and/or modified CDS sequence (opt2) from neuraminidase__InfluenzaB__AGX24737
augcuccccuccaccauccagacccucacccucuuccucaccuccggcggcguccuccucucccucuacgucuccgccucccucuccuaccuccucuacuccgacauccuccucaaguucucccagaccgagaucaccgcccccaucaugccccucgacugcgccaacgccuccaacguccaggccgucaaccgcuccgccgccaagggcgucacccuccuccuccccgagcccgaguggaccuacccccgccucuccugccccggcuccaccuuccagaaggcccuccucaucuccccccaccgcuucggcgagaccaagggcaacuccgccccccucaucauccgcgagcccuucaucgccugcggcaccaccgagugcaagcacuucgcccucacccacuacgccgcccagcccggcggcuacuacaacggcacccgcgaggaccgcaacaagcuccgccaccucaucuccgucaagcucggcaagauccccaccgucgagaacuccaucuuccacauggccgccugguccggcuccgccugccacgacggcaaggaguggaccuacaucggcgucgacggccccgacuccaacgcccuccucaagaucaaguacggcgaggccuacaccgacaccuaccacuccuacgccaagaacauccuccgcacccaggaguccgccugcaacugcaucggcggcgacugcuaccucaugaucaccgacggccccgccuccggcaucuccgagugccgcuuccucaagauccgcgagggccgcaucaucaaggagaucuuccccaccggccgcgucaagcacaccgaggagugcaccugcggcuucgccuccaacaagaccaucgagugcgccugccgcgacaaccgcuacaccgccaagcgccccuucgucaagcucaacgucgagaccgacaccgccgagauccgccucaugugcaccgagaccuaccucgacaccccccgccccaacgacggcuccaucaccggccccugcgaguccgacggcgacaagggcuccggcggcaucaagggcggcuucguccaccagcgcauggccuccaagaucggccgcugguacucccgcaccauguccaagaccaagcgcaugggcaugggccucuacgucaaguacgacggcgaccccuggaccgacuccggcgcccucgcccucuccggcgucauggucuccaucgaggagcccggcugguacuccuucggcuucgagaucaaggacaagaagugcgacguccccugcaucggcaucgagaugguccacgacggcggcaagaccaccuggcacuccgccgccaccgccaucuacugccucaugggcuccggccagcuccucugggacaccgucaccggcgucgacauggcccucuga

SEQ ID NO: 125910 - RNA, 1401 nt, Artificial Sequence
  derived and/or modified CDS sequence (opt2) from neuraminidase__InfluenzaB__AGX24748
augcuccccuccaccauccagacccucacccucuuccucaccuccggcggcguccuccucucccucuacgucuccgccucccucuccuaccuccucuacuccgacauccuccucaaguucucccagaccgagaucaccgcccccaucaugccccucgacugcgccaacgccuccaacguccaggccgucaaccgcuccgccgccaagggcgucacccuccuccuccccgagcccgaguggaccuacccccgccucuccugccccggcuccaccuuccagaaggcccuccucaucuccccccaccgcuucggcgagaccaagggcaacuccgccccccucaucauccgcgagcccuucaucgccugcggccccaccgagugcaagcacuucgcccucacccacuacgccgcccagcccggccgcuacuacaacggcacccgcgaggaccgcaacaagcuccgccaccucaucuccgucaagcucggcaagauccccaccgucgagaacuccaucuuccacauggccgccugguccggcuccgccugccacgacggcaaggaguggaccuacaucggcgucgacggccccgacuccaacgcccuccucaagaucaaguacggcgaggccuacaccgacaccuaccacuccuacgccaagaacauccuccgcacccaggaguccgccugcaacugcaucggcggcgacugcuaccucaugaucaccgacggccccgccuccggcaucuccgagugccgcuuccucaagauccgcgagggccgcaucaucaaggagaucuuccccaccggccgcgucaagcacaccgaggagugcaccugcggcuucgccuccaacaagaccaucgagugcgccugccgcgacaacuccuacaccgccaagcgccccuucgucaagcucaacgucgagaccgacaccgccgagauccgccucaugugcaccgagaccuaccucgacaccccccgccccaacgacggcuccaucaccggccccugcgaguccgacggcgacaagggcuccggcggcaucaagggcggcuucguccaccagcgcauggccuccaagaucggccgcugguacucccgcaccauguccaagaccaagcgcaugggcaugggccucuacgucaaguacgacggcgaccccuggaccgacuccgaggcccucgcccucuccggcgucauggucuccauggaggagcccggcugguacuccuucggcuucgagaucaaggacaagaagugcgacguccccugcaucggcaucgagaugguccacgacggcggcaagaccaccuggcacuccgccgccaccgccgucuacugccucaugggcuccggccagcuccucugggacaccgucaccggcgucgacauggcccucuga

SEQ ID NO: 125911 - RNA, 1401 nt, Artificial Sequence
  derived and/or modified CDS sequence (opt2) from neuraminidase__InfluenzaB__AGX24759
augcuccccuccaccauccagacccucacccucuuccucaccuccggcggcguccuccucucccucuacgucuccgccucccucuccuaccuccucuacuccgacauccuccucaaguucucccagaccgagaucaccgcccccaucaugccccucgacugcgccaacgccuccaacguccaggccgucaaccgcuccgccgccaagggcgucacccuccuccuccccgagcccgaguggaccuacccccgccucuccugccccggcuccaccuuccagaaggcccuccucaucuccccccaccgcuucggcgagaccaagggcaacuccgccccccucaucauccgcgagcccuucaucgccugcggccccaccgagugcaagcacuucgcccucacccacuacgccgcccagcccggcggcuacuacaacggcacccgcgaggaccgcaacaagcuccgccaccucaucuccgucaagcucggcaagauccccaccgucgagaacuccaucuuccacauggccgccugguccggcuccgccugccacgacggcaaggaguggaccuacaucggcgucgacggccccgacuccaacgcccuccucaagaucaaguacggcgaggccuacaccgacaccuaccacuccuacgccaagaacauccuccgcacccaggaguccgccugcaacugcaucggcggcgacugcuaccucaugaucaccgacggccccgccuccggcaucuccgagugccgcuuccucaagauccgcgagggccgcaucaucaaggagaucuuccccaccggccgcgucaagcacaccgaggagugcaccugcggcuucgccuccaacaagaccaucgagugcgccugccgcgacaacuccuacaccgccaagcgccccuucgucaagcucaacgucgagaccgacaccgccgagauccgccucaugugcaccgagaccuaccucgacaccccccgccccaacgacggcuccaucaccggccccugcgaguccgacggcgacaagggcuccggcggcaucaagggcggcuucguccaccagcgcauggccuccaagaucggccgcugguacucccgcaccauguccaagaccaagcgcaugggcaugggccucuacgucaaguacgacggcgaccccuggaccgacuccgaggcccucgcccucuccggcgucauggucuccauggaggagcccggcugguacuccuucggcuucgagaucaaggacaagaagugcgacauccccugcaucggcaucgagaugguccacgacggcggcaagaccaccuggcacuccgccgccaccgccaucuacugccucaugggcuccggccagcuccucugggacaccgucaccggcgucgacauggcccucuga

SEQ ID NO: 125912 - RNA, 1401 nt, Artificial Sequence; identical to SEQ ID NO: 125448
  derived and/or modified CDS sequence (opt2) from neuraminidase__InfluenzaB__AGX24770

SEQ ID NO: 125913 - RNA, 1401 nt, Artificial Sequence; identical to SEQ ID NO: 125910
  derived and/or modified CDS sequence (opt2) from neuraminidase__InfluenzaB__AGX24781

SEQ ID NO: 125914 - RNA, 1401 nt, Artificial Sequence; identical to SEQ ID NO: 124824
  derived and/or modified CDS sequence (opt2) from neuraminidase__InfluenzaB__AGX24792

SEQ ID NO: 125915 - RNA, 1401 nt, Artificial Sequence; identical to SEQ ID NO: 125872
  derived and/or modified CDS sequence (opt2) from neuraminidase__InfluenzaB__AGX24803

SEQ ID NO: 125916 - RNA, 1401 nt, Artificial Sequence; identical to SEQ ID NO: 125448
  derived and/or modified CDS sequence (opt2) from neuraminidase__InfluenzaB__AGX24814

SEQ ID NO: 125917 - RNA, 1401 nt, Artificial Sequence
  derived and/or modified CDS sequence (opt2) from neuraminidase__InfluenzaB__AGX24825
augcuccccuccaccauccagacccucacccucuuccucaccuccggcggcguccuccucucccucuacgucuccgccucccucuccuaccuccucuacuccgacauccuccucaaguucucccagaccgagaucaccgcccccaucaugccccucgacugcgccaacgccuccaacguccaggccgucaaccgcuccgccgccaagggcgucacccuccuccuccccgagcccgaguggaccuacccccgccucuccugccccggcuccaccuuccagaaggcccuccucaucuccccccaccgcuucggcgagaccaagggcaacuccgccccccucaucauccgcgagcccuucaucgccugcggccccaccgagugcaagcacuucgcccucacccacuacgccgcccagcccggcgaguacuacaacggcacccgcgaggaccgcaacaagcuccgccaccucaucuccgucaagcucggcaagauccccaccgucgagaacuccaucuuccacauggccgccugguccggcuccgccugccacgacggcaaggaguggaccuacaucggcgucgacggccccgacuccaacgcccuccucaagaucaaguacggcgaggccuacaccgacaccuaccacuccuacgccaagaacauccuccgcacccaggaguccgccugcaacugcaucggcggcgacugcuaccucaugaucaccgacggccccgccuccggcaucuccgagugccgcuuccucaagauccgcgagggccgcaucaucaaggagaucuuccccaccggccgcgucaagcacaccgaggagugcaccugcggcuucgccuccaacaagaccaucgagugcgccugccgcgacaacuccuacaccgccaagcgccccuucgucaagcucaacgucgagaccgacaccgccgagauccgccucaugugcaccgagaccuaccucgacaccccccgccccaacgacggcuccaucaccggccccugcgaguccgacggcgacaagggcuccggcggcaucaagggcggcuucguccaccagcgcauggccuccaagaucggccgcugguacucccgcaccauguccaagacccgccgcaugggcaugggccucuacgucaaguacgacggcgaccccuggaccgacuccgaggcccucgcccucuccggcgucauggucuccauggaggagcccggcugguacuccuucggcuucgagaucaaggacaagaagugcgacguccccugcaucggcaucgagaugguccacgacggcggcaagaccaccuggcacuccgccgccaccgccaucuacugccucaugggcuccggccagcuccucugggacaccgucaccggcgucgacauggcccucuga

SEQ ID NO: 125918 - RNA, 1401 nt, Artificial Sequence; identical to SEQ ID NO: 125448
  derived and/or modified CDS sequence (opt2) from neuraminidase__InfluenzaB__AGX24836

SEQ ID NO: 125919 - RNA, 1401 nt, Artificial Sequence
  derived and/or modified CDS sequence (opt2) from neuraminidase__InfluenzaB__AGX24847
augcuccccuccaccauccagacccucacccucuuccucaccuccggcggcguccuccucucccucuacgucuccgccucccucuccuaccuccucuacuccgacauccuccucaaguucucccgcaccgagaucaccgcccccaucaugccccucgacugcgccaacgccuccaacguccaggccgucaaccgcuccgccaccaagggcgucacccuccuccuccccgagcccgaguggaccuacccccgccucuccugccccggcuccaccuuccagaaggcccuccucaucuccccccaccgcuucggcgagaccaagggcaacuccgccccccucaucauccgcgagcccuucaucgccugcggccccaaggagugcaagcacuucgcccucacccacuacgccgcccagcccggcggcuacuacaacggcacccgcgaggaccgcaacaagcuccgccaccucaucuccgucaagcucggcaagauccccaccgucgagaacuccaucuuccacauggccgccugguccggcuccgccugccacgacggccgcgaguggaccuacaucggcgucgacggccccgacuccaacgcccuccucaagaucaaguacggcgaggccuacaccgacaccuaccacuccuacgccaagaacauccuccgcacccaggaguccgccugcaacugcaucggcggcgacugcuaccucaugaucaccgacggccccgccuccggcaucuccgagugccgcuuccucaagauccgcgagggccgcaucaucaaggagaucuuccccaccggccgcgucaagcacaccgaggagugcaccugcggcuucgccuccaacaagaccaucgagugcgccugccgcgacaacuccuacaccgccaagcgccccuucgucaagcucaacgucgagaccgacaccgccgagauccgccucaugugcaccgagaccuaccucgacaccccccgccccaacgacggcuccaucaccggccccugcgaguccaacggcgacaagggcuccggcggcaucaagggcggcuucguccaccagcgcauggccuccaagaucggccgcugguacucccgcaccauguccaagaccaagcgcaugggcaugggccucuacgucaaguacgacggcgaccccuggaccgacuccgaggcccucgcccucuccggcgucauggucuccauggaggagcccggcugguacuccuucggcuucgagaucaaggacaagaagugcgacguccccugcaucggcaucgagaugguccacgacggcggcaagaccaccuggcacuccgccgccaccgccgucuacugccucaugggcuccggccagcuccucugggacaccgucaccggcgucaacaugacccucuga

SEQ ID NO: 125920 - RNA, 1401 nt, Artificial Sequence; identical to SEQ ID NO: 124932
  derived and/or modified CDS sequence (opt2) from neuraminidase__InfluenzaB__AGX24858

SEQ ID NO: 125921 - RNA, 1401 nt, Artificial Sequence
  derived and/or modified CDS sequence (opt2) from neuraminidase__InfluenzaB__AGX24869
augcuccccuccaccauccagacccucacccucuuccucaccuccggcggcguccuccucucccucuacgucuccgccucccucuccuaccuccucuacuccgacauccuccucaaguucucccgcaccgagaugaccgcccccaucaugccccucggcugcgccaacgccuccaacguccaggccgucaaccgcuccgccaccaagggcgucacccuccuccuccccgagcccgaguggaccuacccccgccucuccugccccggcuccaccuuccagaaggcccuccucaucuccccccaccgcuucggcgagaccaagggcaacuccgccccccucaucauccgcgagcccuucaucgccugcggccccaaggagugcaagcacuucgcccucacccacuacgccgcccagcccggcggcuacuacaacggcacccgcgaggaccgcaacaagcuccgccaccucaucuccgucaagcucggcaagauccccaccgucgagaacuccaucuuccacauggccgccugguccggcuccgccugccacgacggccgcgaguggaccuacaucggcgucgacggccccgacuccaacgcccuccucaagaucaaguacggcgaggccuacaccgacaccuaccacuccuacgccaagaacauccuccgcacccaggaguccgccugcaacugcaucggcggcgacugcuaccucaugaucaccgacggccccgccuccggcaucuccgagugccgcuuccucaagauccgcgagggccgcaucaucaaggagaucuuccccaccggccgcgucaagcacaccgaggagugcaccugcggcuucgccuccaacaagaccaucgagugcgccugccgcgacaacuccuacaccgccaagcgccccuucgucaagcucaacgucgagaccgacaccgccgagauccgccucaugugcaccgagaccuaccucgacaccccccgccccaacgacggcuccaucaccggccccugcgaguccaacggcgacaagggcuccggcggcaucaagggcggcuucguccaccagcgcauggccuccaagaucggccgcugguacucccgcaccauguccaagaccaagcgcaugggcaugggccucuacgucaaguacgacggcgaccccuggaccgacuccgaggcccucgcccucuccggcgucauggucuccauggaggagcccggcugguacuccuucggcuucgagaucaaggacaagaagugcgacguccccugcaucggcaucgagaugguccacgacggcggcaagaccaccuggcacuccgccgccaccgccaucuacugccucaugggcuccggccagcuccucugggacaccgucaccggcgucaacaugacccucuga

SEQ ID NO: 125922 - RNA, 1401 nt, Artificial Sequence
  derived and/or modified CDS sequence (opt2) from neuraminidase__InfluenzaB__AGX24880
augcuccccuccaccauccagaugcucacccucuuccucaccuccggcggcguccuccucucccucuacgucuccgccucccucuccuaccuccucuacuccgacauccuccucaaguucucccgcaccgagaucaccgcccccaucaugccccucgacugcgccaacgccuccaacguccaggccgucaaccgcuccgccaccaagggcgucacccuccuccuccccgagcccgaguggaccuacccccgccucuccugccccggcuccaccuuccagaaggcccuccucaucuccccccaccgcuucggcgagaccaagggcaacuccgccccccucaucauccgcgagcccuucaucgccugcggccccaaggagugcaagcacuucgcccucacccacuacgccgcccagcccggcggcuacuacaacggcacccgcgaggaccgcaacaagcuccgccaccucaucuccgucaagcucggcaagauccccaccgucgagaacuccaucuuccacauggccgccugguccggcuccgccugccacgacggccgcgaguggaccuacaucggcgucgacggccccgacuccaacgcccuccucaagaucaaguacggcgaggccuacaccgacaccuaccacuccuacgccaagaacauccuccgcacccaggaguccgccugcaacugcaucggcggcgacugcuaccucaugaucaccgacggccccgccuccggcaucuccgagugccgcuuccucaagauccgcgagggccgcaucaucaaggagaucuuccccaccggccgcgucaagcacaccgaggagugcaccugcggcuucgccuccaacaagaccaucgagugcgccugccgcgacaacuccuacaccgccaagcgccccuucgucaagcucaacgucgagaccgacaccgccgagauccgccucaugugcaccgagaccuaccucgacaccccccgccccaacgacggcuccaucaccggccccugcgaguccaacggcgacaagggcuccggcggcaucaagggcggcuucguccaccagcgcauggccuccaagaucggccgcugguacucccgcaccauguccaagaccaagcgcaugggcaugggccucuacgucaaguacgacggcgaccccuggaccgacuccgaggcccucgcccucuccggcgucauggucuccauggaggagcccggcugguacuccuucggcuucgagaucaaggacaagaagugcgacguccccugcaucggcaucgagaugguccacgacggcggcaagaccaccuggcacuccgccgccaccgccaucuacugccucaugggcuccggccagcuccucugggacaccgucaccggcgucaacaugacccucuga

SEQ ID NO: 125923 - RNA, 1401 nt, Artificial Sequence
  derived and/or modified CDS sequence (opt2) from neuraminidase__InfluenzaB__AGX24902
augcuccccuccaccauccagacccucacccucuuccucaccuccggcggcguccuccucucccucuacgucuccgcccuccucuccuaccuccucuacuccgacauccuccucaaguucucccgcaccgagaucaccgcccccaucaugccccucgacugcgccaacgccuccaacguccaggccgucaaccgcuccgccaccaagggcgucacccuccuccuccccgagcccgaguggaccuacccccgccucuccugccccggcuccaccuuccagaaggcccuccucaucuccccccaccgcuucggcgagaacaagggcaacuccgccccccucaucauccgcgagcccuucaucgccugcggccccaaggagugcaagcacuucgcccucacccacuacgccgcccagcccggcggcuacuacaacggcacccgcgaggaccgcaacaagcuccgccaccucaucuccgucaagcucggcaagauccccaccgucgagaacuccaucuuccacauggccgccugguccggcuccgccugccacgacggccgcgaguggaccuacaucggcgucgacggccccgacuccaacgcccuccucaagaucaaguacggcgaggccuacaccgacaccuaccacuccuacgccaagaacauccuccgcacccaggaguccgccugcaacugcaucggcggcgacugcuaccucaugaucaccgacggccccgccuccggcaucuccgagugccgcuuccucaagauccgcgagggccgcaucaucaaggagaucuuccccaccggccgcgucaagcacaccgaggagugcaccugcggcuucgccuccaacaagaccaucgagugcgccugccgcgacaacaacuacaccgccaagcgccccuucgucaagcucaacgucgagaccgacaccgccgagauccgccucaugugcaccgagaccuaccucgacaccccccgccccaacgacggcuccaucaccggccccugcgaguccaacggcgacaagggcuccggcggcaucaagggcggcuucguccaccagcgcauggccuccaagaucggccgcugguacucccgcaccauguccaagaccaagcgcaugggcaugggccucuacgucaaguacgacggcgaccccuggaccgacuccgaggcccucgcccucuccggcgucauggucuccauggaggagcccggcugguacuccuucggcuucgagaucaaggacaagaagugcgacguccccugcaucggcaucgagaugguccacgacggcggcaagaccaccuggcacuccgccgccaccgccaucuacugccucaugggcuccggccagcuccucugggacaccgucaccggcgucaacaugacccucuga

SEQ ID NO: 125924 - RNA, 1401 nt, Artificial Sequence; identical to SEQ ID NO: 124937
  derived and/or modified CDS sequence (opt2) from neuraminidase__InfluenzaB__AGX84846

SEQ ID NO: 125925 - RNA, 1401 nt, Artificial Sequence; identical to SEQ ID NO: 124992
  derived and/or modified CDS sequence (opt2) from neuraminidase__InfluenzaB__AGX84858

SEQ ID NO: 125926 - RNA, 1401 nt, Artificial Sequence; identical to SEQ ID NO: 124937
  derived and/or modified CDS sequence (opt2) from neuraminidase__InfluenzaB__AGX84869

SEQ ID NO: 125927 - RNA, 1401 nt, Artificial Sequence
  derived and/or modified CDS sequence (opt2) from neuraminidase__InfluenzaB__AGX84880
augcuccccuccaccauccagacccucacccucuuccucaccuccggcggcguccuccucucccucuacgucuccgccucccucuccuaccuccucuacuccgacauccuccucaaguucucccccaccgagaucaccgcccccaccaugucccucgacugcgccaacgccuccaacguccaggccgucaaccgcuccgccaccaagggcgucaucuuccuccuccccgagcccgaguggaccuacccccgccucuccugccccggcuccaccuuccagaaggcccuccucaucuccccccaccgcuucggcgagaccaagggcaacuccgccccccucaucauccgcgagcccuucaucgccugcggccccaacgagugcaagcacuucgcccucacccacuacgccgcccagcccggcggcuacuacaacggcacccgcggcgaccgcaacaagcuccgccaccucaucuccgucaagcucggcaagauccccaccgucgagaacuccaucuuccacauggccgccugguccggcuccgccugccacgacggcaaggaguggaccuacaucggcgucgacggccccgacaacgacgcccuccucaaggucaaguacggcgaggccuacaccgacaccuaccacuccuacgccaacaagauccuccgcacccaggaguccgccugcaacugcaucggcggcaacugcuaccucaugaucaccgacggcuccgccuccggcgucuccgagugccgcuuccucaagauccgcgagggccgcaucaucaaggagaucuuccccaccggccgcgucaagcacaccgaggagugcaccugcggcuucgccuccaacaagaccaucgagugcgccugccgcgacaacuccuacaccgccaagcgccccuucgucaagcucaacgucgagaccgacaccgccgagauccgccucaugugcaccgacaccuaccucgacaccccccgccccgacgacggcuccaucaccggccccugcgaguccaacggcgacaagggcuccggcggcaucaagggcggcuucguccaccagcgcauggaguccaagaucggccgcugguacucccgcaccauguccaagaccgagcgcaugggcaugggccucuacgucaaguacgacggcgaccccugggccgacuccgacgcccucgccuucuccggcgucauggucuccaugaaggagcccggcugguacuccuucggcuucgagaucaaggacaagaagugcgacguccccugcaucggcaucgagaugguccacgacggcggcaaggagaccuggcacuccgccgccaccgccaucuacugccucaugggcuccggccagcuccucugggacaccgucaccggcgucgacauggcccucuga

SEQ ID NO: 125928 - RNA, 1401 nt, Artificial Sequence; identical to SEQ ID NO: 124937
  derived and/or modified CDS sequence (opt2) from neuraminidase__InfluenzaB__AGX84891

SEQ ID NO: 125929 - RNA, 1401 nt, Artificial Sequence; identical to SEQ ID NO: 124992
  derived and/or modified CDS sequence (opt2) from neuraminidase__InfluenzaB__AGX84902

SEQ ID NO: 125930 - RNA, 1401 nt, Artificial Sequence
  derived and/or modified CDS sequence (opt2) from neuraminidase__InfluenzaB__AGX84924
augcuccccuccaccauccagacccucacccucuuccucaccuccggcggcguccuccucucccucuacgucuccgcccuccucuccuaccuccucuacuccgacauccuccucaaguucucccccaccgagaucaccgcccccaccaugucccucgacuacgccaacgccuccaacguccaggccgucaaccgcuccgccaccaagggcgucaccuuccuccuccccgagcccgaguggaccuacccccgccucuccugccccggcuccaccuuccagaaggcccuccucaucuccccccaccgcuucggcgagaccaagggcaacuccgccccccucaucauccgcgagcccuucaucgccugcggccccaacgagugcaagcacuucgcccucacccacuacgccgcccagcccggcggcuacuacaacggcacccgcggcgaccgcaacaagcuccgccaccucaucuccgucaagcucggcaagauccccaccgucgagaacuccaucuuccacauggccgccugguccggcuccgccugccacgacggcaaggaguggaccuacaucggcgucgacggccccgacaacgacgcccuccucaaggucaaguacggcgaggccuacaccgacaccuaccacuccuacgccaacaagauccuccgcacccaggaguccgccugcaacugcaucggcggcaacugcuaccucaugaucaccgacggcuccgccuccggcgucuccgagugccgcuuccucaagauccgcgagggccgcaucaucaaggagaucuuccccaccggccgcgucaagcacaccgaggagugcaccugcggcuucgccuccaacaagaccaucgagugcgccugccgcgacaacuccuacaccgccaagcgccccuucgucaagcucaacgucgagaccgacaccgccgagauccgccucaugugcaccgacaccuaccucgacaccccccgccccgacgacggcuccaucaccggccccugcgaguccaacggcgacaagggcuccggcggcaucaagggcggcuucguccaccagcgcauggaguccaagaucggccgcugguacucccgcaccauguccaagaccgagcgcaugggcaugggccucuacgucaaguacgacggcgaccccugggccgacuccgacgcccucgccuucuccggcgucauggucuccaugaaggagcccggcugguacuccuucggcuucgagaucaaggacaagaagugcgacguccccugcaucggcaucgagaugguccacgacggcggcaaggagaccuggcacuccgccgccaccgccaucuacugccucaugggcuccggccagcuccucugggacaccgucaccggcgucgacauggcccucuga

SEQ ID NO: 125931 - RNA, 1401 nt, Artificial Sequence
  derived and/or modified CDS sequence (opt2) from neuraminidase__InfluenzaB__AGY46393
augcuccccuccaccauccagacccucacccucuuccucaccuccggcggcguccuccucucccucuacgucuccgccucccucuccuaccuccucuacuccgacauccuccucaaguuccccuccaccgagaucaccgcccccaccaugccccucgacugcgccaacgccaccaacguccaggccgucaaccgcuccgccaccaagggcgucacccuccuccuccccgagcccgaguggaccuacccccgccucuccugccccggcuccaccuuccagaaggcccuccucaucuccccccaccgcuucggcgagaucaagggcaacuccgccccccucaucauccgcgagcccuucaucgccugcggccccaacgagugcaagcacuucgcccucacccacuacgccgcccagcccggcggcuacuacaacggcacccgcgaggaccgcaacaagcuccgccaccucaucuccgucaagcucggcaagauccccaccgucgagaacuccaucuuccacauggccgccugguccggcuccgccugccacgacggccgcgaguggaccuacaucggcgucgacggccccgacuccaacgcccuccucaagaucaaguacggcgaggccuacaccgacaccuaccacuccuacgccaagaacauccuccgcacccaggaguccgccugcaacugcaucggcggcgacugcuaccucaugaucaccgacggccccgccuccggcaucuccgagugccgcuuccucaagauccgcgagggccgcaucaucaaggagaucuuccccaccggccgcgucaagcacaccgaggagugcaccugcggcuucgccuccaacaagaccaucgagugcgccugccgcgacaacuccuacaccgccaagcgccccuucgucaagcucaacgucgagaccgacaccgccgagauccgccucaugugcaccgagaccuaccucgacaccccccgccccaacgacggcuccaucaccggccccugcgaguccaacggcgacaagggcuccggcggcaucaagggcggcuucguccaccagcgcauggccuccaagaucggccgcugguacucccgcaccauguccaagaccgagcgcaugggcaugggccucuacgucaaguacgacggcgaccccugggccgacuccgacgcccucgccuucuccggcgucauggucuccauggaggagcccggcugguacuccuucggcuucgagaucaaggacaagaagugcgacguccccugcaucggcaucgagaugguccacgacggcggcaaggagaccuggcacuccgccgccaccgccaucuacugccucaugggcuccggccagcuccucugggacaccgucaccggcgucaacauggcccucuga

SEQ ID NO: 125932 - RNA, 1401 nt, Artificial Sequence
  derived and/or modified CDS sequence (opt2) from neuraminidase__InfluenzaB__AGY46397
augcuccccuccaccauccagacccucacccucuuccucaccuccggcggcguccuccucucccucuacgucuccgccucccucuccuaccuccucuacuccgacauccuccucaaguucucccgcaccgagaucaccgcccccaucaugccccucgacugcgccaacgccuccaacguccaggccgucaaccgcuccgccaccaagggcgucacccuccuccuccccgagcccgaguggaccuacccccgccucuccugccccggcuccaccuuccagaaggcccuccucaucuccccccaccgcuucggcgagaccaagggcaacuccgccccccucaucauccgcgagcccuucaucgccugcggccccaacgagugcaagcacuucgcccucacccacuacgccgcccagcccggcggcuacuacaacggcacccgcggcgaccgcaacaagcuccgccaccucaucuccgucaagcucggcaagauccccaccgucgagaacuccaucuuccacauggccgccugguccggcuccgccugccacgacggcaaggaguggaccuacaucggcgucgacggccccgacaacaacgcccuccucaaggucaaguacggcgaggccuacaccgacaccuaccacuccuacgccaacaagauccuccgcacccaggaguccgccugcaacugcaucggcggcaacugcuaccucaugaucaccgacggcuccgccuccggcgucuccgagugccgcuuccucaagauccgcgagggccgcaucaucaaggagaucuuccccaccggccgcgucaagcacaccgaggagugcaccugcggcuucgccuccaacaagaccaucgagugcgccugccgcgacaacuccuacaccgccaagcgccccuucgucaagcucaacgucgagaccgacaccgccgagauccgccucaugugcaccgacaccuaccucgacaccccccgccccaacgacggcuccaucaccggccccugcgaguccgacggcgacaagggcuccggcggcaucaagggcggcuucguccaccagcgcauggaguccaagaucggccgcugguacucccgcaccauguccaagaccgagcgcaugggcaugggccucuacgucaaguacgacggcgaccccugggccgacuccgacgcccucgccuucuccggcgucauggucuccaugaaggagcccggcugguacuccuucggcuucgagaucaaggacaagaagugcgacguccccugcaucggcaucgagaugguccacgacggcggcaagaccaccuggcacuccgccgccaccgccaucuacugccucaugggcuccggccagcuccucugggacaccgucaccggcgucaacaugacccucuga

SEQ ID NO: 125933 - RNA, 1401 nt, Artificial Sequence
  derived and/or modified CDS sequence (opt2) from neuraminidase__InfluenzaB__AGY46399
augcuccccuccaccauccagacccucacccucuuccucaccuccggcggcguccuccucucccucuacgucuccgccucccucuccuaccuccucuacuccgacauccuccucaaguucucccccaccgagaucaucgcccccaccaccccccucgacugcgccaacgccuccaacguccaggccgucaaccgcuccgccaccaagggcgucacccuccuccuccccgagcccgaguggaccuacccccgccucuccugccccggcuccaccuuccagaaggcccuccucaucuccccccaccgcuucggcgagaccaagggcaacuccgccccccucaucauccgcgagcccuucaucgccugcggccccaaggagugcaagcacuucgcccucacccacuacgccgcccagcccggcggcuacuacaacggcacccgcgaggaccgcaacaagcuccgccaccucaucuccgucaagcucggcaagauccccaccgucgagaacuccaucuuccacauggccgccugguccggcuccgccugccacgacggccgcgaguggaccuacaucggcgucgacggccccgacuccaacgcccuccucaagaucaaguacggcgaggccuacaccgacaccuaccacuccuacgccaagaacauccuccgcacccaggaguccgccugcaacugcaucggcggcgacugcuaccucaugaucaccgacggccccgccuccggcaucuccgagugccgcuuccucaagauccgcgagggccgcaucaucaaggagaucuuccccaccggccgcgucaagcacaccgaggagugcaccugcggcuucgccuccaacaagaccaucgagugcgccugccgcgacaacuccuacaccgccaagcgccccuucgucaagcucaacgucgagaccgacaccgccgagauccgccucaugugcaccgagaccuaccucgacaccccccgccccaacgacggcuccaucaccggccccugcgaguccaacggcgacaagggcuccggcggcaucaagggcggcuucguccaccagcgcauggccuccaagaucggccgcugguacucccgcaccauguccaagaccaagcgcaugggcaugggccucuacgucaaguacgacggcgaccccugggccgacuccgaggcccucgcccucuccggcgucauggucuccauggaggagcccggcugguacuccuucggcuucgagaucaaggacaagaagugcgacguccccugcaucggcaucgagaugguccacgacggcggcaaggagaccuggcacuccgccgccaccgccaucuacugccucaugggcuccggccagcuccucugggacaccgucaccggcgucgacauggcccucuga

SEQ ID NO: 125934 - RNA, 1401 nt, Artificial Sequence
  derived and/or modified CDS sequence (opt2) from neuraminidase__InfluenzaB__AGY46401
augcuccccuccaccauccagacccucacccucuuccucaccuccggcggcguccuccucucccucuacgucuccgccucccucuccuaccuccucuacuccgacauccuccucaaguucucccccaccgagaucaccgcccccaccaugccccucgacugcgccaacgccuccaacguccaggccgucaaccgcuccgccaccaagggcgucacccuccuccuccccgagcccgaguggaccuacccccgccucuccugccccggcuccaccuuccagaaggcccuccucaucuccccccaccgcuucggcgagaccaagggcaacuccgccccccucaucauccgcgagcccuucaucgccugcggccccaaggagugcaagcacuucgcccucacccacuacgccgcccagcccggcggcuacuacaacggcacccgcgaggaccgcaacaagcuccgccaccucaucuccgucaagcucggcaagauccccaccgucgagaacuccaucuuccacauggccgccugguccggcuccgccugccacgacggccgcgaguggaccuacaucggcgucgacggccccgacuccaacgcccuccucaagaucaaguacggcgaggccuacaccgacaccuaccacuccuacgccaagaacauccuccgcacccaggaguccgccugcaacugcaucggcggcgacugcuaccucaugaucaccgacggccccgccuccggcaucuccgagugccgcuuccucaagauccgcgagggccgcaucaucaaggagaucuuccccaccggccgcgucaagcacaccgaggagugcaccugcggcuucgccuccaacaagaccaucgagugcgccugccgcgacaacuccuacaccgccaagcgccccuucgucaagcucaacgucgagaccgacaccgccgagauccgccucaugugcaccgagaccuaccucgacaccccccgccccaacgacggcuccaucaccggccccugcgaguccaacggcgacaagggcuccggcggcaucaagggcggcuucguccaccagcgcauggccuccaagaucggccgcugguacucccgcaccauguccaagaccaagcgcaugggcaugggccucuacgucaaguacgacggcgaccccugggccgacuccgacgcccucgccuucuccggcgucauggucuccaugaaggagcccggcugguacuccuucggcuucgagaucaaggacaagaagugcgacguccccugcaucggcaucgagaugguccacgacggcggcaaggagaccuggcacuccgccgccaccgccaucuacugccucaugggcuccggccagcuccucugggacaccgucaccggcgucgacauggcccucuga

SEQ ID NO: 125935 - RNA, 1401 nt, Artificial Sequence; identical to SEQ ID NO: 124652
  derived and/or modified CDS sequence (opt2) from neuraminidase__InfluenzaB__AGZ59825

SEQ ID NO: 125936 - RNA, 1401 nt, Artificial Sequence; identical to SEQ ID NO: 124718
  derived and/or modified CDS sequence (opt2) from neuraminidase__InfluenzaB__AGZ59836

SEQ ID NO: 125937 - RNA, 1401 nt, Artificial Sequence; identical to SEQ ID NO: 125407
  derived and/or modified CDS sequence (opt2) from neuraminidase__InfluenzaB__AGZ59847

SEQ ID NO: 125938 - RNA, 1401 nt, Artificial Sequence
  derived and/or modified CDS sequence (opt2) from neuraminidase__InfluenzaB__AGZ59858
augcuccccuccaccauccagacccucacccucuuccucaccuccggcggcguccuccucucccucuacgucuccgccucccucuccuaccuccucuacuccgacauccuccucaaguucucccccaccgagaucaccgcccccaccaugccccucgacugcgccaacgccuccaacguccacgccgucaaccgcuccgccaccaagggcgucacccuccuccuccccgagcccgaguggaccuacccccgccucuccugccccggcuccaccuuccagaaggcccuccucaucuccccccaccgcuucggcgagaccaagggcaacuccgccccccucaucauccgcgagcccuucaucgccugcggccccaacgagugcaagcacuucgcccucacccacuacgccgcccagcccggcggcuacuacaacggcaagcgcggcgaccgcaacaagcuccgccaccucaucuccgucaagcucggcaagauccccaccgucgagaacuccaucuuccacauggccgccugguccggcuccgccugccacgacggcaaggaguggaccuacaucggcgucgacggccccgacaacaacgcccuccucaagaucaaguacggcgaggccuacaccgacaccuaccacuccuacgccaacaacauccuccgcacccaggaguccgccugcaacugcaucggcggcaacugcuaccucaugaucaccgacggcuccgccuccggcgucuccgagugccgcuuccucaagauccgcgagggccgcaucaucaaggagaucuuccccaccggccgcgucaagcacaccgaggagugcaccugcggcuucgccuccaacaagaccaucgagugcgccugccgcgacaacuccuacaccgccaagcgccccuucgucaagcucaacgucgagaccgacaccgccgagauccgccucaugugcaccgacaccuaccucgacaccccccgccccgacgacggcuccaucaccggccccugcgaguccaacggcgacaagggcuccggcggcaucaagggcggcuucguccaccagcgcauggccuccaagaucggccgcugguacucccgcaccauguccaagaccgagcgcaugggcaugggccucuacgucaaguacgacggcgaccccugggccgacuccgacgcccucgccuucuccggcgucauggucuccaugaaggagcccggcugguacuccuucggcuucgagaucaaggacaagaagugcgacguccccugcaucggcaucgagaugguccacgacggcggcaaggagaccuggcacuccgccgccaccgccaucuacugccucaugggcuccggccagcuccucugggacaccgucaccggcgucgacauggcccucuga

SEQ ID NO: 125939 - RNA, 1401 nt, Artificial Sequence
  derived and/or modified CDS sequence (opt2) from neuraminidase__InfluenzaB__AGZ59869
augcuccccuccaccauccagacccucacccucuuccucaccuccggcggcguccuccucucccucuacgucuccgccucccucuccuaccuccucuacuccgacauccuccucaaguucucccccaccgagaucaccgcccccaccaugccccucgacugcgccaacgccuccaacguccaggccgucaaccgcuccgccaccaagggcgucacccuccuccuccccgagcccgaguggaccuacccccgccucuccugccccggcuccaccuuccagaaggccguccucaucuccccccaccgcuucggcgagaccaagggcaacuccgccccccucaucauccgcgagcccuucaucgccugcggccccaacgagugcaagcacuucgcccucacccacuacgccgcccagcccggcggcuacuacaacggcacccgcggcgaccgcaacaagcuccgccaccucaucuccgucaagcucggcaagauccccaccgucgagaacuccaucuuccacauggccgccugguccggcuccgccugccacgacggcaaggaguggaccuacaucggcgucgacggccccgacaacaacgcccuccucaagaucaaguacggcgaggccuacaccgacaccuaccacuccuacgccaacaagauccuccgcacccaggaguccgccugcaacugcaucggcggcaacugcuaccucaugaucaccgacggcuccgccuccggcgucuccgagugccgcuuccucaagauccgcgagggccgcaucaucaaggagaucuuccccaccggccgcgucaagcacaccgaggagugcaccugcggcuucgccuccaacaagaccaucgagugcgccugccgcgacaacuccuacaccgccaagcgccccuucgucaagcucaacgucgagaccgacaccgccgagauccgccucaugugcaccgacaccuaccucgacaccccccgccccgacgacggcuccaucaccggccccugcgaguccaacggcgacaagggcuccggcggcaucaagggcggcuucguccaccagcgcauggccuccaagaucggccgcugguacucccgcaccauguccaagaccgagcgcaugggcaugggccucuacgucaaguacgacggcgaccccugggccgacuccgacgcccucgccuucuccggcgucauggucuccaugaaggagcccggcugguacuccuucggcuucgagaucaaggacaagaagugcgacguccccugcaucggcaucgagaugguccacgacggcggcaaggagaccuggcacuccgccgccaccgccaucuacugccucaugggcuccggccagcuccucugggacaccgucaccggcgucgacauggcccucuga

SEQ ID NO: 125940 - RNA, 1401 nt, Artificial Sequence; identical to SEQ ID NO: 125436
  derived and/or modified CDS sequence (opt2) from neuraminidase__InfluenzaB__AGZ59880

SEQ ID NO: 125941 - RNA, 1401 nt, Artificial Sequence; identical to SEQ ID NO: 125880
  derived and/or modified CDS sequence (opt2) from neuraminidase__InfluenzaB__AGZ59891

SEQ ID NO: 125942 - RNA, 1401 nt, Artificial Sequence; identical to SEQ ID NO: 124997
  derived and/or modified CDS sequence (opt2) from neuraminidase__InfluenzaB__AGZ59902

SEQ ID NO: 125943 - RNA, 1401 nt, Artificial Sequence; identical to SEQ ID NO: 124997
  derived and/or modified CDS sequence (opt2) from neuraminidase__InfluenzaB__AGZ59913

SEQ ID NO: 125944 - RNA, 1401 nt, Artificial Sequence; identical to SEQ ID NO: 124997
  derived and/or modified CDS sequence (opt2) from neuraminidase__InfluenzaB__AGZ59924

SEQ ID NO: 125945 - RNA, 1401 nt, Artificial Sequence; identical to SEQ ID NO: 124997
  derived and/or modified CDS sequence (opt2) from neuraminidase__InfluenzaB__AGZ59935

SEQ ID NO: 125946 - RNA, 1401 nt, Artificial Sequence; identical to SEQ ID NO: 124997
  derived and/or modified CDS sequence (opt2) from neuraminidase__InfluenzaB__AGZ59946

SEQ ID NO: 125947 - RNA, 1401 nt, Artificial Sequence
  derived and/or modified CDS sequence (opt2) from neuraminidase__InfluenzaB__AGZ59957
augcuccccuccaccauccagacccucacccucuuccucaccuccggcggcguccuccucucccucuacgucuccgccucccucuccuaccuccucuacuccgacauccuccucaaguucucccccaccgagaucaccgcccccaccaugccccucgacugcgccaacgccuccaacguccaggccgucaaccgcuccgccaccaagggcgucacccuccuccuccccgagcccgaguggaccuacccccgccucuccugccccggcuccaccuuccagaaggcccuccucaucuccccccaccgcuucggcgagaccaagggcaacuccgccccccucaucauccgcgagcccuucaucgccugcggccccaacgagugcaagcacuucgcccucacccacuacgccgcccagcccggcggcuacuacaacggcacccgcggcgaccgcaacaagcuccgccaccucaucuccgucaagcucggcaagauccccaccgucgagaacuccaucuuccacauggccgccugguccggcuccgccugccacgacggcaaggaguggaccuacaucggcgucgacggccccgacaacaacgcccuccucaaggucaaguacggcgaggccuacaccgacaccuaccacuccuacgccaacaagauccuccgcacccaggaguccgccugcaacugcaucggcggcaacugcuaccucaugaucaccgacggcuccgccuccggcgucuccgagugccgcuuccucaagauccgcgagggccgcaucaucaaggagaucuuccccaccggccgcgucaagcacaccgaggagugcaccugcggcuucgccuccaacaagaccaucgagugcgccugccgcgacaacuccuacaccgccaagcgccccuucgucaagcucaacgucgagaccgacaccgccgagauccgccucaugugcaccgacaccuaccucgacaccccccgccccaacgacggcuccaucaccggccccugcgaguccaacggcgacaagggcuccggcggcaucaagggcggcuucguccaccagcgcauggaguccaagaucggccgcugguacucccgcaccauguccaagaccgagcgcaugggcaugggccucuacgucaaguacgacggcgaccccugggccgacuccgacgcccucgccuucuccggcgucauggucuccaugaaggagcccggcugguacuccuucggcuucgagaucaaggacaagaagugcgacguccccugcaucggcaucgagaugguccacgacggcggcaagggcaccuggcacuccgccgccaccgccaucuacugccucaugggcuccggccagcuccucugggacaccgucaccggcgucgacauggcccucuga

SEQ ID NO: 125948 - RNA, 1401 nt, Artificial Sequence; identical to SEQ ID NO: 124997
  derived and/or modified CDS sequence (opt2) from neuraminidase__InfluenzaB__AGZ59969

SEQ ID NO: 125949 - RNA, 1401 nt, Artificial Sequence; identical to SEQ ID NO: 124997
  derived and/or modified CDS sequence (opt2) from neuraminidase__InfluenzaB__AGZ59980

SEQ ID NO: 125950 - RNA, 1401 nt, Artificial Sequence; identical to SEQ ID NO: 124997
  derived and/or modified CDS sequence (opt2) from neuraminidase__InfluenzaB__AGZ59991

SEQ ID NO: 125951 - RNA, 1401 nt, Artificial Sequence; identical to SEQ ID NO: 124997
  derived and/or modified CDS sequence (opt2) from neuraminidase__InfluenzaB__AGZ60003

SEQ ID NO: 125952 - RNA, 1401 nt, Artificial Sequence
  derived and/or modified CDS sequence (opt2) from neuraminidase__InfluenzaB__AGZ60014
augcuccccuccaccauccagacccucacccucuuccucaccuccggcggcguccuccucucccucuacgucuccgcccuccucuccuaccuccucuacuccgacauccuccucaaguucucccccaccgagaucaccgcccccaccaugucccucgacugcgccaacgccuccaacguccaggccgucaaccgcuccgccaccaagggcgucaccuuccuccuccccgagcccgaguggaccuacccccgccucuccugccccggcuccaccuuccagcgcgcccuccucaucuccccccaccgcuucggcgaggccaagggcaacuccgccccccucaucauccgcgagcccuucaucgccugcggccccaacgagugcaagcacuucgcccucacccacuacgccgcccagcccggcggcuacuacaacggcacccgcggcgaccgcaacaagcuccgccaccucaucuccgucaagcucggcaagauccccaccgucgagaacuccaucuuccacauggccgccugguccggcuccgccugccacgacggcaaggaguggaccuacaucggcgucgacggccccgacaacgacgcccuccucaaggucaaguacggcgaggccuacaccgacaccuaccacuccuacgccaacaagauccuccgcacccaggaguccgccugcaacugcaucggcggcaacugcuaccucaugaucaccgacggcuccgccuccggcgucuccgagugccgcuuccucaagauccgcgagggccagaucaucaaggagaucuuccccaccggccgcgucaagcacaccgaggagugcaccugcggcuucgccuccaacaagaccaucgagugcgccugccgcgacaacuccuacaccgccaagcgccccuucgucaagcucaacgucgagaccgacaccgccgagauccgccucaugugcaccgacaccuaccucgacaccccccgccccgacgacggcuccaucaccggccccugcgaguccaacggcgacaagggcuccggcggcaucaagggcggcuucguccaccagcgcauggaguccaagaucggccgcugguacucccgcaccauguccaagaccgagcgcaugggcaugggccucuacgucaaguacgacggcgaccccugggccgacuccgacgcccucgccuucuccggcgucauggucuccaugaaggagcccggcugguacuccuucggcuucgagaucaaggacaagaagugcgacguccccugcaucggcaucgagaugguccacgacggcggcaaggagaccuggcacuccgccgccaccgccaucuacugccucaugggcuccggccagcuccucugggacaccgucaccggcgucgacauggcccucuga

SEQ ID NO: 125953 - RNA, 1401 nt, Artificial Sequence; identical to SEQ ID NO: 124931
  derived and/or modified CDS sequence (opt2) from neuraminidase__InfluenzaB__AGZ60025

SEQ ID NO: 125954 - RNA, 1401 nt, Artificial Sequence
  derived and/or modified CDS sequence (opt2) from neuraminidase__InfluenzaB__AGZ60037
augcuccccuccaccauccagacccucacccucuuccucaccuccggcggcguccuccucucccucuacgucuccgcccuccucuccuaccuccucuacuccgacauccuccucaaguucucccccaccgagaucaccgcccccaccaugucccucgacugcgccaacgccuccaacguccaggccgucaaccgcuccgccaccaagggcgucaccuuccuccuccccgagcccgaguggaccuacccccgccucuccugccccggcuccaccuuccagaaggcccuccucaucuccccccaccgcuucggcgagaccaagggcaacuccgccccccucaucauccgcgagcccuucaucgccugcggccccaacgagugcaagcacuucgcccucacccacuacgccgcccagcccggcggcuacuacaacggcacccgcggcgaccgcaacaagcuccgccaccucaucuccgucaagcucggcaagauccccaccgucgagaacuccaucuuccacauggccgccugguccggcuccgccugccacgacggcaaggaguggaccuacaucggcgucgacggccccgacaacgacgcccuccucaaggucaaguacggcgaggccuacaccgacaccuaccacuccuacgccaacaagauccuccgcacccaggaguccgccugcaacugcaucggcggcaacugcuaccucaugaucaccgacggcuccgccuccggcgucuccgagugccgcuuccucaagauccgcgagggccgcaucaucaaggagaucuuccccaccggccgcgucaagcacaccgaggagugcaccugcggcuucgccuccaacaagaccaucgagugcgccugccgcgacaacuccuacaccgccaagcgccccuucgucaagcucaacgucgagaccgacaccgccgagauccgccucaugugcaccgacaccuaccucgacaccccccgccccgacgacggcuccaucaccggccccugcgaguccaacggcgacaagggcuccggcggcaucaagggcggcuucguccaccagcgcauggaguccaagaucggccgcugguacucccgcaccauguccaagaccgagcgcaugggcaugggccucuacgucaaguacgacggcgaccccugggccgaguccgacgcccucgccuucuccggcgucauggucuccaugaaggagcccggcugguacuccuucggcuucgagaucaaggacaagaagugcgacguccccugcaucggcaucgagaugguccacgacggcggcaaggagaccuggcacuccgccgccaccgccaucuacugccucaugggcuccggccagcuccucugggacaccgucaccggcgucgacaucgcccucuga

SEQ ID NO: 125955 - RNA, 1401 nt, Artificial Sequence; identical to SEQ ID NO: 125167
  derived and/or modified CDS sequence (opt2) from neuraminidase__InfluenzaB__AGZ60048

SEQ ID NO: 125956 - RNA, 1401 nt, Artificial Sequence; identical to SEQ ID NO: 125167
  derived and/or modified CDS sequence (opt2) from neuraminidase__InfluenzaB__AGZ60059

SEQ ID NO: 125957 - RNA, 1401 nt, Artificial Sequence
  derived and/or modified CDS sequence (opt2) from neuraminidase__InfluenzaB__AGZ60070
augcuccccuccaccauccagacccucacccucuuccucaccuccggcggcguccuccucucccucuacgucuccgccucccucuccuaccuccucuacuccgacauccuccucaaguucuccaccaccgagaucaccgcccccaccaugccccucgacugcgccaacgccuccaacguccaggccgucaaccacuccgccgccaagggcgucacccuccuccuccccgagcccgaguggaccuacccccgccucuccugccccggcuccaccuuccagaaggcccuccucaucuccccccaccgcuucggcgagaccaagggcaacuccgccccccucaucauccgcgagcccuucaucgccugcggccccaaggagugcaagcacuucgcccucacccacuacgccgcccagcccggcggcuacuacaacggcacccgcgaggaccgcaacaagcuccgccaccucaucuccgucaagcucggcaagauccccaccgucgagaacuccaucuuccacauggccgccugguccggcuccgccugccacgacggcaaggaguggaccuacaucggcgucgacggccccgacuccaacgcccuccucaagaucaaguacggcgaggccuacaccgacaccuaccacuccuacgcccacaacauccuccgcacccaggaguccgccugcaacugcaucggcggcaacugcuaccucaugaucaccgacggcuccgccuccggcaucuccgagugccgcuuccucaagauccgcgagggccgcaucaucaaggagaucuuccccaccggccgcgucaagcacaccgaggagugcaccugcggcuucgccaacaacaagaccaucgagugcgccugccgcgacaacuccuacaccgccaagcgccccuucgucaagcucaacgucgagaccgacaccgccgagauccgccucaugugcaccgagaccuaccucgacaccccccgccccgacgacggcuccaucaccggccccugcgaguccaacggcaacaagggcuccggcggcaucaagggcggcuucguccaccagcgcauggccuccaagaucggccgcugguacucccgcaccauguccaagaccaagcgcaugggcaugggccucuacgucaaguacgacggcgaccccuggaccgacuccgacgcccucgucuucuccggcgucaugaucuccgucgaggagcccggcugguacuccuucggcuucgagaucaaggacaagaagugcgacguccccugcaucggcaucgagaugguccacgacggcggcaaggagaccuggcacuccgccgccaccgccaucuacugccucaugggcuccggccagcuccucugggacaccgucaccggcgucaacaugacccucuga

SEQ ID NO: 125958 - RNA, 1401 nt, Artificial Sequence; identical to SEQ ID NO: 124663
  derived and/or modified CDS sequence (opt2) from neuraminidase__InfluenzaB__AGZ60081

SEQ ID NO: 125959 - RNA, 1401 nt, Artificial Sequence; identical to SEQ ID NO: 125183
  derived and/or modified CDS sequence (opt2) from neuraminidase__InfluenzaB__AGZ60092

SEQ ID NO: 125960 - RNA, 1401 nt, Artificial Sequence; identical to SEQ ID NO: 125806
  derived and/or modified CDS sequence (opt2) from neuraminidase__InfluenzaB__AGZ60103

SEQ ID NO: 125961 - RNA, 1401 nt, Artificial Sequence; identical to SEQ ID NO: 124824
  derived and/or modified CDS sequence (opt2) from neuraminidase__InfluenzaB__AGZ60135

SEQ ID NO: 125962 - RNA, 1401 nt, Artificial Sequence; identical to SEQ ID NO: 124996
  derived and/or modified CDS sequence (opt2) from neuraminidase__InfluenzaB__AGZ60154

SEQ ID NO: 125963 - RNA, 1401 nt, Artificial Sequence
  derived and/or modified CDS sequence (opt2) from neuraminidase__InfluenzaB__AGZ60164
augcuccccuccaccacccagacccucacccucuuccucaccuccggcggcguccuccucucccucuacgucuccgccucccucuccuaccuccucuacuccgacauccuccucaaguucucccagaccgagaucaccgcccccaucaugccccucgacugcgccaacgccuccaacguccaggccgucaaccgcuccgccgccaagggcgucacccuccuccuccccgagcccgaguggaccuacccccgccucuccugccccggcuccaccuuccagaaggcccuccucaucaacccccaccgcuucggcgagaccaagggcaacuccgccccccucaucauccgcgagcccuucaucgccugcggccccaccgagugcaagcacuucgcccucacccacuacgccgcccagcccggcggcuacuacaacggcacccgcgaggaccgcaacaagcuccgccaccucaucuccgucaagcucggcaagauccccaccgucgagaacuccaucuuccacauggccgccugguccggcuccgccugccacgacggcaaggaguggaccuacaucggcgucgacggccccgacuccaacgcccuccucaagaucaaguacggcgaggccuacaccgacaccuaccacuccuacgccaagaacauccuccgcacccaggaguccgccugcaacugcaucggcggcgacugcuaccucaugaucaccgacggccccgccuccggcaucuccgagugccgcuuccucaagauccgcgagggccgcaucaucaaggagaucuuccccaccggccgcgucaagcacaccgaggagugcaccugcggcuucgccuccaacaagaccaucgagugcgccugccgcgacaacuccuacaccgccaagcgccccuucgucaagcucaacgucgagaccgacaccgccgagauccgccucaugugcaccgagaccuaccucgacaccccccgccccaacgacggcuccaucaccggccccugcgaguccgacggcgacaagggcuccggcggcaucaagggcggcuucguccaccagcgcauggccuccaagaucggccgcugguacucccgcaccauguccaagaccaagcgcaugggcaugggccucuacgucaaguacgacggcgaccccuggaccgacuccgaggcccucgcccucuccggcgucauggucuccauggaggagcccggcugguacuccuucggcuucgagaucaaggacaagaagugcgacguccccugcaucggcaucgagaugguccacgacggcggcaagaccaccuggcacuccgccgccaccgccaucuacugccucaugggcuccggccagcuccucugggacaccgucaccggcgucgacauggcccucuga

SEQ ID NO: 125964 - RNA, 1401 nt, Artificial Sequence; identical to SEQ ID NO: 125876
  derived and/or modified CDS sequence (opt2) from neuraminidase__InfluenzaB__AGZ60176

SEQ ID NO: 125965 - RNA, 1401 nt, Artificial Sequence; identical to SEQ ID NO: 124853
  derived and/or modified CDS sequence (opt2) from neuraminidase__InfluenzaB__AGZ60187

SEQ ID NO: 125966 - RNA, 1401 nt, Artificial Sequence; identical to SEQ ID NO: 124853
  derived and/or modified CDS sequence (opt2) from neuraminidase__InfluenzaB__AGZ60198

SEQ ID NO: 125967 - RNA, 1401 nt, Artificial Sequence; identical to SEQ ID NO: 124853
  derived and/or modified CDS sequence (opt2) from neuraminidase__InfluenzaB__AGZ60210

SEQ ID NO: 125968 - RNA, 1401 nt, Artificial Sequence
  derived and/or modified CDS sequence (opt2) from neuraminidase__InfluenzaB__AGZ60221
augcuccccaccaccauccagacccucacccucuuccucaccuccggcggcguccuccucucccucuacgucuccgccucccucuccuaccuccucuacuccgacauccuccucaaguucucccgcaccgagaucaccgcccccaucaugccccucgacugcgccaacgccuccaacguccaggccgucaaccgcuccgccaccaagggcgucacccuccuccuccccgagcccgaguggaccuacccccgccucuccugccccggcuccaccuuccagaaggcccuccucaucuccccccaccgcuucggcgagaccaagggcaacuccgccccccucaucauccgcgagcccuucaucgccugcggccccaaggagugcaagcacuucgcccucacccacuacgccgcccagcccggcggcuacuacaacggcacccgcgaggaccgcaacaagcuccgccaccucaucuccgucaagcucggcaagauccccaccgucgagaacuccaucuuccacauggccgccugguccggcuccgccugccacgacggccgcgaguggaccuacaucggcgucgacggccccgacuccaacgcccuccucaagaucaaguacggcgaggccuacaccgacaccuaccacuccuacgccaagaacauccuccgcacccaggaguccgccugcaacugcaucggcggcgacugcuaccucaugaucaccgacggccccgccuccggcaucuccgagugccgcuuccucaagauccgcgagggccgcaucaucaaggagaucuuccccaccggccgcgucaagcacaccgaggagugcaccugcggcuucgccuccaacaagaccaucgagugcgccugccgcgacaacuccuacaccgccaagcgccccuucgucaagcucaacgucgagaccgacaccgccgagauccgccucaugugcaccgagaccuaccucgacaccccccgccccaacgacggcuccaucaccggccccugcgaguccaacggcgacaagggcuccggcggcaucaagggcggcuucguccaccagcgcauggccuccaagaucggccgcugguacucccgcaccauguccaagaccaagcgcaugggcaugggccucuacgucaaguacgacggcgaccccuggaccgacuccgaggcccucgcccucuccggcgucauggucuccauggaggagcccggcugguacuccuucggcuucgagaucaaggacaagaagugcgacguccccugcaucggcaucgagaugguccacgacggcggcaagaccaccuggcacuccgccgccaccgccaucuacugccucaugggcuccggccagcuccucugggacaccgucaccggcgucaacaugacccucuga

SEQ ID NO: 125969 - RNA, 1401 nt, Artificial Sequence
  derived and/or modified CDS sequence (opt2) from neuraminidase__InfluenzaB__AGZ60272
augcuccccuccaccauccagacccucacccucuuccucaccuccggcggcguccuccucucccucuacgucuccgccucccucuccuaccuccucuacuccgacauccuccucaaguucucccagaccgagaucaccgcccccaucaugccccucgacugcgccaacgccuccaacguccaggccgucaaccgcuccgccgccaagggcgucacccuccuccuccccaagcccgaguggaccuacccccgccucuccugccccggcuccaccuuccagaaggcccuccucaucuccccccaccgcuucggcgagaccaagggcaacuccgccccccucaucauccgcgagcccuucaucgccugcggccccaccgagugcaagcacuucgcccucacccacuacgccgcccagcccggcggcuacuacaacggcacccgcgaggaccgcaacaagcuccgccaccucaucuccgucaagcucggcaagauccccaccgucgagaacuccaucuuccacauggccgccugguccggcuccgccugccacgacggcaaggaguggaccuacaucggcgucgacggccccgacuccaacgcccuccucaagaucaaguacggcgaggccuacaccgacaccuaccacuccuacgccaagaacauccuccgcacccaggaguccgccugcaacugcaucggcggcgacugcuaccucaugaucaccgacggccccgccuccggcaucuccgagugccgcuuccucaagauccgcgagggccgcaucaucaaggagaucuuccccaccggccgcgucaagcacaccgaggagugcaccugcggcuucgccuccaacaagaccaucgagugcgccugccgcgacaacuccuacaccgccaagcgccccuucgucaagcucaacgucgagaccgacaccgccgagauccgccucaugugcaccgagaccuaccucgacaccccccgccccaacgacggcuccaucaccggccccugcgaguccgacggcgacaagggcuccggcggcaucaagggcggcuucguccaccagcgcauggccuccaagaucggccgcugguacucccgcaccauguccaagaccaagcgcaugggcaugggccucuacgucaaguacgacggcgaccccuggaccgacuccgaggcccucgcccucuccggcgucauggucuccauggaggagcccggcugguacuccuucggcuucgagaucaaggacaagaagugcgacguccccugcaucggcaucgagaugguccacgacggcggcaagaccaccuggcacuccgccgccaccgccaucuacugccucaugggcuccggccagcuccucugggacaccgucaccggcgucgacauggcccucuga

SEQ ID NO: 125970 - RNA, 1398 nt, Artificial Sequence
  derived and/or modified CDS sequence (opt2) from neuraminidase__InfluenzaB__AHL91182
augcuccccuccaccauccagacccucacccucuuccucaccuccggcggcguccuccucucccucuacgucuccgcccuccucuccuaccuccucuacuccgacauccuccucaaguucucccccaagaucaucgcccccaccaugucccucgacugcgccaacgccuccaacguccaggccgucaaccacuccgccaccaaggagaugaaguuccucccccccgagcccgaguggaccuacccccgccucuccugccagggcuccaccuuccagaaggcccuccucaucuccccccaccgcuucggcgaggccaagggcaacuccgccccccucaucauccgcgagcccuucaucgccugcggccccaaggagugcaagcacuucgcccucacccacuacgccgcccagcccggcggcuacuacaacggcacccgcgaggaccgcaacaagcuccgccaccucaucuccgucaaccucggcaagauccccaccgucgagaacuccaucuuccacauggccgccugguccggcuccgccugccacgacggccgcgaguggaccuacaucggcgucgacggccccgacuccaacgcccucaucaagaucaaguacggcgaggccuacaccgacaccuaccacuccuacgccaacaacauccuccgcacccaggaguccgccugcaacugcaucggcggcgacugcuaccucaugaucaccgacggcuccgccuccggcaucuccaagugccgcuuccucaagauccgcgagggccgcaucaucaaggagaucuuccccaccggccgcgucgagcacaccgaggagugcaccugcggcuucgccuccaacaagaccaucgagugcgccugccgcgacaacuccuacaccgccaagcgccccuucgucaagcucaacgucgagaccgacaccgccgagauccgccucaugugcaccgagaccuaccucgacaccccccgccccgacgacggcuccaucaccggccccugcgaguccaacggcgacaagggccgcggcggcgucaagggcggcuucguccaccagcgcauggccuccaagaucggccgcugguacucccgcaccauguccaagaccaagcgcaugggcauggagcucuacgucaaguacgacggcgaccccuggaccgacuccgacgcccucgcccccuccggcgucauggucuccauggaggagcccggcugguacuccuucggcuucgagaucaaggacaagaagugcgacguccccugcaucggcaucgagaugguccacgacggcggcaagcgcaccuggcacuccgccgccaccgccaucuacugccucaugggcuccggccagcuccucugggacaccgucaccggcgucgacauggcccucuga

SEQ ID NO: 125971 - RNA, 1398 nt, Artificial Sequence
  derived and/or modified CDS sequence (opt2) from neuraminidase__InfluenzaB__AHL91193
augcuccccuccaccauccagacccucacccucuuccucaccuccggcggcguccuccucucccucuacgucuccgcccuccucuccuaccuccucuacuccgacauccuccucaaguucucccccaagaucaucgcccccaccaugucccucgacugcgccaacgccuccaacguccaggccgucaaccacuccgccaccaaggagaugaaguuccuccccuccgagcccgaguggaccuacccccgccucuccugccagggcuccaccuuccagaaggcccuccucaucuccccccaccgcuucggcgaggccaagggcaacuccgccccccucaucauccgcgagcccuucaucgccugcggccccaaggagugcaagcacuucgcccucacccacuacgccgcccagcccggcggcuacuacaacggcacccgcgaggaccgcaacaagcuccgccaccucaucuccgucaaccucggcaagauccccaccgucgagaacuccaucuuccacauggccgccugguccggcuccgccugccacgacggccgcgaguggaccuacaucggcgucgacggccccgacuccaacgcccucaucaagaucaaguacggcgaggccuacaccgacaccuaccacuccuacgccaacaacauccuccgcacccaggaguccgccugcaacugcaucggcggcgacugcuaccucaugaucaccgacggcuccgccuccggcaucuccaagugccgcuuccucaagauccgcgagggccgcaucaucaaggagaucuuccccaccggccgcgucgagcacaccgaggagugcaccugcggcuucgccuccaacaagaccaucgagugcgccugccgcgacaacuccuacaccgccaagcgccccuucgucaagcucaacgucgagaccgacaccgccgagauccgccucaugugcaccgagaccuaccucgacaccccccgccccgacgacggcuccaucaccggccccugcgaguccaacggcgacaagggccgcggcggcgucaagggcggcuucguccaccagcgcauggccuccaagaucggccgcugguacucccgcaccauguccaagaccaagcgcaugggcauggagcucuacgucaaguacgacggcgaccccuggaccgacuccgacgcccucgcccccuccggcgucauggucuccauggaggagcccggcugguacuccuucggcuucgagaucaaggacaagaagugcgacguccccugcaucggcaucgagaugguccacgacggcggcaagcgcaccuggcacuccgccgccaccgccaucuacugccucaugggcuccggccagcuccucugggacaccgucaccggcgucgacauggcccucuga

SEQ ID NO: 125972 - RNA, 1398 nt, Artificial Sequence
  derived and/or modified CDS sequence (opt2) from neuraminidase__InfluenzaB__AHL91204
augcuccccuccaccauccagacccucacccucuuccucaccuccggcggcguccuccucucccucuacgucuccgcccuccucuccuaccuccucuacuccgacguccuccucaaguucucccccaagaucaucgcccccaccaugucccucgacugcgccaacgccuccaacguccaggccgucaaccacuccgccaccgaggagaugaccuuccuccuccccgagcccgaguggaccuacccccgccucuccugccagggcuccaccuuccagaaggcccuccucaucuccccccaccgcuucggcgaggccaagggcaacuccgccccccucaucauccgcgagcccuucaucgccugcggccccaaggagugcaagcacuucgcccucacccacuacgccgcccagcccggcggcuacuacaacggcacccgcgaggaccgcaacaagcuccgccaccucaucuccgucaaccucggcaagauccccaccgucgagaacuccaucuuccacauggccgccugguccggcuccgccugccacgacggccgcgaguggaccuacaucggcgucgacggccccgacuccaacgcccucaucaagaucaaguacggcgaggccuacaccgacaccuaccacuccuacgccaacaacauccuccgcacccaggaguccgccugcaacugcaucggcggcgacugcuaccucaugaucaccgacggcuccgccuccggcaucuccaagugccgcuuccucaagauccgcgagggccgcaucaucaaggagaucuuccccaccggccgcgucgagcacaccgaggagugcaccugcggcuucgccuccaacaagaccaucgagugcgccugccgcgacaacaucuacaccgccaagcgccccuucgucaagcucaacgucgagaccgacaccgccgagauccgccucaugugcaccgagaccuaccucgacaccccccgccccgacgacggcuccaucaccggccccugcgaguccaacggcgacaagggccacggcggcaucaagggcggcuucguccaccagcgcauggccuccaagaucggccgcugguacucccgcaccauguccaagaccaagcgcaugggcauggagcucuacgucaaguacgacggcgaccccuggaccgacuccgacgcccucgcccccuccggcgucauggucuccauggaggagcccggcugguacuccuucggcuucgagaucaaggacaagaagugcgacguccccugcaucggcaucgagaugguccacgacggcggcaagaagaccuggcacuccgccgccaccgccaucuacugccucaugggcuccggccagcuccucugggacaccgucaccggcgucgacauggcccucuga

SEQ ID NO: 125973 - RNA, 1398 nt, Artificial Sequence
  derived and/or modified CDS sequence (opt2) from neuraminidase__InfluenzaB__AHL91215
augcuccccuccaccauccagacccucacccucuuccucaccuccggcggcguccuccucucccucuacgucuccacccuccucuccuaccuccucuacuccgacauccuccucaaguucucccccaagaucaucgcccccaccaccucccucgacugcgccaacgccuccaacguccaggccgucaaccacuccgccaccaaggagaugaaguuccuccccaccgagcccgaguggaccuacccccgccucuccugccagggcuccaccuuccagaaggcccuccucaucuccccccaccgcuucggcgaggccaagggcaacuccgccccccucaucauccgcgagcccuucaucgccugcggccccaaggagugcaagcacuucgcccucacccacuacgccgcccagcccggcggcuacuacaacggcacccgcgaggaccgcaacaagcuccgccaccucaucuccgucaaccucggcaagauccccaccgucgagaacuccaucuuccacauggccgccugguccggcuccgccugccacgacggccgcgaguggaccuacaucggcgucgacggccccgacuccaacgcccucaucaagaucaaguacggcgaggccuacaccgacaccuaccacuccuacgccaacaacauccuccgcacccaggaguccgccugcaacugcaucggcggcgacugcuaccucaugaucaccgacggcuccgccuccggcaucuccaagugccgcuuccucaagauccgcgagggccgcaucaucaaggagaucuuccccaccggccgcgucgagcacaccgaggagugcaccugcggcuucgccuccaacaagaccaucgagugcgccugccgcgacaacuccuacaccgccaagcgccccuucgucaagcucaacgucgagaccgacaccgccgagauccgccucaugugcaccgagaccuaccucgacaccccccgccccgacgacggcuccaucaccggccccugcgaguccaacggcgacaagggcuccggcggcgucaagggcggcuucguccaccagcgcaugaccuccaagaucggccgcugguacucccgcaccauguccaagaccaagcgcaugggcauggagcucuacgucaaguacgacggcgaccccuggaccgacuccgacgcccucgcccccuccggcgucauggucuccauggaggagcccggcugguacuccuucggcuucgagaucaaggacaagaagugcgacguccccugcaucggcaucgagaugguccacgacggcggcaagcgcaccuggcacuccgccgccaccgccaucuacugccucaugggcuccggccagcuccucugggacaccgucaccggcgucgacauggcccucuga

SEQ ID NO: 125974 - RNA, 1401 nt, Artificial Sequence; identical to SEQ ID NO: 124745
  derived and/or modified CDS sequence (opt2) from neuraminidase__InfluenzaB__AHL91226

SEQ ID NO: 125975 - RNA, 1401 nt, Artificial Sequence; identical to SEQ ID NO: 124746
  derived and/or modified CDS sequence (opt2) from neuraminidase__InfluenzaB__AHL91237

SEQ ID NO: 125976 - RNA, 1401 nt, Artificial Sequence; identical to SEQ ID NO: 124746
  derived and/or modified CDS sequence (opt2) from neuraminidase__InfluenzaB__AHL91248

SEQ ID NO: 125977 - RNA, 1401 nt, Artificial Sequence; identical to SEQ ID NO: 124745
  derived and/or modified CDS sequence (opt2) from neuraminidase__InfluenzaB__AHL91259

SEQ ID NO: 125978 - RNA, 1401 nt, Artificial Sequence; identical to SEQ ID NO: 124745
  derived and/or modified CDS sequence (opt2) from neuraminidase__InfluenzaB__AHL91270

SEQ ID NO: 125979 - RNA, 1398 nt, Artificial Sequence; identical to SEQ ID NO: 124717
  derived and/or modified CDS sequence (opt2) from neuraminidase__InfluenzaB__AHL91281

SEQ ID NO: 125980 - RNA, 1401 nt, Artificial Sequence
  derived and/or modified CDS sequence (opt2) from neuraminidase__InfluenzaB__AHL91303
augcuccccuccaccauccagacccucacccucuuccucaccuccggcggcguccuccucucccucuacgucuccgccucccucuccuaccuccucuacuccgacauccuccucaaguucucccccaccgagaucaccgcccccaccaugccccucgacugcgccaacgccuccaacguccaggccgucaaccgcuccgccaccaagggcgucacccuccuccuccccgagcccgaguggaccuacccccgccucuccugccccggcuccaccuuccagaaggcccuccucaucuccccccaccgcuucggcgagaccaagggcaacuccgccccccucaucauccgcgagcccuucaucgccugcggccccaaggagugcaagcacuucgcccucacccacuacgccgcccagcccggcggcuacuacaacggcacccgcgaggaccgcaacaagcuccgccaccucaucuccgucaagcucggcaagauccccaccgucgagaacuccaucuuccacauggccgccugguccggcuccgccugccacgacggccgcgaguggaccuacaucggcgucgacggccccgacuccaacgcccuccucaagaucaaguacggcgaggccuacaccgacaccuaccacuccuacgccaacaacauccuccgcacccaggaguccgccugcaacugcaucggcggcgacugcuaccucaugaucaccgacggcuccgccuccggcaucaacgagugccgcuuccucaagauccgcgagggccgcaucaucaaggagaucuuccccaccggccgcgucgagcacaccgaggagugcaccugcggcuucgccuccaacaagaccaucgagugcgccugccgcgacaacuccuacaccgccaagcgccccuucgucaagcucaacgucgagaccgacaccgccgagauccgccucaugugcaccgagaccuaccucgacaccccccgccccgacgacggcuccaucaccggccccugcgaguccaacggcgacaagggcuccggcggcaucaagggcggcuucguccaccagcgcauggccuccaagaucggccgcugguacucccgcaccauguccaagacccgccgcaugggcaugggccucuacgucaaguacgacggcgaccccuggaccgacuccgacgcccucgcccucuccggcgucauggucuccauggaggagcccggcugguacuccuucggcuucgagaucaaggacaagaagugcgacguccccugcaucggcaucgagaugguccacgacggcggcaagaagaccuggcacuccgccgccaccgccaucuacugccucaugggcuccggccagcuccucugggacaccgucaccggcgucgacauggcccucuga

SEQ ID NO: 125981 - RNA, 1401 nt, Artificial Sequence; identical to SEQ ID NO: 124746
  derived and/or modified CDS sequence (opt2) from neuraminidase__InfluenzaB__AHL91314

SEQ ID NO: 125982 - RNA, 1401 nt, Artificial Sequence; identical to SEQ ID NO: 124746
  derived and/or modified CDS sequence (opt2) from neuraminidase__InfluenzaB__AHL91325

SEQ ID NO: 125983 - RNA, 1401 nt, Artificial Sequence
  derived and/or modified CDS sequence (opt2) from neuraminidase__InfluenzaB__AHL91347
augcuccccuccaccauccagacccucacccucuuccucaccuccggcggcguccuccucucccucuacgucuccgccucccucuccuaccuccucuacuccgacguccuccucaaguucucccccaccgagaucaccgcccccaccaugccccucgacugcgccaacgccuccaacguccaggccgucaaccgcuccgccaccaagggcgucacccuccuccuccccgagcccgaguggaccuacccccgccucuccugccccggcuccaccuuccagaaggcccuccucaucuccccccaccgcuucggcgagaccaagggcaacuccgccccccucaucauccgcgagcccuucaucgccugcggccccaaggagugcaagcacuucgcccucacccacuacgccgcccagcccggcggcuacuacaacggcacccgcgaggaccgcaacaagcuccgccaccucaucuccgucaagcucggcaagauccccaccgucgagaacuccaucuuccacauggccgccugguccggcuccgccugccacgacggccgcgaguggaccuacaucggcgucgacggccccgacuccaacgcccuccucaagaucaaguacggcgaggccuacaccgacaccuaccacuccuacgccaacaacauccuccgcacccaggaguccgccugcaacugcaucggcggcgacugcuaccucaugaucaccgacggcuccgccuccggcaucuccgagugccgcuuccucaagauccgcgagggccgcaucgucaaggagaucuuccccaccggccgcgucgagcacaccgaggagugcaccugcggcuucgccuccaacaagaccaucgagugcgccugccgcgacaacuccuacaccgccaagcgccccuucgucaagcucaacgucgagaccgacaccgccgagauccgccucaugugcaccgagaccuaccucgacaccccccgccccgaggacggcuccaucaccggccccugcgaguccaacggcgacaagggcuccggcggcaucaagggcggcuucguccaccagcgcauggccuccaagaucggccgcugguacucccgcaccauguccaagaccaagcgcaugggcaugggccucuacgucaaguacgacggcgaccccuggaccgacuccgacgcccucgcccucuccggcgucauggucuccauggaggagcccggcugguacuccuucggcuucgagaucaaggacaagaagugcgacguccccugcaucggcaucgagaugguccacgacggcggcaaggagaccuggcacuccgccgccaccgccaucuacugccucaugggcuccggccagcuccucugggacaccgucaccggcgucgacauggcccucuga

SEQ ID NO: 125984 - RNA, 1401 nt, Artificial Sequence; identical to SEQ ID NO: 125983
  derived and/or modified CDS sequence (opt2) from neuraminidase__InfluenzaB__AHL91358

SEQ ID NO: 125985 - RNA, 1401 nt, Artificial Sequence; identical to SEQ ID NO: 124721
  derived and/or modified CDS sequence (opt2) from neuraminidase__InfluenzaB__AHL91369

SEQ ID NO: 125986 - RNA, 1401 nt, Artificial Sequence; identical to SEQ ID NO: 124721
  derived and/or modified CDS sequence (opt2) from neuraminidase__InfluenzaB__AHL91380

SEQ ID NO: 125987 - RNA, 1401 nt, Artificial Sequence
  derived and/or modified CDS sequence (opt2) from neuraminidase__InfluenzaB__AHL91391
augcuccccuccaccauccagacccucacccucuuccucaccuccggcggcguccuccucucccucuacgucuccgccucccucuccuaccuccucuacuccgacauccuccucaaguucucccccaaggagaucaccgcccccaccaugccccucaacugcgccaacgccuccaacguccaggccgucaaccgcuccgccaccaagggcgucacccucccccuccccgagcccgaguggaccuacccccgccucuccugccccggcuccaccuuccagaaggcccuccucaucuccccccaccgcuucggcgagaccaagggcaacuccgccccccucaucauccgcgagcccuucaucgccugcggccccaaggagugcaagcacuucgcccucacccacuacgccgcccagcccggcggcuacuacaacggcacccgcgaggaccgcaacaagcuccgccaccucaucuccgucaagcucggcaagauccccaccgucgagaacuccaucuuccacauggccgccugguccggcuccgccugccacgacggccgcgaguggaccuacaucggcgucgacggccccgacaacaacgcccuccucaagaucaaguacggcgaggccuacaccgacaccuaccacuccuacgccaacaacauccuccgcacccaggaguccgccugcaacugcaucggcggcgacugcuaccucaugaucaccgacggcuccgccuccggcaucuccgagugccgcuuccucaagauccgcgagggccgcaucaucaaggagaucuuccccaccggccgcgucgagcacaccgaggagugcaccugcggcuucgccuccaacaagaccaucgagugcgccugccgcgacaacuccuacaccgccaagcgccccuucgucaagcucaacgucgagaccgacaccgccgagauccgccucaugugcaccgagaccuaccucgacaccccccgccccgacgacggcuccaucaccggccccugcgaguccaacggcgacaagggcuccggcggcaucaagggcggcuucguccaccagcgcauggccuccaagaucggccgcugguacucccgcaccauguccaagaccaagcgcaugggcaugggccucuacgucaaguacgacggcgaccccuggaucgacuccgacgcccucacccucuccggcgucauggucuccauggaggagcccggcugguacuccuucggcuucgagaucaaggacaagaagugcgacguccccugcaucggcaucgagaugguccacgacggcggcaagaccaccuggcacuccgccgccaccgccaucuacugccucaugggcuccggccagcuccucugggacaccgucaccggcgucgacauggcccucuga

SEQ ID NO: 125988 - RNA, 1401 nt, Artificial Sequence
  derived and/or modified CDS sequence (opt2) from neuraminidase__InfluenzaB__AHL91413
augcuccccuccaccauccagacccucacccucuuccucaccuccggcggcguccuccucucccucuacgucuccgccucccucuccuaccuccucuacuccgacauccuccucaaguucacccccaccgagaucaccgcccccaccaugccccucgacugcgccaacgccuccaacguccaggccgucaaccucuccgccaccaagggcgucacccuccuccuccccgagcccgaguggaccuacccccgccucuccugccccggcuccaccuuccagaaggcccuccucaucuccccccaccgcuucggcgagaccaagggcaacuccgccccccucaucauccgcgagcccuucaucgccugcggccccaaggagugcaagcacuucgcccucacccacuacgccgcccagcccggcggcuacuacaacggcacccgcgaggaccgcaacaagcuccgccaccucaucuccgucaagcucggcaagauccccaccgucgagaacuccaucuuccacauggccgccugguccggcuccgccugccacgacggcaaggaguggaccuacaucggcgucgacggccccgacuccaacgcccuccucaagaucaaguacggcgaggccuacaccgacaccuaccacuccuacgccaacaacauccuccgcacccaggaguccgccugcaacugcaucggcggcaacugcuaccucaugaucaccgacggcuccgccuccggcaucuccgagugccgcuuccucaagauccgcgagggccgcaucaucaaggagaucuuccccaccggccgcgucaagcacaccgaggagugcaccugcggcuucgccuccaacaagaccaucgagugcgccugccgcgacaacuccuacaccgccaagcgccccuucgucaagcucaacgucgagaccgacaccgccgagauccgccucaugugcaccgagaccuaccucgacaccccccgccccgacgacggcuccaucaccggccccugcgaguccaacggcaacaagggcuccggcggcaucaagggcggcuucguccaccagcgcauggccuccaagaucggccgcugguacucccgcaccauguccaagaccaagcgcaugggcaugggccucuacgucaaguacgacggcgaccccuggaccgacuccgacgcccucgcccucuccggcgucauggucuccauggaggagcccggcugguacuccuucggcuucgagaucaaggacaagaagugcgacguccccugcaucggcaucgagaugguccacgacggcggcaaggagaccuggcacuccgccgccaccgccaucuacugccucaugggcuccggccagcuccucugggacaccgucaccggcgucgacauggcccucuga

SEQ ID NO: 125989 - RNA, 1401 nt, Artificial Sequence
  derived and/or modified CDS sequence (opt2) from neuraminidase__InfluenzaB__AHL91446
augcuccccuccaccauccagacccucacccucuuccucaccuccggcggcguccuccucucccucuacgucuccgccucccucuccuaccuccucuacuccgacauccuccucaaguucucccccaccgagaucaccgcccccaccaugccccucgacugcgccaacgccuccaacguccaggccgucaaccgcuccgccaccaagggcaugacccuccuccuccccgagcccgaguggaccuacccccgccucuccugccccggcuccaccuuccagaaggcccuccucaucuccccccaccgcuucggcgagaccaagggcaacuccgccccccucaucauccgcgagcccuucaucgccugcggccccaaggagugcaagcacuucgcccucacccacuacgccgcccagcccggcggcuacuacaacggcacccgcgaggaccgcaacaagcuccgccaccucaucuccgucaagcucggcaagauccccaccgucgagaacuccaucuuccacauggccgccugguccggcuccgccugccacgacggcaaggaguggaccuacaucggcgucgacggccccgacuccaacgcccuccucaagaucaaguacggcgaggccuacaccgacaccuaccacuccuacgccaacaacauccuccgcacccaggaguccgccugcaacugcaucggcggcaacugcuaccucaugaucaccgacggcuccgccuccggcaucuccgagugccgcuuccucaagauccgcgagggccgcaucaucaaggagaucuuccccaccggccgcgucgagcacaccgaggagugcaccugcggcuucgccuccaacaagaccaucgagugcgccugccgcgacaacuccuacaccgccaagcgccccuucgucaagcucaacgucgagaccgacaccgccgagauccgccucaugugcaccgagaccuaccucgacaccccccgccccgacgacggcuccaucaccggccccugcgaguccaacggcggcaagggcuccggcggcaucaagggcggcuucguccaccagcgcauggaguccaagaucggccgcugguacucccgcaccauguccaagaccaagcgcaugggcaugggccucuacgucaaguacgacggcgaccccuggaccgacuccgacgcccucgcccucuccggcgucauggucuccauggaggagcccggcugguacuccuucggcuucgagaucaaggacaaggagugcgacguccccugcaucggcaucgagaugguccacgacggcggcaaggagaccuggcacuccgccgccaccgccaucuacugccucaugggcuccggccagcuccucugggacaccgucaccggcgucaacauggcccucuga

SEQ ID NO: 125990 - RNA, 1401 nt, Artificial Sequence
  derived and/or modified CDS sequence (opt2) from neuraminidase__InfluenzaB__AHL91457
augcuccccuccaccauccagacccucacccucuuccucaccuccggcggcguccuccucucccucuacgucuccgccucccucuccuaccuccucuacuccgacauccuccucaaguucucccccaccgagaucaccgcccccaucaugccccucgacugcgccaacgccuccaacguccaggccgucaaccgcuccgccaccaagggcgucacccuccuccuccccgagcccgaguggaccuacccccgccucuccugccccggcuccaccuuccagaaggcccuccucaucuccccccaccgcuucggcgagaccaagggcaacuccgccccccucaucauccgcgagcccuucaucgccugcggccccaaggagugcaagcacuucgcccucacccacuacgccgcccagcccggcggcuacuacaacggcacccgcggcgaccgcaacaagcuccgccaccucaucuccgucaagcucggcaagauccccaccgucgagaacuccaucuuccacauggccgccugguccggcuccgccugccacgacggcaaggaguggaccuacaucggcgucgacggccccgacaacaacgcccuccucaagaucaaguacggcgaggccuacaccgacaccuaccacuccuacgccaacaacacccuccgcacccaggaguccgccugcaacugcaucggcggcaacugcuaccucaugaucaccgacggcuccgccuccggcaucuccgagugccgcuuccucaagauccgcgagggccgcaucaucaaggagaucuuccccaccggccgcgucaagcacaccgaggagugcaccugcggcuucgccuccaacaagaccaucgagugcgccugccgcgacaacuccuacaccgccaagcgccccuucgucaagcucaacgucgagaccgacaccgccgagauccgccucaugugcaccgagaccuaccucgacaccccccgccccgacgacggcuccaucaccggccccugcgaguccaacggcaacaagggcuccggcggcaucaagggcggcuucguccaccagcgcauggccuccaagaucggccgcugguacucccgcaccauguccaagaccaagcgcaugggcaugggccucuacgucaaguacgacggcgaccccuggaccgacuccgacgcccucgcccucuccggcgucauggucuccauggaggagcccggcugguacuccuucggcuucgagaucaaggacaagaagugcgacguccccugcaucggcaucgagaugguccacgacggcggcaaggagaccuggcacuccgccgccaccgccaucuacugccucaugggcuccggccagcuccucugggacaccgucaccggcgucgacauggcccucuga

SEQ ID NO: 125991 - RNA, 1401 nt, Artificial Sequence
  derived and/or modified CDS sequence (opt2) from neuraminidase__InfluenzaB__AHL91468
augcuccccuccaccauccagacccucacccucuuccucaccuccggcggcguccuccucucccucuacgucuccgccucccucuccuaccuccucuacuccgacauccuccucaaguucucccccaccgagaucaccgcccccaccaugccccucgacugcgccaacgccuccaacguccaggccgucaaccgcuccgccaccaagggcgucacccuccuccuccccgagcccgaguggaccuacccccgccucuccugccccggcuccaccuuccagaaggcccuccucaucuccccccaccgcuucggcgagaccaagggcaacuccgccccccucaucauccgcgagcccuucaucgccugcggccccaaggagugcaagcacuucgcccucacccacuacgccgcccagcccggcggcuacuacaacggcacccgcgaggaccgcaacaagcuccgccaccucaucuccgucaagcucggcaagauccccaccgucgagaacuccaucuuccacauggccgccugguccggcuccgccugccacgacggcaaggaguggaccuacaucggcgucgacggccccgacuccaacgcccuccucaagaucaaguacggcgaggccuacaccgacaccuaccacuccuacgccaacaacauccuccgcacccaggaguccgccugcaacugcaucggcggcaacugcuaccucaugaucaccgacggcuccgccuccggcaucuccgagugccgcuuccucaagauccgcgagggccgcaucaucaaggagaucuuccccaccggccgcgucaagcacaccgaggagugcaccugcggcuucgccuccaacaagaccaucgagugcgccugccgcgacaacuccuacaccgccaagcgccccuucgucaagcucaacgucgagaccgacaccgccgagauccgccucaugugcaccgagaccuaccucgacaccccccgccccgacgacggcuccaucaccggccccugcgaguccaacggcgacaagggcuccggcggcaucaagggcggcuucguccaccagcgcauggccuccaagaucggccgcugguacucccgcaccauguccaagaccaagcgcaugggcaugggccucuacgucaaguacgacggcgaccccuggaccgacuccgacgcccucgcccucuccggcgucauggucuccgucggcgagcccggcugguacuccuucggcuucgagaucaaggacaagaagugcgacguccccugcaucggcaucgagaugguccacgacggcggcaaggagaccuggcacuccgccgccaccgccaucuacugccucaugggcuccggccagcuccucugggacaccgucaccggcgucgacauggcccucuga

SEQ ID NO: 125992 - RNA, 1401 nt, Artificial Sequence
  derived and/or modified CDS sequence (opt2) from neuraminidase__InfluenzaB__AHL91479
augcuccccuccaccauccagacccucacccucuuccucaccuccggcggcguccuccucucccucuacgucuccgccucccucuccuaccuccucuacuccgacauccuccucaaguucucccccaccgagaucaccgcccccaccaugcccuccgacugcgccaacgccuccaacguccaggccgucaaccgcuccgccaccaagggcgucacccuccuccuccccgagcccgaguggaccuacccccgccucuccugccccggcuccaccuuccagaaggcccuccucaucuccccccaccgcuucggcgagaccaagggcaacuccgccccccucaucauccgcgagcccuucaucgccugcggccccaaggagugcaagcacuucgcccucacccacuacgccgcccagcccggcggcuacuacaacggcacccgcggcgaccgcaacaagcuccgccaccucaucuccgucaagcucggcaagauccccaccgucgagaacuccaucuuccacauggccgccugguccggcuccgccugccacgacggcaaggaguggaccuacaucggcgucgacggccccgacuccaacgcccuccucaagaucaaguacggcgaggccuacaccgacaccuaccacuccuacgccaacaacauccuccgcacccaggaguccgccugcaacugcaucggcggcaacugcuaccucaugaucaccgacggcuccgccuccggcaucuccgagugccgcuuccucaagauccgcgagggccgcaucaucaaggagaucuuccccaccggccgcgucaagcacaccgaggagugcaccugcggcuucgccuccaacaagaccaucgagugcgccugccgcgacaacuccuacaccgccaagcgccccuucgucaagcucaacgucgagaccgacaccgccgagauccgccucaugugcaccgagaccuaccucgacaccccccgccccgacgacggcuccaucaccggccccugcgaguccaacggcgacaagggcuccggcggcaucaagggcggcuucguccaccagcgcauggccuccaagaucggccgcugguacucccgcaccauguccaagaccaagcgcaugggcaugggccucuacgucaaguacgacggcgaccccuggaccgacuccgacgcccucgcccucuccggcgucauggucuccauggaggagcccggcugguacuccuucggcuucgagaucaaggacaagaagugcgacguccccugcaucggcaucgagaugguccacgacggcggcaaggagaccuggcacuccgccgccaccgccaucuacugccucaugggcuccggccagcuccucugggacaccgucaccggcgucgacauggcccucuga

SEQ ID NO: 125993 - RNA, 1401 nt, Artificial Sequence
  derived and/or modified CDS sequence (opt2) from neuraminidase__InfluenzaB__AHL91501
augcuccccuccaccauccagacccucacccucuuccucaccuccggcggcguccuccucucccucuacgucuccgccucccucuccuaccuccucuacuccgacauccuccucaaguucucccccaccgagaucaccgcccccaccaugccccucgacugcgccaacgccuccaacguccaggccgucaaccgcuccgccaccaagggcaugacccuccuccuccccgagcccgaguggaccuacccccgccucuccugccccggcuccaccuuccagaaggcccuccucaucuccccccaccgcuucggcgagaccaagggcaacuccgccccccucaucauccgcgagcccuucaucgccugcggccccaaggagugcaagcacuucgcccucacccacuacgccgcccagcccggcggcuacuacaacggcacccgcgaggaccgcaacaagcuccgccaccucaucuccgucaagcucggcaagauccccaccgucgagaacuccaucuuccacauggccgccugguccggcuccgccugccacgacggcaaggaguggaccuacaucggcgucgacggccccgacuccaacgcccuccucaagaucaaguacggcgaggccuacaccgacaccuaccacuccuacgccaacaacauccuccgcacccaggaguccgccugcaacugcaucggcggcaacugcuaccucaugaucaccgacggcuccgccuccggcaucuccgagugccgcuuccucaagauccgcgagggccgcaucaucaaggagaucuuccccaccggccgcgucgagcacaccgaggagugcaccugcggcuucgccuccaacaagaccaucgagugcgccugccgcgacaacuccuacaccgccaagcgccccuucgucaagcucaacgucgagaccgacaccgccgagauccgccucaugugcaccgagaccuaccucgacaccccccgccccgacgacggcuccaucaccggccccugcgaguccaacggcggcaagggcuccggcggcaucaagggcggcuucguccaccagcgcauggaguccaagaucggccgcugguacucccgcaccauguccaagaccaagcgcaugggcaugggccucuacgucaaguacgacggcgaccccuggaccgacuccgacgcccucgcccucuccggcgucauggucuccauggaggagcccggcugguacuccuucggcuucgagaucaaggacaagaagugcgacguccccugcaucggcaucgagaugguccacgacggcggcaaggagaccuggcacuccgccgccaccgccaucuacugccucaugggcuccggccagcuccucugggacaccgucaccggcgucaacauggcccucuga

SEQ ID NO: 125994 - RNA, 1401 nt, Artificial Sequence
  derived and/or modified CDS sequence (opt2) from neuraminidase__InfluenzaB__AHL91512
augcuccccuccaccauccagacccucacccucuuccucaccuccggcggcguccuccucucccucuacgucuccgccucccucuccuaccuccucuacuccgacauccuccucaaguucucccccaccgagaucaccgcccccaccaugccccucgacugcgccaacgccuccaacguccaggccgucaaccgcuccgccaccaagggcgucacccuccuccuccccgagcccgaguggaccuacccccgccucuccugccccggcuccaucuuccagaaggcccuccucaucuccccccaccgcuucggcgagaccaagggcaacuccgccccccucaucauccgcgagcccuucaucgccugcggccccaaggagugcaagcacuucgcccucacccacuacgccgcccagcccggcggcuacuacaacggcacccgcggcgaccgcaacaagcuccgccaccucaucuccgucaagcucggcaagauccccaccgucgagaacuccaucuuccacauggccgccugguccggcuccgccugccacgacggcaaggaguggaccuacaucggcgucgacggccccgacuccaacgcccuccucaagaucaaguacggcgaggccuacaccgacaccuaccacuccuacgccaacaacauccuccgcacccaggaguccgccugcaacugcaucggcggcaacugcuaccucaugaucaccgacggcuccgccuccggcaucuccgagugccgcuuccucaagauccgcgagggccgcaucaucaaggagaucuuccccaccggccgcgucaagcacaccgaggagugcaccugcggcuucgccuccaacaagaccaucgagugcgccugccgcgacaacuccuacaccgccaagcgccccuucgucaagcucaacgucgagaccgacaccgccgagauccgccucaugugcaccgagaccuaccucgacaccccccgccccgacgacggcuccaucaccggccccugcgaguccaacggcgacaagggcuccggcggcaucaagggcggcuucguccaccagcgcauggccuccaagaucggccgcugguacucccgcaccauguccaagaccaagcgcaugggcaugggccucuacgucaaguacgacggcgaccccuggaccgacuccgacgcccucgcccucuccggcgucauggucuccauggaggagcccggcugguacuccuucggcuucgagaucaaggacaagaagugcgacguccccugcaucggcaucgagaugguccacgacggcggcaaggagaccuggcacuccgccgccaccgccaucuacugccucaugggcuccggccagcuccucugggacaccgucaccggcgucgacauggcccucuga

SEQ ID NO: 125995 - RNA, 1401 nt, Artificial Sequence
  derived and/or modified CDS sequence (opt2) from neuraminidase__InfluenzaB__AHL91523
augcuccccuccaccauccagacccucacccucuuccucaccuccggcggcguccuccucucccucuacgucuccgccucccucuccuaccuccucuacuccgacauccuccucaaguucucccccaccgagaucaccgcccccaccaugccccucgacugcgccaacgccuccaacguccaggccgucaaccgcuccgccaccaagggcgucacccuccuccuccccgagcccgaguggaccuacccccgccucuccugccccggcuccaccuuccagaaggcccuccucaucuccccccaccgcuucggcgagaccaagggcaacuccgccccccucaucauccgcgagcccuucaucgccugcggccccaaggagugcaagcacuucgcccucacccacuacgccgcccagcccggcggcuacuacaacggcacccgcggcgaccgcaacaagcuccgccaccucaucuccgucaagcucggcaagauccccaccgucgagaacuccaucuuccacauggccgccugguccggcuccgccugccacgacggcaaggaguggaccuacaucggcgucgacggccccgacaacaacgcccuccucaagaucaaguacggcgaggccuacaccgacaccuaccacuccuacgccaacaacauccuccgcacccaggaguccgccugcaacugcaucggcggcaacugcuaccucaugaucaccgacggcuccgccuccggcaucuccgagugccgcuuccucaagauccgcgagggccgcaucaucaaggagaucuuccccaccggccgcgucaagcacaccgaggagugcaccugcggcuucgccuccaacaagaccaucgagugcgccugccgcgacaacuccuacaccgccaagcgccccuucgucaagcucaacgucgagaccgacaccgccgagauccgccucaugugcaccgagaccuaccucgacaccccccgccccgacgacggcuccaucaccggccccugcgaguccaacggcgacaagggcuccggcggcaucaagggcggcuucguccaccagcgcauggccuccaagaucggccgcugguacucccgcaccauguccaagaccaagcgcaugggcaugggccucuacgucaaguacgacggcgaccccuggaccgacuccgacgcccucgcccucuccggcgucauggucuccauggaggagcccggcugguacuccuucggcuucgagaucaaggacaagaagugcgacguccccugcaucggcaucgagaugguccacgacggcggcaaggagaccuggcacuccgccgccaccgccaucuacugccucaugggcuccggccagcuccucugggacaccgucaccggcgucgacauggcccucuga

SEQ ID NO: 125996 - RNA, 1401 nt, Artificial Sequence; identical to SEQ ID NO: 125993
  derived and/or modified CDS sequence (opt2) from neuraminidase__InfluenzaB__AHL91534

SEQ ID NO: 125997 - RNA, 1401 nt, Artificial Sequence
  derived and/or modified CDS sequence (opt2) from neuraminidase__InfluenzaB__AHL91545
augcuccccuccaccauccagacccucacccucuuccucaccuccggcggcguccuccucucccucuacgucuccgccucccucuccuaccuccucuacuccgacauccuccucaaguucucccccaccgagaucaccgcccccaccaugccccucgacugcgccaacgccuccaacguccaggccgucaaccgcuccgccaccaagggcgucacccuccuccuccccgagcccgaguggaccuacccccgccucuccugccccggcuccaccuuccagaaggcccuccucaucuccccccaccgcuucggcgagaccaagggcaacuccgccccccucaucauccgcgagcccuucaucgccugcggccccaaggagugcaagcacuucgcccucacccacuacgccgcccagcccggcggcuacuacaacggcacccgcggcgaccgcaacaagcuccgccaccucaucuccgucaagcucggcaagauccccaccgucgagaacuccaucuuccacauggccgccugguccggcuccgccugccacgacggcaaggaguggaccuacaucggcgucgacggccccgacuccaacgcccuccucaagaucaaguacggcgaggccuacaccgacaccuaccacuccuacgccaacaacauccuccgcacccaggaguccgccugcaacugcaucggcggcaacugcuaccucaugaucaccgacggcuccgccuccggcaucuccgagugccgcuuccucaagauccgcgagggccgcaucaucaaggagaucuuccccaccggccgcgucaagcacaccgaggagugcaccugcggcuucgccuccaacaagaccaucgagugcgccugccgcgacaacuccuacaccgccaagcgccccuucgucaagcucaacgucgagaccgacaccgccgagauccgccucaugugcaccgagaccuaccucgacaccccccgccccgacgacggcuccaucaccggccccugcgaguccaacggcgacaagggcuccggcggcaucaagggcggcuucguccaccagcgcaugaccuccaagaucggccgcugguacucccgcaccauguccaagaccaagcgcaugggcaugggccucuacgucaaguacgacggcgaccccuggaccgacuccgacgcccucgcccucuccggcgucauggucuccauggaggagcccggcugguacuccuucggcuucgagaucaaggacaagaagugcgacguccccugcaucggcaucgagaugguccacgacggcggcaagggcaccuggcacuccgccgccaccgccaucuacugccucaugggcuccggccagcuccucugggacaccgucaccggcgucgacauggcccucuga

SEQ ID NO: 125998 - RNA, 1401 nt, Artificial Sequence; identical to SEQ ID NO: 125993
  derived and/or modified CDS sequence (opt2) from neuraminidase__InfluenzaB__AHL91556

SEQ ID NO: 125999 - RNA, 1401 nt, Artificial Sequence; identical to SEQ ID NO: 125993
  derived and/or modified CDS sequence (opt2) from neuraminidase__InfluenzaB__AHL91578

SEQ ID NO: 126000 - RNA, 1401 nt, Artificial Sequence; identical to SEQ ID NO: 124921
  derived and/or modified CDS sequence (opt2) from neuraminidase__InfluenzaB__AHL91589

SEQ ID NO: 126001 - RNA, 1401 nt, Artificial Sequence
  derived and/or modified CDS sequence (opt2) from neuraminidase__InfluenzaB__AHL91600
augcuccccuccaccauccagacccucacccucuuccucaccaccggcggcguccuccucucccucuacgucuccgccucccucuccuaccuccucuacuccgacauccuccucaaguucucccccaccgagaucaccgcccccaccaugccccucgacugcgccaacgccuccaacguccaggccgucaaccgcuccgccaccaagggcgucaccuuccuccuccccgagcccgaguggaccuacccccgccucuccugccccggcuccaccuuccagaaggcccuccucaucuccccccaccgcuucggcgagaccaagggcaacuccgccccccucaucauccgcgagcccuucaucgccugcggccccaaggagugcaagcacuucgcccucacccacuacgccgcccagcccggcggcuacuacaacggcacccgcggcgaccgcaacaagcuccgccaccucaucuccgucaagcucggcaagauccccaccgucgagaacuccaucuuccacauggccgccugguccggcuccgccugccacgacggcaaggaguggaccuacaucggcgucgacggccccgacuccaacgcccuccucaagaucaaguacggcgaggccuacaccgacaccuaccacuccuacgccaacaacauccuccgcacccaggaguccgccugcaacugcaucggcggcaacugcuaccucaugaucaccgacggcuccgccuccggcaucuccgagugccgcuuccucaagauccgcgagggccgcaucaucaaggagaucuuccccaccggccgcgucaagcacaccgaggagugcaccugcggcuucgccuccaacaagaccaucgagugcgccugccgcgacaacuccuacaccgccaagcgccccuucgucaagcucaacgucgagaccgacaccgccgagauccgccucaugugcaccgagaccuaccucgacaccccccgccccgacgacggcuccaucaccggccccugcgaguccaacggcgacaagggcuccggcggcaucaagggcggcuucguccaccagcgcauggccuccaagaucggccgcugguacucccgcaccauguccaagaccaagcgcaugggcaugggccucuacgucaaguacgacggcgaccccuggaccgacuccgacgcccucgcccucuccggcgucauggucuccauggaggagcccggcugguacuccuucggcuucgagaucaaggacaagaagugcgacguccccugcaucggcaucgagaugguccacgacggcggcaaggagaccuggcacuccgccgccaccgccaucuacugccucaugggcuccggccagcuccucugggacaccgucaccggcgucgacauggcccucuga

SEQ ID NO: 126002 - RNA, 1401 nt, Artificial Sequence; identical to SEQ ID NO: 126001
  derived and/or modified CDS sequence (opt2) from neuraminidase__InfluenzaB__AHL91611

SEQ ID NO: 126003 - RNA, 1401 nt, Artificial Sequence; identical to SEQ ID NO: 125993
  derived and/or modified CDS sequence (opt2) from neuraminidase__InfluenzaB__AHL91622

SEQ ID NO: 126004 - RNA, 1401 nt, Artificial Sequence; identical to SEQ ID NO: 125994
  derived and/or modified CDS sequence (opt2) from neuraminidase__InfluenzaB__AHL91633

SEQ ID NO: 126005 - RNA, 1401 nt, Artificial Sequence; identical to SEQ ID NO: 125994
  derived and/or modified CDS sequence (opt2) from neuraminidase__InfluenzaB__AHL91644

SEQ ID NO: 126006 - RNA, 1401 nt, Artificial Sequence
  derived and/or modified CDS sequence (opt2) from neuraminidase__InfluenzaB__AHL91655
augcuccccuccaccauccagacccucacccucuuccucaccuccggcggcguccuccucucccucuacgucuccgccucccucuccuaccuccucuacuccgacauccuccucaaguucucccccaccgagaucaccgcccccaccaugccccucgacugcgccaacgccuccaacguccaggccgucaaccgcuccgccaccaaggaggucacccuccuccuccccgagcccgaguggaccuacccccgccucuccugccccggcuccaccuuccagaaggcccuccucaucuccccccaccgcuucggcgagaccaagggcaacuccgccccccucaucauccgcgagcccuucaucgccugcggccccaaggagugcaagcacuucgcccucacccacuacgccgcccagcccggcggcuacuacaacggcacccgcggcgaccgcaacaagcuccgccaccucaucuccgucaagcucggcaagauccccaccgucgagaacuccaucuuccacauggccgccugguccggcuccgccugccacgacggcaaggaguggaccuacaucggcgucgacggccccgacuccaacgcccuccucaagaucaaguacggcgaggccuacaccgacaccuaccacuccuacgccaacaacauccuccgcacccaggaguccgccugcaacugcaucggcggcaacugcuaccucaugaucaccgacggcuccgccuccggcaucuccgagugccgcuuccucaagauccgcgagggccgcaucaucaaggagaucuuccccaccggccgcgucaagcacaccgaggagugcaccugcggcuucgccuccaacaagaccaucgagugcgccugccgcgacaacuccuacaccgccaagcgccccuucgucaagcucaacgucgagaccgacaccgccgagauccgccucaugugcaccgagaccuaccucgacaccccccgccccgacgacggcuccaucaccggccccugcgaguccaacggcgacaagggcuccggcggcaucaagggcggcuucguccaccagcgcauggccuccaagaucggccgcugguacucccgcaccauguccaagaccaagcgcaugggcaugggccucuacgucaaguacgacggcgaccccuggaccgacuccgacgcccucgcccucuccggcgucauggucuccauggaggagcccggcugguacuccuucggcuucgagaucaaggacaagaagugcgacguccccugcaucggcaucgagaugguccacgacggcggcaaggagaccuggcacuccgccgccaccgccaucuacugccucaugggcuccggccagcuccucugggacaccgucaccggcgucgacauggcccucuga

SEQ ID NO: 126007 - RNA, 1401 nt, Artificial Sequence; identical to SEQ ID NO: 125993
  derived and/or modified CDS sequence (opt2) from neuraminidase__InfluenzaB__AHL91666

SEQ ID NO: 126008 - RNA, 1401 nt, Artificial Sequence; identical to SEQ ID NO: 125994
  derived and/or modified CDS sequence (opt2) from neuraminidase__InfluenzaB__AHL91677

SEQ ID NO: 126009 - RNA, 1401 nt, Artificial Sequence; identical to SEQ ID NO: 125995
  derived and/or modified CDS sequence (opt2) from neuraminidase__InfluenzaB__AHL91688

SEQ ID NO: 126010 - RNA, 1401 nt, Artificial Sequence; identical to SEQ ID NO: 124723
  derived and/or modified CDS sequence (opt2) from neuraminidase__InfluenzaB__AHL91699

SEQ ID NO: 126011 - RNA, 1401 nt, Artificial Sequence
  derived and/or modified CDS sequence (opt2) from neuraminidase__InfluenzaB__AHL91710
augcuccccuccaccauccagacccucacccucuuccucaccuccggcggcguccuccucucccucuacgucuccgccucccucuccuaccuccucuacuccgacauccuccucaaguucucccccaccgagaucaccgcccccaccaugccccucgacugcgccaacgccuccaacguccaggccgucaaccacuccgccaccaagggcgucacccuccuccuccccgagcccgaguggaccuacccccgccucuccugccccggcuccaccuuccagaaggcccuccucaucuccccccaccgcuucggcgagaccaagggcaacuccgccccccucaucauccgcgagcccuucaucgccugcggccccaaggagugcaagcacuucgcccucacccacuacgccgcccagcccggcggcuacuacaacggcacccgcggcgaccgcaacaagcuccgccaccucaucuccgucaagcucggcaagauccccaccgucgagaacuccaucuuccacauggccgccugguccggcuccgccugccacgacggcaaggaguggaccuacaucggcgucgacggccccgacuccaacgcccuccucaagaucaaguacggcgaggccuacaccgacaccuaccacuccuacgccaacaacauccuccgcacccaggaguccgccugcaacugcaucggcggcaacugcuaccucaugaucaccgacggcuccgccuccggcaucuccgagugccgcuuccucaagauccgcgagggccgcaucaucaaggagaucuuccccaccggccgcgucaagcacaccgaggagugcaccugcggcuucgccuccaacaagaccaucgagugcgccugccgcgacaacuccuacaccgccaagcgccccuucgucaagcucaacgucgagaccgacaccgccgagauccgccucaugugcaccgagaccuaccucgacaccccccgccccgacgacggcuccaucaccggccccugcgaguccaacggcgacaagggcuccggcggcaucaagggcggcuucguccaccagcgcauggccuccaagaucggccgcugguacucccgcaccauguccaagaccaagcgcaugggcaugggccucuacgucaaguacgacggcgaccccuggaccgacuccgacgcccucgcccucuccggcgucauggucuccauggaggagcccggcugguacuccuucggcuucgagaucaaggacaagaagugcgacguccccugcaucggcaucgagaugguccacgacggcggcaaggagaccuggcacuccgccgccaccgccaucuacugccucaugggcuccggccagcuccucugggacaccgucaccggcgucgacauggcccucuga

SEQ ID NO: 126012 - RNA, 1401 nt, Artificial Sequence; identical to SEQ ID NO: 124650
  derived and/or modified CDS sequence (opt2) from neuraminidase__InfluenzaB__AHL91721

SEQ ID NO: 126013 - RNA, 1401 nt, Artificial Sequence; identical to SEQ ID NO: 124718
  derived and/or modified CDS sequence (opt2) from neuraminidase__InfluenzaB__AHL91732

SEQ ID NO: 126014 - RNA, 1401 nt, Artificial Sequence; identical to SEQ ID NO: 124650
  derived and/or modified CDS sequence (opt2) from neuraminidase__InfluenzaB__AHL91743

SEQ ID NO: 126015 - RNA, 1401 nt, Artificial Sequence
  derived and/or modified CDS sequence (opt2) from neuraminidase__InfluenzaB__AHL91754
augcuccccuccaccauccagacccucacccuccuccucaccuccggcggcguccuccucucccucuacgucuccgccucccucuccuaccuccucuacuccgacauccuccucaaguucucccccaccgagaucaccgcccccaccaugccccucgacugcgccaacgccuccaacguccaggccgucaaccgcuccgccaccaagggcgucacccuccuccuccccgagcccgaguggaccuacccccgccucuccugccccggcuccaccuuccagaaggcccuccucaucuccccccaccgcuucggcgagaccaagggcaacuccgccccccucaucauccgcgagcccuucaucgccugcggccccaaggagugcaagcacuucgcccucacccacuacgccgcccagcccggcggcuacuacaacggcacccgcggcgaccgcaacaagcuccgccaccucaucuccgucaagcucggcaagauccccaccgucgagaacuccaucuuccacauggccgccugguccggcuccgccugccacgacggcaaggaguggaccuacaucggcgucgacggccccgacuccaacgcccuccucaagaucaaguacggcgaggccuacaccgacaccuaccacuccuacgccaacaacauccuccgcacccaggaguccgccugcaacugcaucggcggcaacugcuaccucaugaucaccgacggcuccgccuccggcaucuccgagugccgcuuccucaagauccgcgagggccgcaucaucaaggagaucuuccccaccggccgcgucaagcacaccgaggagugcaccugcggcuucgccuccaacaagaccaucgagugcgccugccgcgacaacuccuacaccgccaagcgccccuucgucaagcucaacgucgagaccgacaccgccgagauccgccucaugugcaccgagaccuaccucgacaccccccgccccgacgacggcuccaucaccggccccugcgaguccaacggcgacaagggcuccggcggcaucaagggcggcuucguccaccagcgcauggccuccaagaucggccgcugguacucccgcaccauguccaagaccaagcgcaugggcaugggccucuacgucaaguacgacggcgaccccuggaccgacuccgacgcccucgcccucuccggcgucauggucuccauggaggagcccggcugguacuccuucggcuucgagaucaaggacaagaagugcgacguccccugcaucggcaucgagaugguccacgacggcggcaaggagaccuggcacuccgccgccaccgccaucuacugccucaugggcuccggccagcuccucugggacaccgucaccggcgucgacauggcccucuga

SEQ ID NO: 126016 - RNA, 1401 nt, Artificial Sequence; identical to SEQ ID NO: 124650
  derived and/or modified CDS sequence (opt2) from neuraminidase__InfluenzaB__AHL91765

SEQ ID NO: 126017 - RNA, 1401 nt, Artificial Sequence
  derived and/or modified CDS sequence (opt2) from neuraminidase__InfluenzaB__AHL91776
augcuccccuccaccauccagacccucacccucuuccucaccuccggcggcguccuccucucccucuacgucuccgccucccucuccuaccuccucuacuccgacauccuccucaaguucucccccaccgagaucaccgcccccaccaugccccucgacugcgccaacgccuccaacguccaggccgucaaccgcuccgccaccaagggcgucacccuccuccuccccgagcccgaguggaccuacccccgccucuccugccccggcuccaccuuccagaaggcccuccucaucuccccccaccgcuucggcgagaccaagggcaacuccgccccccucaucauccgcgagcccuucaucgccugcggccccaaggagugcaagcacuucgcccucacccacuacgccgcccagcccggcggcuacuacaacggcacccgcggcgaccgcaacaagcuccgccaccucaucuccgucaagcucggcaagauccccaccgucgagaccuccaucuuccacauggccgccugguccggcuccgccugccacgacggcaaggaguggaccuacaucggcgucgacggccccgacaacaacgcccuccucaagaucaaguacggcgaggccuacaccgacaccuaccacuccuacgccaacaacauccuccgcacccaggaguccgccugcaacugcaucggcggcaacugcuaccucaugaucaccgacggcuccgccuccggcgucuccgagugccgcuuccucaagauccgcgagggccgcaucaucaaggagaucuuccccaccggccgcgucaagcacaccgaggagugcaccugcggcuucgccuccaacaagaccaucgagugcgccugccgcgacaacuccuacaccgccaagcgccccuucgucaagcucaacgucgagaccgacaccgccgagauccgccucaugugcaccgagaccuaccucgacaccccccgccccgacgacggcuccaucaccggccccugcgaguccaacggcgacaagggcuccggcggcaucaagggcggcuucguccaccagcgcauggccuccaagaucggccgcugguacucccgcaccauguccaagaccgagcgcaugggcaugggccucuacgucaaguacgacggcgaccccugggccgacuccgacgcccucgcccucuccggcgucauggucuccauggaggagcccggcugguacuccuucggcuucgagaucaaggacaagaagugcgacguccccugcaucggcaucgagaugguccacgacggcggcaaggagaccuggcacuccgccgccaccgccaucuacugccucaugggcuccggccagcuccucugggacaccgucaccggcgucgacauggcccucuga

SEQ ID NO: 126018 - RNA, 1401 nt, Artificial Sequence; identical to SEQ ID NO: 126017
  derived and/or modified CDS sequence (opt2) from neuraminidase__InfluenzaB__AHL91787

SEQ ID NO: 126019 - RNA, 1401 nt, Artificial Sequence; identical to SEQ ID NO: 126017
  derived and/or modified CDS sequence (opt2) from neuraminidase__InfluenzaB__AHL91798

SEQ ID NO: 126020 - RNA, 1401 nt, Artificial Sequence; identical to SEQ ID NO: 124654
  derived and/or modified CDS sequence (opt2) from neuraminidase__InfluenzaB__AHL91809

SEQ ID NO: 126021 - RNA, 1401 nt, Artificial Sequence
  derived and/or modified CDS sequence (opt2) from neuraminidase__InfluenzaB__AHL91820
augcuccccuccaccauccagacccucacccucuuccucaccuccggcggcguccuccucucccucuacgucuccgccucccucuccuaccuccucuacuccgacauccuccucaaguucucccccaccgagaucaccgcccccaccaugccccucgacugcgccaacgccuccaacguccaggccgucaaccgcuccgccaccaagggcgucacccuccuccuccccgagcccgaguggaccuacccccgccucuccugccccggcuccaccuuccagaaggcccuccucaucuccccccaccgcuucggcgagaccaagggcaacuccgccccccucaucauccgcgagcccuucaucgccugcggccccaacgagugcaagcacuucgcccucacccacuacgccgcccagcccggcggcuacuacaacggcacccgcggcgaccgcaacaagcuccgccaccucaucuccgucaagcucggcaagauccccaccgucgagaacuccaucuuccacauggccgccugguccggcuccgccugccacgacggcaaggaguggaccuacaucggcgucgacggccccgacaacaacgcccuccucaagaucaaguacggcgaggccuacaccgacaccuaccacuccuacgccaacaacauccuccgcacccaggaguccgccugcaacugcaucggcggcaacugcuaccucauggucaccgacggcuccgccuccggcgucuccgagugccgcuuccucaagauccgcgagggccgcaucaucaaggagaucuuccccaccggccgcgucaagcacaccgaggagugcaccugcggcuucgccuccaacaagaccaucgagugcgccugccgcgacaacuccuacaccgccaagcgccccuucgucaagcucaacgucgagaccgacaccgccgagauccgccucaugugcaccgagaccuaccucgacaccccccgccccgacgacggcuccaucaccggccccugcgaguccaacggcgacaagggcuccggcggcaucaagggcggcuucguccaccagcgcauggccuccaagaucggccgcugguacucccgcaccauguccaagaccgagcgcaugggcaugggccucuacgucaaguacgacggcgaccccugggccgacuccgacgcccucgcccucuccggcgucauggucuccauggaggagcccggcugguacuccuucggcuucgagaucaaggacaagaagugcgacguccccugcaucggcaucgagaugguccacgacggcggcaaggagaccuggcacuccgccgccaccgccaucuacugccucaugggcuccggccagcuccucugggacaccgucaccggcgucgacauggcccucuga

SEQ ID NO: 126022 - RNA, 1401 nt, Artificial Sequence
  derived and/or modified CDS sequence (opt2) from neuraminidase__InfluenzaB__AHL91831
augcuccccuccaccauccagacccucacccucuuccucaccuccggcggcguccuccucucccucuacgucuccgccucccucuccuaccuccucuacuccgacauccuccucaaguucucccccaccgagaucaccgcccccaccaugccccucgacugcgccaacgccuccaacguccaggccgucaaccgcuccgccaccaagggcgucacccuccuccuccccgagcccgaguggaccuacccccgccucuccugccccggcuccaccuuccagaaggcccuccucaucuccccccaccgcuucggcgagaccaagggcaacuccgccccccucaucauccgcgagcccuucaucgccugcggccccaacgagugcaagcacuucgcccucacccacuacgccgcccagcccggcggcuacuacaacggcacccgcggcgaccgcaacaagcuccgccaccucaucuccgucaagcucggcaagauccccaccgucgagaacuccaucuuccacauggccgccugguccggcuccgccugccacgacggcaaggaguggaccuacaucggcgucgacggccccgacaacaacgcccuccucaagaucaaguacggcgaggccuacaccgacaccuaccacuccuacgccaacaacauccuccgcacccaggaguccgccugcaacugcaucggcggcaacugcuaccucaugaucaccgacggcuccgccuccggcgucuccgagugccgcuuccucaagauccgcgagggccgcaucaucaaggagaucuuccccaccggccgcgucaagcacaccgaggagugcaccugcggcuucgccuccaacaagaccaucgagugcgccugccgcgacaacuccuacaccgccaagcgccccuucgucaagcucaacgucgagaccgacaccgccgagauccgccucaugugcaccgagaccuaccucgacaccccccgccccgacgacggcuccaucaccggccccugcgaguccaacggcgacaagggcuccggcggcaucaagggcggcuucguccaccagcgcaugaccuccaagaucggccgcugguacucccgcaccauguccaagaccgagcgcaugggcaugggccucuacgucaaguacgacggcgaccccugggccgacuccgacgcccucgcccucuccggcgucauggucuccauggaggagcccggcugguacuccuucggcuucgagaucaaggacaagaagugcgacguccccugcaucggcaucgagaugguccacgacggcggcaaggagaccuggcacuccgccgccaccgccaucuacugccucaugggcuccggccagcuccucugggacaccgucaccggcgucgacauggcccucuga

SEQ ID NO: 126023 - RNA, 1401 nt, Artificial Sequence; identical to SEQ ID NO: 125167
  derived and/or modified CDS sequence (opt2) from neuraminidase__InfluenzaB__AHL91842

SEQ ID NO: 126024 - RNA, 1401 nt, Artificial Sequence
  derived and/or modified CDS sequence (opt2) from neuraminidase__InfluenzaB__AHL91853
augcuccccuccaccauccagacccucacccucuuccucaccuccggcggcguccuccucucccucuacgucuccgccucccucuccuaccuccucuacuccgacauccuccucaaguucuccaccaccgagaucaccgcccccaccaugcccuccgacugcgccaacgccuccaacguccaggccgucaaccgcuccgccaccaagggcgucacccuccuccuccccgagcccgaguggaccuacccccgccucuccugccccggcuccaccuuccagaaggcccuccucaucuccccccaccgcuucggcgagaccaagggcaacuccgccccccucaucauccgcgagcccuucaucgccugcggccccaaggagugcaagcacuucgcccucacccacuacgccgcccagcccggcggcuacuacaacggcacccgcgaggaccgcaacaagcuccgccaccucaucuccgucaagcucggcaagauccccaccgucgagaacuccaucuuccacauggccgccugguccggcuccgccugccacgacggcaaggaguggaccuacaucggcgucgacggccccgacuccaacgcccuccucaagaucaaguacggcgaggccuacaccgacaccuaccacuccuacgccaacaacauccuccgcacccaggaguccgccugcaacugcaucggcggcaacugcuaccucaugaucaccgacggcuccgccuccggcaucuccgagugccgcuuccucaagauccgcgagggccgcaucaucaaggagaucuuccccaccggccgcgucaagcacaccgaggagugcaccugcggcuucgccuccaacaagaccaucgagugcgccugccgcgacaacuccuacaccgccaagcgccccuucgucaagcucaacgucgagaccgacaccgccgagauccgccucaugugcaccgagaccuaccucgacaccccccgccccgacgacggcuccaucaccggccccugcgaguccaacggcaacaagggcuccggcggcaucaagggcggcuucguccaccagcgcauggccuccaagaucggccgcugguacucccgcaccauguccaagaccaagcgcaugggcaugggccucuacgucaaguacgacggcgaccccuggaccgacuccgacgcccucgcccucuccggcgucauggucuccauggaggagcccggcugguacuccuucggcuucgagaucaaggacaagaagugcgacguccccugcaucggcaucgagaugguccacgacggcggcaaggagaccuggcacuccgccgccaccgccaucuacugccucaugggcuccggccagcuccucugggacaccgucaccggcgucgacauggcccucuga

SEQ ID NO: 126025 - RNA, 1401 nt, Artificial Sequence; identical to SEQ ID NO: 125165
  derived and/or modified CDS sequence (opt2) from neuraminidase__InfluenzaB__AHL91864

SEQ ID NO: 126026 - RNA, 1401 nt, Artificial Sequence; identical to SEQ ID NO: 125165
  derived and/or modified CDS sequence (opt2) from neuraminidase__InfluenzaB__AHL91875

SEQ ID NO: 126027 - RNA, 1401 nt, Artificial Sequence; identical to SEQ ID NO: 124922
  derived and/or modified CDS sequence (opt2) from neuraminidase__InfluenzaB__AHL91886

SEQ ID NO: 126028 - RNA, 1401 nt, Artificial Sequence; identical to SEQ ID NO: 124663
  derived and/or modified CDS sequence (opt2) from neuraminidase__InfluenzaB__AHL91897

SEQ ID NO: 126029 - RNA, 1401 nt, Artificial Sequence; identical to SEQ ID NO: 124663
  derived and/or modified CDS sequence (opt2) from neuraminidase__InfluenzaB__AHL91908

SEQ ID NO: 126030 - RNA, 1401 nt, Artificial Sequence
  derived and/or modified CDS sequence (opt2) from neuraminidase__InfluenzaB__AHL91919
augcuccccuccaccauccagacccucacccucuuccucaccuccggcggcguccuccucucccucuacgucuccgccucccucuccuaccuccucuacuccgacauccuccucaaguucucccagaccgagaucaccgcccccaucaugccccucgacugcgccaacgccuccaacguccaggccgucaaccgcuccgccaccaagggcgucaccccccuccuccccgagcccgaguggaccuacccccgccucuccugccccggcuccaccuuccagaaggcccuccucaucuccccccaccgcuucggcgagaccaagggcaacuccgccccccucaucauccgcgagcccuucaucgccugcggccccaaggagugcaagcacuucgcccucacccacuacgccgcccagcccggcggcuacuacaacggcacccgcgaggaccgcaacaagcuccgccaccucaucuccgucaagcucggcaagauccccaccgucgagaacuccaucuuccacauggccgccugguccggcuccgccugccacgacggccgcgaguggaccuacaucggcgucgacggccccgacuccaacgcccuccucaagaucaaguacggcgaggccuacaccgacaccuaccacuccuacgccaagaacauccuccgcacccaggaguccgccugcaacugcaucggcggcgacugcuaccucaugaucaccgacggccccgccuccggcaucuccgagugccgcuuccucaagauccgcgagggccgcaucaucaaggagaucuuccccaccggccgcgucaagcacaccgaggagugcaccugcggcuucgccuccaacaagaccaucgagugcgccugccgcgacaacuccuacaccgccaagcgccccuucgucaagcucaacgucgagaccgacaccgccgagauccgccucaugugcaccgagaccuaccucgacaccccccgccccaacgacggcuccaucaccggccccugcgaguccaacggcgacaagggcuccggcggcaucaagggcggcuucguccaccagcgcauggccuccaagaucggccgcugguacucccgcaccauguccaagaccaagcgcaugggcaugggccucuacgucaaguacgacggcgaccccuggaccgacuccgaggcccucgcccucuccggcgucauggucuccauggaggagcccggcugguacuccuucggcuucgagaucaaggacaagaagugcgacguccccugcaucggcaucgagaugguccacgacggcggcaagaccaccuggcacuccgccgccaccgccaucuacugccucaugggcuccggccagcuccucugggacaccgucaccggcgucgacauggcccucuga

SEQ ID NO: 126031 - RNA, 1401 nt, Artificial Sequence; identical to SEQ ID NO: 125725
  derived and/or modified CDS sequence (opt2) from neuraminidase__InfluenzaB__AHL91930

SEQ ID NO: 126032 - RNA, 1401 nt, Artificial Sequence; identical to SEQ ID NO: 124663
  derived and/or modified CDS sequence (opt2) from neuraminidase__InfluenzaB__AHL91941

SEQ ID NO: 126033 - RNA, 1401 nt, Artificial Sequence; identical to SEQ ID NO: 124663
  derived and/or modified CDS sequence (opt2) from neuraminidase__InfluenzaB__AHL91952

SEQ ID NO: 126034 - RNA, 1401 nt, Artificial Sequence; identical to SEQ ID NO: 124706
  derived and/or modified CDS sequence (opt2) from neuraminidase__InfluenzaB__AHL91963

SEQ ID NO: 126035 - RNA, 1401 nt, Artificial Sequence
  derived and/or modified CDS sequence (opt2) from neuraminidase__InfluenzaB__AHL91974
augcuccccuccaccauccagacccucacccucuuccucaccuccggcggcguccuccucucccucuacgucuccgccucccucuccuaccuccucuacuccgacauccuccucaaguucucccccaccgagaucaccacccccaccaugccccucgacugcgccaacgccuccaacguccaggccgucaaccgcuccgccaccaagggcgucacccuccuccuccccgagcccgaguggaccuacccccgccucuccugccccggcuccaccuuccagaaggcccuccucaucuccccccaccgcuucggcgagaccaagggcaacuccgccccccucaucauccgcgagcccuucaucgccugcggccccaacgagugcaagcacuucgcccucacccacuacgccgcccagcccggcggcuacuacaacggcacccgcggcgaccgcaacaagcuccgccaccucaucuccgucaagcucggcaagauccccaccgucgagaacuccaucuuccacauggccgccugguccggcuccgccugccacgacggcaaggaguggaccuacaucggcgucgacggccccgacaacaacgcccuccucaagaucaaguacggcgaggccuacaccgacaccuaccacuccuacgccaacaacauccuccgcacccaggaguccgccugcaacugcaucggcggcaacugcuaccucaugaucaccgacggcuccgccuccggcgucuccgagugccgcuuccucaagauccgcgagggccgcaucaucaaggagaucuuccccaccggccgcgucaagcacaccgaggagugcaccugcggcuucgccuccaacaagaccaucgagugcgccugccgcgacaacuccuacaccgccaagcgccccuucgucaagcucaacgucgagaccgacaccgccgagauccgccucaugugcaccgacaccuaccucgacaccccccgccccgacgacggcuccaucaccggccccugcgaguccaacggcgacaagggcuccggcggcaucaagggcggcuucguccaccagcgcauggccuccaagaucggccgcugguacucccgcaccauguccaagaccgagcgcaugggcaugggccucuacgucaaguacgacggcgaccccugggccgacuccgacgcccucgccuucuccggcgucauggucuccaugaaggagcccggcugguacuccuucggcuucgagaucaaggacaagaagugcgacguccccugcaucggcaucgagaugguccacgacggcggcaaggagaccuggcacuccgccgccaccgccaucuacugccucaugggcuccggccagcuccucugggacaccgucaccggcgucgacauggcccucuga

SEQ ID NO: 126036 - RNA, 1401 nt, Artificial Sequence; identical to SEQ ID NO: 124706
  derived and/or modified CDS sequence (opt2) from neuraminidase__InfluenzaB__AHL91985

SEQ ID NO: 126037 - RNA, 1401 nt, Artificial Sequence; identical to SEQ ID NO: 124663
  derived and/or modified CDS sequence (opt2) from neuraminidase__InfluenzaB__AHL91995

SEQ ID NO: 126038 - RNA, 1401 nt, Artificial Sequence
  derived and/or modified CDS sequence (opt2) from neuraminidase__InfluenzaB__AHL92006
augcuccccuccaccauccagacccucacccucuuccucaccuccggcggcguccuccucucccucuacgucuccgccucccucuccuaccuccucuacuccgacauccuccucaaguucucccccaccgagaucaccgcccccaccaugccccucgacugcgccaacgccuccaacguccaggccgucaaccgcuccgccaccaagggcgucacccuccuccuccccgagcccgaguggaccuacccccgccucuccugccccggcuccaccuuccagaaggcccuccucaucuccccccaccgcuucggcgagaccaagggcaacuccgccccccucaucauccgcgagcccuucaucgccugcggccccaacgagugcaagcacuucgcccucacccacuacgccgcccagcccggcggcuacuacaacggcacccgcggcgaccgcaacaagcuccgccaccucaucuccgucaagcucggcaagauccccaccgucgagaacuccaucuuccacauggccgccugguccggcuccgccugccacgacggcaaggaguggaccuacaucggcgucgacggccccgacaacaacgcccuccucaagaucaaguacggcgaggccuacaccgacaccuaccacuccuacgccaacaagauccuccgcacccaggaguccgccugcaacugcaucggcggcaacugcuaccucaugaucaccgacggcuccgccuccggcgucuccgagugccgcuuccucaagauccgcgagggccgcaucaucaaggagaucuuccccaccggccgcgucaagcacaccgaggagugcaccugcggcuucgccuccaacaagaccaucgagugcgccugccgcgacaacuccuacaccgccaagcgccccuucgucaagcucaacgucgagaccgacaccgccgagauccgccucaugugcaccgacaccuaccucgacaccccccgccccgacgacggcuccaucaccggccccugcgaguccaacggcgacaagggcuccggcggcaucaagggcggcuucguccaccagcgcauggccuccaagaucggccgcugguacucccgcaccauguccaagaccgagcgcaugggcaugggccucuacgucaaguacgacggcgaccccugggccgacuccgacgcccucgccuucuccggcgucauggucuccaugaaggagcccggcugguacuccuucggcuucgagaucaaggacaagaagugcgacguccccugcaucggcgucgagaugguccacgacggcggcaaggagaccuggcacuccgccgccaccgccaucuacugccucaugggcuccggccagcuccucugggacaccgucaccggcgucgacauggcccucuga

SEQ ID NO: 126039 - RNA, 1401 nt, Artificial Sequence; identical to SEQ ID NO: 124671
  derived and/or modified CDS sequence (opt2) from neuraminidase__InfluenzaB__AHL92017

SEQ ID NO: 126040 - RNA, 1401 nt, Artificial Sequence; identical to SEQ ID NO: 124671
  derived and/or modified CDS sequence (opt2) from neuraminidase__InfluenzaB__AHL92028

SEQ ID NO: 126041 - RNA, 1401 nt, Artificial Sequence
  derived and/or modified CDS sequence (opt2) from neuraminidase__InfluenzaB__AHL92039
augcuccccuccaccauccagacccucacccucuuccucaccuccggcggcguccuccucucccucuacgucuccgccucccucuccuaccuccucuacuccgacauccuccucaaguucucccccaccgagaucaccgcccccaccaugccccucgacugcgccaacgccuccaacguccacgccgucaaccgcuccgccaccaagggcgucacccuccuccuccccgagcccgaguggaucuacccccgccucuccugccccggcuccaccuuccagaaggcccuccucaucuccccccaccgcuucggcgagaccaagggcaacuccgccccccucaucauccgcgagcccuucaucgccugcggccccaacgagugcaagcacuucgcccucacccacuacgccgcccagcccggcggcuacuacaacggcacccgcggcgaccgcaacaagcuccgccaccucaucuccgucaagcucggcaagauccccaccgucgagaacuccaucuuccacauggccgccugguccggcuccgccugccacgacggcaaggaguggaccuacaucggcgucgacggccccgacaacaacgcccuccucaagaucaaguacggcgaggccuacaccgacaccuaccacuccuacgccaacaacauccuccgcacccaggaguccgccugcaacugcaucggcggcaacugcuaccucaugaucaccgacggcuccgccuccggcgucuccgagugccgcuuccucaagauccgcgagggccgcaucaucaaggagaucuuccccaccggccgcgucaagcacaccgaggagugcaccugcggcuucgccuccaacaagaccaucgagugcgccugccgcgacaacuccuacaccgccaagcgccccuucgucaagcucaacgucgagaccgacaccgccgagauccgccucaugugcaccgacaccuaccucgacaccccccgccccgacgacggcuccaucaccggccccugcgaguccaacggcgacaagggcuccggcggcaucaagggcggcuucguccaccagcgcauggccuccaagaucggccgcugguacucccgcaccauguccaagaccgagcgcaugggcaugggccucuacgucaaguacaacggcgaccccugggccgacuccgacgcccucgccuucuccggcgucauggucuccaugaaggagcccggcugguacuccuucggcuucgagaucaaggacaagaagugcgacguccccugcaucggcaucgagaugguccacgacggcggcaaggagaccuggcacuccgccgccaccgccaucuacugccucaugggcuccggccagcuccucugggacaccgucaccggcgucgacauggcccucuga

SEQ ID NO: 126042 - RNA, 1401 nt, Artificial Sequence; identical to SEQ ID NO: 124671
  derived and/or modified CDS sequence (opt2) from neuraminidase__InfluenzaB__AHL92050

SEQ ID NO: 126043 - RNA, 1401 nt, Artificial Sequence
  derived and/or modified CDS sequence (opt2) from neuraminidase__InfluenzaB__AHL92061
augcuccccuccaccacccagacccucacccucuuccucaccuccggcggcguccuccucucccucuacgucuccgccucccucuccuaccuccucuacuccgacauccuccucaaguucucccccaccgagaucaccgcccccaccaugccccucgacugcgccaacgccuccaacguccaggccgucaaccgcuccgccaccaagggcgucacccuccuccuccccgagcccgaguggaccuacccccgccucuccugccccggcuccaccuuccagaaggcccuccucaucuccccccaccgcuucggcgagaccaagggcaacuccgccccccucaucauccgcgagcccuucaucgccugcggccccaacgagugcaagcacuucgcccucacccacuacgccgcccagcccggcggcuacuacaacggcacccgcggcgaccgcaacaagcuccgccaccucaucuccgucaagcucggcaagauccccaccgucgagaacuccaucuuccacauggccgccugguccggcuccgccugccacgacggcaaggaguggaccuacaucggcgucgacggccccgacaacaacgcccuccucaagaucaaguacggcgaggccuacaccgacaccuaccacuccuacgccaacaagauccuccgcacccaggaguccgccugcaacugcaucggcggcaacugcuaccucaugaucaccgacggcuccgccuccggcgucuccgagugccgcuuccucaagauccgcgagggccgcaucaucaaggagaucuuccccaccggccgcgucaagcacaccgaggagugcaccugcggcuucgccuccaacaagaccaucgagugcgccugccgcgacaacuccuacaccgccaagcgccccuucgucaagcucaacgucgagaccgacaccgccgagauccgccucaugugcaccgacaccuaccucgacaccccccgccccgacgacggcuccaucaccggccccugcgaguccaacggcgacaagggcuccggcggcaucaagggcggcuucguccaccagcgcauggccuccaagaucggccgcugguacucccgcaccauguccaagaccgagcgcaugggcaugggccucuacgucaaguacgacggcgaccccugggccgacuccgacgcccucgccuucuccggcgucauggucuccaugaaggagcccggcugguacuccuucggcuucgagaucaaggacaagaagugcgacguccccugcaucggcaucgagaugguccacgacggcggcaaggagaccuggcacuccgccgccaccgccaucuacugccucaugggcuccggccagcuccucugggacaccgucaccggcgucgacauggcccucuga

SEQ ID NO: 126044 - RNA, 1401 nt, Artificial Sequence
  derived and/or modified CDS sequence (opt2) from neuraminidase__InfluenzaB__AHL92072
augcuccccuccaccauccagacccucacccucuuccucaccuccggcggcguccuccucucccucuacgucuccgccucccucuccuaccuccucuacuccgacauccuccucaaguucucccccaccgagaucaccgcccccaccaugccccucgacugcgccaacgccuccaacguccaggccgucaaccacuccgccaccaagggcgucacccuccuccuccccgagcccgaguggaccuacccccgccucuccugccccggcuccaccuuccagaaggcccuccucaucuccccccaccgcuucggcgagaccaagggcaacuccgccccccucaucauccgcgagcccuucaucgccugcggccccaacgagugcaagcacuucgcccucacccacuacgccgcccagcccggcggcuacuacaacggcacccgcggcgaccgcaacaagcuccgccaccucaucuccgucaagcucggcaagauccccaccgucgagaacuccaucuuccacauggccgccugguccggcuccgccugccacgacggcaaggaguggaccuacaucggcgucgacggccccgacaacaacgcccuccucaagaucaaguacggcgaggccuacaccgacaccuaccacuccuacgccaacaagauccuccgcacccaggaguccgccugcaacugcaucggcggcaacugcuaccucaugaucaccgacggcuccgccuccggcgucuccgagugccgcuuccucaagauccgcgagggccgcaucaucaaggagaucuuccccaccggccgcgucaagcacaccgaggagugcaccugcggcuucgccuccaacaagaccaucgagugcgccugccgcgacaacuccuacaccgccaagcgccccuucgucaagcucaacgucgagaccgacaccgccgagauccgccucaugugcaccgacaccuaccucgacaccccccgccccgacgacggcuccaucaccggccccugcgaguccaacggcgacaagggcuccggcggcaucaagggcggcuucguccaccagcgcauggccuccaagaucggccgcugguacucccgcaccauguccaagaccgagcgcaugggcaugggccucuacgucaaguacgacggcgaccccugggccgacuccgacgcccucgccuucuccggcgucauggucuccaugaaggagcccggcugguacuccuucggcuucgagaucaaggacaagaagugcgacguccccugcaucggcaucgagaugguccacgacggcggcaaggagaccuggcacuccgccgccaccgccaucuacugccucaugggcuccggccagcuccucugggacaccgucaccggcgucgacauggcccucuga

SEQ ID NO: 126045 - RNA, 1401 nt, Artificial Sequence; identical to SEQ ID NO: 126044
  derived and/or modified CDS sequence (opt2) from neuraminidase__InfluenzaB__AHL92083

SEQ ID NO: 126046 - RNA, 1401 nt, Artificial Sequence; identical to SEQ ID NO: 126044
  derived and/or modified CDS sequence (opt2) from neuraminidase__InfluenzaB__AHL92094

SEQ ID NO: 126047 - RNA, 1401 nt, Artificial Sequence
  derived and/or modified CDS sequence (opt2) from neuraminidase__InfluenzaB__AHL92105
augcuccccuccaccauccagacccucacccucuuccucaccuccggcggcguccuccucucccucuacgucuccgccucccucuccuaccuccucuacuccgacauccuccucaaguucucccccaccgagaucaccgcccccaccaugccccucgacugcgccaacgccuccaacguccacgccgucaaccgcuccgccaccaagggcgucacccuccuccuccccgagcccgaguggaccuacccccgccucuccugccccggcuccaccuuccagaaggcccuccucaucuccccccaccgcuucggcgagaccaagggcaacuccgccccccucaucauccgcgagcccuucaucgccugcggccccaacgagugcaagcacuucgcccucacccacuacgccgcccagcccggcggcuacuacaacggcacccgcggcgaccgcaacaagcuccgccaccucaucuccgucaagcucggcaagauccccaccgucgagaacuccaucuuccacauggccgccugguccggcuccgccugccacgacggcaaggaguggaccuacaucggcgucgacggccccgacaacaacgcccuccucaagaucaaguacggcgaggccuacaccgacaccuaccacuccuacgccaacaacauccuccgcacccaggaguccgccugcaacugcaucggcggcaacugcuaccucaugaucaccgacggcuccgccuccggcgucuccgagugccgcuuccucaagauccgcgagggccgcaucaucaaggagaucuuccccaccggccgcgucaagcacaccgaggagugcaccugcggcuucgccuccaacaagaccaucgagugcgccugccgcgacaacuccuacaccgccaagcgccccuucgucaagcucaacgucgagaccgacaccgccgagauccgccucaugugcaccgacaccuaccucgacaccccccgccccgacgacggcuccaucaccggccccugcgaguccaacggcgacaagggcggcggcggcaucaagggcggcuucguccaccagcgcauggccuccaagaucggccgcugguacucccgcaccauguccaagaccgagcgcaugggcaugggccucuacgucaaguacgacggcgaccccugggccgacuccgacgcccucgccuucuccggcgucauggucucccucaaggagcccggcugguacuccuucggcuucgagaucaaggacaagaagugcgacguccccugcaucggcaucgagaugguccacgacggcggcaaggagaccuggcacuccgccgccaccgccaucuacugccucaugggcuccggccagcuccucugggacaccgucaccggcgucgacauggcccucuga

SEQ ID NO: 126048 - RNA, 1401 nt, Artificial Sequence; identical to SEQ ID NO: 124824
  derived and/or modified CDS sequence (opt2) from neuraminidase__InfluenzaB__AHL92116

SEQ ID NO: 126049 - RNA, 1401 nt, Artificial Sequence; identical to SEQ ID NO: 126044
  derived and/or modified CDS sequence (opt2) from neuraminidase__InfluenzaB__AHL92127

SEQ ID NO: 126050 - RNA, 1401 nt, Artificial Sequence; identical to SEQ ID NO: 126044
  derived and/or modified CDS sequence (opt2) from neuraminidase__InfluenzaB__AHL92138

SEQ ID NO: 126051 - RNA, 1401 nt, Artificial Sequence; identical to SEQ ID NO: 126044
  derived and/or modified CDS sequence (opt2) from neuraminidase__InfluenzaB__AHL92149

SEQ ID NO: 126052 - RNA, 1401 nt, Artificial Sequence
  derived and/or modified CDS sequence (opt2) from neuraminidase__InfluenzaB__AHL92171
augcuccccuccaccauccagacccucacccucuuccucaccuccggcggcguccuccucucccucuacgucuccgccucccucuccuaccuccucuacuccgacauccuccucaaguucucccccaccgagaucaccgcccccaccaugccccucgacugcgccaacgccuccaacguccaggccgucaaccacuccgccaccaagggcgucacccuccuccuccccgagcccgaguggaccuacccccgccucuccugccccggcuccaccuuccagaaggcccuccucgucuccccccaccgcuucggcgagaccaagggcaacuccgccccccucaucauccgcgagcccuucaucgccugcggccccaacgagugcaagcacuucgcccucacccacuacgccgcccagcccggcggcuacuacaacggcacccgcggcgaccgcaacaagcuccgccaccucaucuccgucaagcucggcaagauccccaccgucgagaacuccaucuuccacauggccgccugguccggcuccgccugccacgacggcaaggaguggaccuacaucggcgucgacggccccgacaacaacgcccuccucaagaucaaguacggcgaggccuacaccgacaccuaccacuccuacgccaacaagauccuccgcacccaggaguccgccugcaacugcaucggcggcaacugcuaccucaugaucaccgacggcuccgccuccggcgucuccgagugccgcuuccucaagauccgcgagggccgcaucaucaaggagaucuuccccaccggccgcgucaagcacaccgaggagugcaccugcggcuucgccuccaacaagaccaucgagugcgccugccgcgacaacuccuacaccgccaagcgccccuucgucaagcucaacgucgagaccgacaccgccgagauccgccucaugugcaccgacaccuaccucgacaccccccgccccgacgacggcuccaucaccggccccugcgaguccaacggcgacaagggcuccggcggcaucaagggcggcuucguccaccagcgcauggccuccaagaucggccgcugguacucccgcaccauguccaagaccgagcgcaugggcaugggccucuacgucaaguacgacggcgaccccugggccgacuccgacgcccucgccuucuccggcgucauggucuccaugaaggagcccggcugguacuccuucggcuucgagaucaaggacaagaagugcgacguccccugcaucggcaucgagaugguccacgacggcggcaaggagaccuggcacuccgccgccaccgccaucuacugccucaugggcuccggccagcuccucugggacaccgucaccggcgucgacauggcccucuga

SEQ ID NO: 126053 - RNA, 1401 nt, Artificial Sequence
  derived and/or modified CDS sequence (opt2) from neuraminidase__InfluenzaB__AHL92182
augcuccccuccaccauccagacccucacccucuuccucaccuccggcggcguccuccucucccucuacgucuccgccucccucuccuaccuccucuacuccgacauccuccucaaguucucccccaccgagaucaccgcccccaccaugccccucgacugcgccaacgccuccaacguccacgccgucaaccgcuccgccaccaagggcgucacccuccuccuccccgagcccgagugggccuacccccgccucuccugccccggcuccaccuuccagaaggcccuccucaucuccccccaccgcuucggcgagaccaagggcaacuccgccccccucaucauccgcgagcccuucaucgccugcggccccaacgagugcaagcacuucgcccucacccacuacgccgcccagcccggcggcuacuacuccggcacccgcggcgaccgcaacaagcuccgccaccucaucuccgucaagcucggcaagauccccaccgucgagaacuccaucuuccacauggccgccugguccggcuccgccugccacgacggcaaggaguggaccuacaucggcgucgacggccccgacaacaacgcccuccucaagaucaaguacggcgaggccuacaccgacaccuaccacuccuacgccaacaacauccuccgcacccaggaguccgccugcaacugcaucggcggcaacugcuaccucaugaucaccgacggcuccgccuccggcgucuccgagugccgcuuccucaagauccgcgagggccgcaucaucaaggagaucuuccccaccggccgcgucaagcacaccgaggagugcaccugcggcuucgccuccaacaagaccaucgagugcgccugccgcgacaacuccuacaccgccaagcgccccuucgucaagcucaacgucgagaccgacaccgccgagauccgccucaugugcaccgacaccuaccucgacaccccccgccccgacgacggcuccaucaccggccccugcgaguccaacggcgacaagggcuccggcggcaucaagggcggcuucguccaccagcgcauggccuccaagaucggccgcugguacucccgcaccauguccaagaccgagcgcaugggcaugggccucuacgucaaguacgacggcgaccccugggccgacuccgacgcccucgccuucuccggcgucauggucuccaugaaggagcccggcugguacuccuucggcuucgagaucaaggacaagaagugcgacguccccugcaucggcaucgagaugguccacgacggcggcaaggagaccuggcacuccgccgccaccgccaucuacugccucaugggcuccggccagcuccucugggacaccgucaccggcgucgacauggcccucuga

SEQ ID NO: 126054 - RNA, 1401 nt, Artificial Sequence; identical to SEQ ID NO: 126053
  derived and/or modified CDS sequence (opt2) from neuraminidase__InfluenzaB__AHL92193

SEQ ID NO: 126055 - RNA, 1401 nt, Artificial Sequence; identical to SEQ ID NO: 124824
  derived and/or modified CDS sequence (opt2) from neuraminidase__InfluenzaB__AHL92204

SEQ ID NO: 126056 - RNA, 1401 nt, Artificial Sequence
  derived and/or modified CDS sequence (opt2) from neuraminidase__InfluenzaB__AHL92215
augcuccccuccaccauccagacccucacccucuuccucaccuccggcggcguccuccucucccucuacgucuccgccucccucuccuaccuccucuacuccgacauccuccucaaguucucccccaccgagaucaccgcccccaccaugccccucgacugcgccaacgccuccaacguccaggccgucaaccacuccgccaccaagggcgucacccuccuccuccccgagcccgaguggaccuacccccgccucuccugccccggcuccaccuuccagaaggcccuccucaucuccccccaccgcuucggcgagaccaagggcaacuccgccccccucaucauccgcgagcccuucaucgccugcggccccaacgagugcaagcacuucgcccucacccacuacgccgcccagcccggcggcuacuacaacggcacccgcggcgaccgcaacaagcuccgccaccucaucuccgucaagcucggcaagauccccaccgucgagaacuccaucuuccacauggccgccugguccggcuccgccugccacgacggcaaggaguggaccuacaucggcgucgacggccccgacaacaacgcccuccucaagaucaaguacggcgaggccuacaccgacaccuaccacuccuacgccaacaagauccuccgcacccaggaguccgccugcaacugcaucggcggcaacugcuaccucaugaucaccgacggcuccgccuccggcgucuccgagugccgcuuccucaagauccgcgagggccgcaucaucaaggagaucuuccccaagggccgcgucaagcacaccgaggagugcaccugcggcuucgccuccaacaagaccaucgagugcgccugccgcgacaacuccuacaccgccaagcgccccuucgucaagcucaacgucgagaccgacaccgccgagauccgccucaugugcaccgacaccuaccucgacaccccccgccccgacgacggcuccaucaccggccccugcgaguccaacggcgacaagggcuccggcggcaucaagggcggcuucguccaccagcgcauggccuccaagaucggccgcugguacucccgcaccauguccaagaccgagcgcaugggcaugggccucuacgucaaguacgacggcgaccccugggccgacuccgacgcccucgccuucuccggcgucauggucuccaugaaggagcccggcugguacuccuucggcuucgagaucaaggacaagaagugcgacguccccugcaucggcaucgagaugguccacgacggcggcaaggagaccuggcacuccgccgccaccgccaucuacugccucaugggcuccggccagcuccucugggacaccgucaccggcgucgacauggcccucuga

SEQ ID NO: 126057 - RNA, 1401 nt, Artificial Sequence; identical to SEQ ID NO: 126044
  derived and/or modified CDS sequence (opt2) from neuraminidase__InfluenzaB__AHL92226

SEQ ID NO: 126058 - RNA, 1401 nt, Artificial Sequence; identical to SEQ ID NO: 124824
  derived and/or modified CDS sequence (opt2) from neuraminidase__InfluenzaB__AHL92237

SEQ ID NO: 126059 - RNA, 1401 nt, Artificial Sequence; identical to SEQ ID NO: 126044
  derived and/or modified CDS sequence (opt2) from neuraminidase__InfluenzaB__AHL92248

SEQ ID NO: 126060 - RNA, 1401 nt, Artificial Sequence
  derived and/or modified CDS sequence (opt2) from neuraminidase__InfluenzaB__AHL92259
augcuccccuccaccauccagacccucacccucuuccucaccuccggcggcguccuccucucccucuacgucuccgccucccucuccuaccuccucuacuccgacauccuccucaaguucucccccaccgagaucaccgccuccaccaugccccucgacugcgccaacgccuccaacguccaggccgucaaccgcuccgccaccaagggcgucacccuccuccuccccgagcccgaguggaccuacccccgccucuccugccccggcuccaccuuccagaaggcccuccucaucuccccccaccgcuucggcgagaccaagggcaacuccgccccccucaucauccgcgagcccuucaucgccugcggccccaacgagugcaagcacuucgcccucacccacuacgccgcccagcccggcggcuacuacaacggcacccgcggcgaccgcaacaagcuccgccaccucaucuccgucaagcucggcaagauccccaccgucgagaacuccaucuuccacauggccgccugguccggcuccgccugccacgacggcaaggaguggaccuacaucggcgucgacggccccgacaacgacgcccuccucaagaucaaguacggcgaggccuacaccgacaccuaccacuccuacgccaacaagauccuccgcacccaggaguccgccugcaacugcaucggcggcaacugcuaccucaugaucaccgacggcuccgccuccggcgucuccgagugccgcuuccucaagauccgcgagggccgcaucaucaaggagaucuuccccaccggccgcgucaagcacaccgaggagugcaccugcggcuucgccuccaacaagaccaucgagugcgccugccgcgacaacuccuacaccgccaagcgccccuucgucaagcucaacgucgagaccgacaccgccgagauccgccucaugugcaccgacaccuaccucgacaccccccgccccgacgacggcuccaucaccggccccugcgaguccaacggcgacaagggcuccggcggcaucaagggcggcuucguccaccagcgcaugaccuccaagaucggccgcugguacucccgcaccauguccaagaccgagcgcaugggcaugggccucuacgucaaguacgacggcgaccccugggccgacuccgacgcccucgccuucuccggcgucauggucuccaugaaggagcccggcugguacuccuucggcuucgagaucaaggacaagaagugcgacguccccugcaucggcaucgagaugguccacgacggcggcaaggagaccuggcacuccgccgccaccgccaucuacugccucaugggcuccggccagcuccucugggacaccgucaccggcgucgacauggcccucuga

SEQ ID NO: 126061 - RNA, 1401 nt, Artificial Sequence; identical to SEQ ID NO: 126044
  derived and/or modified CDS sequence (opt2) from neuraminidase__InfluenzaB__AHL92270

SEQ ID NO: 126062 - RNA, 1401 nt, Artificial Sequence
  derived and/or modified CDS sequence (opt2) from neuraminidase__InfluenzaB__AHL92281
augcuccccuccaccauccagacccucacccucuuccucaccuccggcggcguccuccucucccucuacgucuccgccucccucuccuaccuccucuacuccgacauccuccucaaguucucccccaccgagaucaccgcccccaccaugccccucgacugcgccaacgccuccaacguccaggccgccaaccacuccgccaccaagggcgucacccuccuccuccccgagcccgaguggaccuacccccgccucuccugccccggcuccaccuuccagaaggcccuccucaucuccccccaccgcuucggcgagaccaagggcaacuccgccccccucaucauccgcgagcccuucaucgccugcggccccaacgagugcaagcacuucgcccucacccacuacgccgcccagcccggcggcuacuacaacggcacccgcggcgaccgcaacaagcuccgccaccucaucuccgucaagcucggcaagauccccaccgucgagaacuccaucuuccacauggccgccugguccggcuccgccugccacgacggcaaggaguggaccuacaucggcgucgacggccccgacaacaacgcccuccucaagaucaaguacggcgaggccuacaccgacaccuaccacuccuacgccaacaagauccuccgcacccaggaguccgccugcaacugcaucggcggcaacugcuaccucaugaucaccgacggcuccgccuccggcgucuccgagugccgcuuccucaagauccgcgagggccgcaucaucaaggagaucuuccccaccggccgcgucaagcacaccgaggagugcaccugcggcuucgccuccaacaagaccaucgagugcgccugccgcgacaacuccuacaccgccaagcgccccuucgucaagcucaacgucgagaccgacaccgccgagauccgccucaugugcaccgacaccuaccucgacaccccccgccccgacgacggcuccaucaccggccccugcgaguccaacggcgacaagggcuccggcggcaucaagggcggcuucguccaccagcgcauggccuccaagaucggccgcugguacucccgcaccauguccaagaccgagcgcaugggcaugggccucuacgucaaguacgacggcgaccccugggccgacuccgacgcccucgccuucuccggcgucauggucuccaugaaggagcccggcugguacuccuucggcuucgagaucaaggacaagaagugcgacguccccugcaucggcaucgagaugguccacgacggcggcaaggagaccuggcacuccgccgccaccgccaucuacugccucaugggcuccggccagcuccucugggacaccgucaccggcgucgacauggcccucuga

SEQ ID NO: 126063 - RNA, 1401 nt, Artificial Sequence
  derived and/or modified CDS sequence (opt2) from neuraminidase__InfluenzaB__AHL92303
augcuccccuccaccauccagacccucacccucuuccucaccuccggcggcguccuccucucccucuacgucuccgccucccucuccuaccuccucuacuccgacauccuccucaaguucucccccaccgagaucaccgcccccaccaugccccucgacugcgccaacgccuccaacguccacgccgucaaccgcuccgccaccaagggcgucaccuuccuccuccccgagcccgaguggaccuacccccgccucuccugccccggcuccaccuuccagaaggcccuccucaucuccccccaccgcuucggcgagaccaagggcaacuccgccccccucaucauccgcgagcccuucaucgccugcggccccaacgagugcaagcacuucgcccucacccacuacgccgcccagcccggcggcuacuacaacggcacccgcggcgaccgcaacaagcuccgccaccucaucuccgucaagcucggcaagauccccaccgucgagaacuccaucuuccacauggccgccugguccggcuccgccugccacgacggcaaggaguggaccuacaucggcgucgacggccccgacaacaacgcccuccucaagaucaaguacggcgaggccuacaccgacaccuaccacuccuacgccaacaacauccuccgcacccaggaguccgccugcaacugcaucggcggcaacugcuaccucaugaucaccgacggcuccgccuccggcgucuccgagugccgcuuccucaagauccgcgagggccgcaucaucaaggagaucuuccccaccggccgcgucaagcacaccgaggagugcaccugcggcuucgccuccaacaagaccaucgagugcgccugccgcgacaacuccuacaccgccaagcgccccuucgucaagcucaacgucgagaccgacaccgccgagauccgccucaugugcaccgacaccuaccucgacaccccccgccccgacgacggcuccaucaccggccccugcgaguccaacggcaacaagggcuccggcggcaucaagggcggcuucguccaccagcgcauggccuccaagaucggccgcugguacucccgcaccauguccaagaccgagcgcaugggcaugggccucuacgucaaguacgacggcgaccccugggccgacuccgacgcccucgccuucuccggcgucauggucuccaugaaggagcccggcugguacuccuucggcuucgagaucaaggacaagaagugcgacguccccugcaucggcaucgagaugguccacgacggcggcaaggagaccuggcacuccgccgccaccgccaucuacugccucaugggcuccggccagcuccucugggacaccgucaccggcgucgacauggcccucuga

SEQ ID NO: 126064 - RNA, 1401 nt, Artificial Sequence
  derived and/or modified CDS sequence (opt2) from neuraminidase__InfluenzaB__AHL92314
augcuccccuccaccauccagacccucacccucuuccucaccuccggcggcguccuccucucccucuacgucuccgccucccucuccuaccuccucuacuccgacauccuccucaaguucucccagaccaagaucaccgcccccaucaugccccucgacugcgccaacgccuccaacguccaggccgucaaccgcuccgccgccaagggcgucacccuccuccuccccgagcccgaguggaccuacccccgccucuccugccccggcuccaccuuccagaaggcccuccucaucuccccccaccgcuucggcgagaccaagggcaacuccgccccccucaucauccgcgagcccuucaucgccugcggccccaccgagugcaagcacuucgcccucacccacuacgccgcccagcccggcggcuacuacaacggcacccgcgaggaccgcaacaagcuccgccaccucaucuccgucaagcucggcaagauccccaccgucgagaacuccaucuuccacauggccgccugguccggcuccgccugccacgacggcaaggaguggaccuacgucggcgucgacggccccgacuccaacgcccuccucaagaucaaguacggcgaggccuacaccgacaccuaccacuccuacgccaagaacauccuccgcacccaggaguccgccugcaacugcaucggcggcgacugcuaccucaugaucaccgacggccccgccuccggcaucuccgagugccgcuuccucaagauccgcgagggccgcaucaucaaggagaucuuccccaccggccgcgucaagcacaccgaggagugcaccugcggcuucgccuccaacaagaccaucgagugcgccugccgcgacaacuccuacaccgccaagcgccccuucgucaagcucaacgucgagaccgacaccgccgagauccgccucaugugcaccgagaccuaccucgacaccccccgccccaacgacggcuccaucaccggccccugcgaguccgacggcgacaagggcuccggcggcaucaagggcggcuucguccaccagcgcauggccuccaagaucggccgcugguacucccgcaccauguccaagaccaagcgcaugggcaugggccucuacgucaaguacgacggcgaccccuggaccgacuccgaggcccucgcccucuccggcgucauggucuccauggacgagcccggcugguacuccuucggcuucgagaucaaggacaagaagugcgacguccccugcaucggcaucgagaugguccacgacggcggcaagaccaccuggcacuccgccgccaccgccaucuacugccucaugggcuccggccagcuccucugggacaccgucaccggcgucgacauggcccucuga

SEQ ID NO: 126065 - RNA, 1401 nt, Artificial Sequence
  derived and/or modified CDS sequence (opt2) from neuraminidase__InfluenzaB__AHL92325
augcuccccuccaccauccagacccucacccucuuccucaccuccggcggcguccuccucucccucuacgucuccgccucccucuccuaccuccucuacuccgacauccuccucaaguucucccagaccgagaucaccgcccccaucaugccccucgacugcgccaacgccuccaacguccaggccgucaaccgcuccgccgccaagggcgucacccuccuccuccccgagcccgaguggaccuacccccgccucuccugccccggcuccaccuuccagaaggcccuccucaucuccccccaccgcuucggcgagaccaagggcaacuccgccccccucaucauccgcgagcccuucaucgccugcggccccaccgagugcaagcacuucgcccucacccacuacgccgcccagcccggcggcuacuacaacggcacccgcgaggaccgcaacaagcuccgccaccucaucuccgucaagcucggcaagauccccaccgucgagaacuccaucuuccacauggccgccugguccggcuccgccugccacgacggcaaggaguggaccuacaucggcgucgacggccccgacuccaacgcccuccucaagaucaaguacggcgaggccuacaccgacaccuaccacuccuacgccaagaacauccuccgcacccaggaguccgccugcaacugcaucggcggcgacugcuaccucaugaucaccgacggccccgccuccggcaucuccgagugccgcuuccucaagauccgcgagggccgcaucaucaaggagaucuuccccaccggccgcgucaagcacaccgaggagugcaccugcggcuucgccuccaacaagaccaucgagugcgccugccgcgacaacuccuacaccgccaagcgccccuucgucaagcucaacgucgagaccgacaccgccgagauccgccucaugugcaccgagaccuaccucgacaccccccgccccaacgacggcuccaucaccggccccugcgaguccgacggcgacaagggcuccggcggcaucaagggcggcuucguccaccagcgcauggccuccaagaucggccgcugguacucccgcaccauguccaagaccaagcgcaugggcaugggccucuacgucaaguacgacggcgaccccuggaccgacuccgaggcccucgcccucuccggcgucauggucuccaugggcgagcccggcugguacuccuucggcuucgagaucaaggacaagaagugcgacguccccugcaucggcaucgagaugguccacgacggcggcaagaccaccuggcacuccgccgccaccgccaucuacugccucaugggcuccggccagcuccucugggacaccgucaccggcgucgacauggcccucuga

SEQ ID NO: 126066 - RNA, 1401 nt, Artificial Sequence; identical to SEQ ID NO: 124824
  derived and/or modified CDS sequence (opt2) from neuraminidase__InfluenzaB__AHL92336

SEQ ID NO: 126067 - RNA, 1401 nt, Artificial Sequence
  derived and/or modified CDS sequence (opt2) from neuraminidase__InfluenzaB__AHL92358
augcuccccuccaccauccagacccucacccucuuccucaccuccggcggcguccuccucucccucuacgucuccgccucccucuccuaccuccucuacuccgacauccuccucaaguucucccagaccgagaucaccgcccccaucaugccccucgacugcgccaacgccuccaacguccaggccgucaaccgcuccgccgccaagggcgucacccuccuccuccccgagcccgaguggaccuacccccgccucuccugccccggcuccaccuuccagaaggcccuccucaucuccccccaccgcuucggcgagaccaagggcaacuccgccccccucaucauccgcgagcccuucaucgccugcggccccaaggagugcaagcacuucgcccucacccacuacgccgcccagcccggcggcuacuacaacggcacccgcgaggaccgcaacaagcuccgccaccucaucuccgucaagcucggcaagauccccaccgucgagaacuccaucuuccacauggccgccugguccggcuccgccugccacgacggcaaggaguggaccuacgucggcgucgacggccccgacuccaacgcccuccucaagaucaaguacggcgaggccuacaccgacaccuaccacuccuacgccaagaacauccuccgcacccaggaguccgccugcaacugcaucggcggcgacugcuaccucaugaucaccgacggccccgccuccggcaucuccgagugccgcuuccucaagauccgcgagggccgcaucaucaaggagaucuuccccaccggccgcgucaagcacaccgaggagugcaccugcggcuucgccuccaacaagaccaucgagugcgccugccgcgacaacuccuacaccgccaagcgccccuucgucaagcucaacgucgagaccgacaccgccgagauccgccucaugugcaccgagaccuaccucgacaccccccgccccaacgacggcuccaucaccggccccugcgaguccgacggcgacaagggcuccggcggcaucaagggcggcuucguccaccagcgcauggccuccaagaucggccgcugguacucccgcaccauguccaagaccaagcgcaugggcaugggccucuacgucaaguacgacggcgaccccuggaccgacuccgaggcccucgcccucuccggcgucauggucuccauggaggagcccggcugguacuccuucggcuucgagaucaaggacaagaagugcgacguccccugcaucggcaucgagaugguccacgacggcggcaagaccaccuggcacuccgccgccaccgccaucuacugccucaugggcuccggccagcuccucugggacaccgucaccggcgucgacauggcccucuga

SEQ ID NO: 126068 - RNA, 1401 nt, Artificial Sequence; identical to SEQ ID NO: 126067
  derived and/or modified CDS sequence (opt2) from neuraminidase__InfluenzaB__AHL92369

SEQ ID NO: 126069 - RNA, 1401 nt, Artificial Sequence
  derived and/or modified CDS sequence (opt2) from neuraminidase__InfluenzaB__AHL92380
augcuccccuccaccauccagacccucacccucuuccucaccuccggcggcguccuccucucccucuacgucuccgccucccucuccuaccuccucuacuccgacauccuccucaaguucucccgcaccgagaucaccgcccccaucaugccccucgacugcgccaacgccuccaacguccaggccgucaaccgcuccgccaccaagggcgucaagcuccuccuccccgagcccgaguggaccuacccccgccucuccugccccggcuccaccuuccagaaggcccuccucaucuccccccaccgcuucggcgagaccaagggcaacuccgccccccucaucauccgcgagcccuucaucgccugcggccccaaggagugcaagcacuucgcccucacccacuacgccgcccagcccggcggcuacuacaacggcacccgcgaggaccgcaacaagcuccgccaccucaucuccgucaagcucggcaagauccccaccgucgagaacuccaucuuccacauggccgccugguccggcuccgccugccacgacggccgcgaguggaccuacaucggcgucgacggccccgacuccaacgcccuccucaagaucaaguacggcgaggccuacaccgacaccuaccacuccuacgccaagaacauccuccgcacccaggaguccgccugcaacugcaucggcggcgacugcuaccucaugaucaccgacggccccgccuccggcaucuccgagugccgcuuccucaagauccgcgagggccgcaucaucaaggagaucuuccccaccggccgcgucaagcacaccgaggagugcaccugcggcuucgccuccaacaagaccaucgagugcgccugccgcgacaacuccuacaccgccaagcgccccuucgucaagcucaacgucgagaccgacaccgccgagauccgccucaugugcaccgagaccuaccucgacaccccccgccccaacgacggcuccaucaccggccccugcgaguccaacggcgacaagggcuccggcggcaucaagggcggcuucguccaccagcgcauggccuccaagaucggccgcugguacucccgcaccauguccaagaccaagcgcaugggcaugggccucuacgucaaguacgacggcgaccccuggaccgacuccgaggcccucgcccucuccggcgucauggucuccauggaggagcccggcugguacuccuucggcuucgagaucaaggacaagaagugcgacguccccugcaucggcaucgagaugguccacgacggcggcaagaccaccuggcacuccgccgccaccgccaucuacugccucaugggcuccggccagcuccucugggacaccgucaccggcgucaacaugacccucuga

SEQ ID NO: 126070 - RNA, 1401 nt, Artificial Sequence
  derived and/or modified CDS sequence (opt2) from neuraminidase__InfluenzaB__AHL92391
augcuccccuccaccauccagacccucacccucuuccucaccuccggcggcguccuccucucccucuacgucuccgccucccucuccuaccuccucuacuccgacauccuccucaaguucucccgcaccgagaucaccgcccccaucaugccccucgacugcgccaacgccuccaacguccaggccgucaaccgcuccgccaccaagggcgucacccuccuccuccccgagcccgaguggaccuacccccgccucuccugccccggcuccaccuuccagaaggcccuccucaucuccccccaccgcuucggcgagaccaagggcaacuccgccccccucaucauccgcgagcccuucaucgccugcggccccaaggagugcaagcacuucgcccucacccacuacgccgcccagcccggcggcuacuacaacggcacccgcgaggaccgcuccaagcuccgccaccucaucuccgucaagcucggcaagauccccaccgucgagaacuccaucuuccacauggccgccugguccggcuccgccugccacgacggccgcgaguggaccuacaucggcgucgacggccccgacuccaacgcccuccucaagaucaaguacggcgaggccuacaccgacaccuaccacuccuacgccaagaacauccuccgcacccaggaguccgccugcaacugcaucggcggcgacugcuaccucaugaucaccgacggccccgccuccggcaucuccgagugccgcuuccucaagauccgcgagggccgcaucaucaaggagaucuuccccaccggccgcgucaagcacaccgaggagugcaccugcggcuucgccuccaacaagaccaucgagugcgccugccgcgacaacuccuacaccgccaagcgccccuucgucaagcucaacgucgagaccgacaccgccgagauccgccucaugugcaccgagaccuaccucgacaccccccgccccaacgacggcuccaucaccggccccugcgaguccaacggcgacaagggcuccggcggcaucaagggcggcuucguccaccagcgcauggccuccaagaucggccgcugguacucccgcaccauguccaagaccaagcgcaugggcaugggccucuacgucaaguacgacggcgaccccuggaccgacuccgaggcccucgcccucuccggcgucauggucuccauggaggagcccggcugguacuccuucggcuucgagaucaaggacaagaagugcgacguccccugcaucggcaucgagaugguccacgacggcggcaagaccaccuggcacuccgccgccaccgccaucuacugccucaugggcuccggccagcuccucugggacaccgucaccggcgucaacaugacccucuga

SEQ ID NO: 126071 - RNA, 1401 nt, Artificial Sequence; identical to SEQ ID NO: 124853
  derived and/or modified CDS sequence (opt2) from neuraminidase__InfluenzaB__AHL92402

SEQ ID NO: 126072 - RNA, 1401 nt, Artificial Sequence; identical to SEQ ID NO: 124853
  derived and/or modified CDS sequence (opt2) from neuraminidase__InfluenzaB__AHL92413

SEQ ID NO: 126073 - RNA, 1401 nt, Artificial Sequence; identical to SEQ ID NO: 124853
  derived and/or modified CDS sequence (opt2) from neuraminidase__InfluenzaB__AHL92424

SEQ ID NO: 126074 - RNA, 1401 nt, Artificial Sequence
  derived and/or modified CDS sequence (opt2) from neuraminidase__InfluenzaB__AHL92435
augcuccccuccaccauccagacccucacccucuuccucaccuccggcggcguccuccucucccucuacgucuccgccucccucuccuaccuccucuacuccgacauccuccucaaguucucccagaccgagaucaccgcccccaucaugccccucgacugcgccaacgccuccaacguccaggccgucaaccgcuccgccgccaagggcgucacccuccuccuccccgagcccgaguggaccuacccccgccucuccugccccggcuccaccuuccagaaggcccuccucaucuccccccaccgcuucggcgagaccaagggcaacuccgccccccucaucauccgcgagcccuucaucgccugcggccccaccgagugcaagcacuucgcccucacccacuacgccgcccagcccggcggcuacuacaacggcacccgcgaggaccgcaacaagcuccgccaccucaucuccgucaagcucggcaagauccccaccgucgagaacuccaucuuccacauggccgccugguccggcuccgccugccacgacggcaaggaguggaccuacaucggcgucgacggccccgacuccaacgcccuccucaagaucaaguacggcgaggccuacaccgacaccuaccacuccuacgccaagaacauccuccgcacccaggaguccgccugcaacugcaucggcggcgacugcuaccucaugaucaccgacggccccgccuccggcaucuccgagugccgcuuccucaagauccgcgagggccgcaucaucaaggagaucuuccccaccggccgcgucaagcacaccgaggagugcaccugcggcuucgccuccaacaagaccaucgagugcgccugccgcgacaacuccuacaccgccaagcgccccuucgucaagcucaacgucgagaccgacaccgccgagauccgccucaugugcaccgagaccuaccucgacaccccccgccccaacgacggcuccaucaccggccccugcgaguccgacggcgacaagggcuccggcggcaucaagggcggcuucguccaccagcgcauggccuccaagaucggccgcugguacucccgcaccauguccaagaccaagcgcaugggcaugggccucuacgucaaguacgacggcgaccccuggaccgacuccgaggcccucgcccucuccggcgucaugaucuccauggaggagcccggcugguacuccuucggcuucgagaucaaggacaagaagugcgacguccccugcaucggcaucgagaugguccacgacggcggcaagaccaccuggcacuccgccgccaccgccaucuacugccucaugggcuccggccagcuccucugggacaccgucaccggcgucgacauggcccucuga

SEQ ID NO: 126075 - RNA, 1401 nt, Artificial Sequence; identical to SEQ ID NO: 124853
  derived and/or modified CDS sequence (opt2) from neuraminidase__InfluenzaB__AHL92446

SEQ ID NO: 126076 - RNA, 1401 nt, Artificial Sequence; identical to SEQ ID NO: 124853
  derived and/or modified CDS sequence (opt2) from neuraminidase__InfluenzaB__AHL92457

SEQ ID NO: 126077 - RNA, 1401 nt, Artificial Sequence; identical to SEQ ID NO: 124853
  derived and/or modified CDS sequence (opt2) from neuraminidase__InfluenzaB__AHL92468

SEQ ID NO: 126078 - RNA, 1401 nt, Artificial Sequence; identical to SEQ ID NO: 124853
  derived and/or modified CDS sequence (opt2) from neuraminidase__InfluenzaB__AHL92479

SEQ ID NO: 126079 - RNA, 1401 nt, Artificial Sequence; identical to SEQ ID NO: 124824
  derived and/or modified CDS sequence (opt2) from neuraminidase__InfluenzaB__AHL92490

SEQ ID NO: 126080 - RNA, 1401 nt, Artificial Sequence; identical to SEQ ID NO: 124853
  derived and/or modified CDS sequence (opt2) from neuraminidase__InfluenzaB__AHL92501

SEQ ID NO: 126081 - RNA, 1401 nt, Artificial Sequence
  derived and/or modified CDS sequence (opt2) from neuraminidase__InfluenzaB__AHL92512
augcuccccuccaccauccagacccucacccucuuccucaccuccggcggcguccuccucucccucuacgucuccgccucccucuccuaccuccucuacuccgacauccuccucaaguucucccgcaccgagaucaccgcccccaucaugccccucgacugcgccaacgccuccaacguccaggccgucaaccgcuccgccaccaagggcgucacccuccuccuccccgagcccgaguggaccuacccccgccucuccugccccggcuccaccuuccagaaggcccuccucaucuccccccaccgcuucggcgagaccaagggcaacuccgccccccucaucauccgcgagcccuucaucgccugcggccccaaggagugcaagcacuucgcccucacccacuacgccgcccagcccggcggcuacuacaacggcacccgcgaggaccgcaacaagcuccgccaccucaucuccgucaagcucggcaagauccccaccgucgagaacuccaucuuccacauggucgccugguccggcuccgccugccacgacggccgcgaguggaccuacaucggcgucgacggccccgacuccaacgcccuccucaagaucaaguacggcgaggccuacaccgacaccuaccacuccuacgccaagaacauccuccgcacccaggaguccgccugcaacugcaucggcggcgacugcuaccucaugaucaccgacggccccgccuccggcaucuccgagugccgcuuccucaagauccgcgagggccgcaucaucaaggagaucuuccccaccggccgcgucaagcacaccgaggagugcaccugcggcuucgccuccaacaagaccaucgagugcgccugccgcgacaacuccuacaccgccaagcgccccuucgucaagcucaacgucgagaccgacaccgccgagauccgccucaugugcaccgagaccuaccucgacaccccccgccccaacgacggcuccaucaccggccccugcgaguccaacggcgacaagggcuccggcggcaucaagggcggcuucguccaccagcgcauggccuccaagaucggccgcugguacucccgcaccauguccaagaccaagcgcaugggcaugggccucuacgucaaguacgacggcgaccccuggaccgacuccgaggcccucgcccucuccggcgucauggucuccauggaggagcccggcugguacuccuucggcuucgagaucaaggacaagaagugcgacguccccugcaucggcaucgagaugguccacgacggcggcaagaccaccuggcacuccgccgccaccgccaucuacugccucaugggcuccggccagcuccucugggacaccgucaccggcgucaacaugacccucuga

SEQ ID NO: 126082 - RNA, 1401 nt, Artificial Sequence; identical to SEQ ID NO: 124853
  derived and/or modified CDS sequence (opt2) from neuraminidase__InfluenzaB__AHL92523

SEQ ID NO: 126083 - RNA, 1401 nt, Artificial Sequence; identical to SEQ ID NO: 124853
  derived and/or modified CDS sequence (opt2) from neuraminidase__InfluenzaB__AHL92534

SEQ ID NO: 126084 - RNA, 1401 nt, Artificial Sequence; identical to SEQ ID NO: 124824
  derived and/or modified CDS sequence (opt2) from neuraminidase__InfluenzaB__AHL92545

SEQ ID NO: 126085 - RNA, 1401 nt, Artificial Sequence; identical to SEQ ID NO: 124853
  derived and/or modified CDS sequence (opt2) from neuraminidase__InfluenzaB__AHL92556

SEQ ID NO: 126086 - RNA, 1401 nt, Artificial Sequence; identical to SEQ ID NO: 124853
  derived and/or modified CDS sequence (opt2) from neuraminidase__InfluenzaB__AHL92567

SEQ ID NO: 126087 - RNA, 1401 nt, Artificial Sequence; identical to SEQ ID NO: 124853
  derived and/or modified CDS sequence (opt2) from neuraminidase__InfluenzaB__AHL92578

SEQ ID NO: 126088 - RNA, 1401 nt, Artificial Sequence; identical to SEQ ID NO: 124824
  derived and/or modified CDS sequence (opt2) from neuraminidase__InfluenzaB__AHL92589

SEQ ID NO: 126089 - RNA, 1401 nt, Artificial Sequence; identical to SEQ ID NO: 124853
  derived and/or modified CDS sequence (opt2) from neuraminidase__InfluenzaB__AHL92600

SEQ ID NO: 126090 - RNA, 1401 nt, Artificial Sequence; identical to SEQ ID NO: 125880
  derived and/or modified CDS sequence (opt2) from neuraminidase__InfluenzaB__AHL92611

SEQ ID NO: 126091 - RNA, 1401 nt, Artificial Sequence
  derived and/or modified CDS sequence (opt2) from neuraminidase__InfluenzaB__AHL92622
augcuccccuccaccauccagacccucacccucuuccucaccuccggcggcguccuccucucccucuacgucuccgccucccucuccuaccuccucuacuccgacauccuccucaaguucucccgcaccgagaucaccgcccccaucaugccccucgacugcgccaacgccuccaacguccaggccgucaaccgcuccgccaccaagggcgucaccuuccuccuccccgagcccgaguggaccuacccccgccucuccugccccggcuccaccuuccagaaggcccuccucaucuccccccaccgcuucggcgagaccaagggcaacuccgccccccucaucauccgcgagcccuucaucgccugcggccccaaggagugcaagcacuucgcccucacccacuacgccgcccagcccggcggcuacuacaacggcacccgcgaggaccgcaacaagcuccgccaccucaucuccgucaagcucggcaagauccccaccgucgagaacuccaucuuccacauggccgccugguccggcuccgccugccacgacggccgcgaguggaccuacaucggcgucgacggccccgacuccaacgcccuccucaagaucaaguacggcgaggccuacaccgacaccuaccacuccuacgccaagaacauccuccgcacccaggaguccgccugcaacugcaucggcggcgacugcuaccucaugaucaccgacggccccgccuccggcaucuccgagugccgcuuccucaagauccgcgagggccgcaucaucaaggagaucuuccccaccggccgcgucaagcacaccgaggagugcaccugcggcuucgccuccaacaagaccaucgagugcgccugccgcgacaacuccuacaccgccaagcgccccuucgucaagcucaacgucgagaccgacaccgccgagauccgccucaugugcaccgagaccuaccucgacaccccccgccccaacgacggcuccaucaccggccccugcgaguccaacggcgacaagggcuccggcggcaucaagggcggcuucguccaccagcgcauggccuccaagaucggccgcugguacucccgcaccauguccaagaccaagcgcaugggcaugggccucuacgucaaguacgacggcgaccccuggaccgacuccgaggcccucgcccucuccggcgucauggucuccauggaggagcccggcugguacuccuucggcuucgagaucaaggacaagaagugcgacguccccugcaucggcaucgagaugguccacgacggcggcaagaccaccuggcacuccgccgccaccgccaucuacugccucaugggcuccggccagcuccucugggacaccgucaccggcgucaacaugacccucuga

SEQ ID NO: 126092 - RNA, 1401 nt, Artificial Sequence
  derived and/or modified CDS sequence (opt2) from neuraminidase__InfluenzaB__AHL92633
augcuccccuccaccauccagacccucacccucuuccucaccuccggcggcguccuccucucccucuacgucuccgccucccucuccuaccuccucuacuccgacauccuccucaaguucucccgcaccgagaucaccgcccccaucaugccccucgacugcgccaacgccuccaacguccaggccgucaaccgcuccgccaccaagggcgucaccuuccuccuccccgagcccgaguggaccuacccccgccucuccugccccggcuccaccuuccagaaggcccuccucaucuccccccaccgcuucggcgagaccaagggcaacuccgccccccucaucauccgcgagcccuucaucgccugcggccccaaggagugcaagcacuucgcccucacccacuacgccgcccagcccggcggcuacuacaacggcacccgcgaggaccgcaacaagcuccgccaccucaucuccgucaagcucggcaagauccccaucgucgagaacuccaucuuccacauggccgccugguccggcuccgccugccacgacggccgcgaguggaccuacaucggcgucgacggccccgacuccaacgcccuccucaagaucaaguacggcgaggccuacaccgacaccuaccacuccuacgccaagaacauccuccgcacccaggaguccgccugcaacugcaucggcggcgacugcuaccucaugaucaccgacggccccgccuccggcaucuccgagugccgcuuccucaagauccgcgagggccgcaucaucaaggagaucuuccccaccggccgcgucaagcacaccgaggagugcaccugcggcuucgccuccaacaagaccaucgagugcgccugccgcgacaacuccuacaccgccaagcgccccuucgucaagcucaacgucgagaccgacaccgccgagauccgccucaugugcaccgagaccuaccucgacaccccccgccccaacgacggcuccaucaccggccccugcgaguccaacggcgacaagggcuccggcggcaucaagggcggcuucguccaccagcgcauggccuccaagaucggccgcugguacucccgcaccauguccaagaccaagcgcaugggcaugggccucuacgucaaguacgacggcgaccccuggaccgacuccgaggcccucgcccucuccggcgucauggucuccauggaggagcccggcugguacuccuucggcuucgagaucaaggacaagaagugcgacguccccugcaucggcaucgagaugguccacgacggcggcaagaccaccuggcacuccgccgccaccgccaucuacugccucaugggcuccggccagcuccucugggacaccgucaccggcgucaacaugacccucuga

SEQ ID NO: 126093 - RNA, 1401 nt, Artificial Sequence; identical to SEQ ID NO: 124824
  derived and/or modified CDS sequence (opt2) from neuraminidase__InfluenzaB__AHL92644

SEQ ID NO: 126094 - RNA, 1401 nt, Artificial Sequence; identical to SEQ ID NO: 124824
  derived and/or modified CDS sequence (opt2) from neuraminidase__InfluenzaB__AHL92655

SEQ ID NO: 126095 - RNA, 1401 nt, Artificial Sequence; identical to SEQ ID NO: 124853
  derived and/or modified CDS sequence (opt2) from neuraminidase__InfluenzaB__AHL92666

SEQ ID NO: 126096 - RNA, 1401 nt, Artificial Sequence; identical to SEQ ID NO: 124853
  derived and/or modified CDS sequence (opt2) from neuraminidase__InfluenzaB__AHL92677

SEQ ID NO: 126097 - RNA, 1401 nt, Artificial Sequence; identical to SEQ ID NO: 124824
  derived and/or modified CDS sequence (opt2) from neuraminidase__InfluenzaB__AHL92688

SEQ ID NO: 126098 - RNA, 1401 nt, Artificial Sequence; identical to SEQ ID NO: 124853
  derived and/or modified CDS sequence (opt2) from neuraminidase__InfluenzaB__AHL92699

SEQ ID NO: 126099 - RNA, 1401 nt, Artificial Sequence; identical to SEQ ID NO: 124853
  derived and/or modified CDS sequence (opt2) from neuraminidase__InfluenzaB__AHL92710

SEQ ID NO: 126100 - RNA, 1401 nt, Artificial Sequence; identical to SEQ ID NO: 124853
  derived and/or modified CDS sequence (opt2) from neuraminidase__InfluenzaB__AHL92721

SEQ ID NO: 126101 - RNA, 1401 nt, Artificial Sequence; identical to SEQ ID NO: 124853
  derived and/or modified CDS sequence (opt2) from neuraminidase__InfluenzaB__AHL92732

SEQ ID NO: 126102 - RNA, 1401 nt, Artificial Sequence; identical to SEQ ID NO: 124853
  derived and/or modified CDS sequence (opt2) from neuraminidase__InfluenzaB__AHL92743

SEQ ID NO: 126103 - RNA, 1401 nt, Artificial Sequence; identical to SEQ ID NO: 124853
  derived and/or modified CDS sequence (opt2) from neuraminidase__InfluenzaB__AHL92754

SEQ ID NO: 126104 - RNA, 1401 nt, Artificial Sequence; identical to SEQ ID NO: 124853
  derived and/or modified CDS sequence (opt2) from neuraminidase__InfluenzaB__AHL92765

SEQ ID NO: 126105 - RNA, 1401 nt, Artificial Sequence; identical to SEQ ID NO: 124853
  derived and/or modified CDS sequence (opt2) from neuraminidase__InfluenzaB__AHL92776

SEQ ID NO: 126106 - RNA, 1401 nt, Artificial Sequence; identical to SEQ ID NO: 124853
  derived and/or modified CDS sequence (opt2) from neuraminidase__InfluenzaB__AHL92787

SEQ ID NO: 126107 - RNA, 1401 nt, Artificial Sequence; identical to SEQ ID NO: 124853
  derived and/or modified CDS sequence (opt2) from neuraminidase__InfluenzaB__AHL92798

SEQ ID NO: 126108 - RNA, 1401 nt, Artificial Sequence
  derived and/or modified CDS sequence (opt2) from neuraminidase__InfluenzaB__AHL92809
augcuccccuccaccauccagacccucacccucuuccucaccuccggcggcguccuccucucccucuacgucuccgccucccucuccuaccuccucuacuccgacauccuccucaaguucucccgcaccgagaucaccgcccccaucaugccccucgacugcgccaacgccuccaacguccaggccgucaaccgcuccgccaucaagggcgucacccuccuccuccccgagcccgaguggaccuacccccgccucuccugccccggcuccaccuuccagaaggcccuccucaucuccccccaccgcuucggcgagaccaagggcaacuccgccccccucaucauccgcgagcccuucaucgccugcggccccaaggagugcaagcacuucgcccucacccacuacgccgcccagcccggcggcuacuacaacggcacccgcgaggaccgcaacaagcuccgccaccucaucuccgucaagcucggcaagauccccaccgucgagaacuccaucuuccacauggccgccugguccggcuccgccugccacgacggccgcgaguggaccuacaucggcgucgacggccccgacuccaacgcccuccucaagaucaaguacggcgaggccuacaccgacaccuaccacuccuacgccaagaacauccuccgcacccaggaguccgccugcaacugcaucggcggcgacugcuaccucaugaucaccgacggccccgccuccggcaucuccgagugccgcuuccucaagauccgcgagggccgcaucaucaaggagaucuuccccaccggccgcgucaagcacaccgaggagugcaccugcggcuucgccuccaacaagaccaucgagugcgccugccgcgacaacuccuacaccgccaagcgccccuucgucaagcucaacgucgagaccgacaccgccgagauccgccucaugugcaccgagaccuaccucgacaccccccgccccaacgacggcuccaucaccggccccugcgaguccaacggcgacaagggcuccggcggcaucaagggcggcuucguccaccagcgcauggccuccaagaucggccgcugguacucccgcaccauguccaagaccaagcgcaugggcaugggccucuacgucaaguacgacggcgaccccuggaccgacuccgaggcccucgcccucuccggcgucauggucuccauggaggagcccggcugguacuccuucggcuucgagaucaaggacaagaagugcgacguccccugcaucggcaucgagaugguccacgacggcggcaagaccaccuggcacuccgccgccaccgccaucuacugccucaugggcuccggccagcuccucugggacaccgucaccggcgucaacaugacccucuga

SEQ ID NO: 126109 - RNA, 1401 nt, Artificial Sequence
  derived and/or modified CDS sequence (opt2) from neuraminidase__InfluenzaB__AHL92820
augcuccccuccaccauccagacccucacccucuuccucaccuccggcggcguccuccucucccucuacgucuccgccucccucuccuaccuccucuacuccgacauccuccucaaguucucccgcaccgagaucaccgcccccaucaugccccucgacugcgccaacgccuccaacguccaggccgucaaccgcuccgccaccaagggcgucacccuccuccuccccgagcccgaguggaccuacccccgccucuccugccccggcuccaccuuccagaaggcccuccucaucuccccccaccgcuucggcgagaccaagggcaacuccgccccccucaucauccgcgagcccuucaucgccugcggccccaaggagugcaagcacuucgcccucacccacuacgccgcccagcccggcggcuacuacaacggcacccgcgaggaccgcaacaagcuccgccaccucaucuccgucaagcucggcaagauccccaccgucgagaacuccaucuuccacauggccgccugguccggcuccgccugccacgacggccgcgaguggaccuacaucggcgucgacggccccgacuccaacgcccuccucaagaucaaguacggcgaggccuacaccgacaccuaccacuccuacgccaagaacauccuccgcacccaggaguccgccugcaacugcaucggcggcgacugcuaccucaugaucaccgacggccccgccuccggcaucuccgagugccgcuuccucaagauccgcgagggccgcaucaucaaggagaucuuccccaccggccgcgucaagcacaccgaggagugcaccugcggcuucgccuccaacaagaccaucgagugcgccugccgcgacaacuccuacaccgccaagcgccccuucgucaagcucaacgucgagaccgacaccgccgagauccgccucaugugcaccgagaccuaccucgacaccccccgccccaacgacggcuccaucaccggccccugcgaguccaacggcgacaagggcuccggcggcaucaagggcggcuucguccaccagcgcauggccuccaagaucggccgcugguacucccgcaccauguccaagaccaagcgcaugggcaugggccucuacgucaaguacgacggcgaccccuggaccgacuccgaggcccucgcccucuccggcgucauggucuccauggaggagcccggcugguacuccuucggcuucgagaucaaggacaagaagugcgacguccccugcaucggcaucgagaugguccacgacggcggcaagaagaccuggcacuccgccgccaccgccaucuacugccucaugggcuccggccagcuccucugggacaccgucaccggcgucaacaugacccucuga

SEQ ID NO: 126110 - RNA, 1401 nt, Artificial Sequence
  derived and/or modified CDS sequence (opt2) from neuraminidase__InfluenzaB__AHL92842
augcuccccuccaccauccagacccucacccucuuccucaccuccggcggcguccuccucucccucuacgucuccgccucccucuccuaccuccucuacuccgacauccuccucaaguucucccgcaccgagaucaccgcccccaucaugccccucgacugcgccaacgccuccaacguccaggccgucaaccgcuccaccaccaagggcgucacccuccuccuccccgagcccgaguggaccuacccccgccucuccugccccggcuccaccuuccagaaggcccuccucaucuccccccaccgcuucggcgagaccaagggcaacuccgccccccucaucauccgcgagcccuucaucgccugcggccccaaggagugcaagcacuucgcccucacccacuacgccgcccagcccggcggcuacuacaacggcacccgcgaggaccgcaacaagcuccgccaccucaucuccgucaagcucggcaagauccccaccgucgagaacuccaucuuccacauggccgccugguccggcuccgccugccacgacggccgcgaguggaccuacaucggcgucgacggccccgacuccaacgcccuccucaagaucaaguacggcgaggccuacaccgacaccuaccacuccuacgccaagaacauccuccgcacccaggaguccgccugcaacugcaucggcggcgacugcuaccucaugaucaccgacggccccgccuccggcaucuccgagugccgcuuccucaagauccgcgagggccgcaucaucaaggagaucuuccccaccggccgcgucaagcacaccgaggagugcaccugcggcuucgccuccaacaagaccaucgagugcgccugccgcgacaacuccuacaccgccaagcgccccuucgucaagcucaacgucgagaccgacaccgccgagauccgccucaugugcaccgagaccuaccucgacaccccccgccccaacgacggcuccaucaccggccccugcgaguccaacggcgacaagggcuccggcggcaucaagggcggcuucguccaccagcgcauggccuccaagaucggccgcugguacucccgcaccauguccaagaccaagcgcaugggcaugggccucuacgucaaguacgacggcgaccccuggaccgacuccgaggcccucgcccucuccggcgucauggucuccauggaggagcccggcugguacuccuucggcuucgagaucaaggacaagaagugcgacguccccugcaucggcaucgagaugguccacgacggcggcaagaccaccuggcacuccgccgccaccgccaucuacugccucaugggcuccggccagcuccucugggacaccgucaccggcgucaacaugacccucuga

SEQ ID NO: 126111 - RNA, 1401 nt, Artificial Sequence; identical to SEQ ID NO: 124853
  derived and/or modified CDS sequence (opt2) from neuraminidase__InfluenzaB__AHL92853

SEQ ID NO: 126112 - RNA, 1401 nt, Artificial Sequence; identical to SEQ ID NO: 124853
  derived and/or modified CDS sequence (opt2) from neuraminidase__InfluenzaB__AHL92864

SEQ ID NO: 126113 - RNA, 1401 nt, Artificial Sequence; identical to SEQ ID NO: 124706
  derived and/or modified CDS sequence (opt2) from neuraminidase__InfluenzaB__AHL92875

SEQ ID NO: 126114 - RNA, 1401 nt, Artificial Sequence; identical to SEQ ID NO: 124663
  derived and/or modified CDS sequence (opt2) from neuraminidase__InfluenzaB__AHL92886

SEQ ID NO: 126115 - RNA, 1401 nt, Artificial Sequence
  derived and/or modified CDS sequence (opt2) from neuraminidase__InfluenzaB__AHL92897
augcuccccuccaccauccagacccucacccucuuccucaccuccggcggcguccuccucucccucuacgucuccgccucccucuccuaccuccucuacuccgacauccuccucaaguucucccccaccgagaucaccgcccccaccaucccccucgacugcgccaacgccuccaacguccaggccgucaaccgcuccgccaccaagggcgucacccuccuccuccccgagcccgaguggaccuacccccgccucuccugccccggcuccaccuuccagaaggcccuccucaucuccccccaccgcuucggcgagaccaagggcaacuccgccccccucaucauccgcgagcccuucaucgccugcggccccaacgagugcaagcacuucgcccucacccacuacgccgcccagcccggcggcuacuacaacggcacccgcggcgaccgcaacaagcuccgccaccucaucuccgucaagcucggcaagauccccaccgucgagaacuccaucuuccacauggccgccugguccggcuccgccugccacgacggcaaggaguggaccuacaucggcgucgacggccccgacaacaacgcccuccucaagaucaaguacggcgaggccuacaccgacaccuaccacuccuacgccaacaacauccuccgcacccaggaguccgccugcaacugcaucggcggcaacugcuaccucaugaucaccgacggcuccgccuccggcgucuccgagugccgcuuccucaagauccgcgagggccgcaucaucaaggagaucuuccccaccggccgcgucaagcacaccgaggagugcaccugcggcuucgccuccaacaagaccaucgagugcgccugccgcgacaacuccuacaccgccaagcgccccuucgucaagcucaacgucgagaccgacaccgccgagauccgccucaugugcaccgacaccuaccucgacaccccccgccccgacgacggcuccaucaccggccccugcgaguccaacggcgacaagggcuccggcggcaucaagggcggcuucguccaccagcgcauggccuccaagaucggccgcugguacucccgcaccauguccaagaccgagcgcaugggcaugggccucuacgucaaguacgacggcgaccccugggccgacuccgacgcccucgccuucuccggcgucauggucuccaugaaggagcccggcugguacuccuucggcuucgagaucaaggacaagaagugcgacguccccugcaucggcaucgagaugguccacgacggcggcaaggagaccuggcacuccgccgccaccgccaucuacugccucaugggcuccggccagcuccucugggacaccgucaccggcgucgacauggcccucuga

SEQ ID NO: 126116 - RNA, 1401 nt, Artificial Sequence
  derived and/or modified CDS sequence (opt2) from neuraminidase__InfluenzaB__AHL92908
augcuccccuccaccauccagacccucacccucuuccucacccucggcggcguccuccucucccucuacgucuccgccucccucuccuaccuccucuacuccgacauccuccucaaguucucccagaccgagaucaccgcccccaucaugccccucgacugcgccaacgccuccaacguccaggccgucaaccgcuccgccaccaagggcgucacccuccuccuccccgagcccgaguggaccuacccccgccucuccugccccggcuccaccuuccagaaggcccuccucaucuccccccaccgcuucggcgagaccaagggcaacuccgccccccucaucauccgcgagcccuucaucgccugcggccccaaggagugcaagcacuucgcccucacccacuacgccgcccagcccggcggcuacuacaacggcacccgcgaggaccgcaacaagcuccgccaccucaucuccgucaagcucggcaagauccccaccgucgagaacuccaucuuccacauggccgccugguccggcuccgccugccacgacggcaaggaguggaccuacaucggcgucgacggccccgacuccaacgcccuccucaagaucaaguacggcgaggccuacaccgacaccuaccacuccuacgccaagaacauccuccgcacccaggaguccgccugcaacugcaucggcggcgacugcuaccucaugaucaccgacggccccgccuccggcaucuccgagugccgcuuccucaagauccgcgagggccgcaucaucaaggagaucuuccccaccggccgcgucaagcacaccgaggagugcaccugcggcuucgccuccaacaagaccaucgagugcgccugccgcgacaacuccuacaccgccaagcgccccuucgucaagcucaacgucgagaccgacaccgccgagauccgccucaugugcaccgagaccuaccucgacaccccccgccccaacgacggcuccaucaccggccccugcgaguccaacggcgacaagggcuccggcggcaucaagggcggcuucguccaccagcgcauggccuccaagaucggccgcugguacucccgcaccauguccaagaccaagcgcaugggcaugggccucuacgucaaguacgacggcgaccccuggaccgacuccgaggcccucgcccucuccggcgucauggucuccauggaggagcccggcugguacuccuucggcuucgagaucaaggacaagaagugcgacguccccugcaucggcaucgagaugguccacgacggcggcaagaccaccuggcacuccgccgccaccgccgucuacugccucaugggcuccggccagcuccucugggacaccaucaccggcgucgacauggcccucuga

SEQ ID NO: 126117 - RNA, 1401 nt, Artificial Sequence
  derived and/or modified CDS sequence (opt2) from neuraminidase__InfluenzaB__AHL92919
augcuccccuccaccauccagacccucacccucuuccucaccuccggcggcguccuccucucccucuacgucuccgccucccucuccuaccuccucuacuccgacauccuccucaaguucucccccaccgagaucaccgcccccaccaugccccucgacugcgccaacgccuccaacguccaggccgucaaccgcuccgccaccaagggcgucacccuccuccuccccgagcccgaguggaccuacccccgccucuccugccccggcuccaccuuccagaaggcccuccucaucuccccccaccgcuucggcgagaccaagggcaacuccgccccccucaucauccgcgagcccuucaucgccugcggccccaacgagugcaagcacuucgcccucacccacuacgccgcccagcccggcggcuacuacaacggcacccgcggcgaccgcaacaagcuccgccaccucaucuccgucaagcucggcaagauccccaccgucgagaacuccaucuuccacauggccgccugguccggcuccgccugccacgacggcaaggaguggaccuacaucggcaucgacggccccgacaacaacgcccuccucaagaucaaguacggcgaggccuacaccgacaccuaccacuccuacgccaacaacauccuccgcacccaggaguccgccugcaacugcaucggcggcaacugcuaccucaugaucaccgacggcuccgccuccggcgucuccgagugccgcuuccucaagauccgcgagggccgcaucaucaaggagaucuuccccaccggccgcgucaagcacaccgaggagugcaccugcggcuucgccuccaacaagaccaucgagugcgccugccgcgacaacuccuacaccgccaagcgccccuucgucaagcucaacgucgagaccgacaccgccgagauccgccucaugugcaccgacaccuaccucgacaccccccgccccgacgacggcuccaucaccggccccugcgaguccaacggcgacaagggcuccggcggcaucaagggcggcuucguccaccagcgcauggccuccaagaucggccgcugguacucccgcaccauguccaagaccgagcgcaugggcaugggccucuacgucaaguacgacggcgaccccugggccgacuccgacgcccucgccuucuccggcgucauggucuccaugaaggagcccggcugguacuccuucggcuucgagaucaaggacaagaagugcgacguccccugcaucggcaucgagaugguccacgacggcggcaaggagaccuggcacuccgccgccaccgccaucuacugccucaugggcuccggccagcuccucugggacaccgucaccggcgucgacauggcccucuga

SEQ ID NO: 126118 - RNA, 1401 nt, Artificial Sequence
  derived and/or modified CDS sequence (opt2) from neuraminidase__InfluenzaB__AHL92930
augcuccccuccaccauccagacccucacccucuuccucaccuccggcggcguccuccucucccucuacgucuccgccucccucuccuaccuccucuacuccgacauccuccucaaguucucccccaccgagaucaccgcccccaccaugccccucgacugcgccaacgccuccaacguccaggccgucaaccgcuccgccaccaagggcgucacccuccuccuccccgagcccgaguggaccuacccccgccucuccugccccggcuccaccuuccagaaggcccuccucaucuccccccaccgcuucggcgagaccaagggcaacuccgccccccucaucauccgcgagcccuucaucgccugcggccccaacgagugcaagcacuucgcccucacccacuacgccgcccagcccggcggcuacuacaacggcacccgcggcgaccgcaacaagcuccgccaccucaucuccgucaagcucggcaagauccccaccgucgagaacuccaucuuccacauggccgccugguccggcuccgccugccacgacggcaaggaguggaccuacaucggcgucgacggccccgacaacgacgcccuccucaagaucaaguacggcgaggccuacaccgacaccuaccacuccuacgccaacaacauccuccgcacccaggaguccgccugcaacugcaucggcggcaacugcuaccucaugaucaccgacggcuccgccuccggcgucuccgagugccgcuuccucaagauccgcgagggccgcaucaucaaggagaucuuccccaccggccgcgucaagcacaccgaggagugcaccugcggcuucgccuccaacaagaccaucgagugcgccugccgcgacaacuccuacaccgccaagcgccccuucgucaagcucgacgucgagaccgacaccgccgagauccgccucaugugcaccgacaccuaccucgacaccccccgccccgacgacggcuccaucaccggccccugcgaguccaacggcgacaagggcuccggcggcaucaagggcggcuucguccaccagcgcauggccuccaagaucggccgcugguacucccgcaccauguccaagaccgagcgcaugggcaugggccucuacgucaaguacgacggcgaccccugggccgacuccgacgcccucgccuucuccggcgucauggucuccaugaaggagcccggcugguacuccuucggcuucgagaucaaggacaagaagugcgacguccccugcaucggcaucgagaugguccacgacggcggcaaggagaccuggcacuccgccgccaccgccaucuacugccucaugggcuccggccagcuccucugggacaccgucaccggcgucgacauggcccucuga

SEQ ID NO: 126119 - RNA, 1401 nt, Artificial Sequence; identical to SEQ ID NO: 124663
  derived and/or modified CDS sequence (opt2) from neuraminidase__InfluenzaB__AHL92941

SEQ ID NO: 126120 - RNA, 1401 nt, Artificial Sequence; identical to SEQ ID NO: 124671
  derived and/or modified CDS sequence (opt2) from neuraminidase__InfluenzaB__AHL92952

SEQ ID NO: 126121 - RNA, 1401 nt, Artificial Sequence; identical to SEQ ID NO: 124671
  derived and/or modified CDS sequence (opt2) from neuraminidase__InfluenzaB__AHL92963

SEQ ID NO: 126122 - RNA, 1401 nt, Artificial Sequence
  derived and/or modified CDS sequence (opt2) from neuraminidase__InfluenzaB__AHL92974
augcuccccuccaccauccagacccucacccucuuccucaccuccggcggcguccuccucucccucuacgucuccgccucccucuccuaccuccucuacuccgacauccuccucaaguucucccccaccgagaucaccgcccccaccaugccccucgacugcgccaacgccuccaacguccacgccgucaaccgcuccgccaccaagggcgucacccuccuccuccccgagcccgaguggaccuacccccgccucuccugccccggcuccaccuuccagaaggcccuccucaucuccccccaccgcuucggcgagaccaagggcaacuccgccccccucaucauccgcgagcccuucaucgccugcggccccaacgagugcaagcacuucgcccucacccacuacgccgcccagcccggcggcuacuacaacggcacccgcggcgaccgcaacaagcuccgccaccucaucuccgucaagcucggcaagauccccaccgucgagaacuccaucuuccacauggccgccugguccggcuccgccugccacgacggcaaggaguggaccuacaucggcgucgacggccccgacaacaacgcccuccucaagaucaaguacggcgaggccuacaccgacaccuaccacuccuacgccaacaacauccuccgcacccaggaguccgccugcaacugcaucggcggcaacugcuaccucaugaucaccgacggcuccgccuccggcgucuccgagugccgcuuccucaagauccgcgagggccgcaucaucaaggagaucuuccccaccggccgcgucaagcacaccgaggagugcaccugcggcuucgccuccaacaagaccaucgagugcgccugccgcgacaacuccuacaccgccaagcgccccuucgucaagcucaacgucgagaccgacaccgccgagauccgccucaugugcaccgacaccuaccucgacaccccccgccccgacgacggcuccaucaccggccccugcgaguccaacggcgacaagggcuccggcggcaucaagggcggcuucguccaccagcgcauggccuccaagaucggccgcugguacucccgcaccauguccaagaccgagcgcaugggcaugggccucuacgucaaguacaacggcgaccccugggccgacuccgacgcccucgccuucuccggcgucauggucuccaugaaggagcccggcugguacuccuucggcuucgagaucaaggacaagaagugcgacguccccugcaucggcaucgagaugguccacgacggcggcaaggagaccuggcacuccgccgccaccgccaucuacugccucaugggcuccggccagcuccucugggacaccgucaccggcgucgacauggcccucuga

SEQ ID NO: 126123 - RNA, 1401 nt, Artificial Sequence; identical to SEQ ID NO: 124671
  derived and/or modified CDS sequence (opt2) from neuraminidase__InfluenzaB__AHL92985

SEQ ID NO: 126124 - RNA, 1401 nt, Artificial Sequence; identical to SEQ ID NO: 124671
  derived and/or modified CDS sequence (opt2) from neuraminidase__InfluenzaB__AHL92996

SEQ ID NO: 126125 - RNA, 1401 nt, Artificial Sequence; identical to SEQ ID NO: 126044
  derived and/or modified CDS sequence (opt2) from neuraminidase__InfluenzaB__AHL93008

SEQ ID NO: 126126 - RNA, 1401 nt, Artificial Sequence; identical to SEQ ID NO: 126053
  derived and/or modified CDS sequence (opt2) from neuraminidase__InfluenzaB__AHL93019

SEQ ID NO: 126127 - RNA, 1401 nt, Artificial Sequence; identical to SEQ ID NO: 126053
  derived and/or modified CDS sequence (opt2) from neuraminidase__InfluenzaB__AHL93030

SEQ ID NO: 126128 - RNA, 1401 nt, Artificial Sequence; identical to SEQ ID NO: 126067
  derived and/or modified CDS sequence (opt2) from neuraminidase__InfluenzaB__AHL93041

SEQ ID NO: 126129 - RNA, 1401 nt, Artificial Sequence; identical to SEQ ID NO: 126067
  derived and/or modified CDS sequence (opt2) from neuraminidase__InfluenzaB__AHL93052

SEQ ID NO: 126130 - RNA, 1401 nt, Artificial Sequence; identical to SEQ ID NO: 124853
  derived and/or modified CDS sequence (opt2) from neuraminidase__InfluenzaB__AHL93063

SEQ ID NO: 126131 - RNA, 1401 nt, Artificial Sequence; identical to SEQ ID NO: 124853
  derived and/or modified CDS sequence (opt2) from neuraminidase__InfluenzaB__AHL93074

SEQ ID NO: 126132 - RNA, 1401 nt, Artificial Sequence; identical to SEQ ID NO: 124853
  derived and/or modified CDS sequence (opt2) from neuraminidase__InfluenzaB__AHL93085

SEQ ID NO: 126133 - RNA, 1401 nt, Artificial Sequence; identical to SEQ ID NO: 126110
  derived and/or modified CDS sequence (opt2) from neuraminidase__InfluenzaB__AHL93096

SEQ ID NO: 126134 - RNA, 1401 nt, Artificial Sequence; identical to SEQ ID NO: 124853
  derived and/or modified CDS sequence (opt2) from neuraminidase__InfluenzaB__AHL93107

SEQ ID NO: 126135 - RNA, 1401 nt, Artificial Sequence; identical to SEQ ID NO: 124853
  derived and/or modified CDS sequence (opt2) from neuraminidase__InfluenzaB__AHL93118

SEQ ID NO: 126136 - RNA, 1401 nt, Artificial Sequence; identical to SEQ ID NO: 124824
  derived and/or modified CDS sequence (opt2) from neuraminidase__InfluenzaB__AHL93129

SEQ ID NO: 126137 - RNA, 1401 nt, Artificial Sequence; identical to SEQ ID NO: 124853
  derived and/or modified CDS sequence (opt2) from neuraminidase__InfluenzaB__AHL93140

SEQ ID NO: 126138 - RNA, 1401 nt, Artificial Sequence; identical to SEQ ID NO: 124824
  derived and/or modified CDS sequence (opt2) from neuraminidase__InfluenzaB__AHL93151

SEQ ID NO: 126139 - RNA, 1401 nt, Artificial Sequence; identical to SEQ ID NO: 124853
  derived and/or modified CDS sequence (opt2) from neuraminidase__InfluenzaB__AHL93162

SEQ ID NO: 126140 - RNA, 1401 nt, Artificial Sequence; identical to SEQ ID NO: 124853
  derived and/or modified CDS sequence (opt2) from neuraminidase__InfluenzaB__AHL93173

SEQ ID NO: 126141 - RNA, 1401 nt, Artificial Sequence; identical to SEQ ID NO: 124824
  derived and/or modified CDS sequence (opt2) from neuraminidase__InfluenzaB__AHL93184

SEQ ID NO: 126142 - RNA, 1401 nt, Artificial Sequence; identical to SEQ ID NO: 124853
  derived and/or modified CDS sequence (opt2) from neuraminidase__InfluenzaB__AHL93195

SEQ ID NO: 126143 - RNA, 1401 nt, Artificial Sequence; identical to SEQ ID NO: 124853
  derived and/or modified CDS sequence (opt2) from neuraminidase__InfluenzaB__AHL93206

SEQ ID NO: 126144 - RNA, 1401 nt, Artificial Sequence; identical to SEQ ID NO: 124997
  derived and/or modified CDS sequence (opt2) from neuraminidase__InfluenzaB__AHL93217

SEQ ID NO: 126145 - RNA, 1401 nt, Artificial Sequence; identical to SEQ ID NO: 124997
  derived and/or modified CDS sequence (opt2) from neuraminidase__InfluenzaB__AHL93228

SEQ ID NO: 126146 - RNA, 1401 nt, Artificial Sequence
  derived and/or modified CDS sequence (opt2) from neuraminidase__InfluenzaB__AHL93239
augcuccccuccaccauccagacccucacccucuuccucaccuccggcggcguccuccucucccucuacgucuccgccucccucuccuaccuccucuacuccgacauccuccucaaguucucccccaccgagaucaccgcccccaccaugccccucgacugcgccaacgccuccaacguccaggccgucaaccgcuccgccaccaagggcgucaccuuccuccuccccgagcccgaguggaccuacccccgccucuccugccccggcuccaccuuccagaaggcccuccucaucuccccccaccgcuucggcgagaccaagggcaacuccgccccccucaucauccgcgagcccuucaucgccugcggccccaacgagugcaagcacuucgcccucacccacuacgccgcccagcccggcggcuacuacaacggcacccgcggcgaccgcaacaagcuccgccaccucaucuccgucaagcucggcaagauccccaccgucgagaacuccaucuuccacauggccgccugguccggcuccgccugccacgacggcaaggaguggaccuacaucggcgucgacggccccgacaacaacgcccuccucaaggucaaguacggcgaggccuacaccgacaccuaccacuccuacgccaacaagauccuccgcacccaggaguccgccugcaacugcaucggcggcaacugcuaccucaugaucaccgacggcuccgccuccggcgucuccgagugccgcuuccucaagauccgcgagggccgcaucaucaaggagaucuuccccaccggccgcgucaagcacaccgaggagugcaccugcggcuucgccuccaacaagaccaucgagugcgccugccgcgacaacuccuacaccgccaagcgccccuucgucaagcucaacgucgagaccgacaccgccgagauccgccucaugugcaccgacaccuaccucgacaccccccgccccgacgacggcuccaucaccggccccugcgaguccaacggcgacaagggcuccggcggcaucaagggcggcuucguccaccagcgcauggaguccaagaucggccgcugguacucccgcaccauguccaagaccgagcgcaugggcaugggccucuacgucaaguacgacggcgaccccugggccgacuccgacgcccucgccuucuccggcgucauggucuccaugaaggagcccggcugguacuccuucggcuucgagaucaaggacaagaagugcgacguccccugcaucggcaucgagaugguccacgacggcggcaaggagaccuggcacuccgccgccaccgccaucuacugccucaugggcuccggccagcuccucugggacaccgucaccggcgucgacauggcccucuga

SEQ ID NO: 126147 - RNA, 1401 nt, Artificial Sequence
  derived and/or modified CDS sequence (opt2) from neuraminidase__InfluenzaB__AHL93250
augcuccccuccaccauccagaugcucacccucuuccucaccuccggcggcguccuccucucccucuacgucuccgccucccucuccuaccuccucuacuccgacauccuccucaaguucucccccaccgagaucaccgcccccaccaugccccucgacugcgccaacgccuccaacguccacgccgucaaccgcuccgccaccaagggcgucaccuuccuccuccccgagcccgaguggaccuacccccgccucuccugccccggcuccaccuuccagaaggcccuccucaucuccccccaccgcuucggcgagaccaagggcaacuccgccccccucaucauccgcgagcccuucaucgccugcggccccaacgagugcaagcacuucgcccucacccacuacgccgcccagcccggcggcuacuacaacggcacccgcggcgaccgcaacaagcuccgccaccucaucuccgucaagcucggcaagauccccaccgucgagaacuccaucuuccacauggccgccugguccggcuccgccugccacgacggcaaggaguggaccuacaucggcgucgacggccccgacaacaacgcccuccucaagaucaaguacggcgaggccuacaccgacaccuaccacuccuacgccaacaacauccuccgcacccaggaguccgccugcaacugcaucggcggcaacugcuaccucaugaucaccgacggcuccgccuccggcgucuccgagugccgcuuccucaagauccgcgagggccgcaucaucaaggagaucuuccccaccggccgcgucaagcacaccgaggagugcaccugcggcuucgccuccaacaagaccaucgagugcgccugccgcgacaacuccuacaccgccaagcgccccuucgucaagcucaacgucgagaccgacaccgccgagauccgccucaugugcaccgacaccuaccucgacaccccccgccccgacgacggcuccaucaccggccccugcgaguccaacggcgacaagggcuccggcggcaucaagggcggcuucguccaccagcgcauggccuccaagaucggccgcugguacucccgcaccauguccaagaccgagcgcaugggcaugggccucuacgucaaguacgacggcgaccccuggaccgacuccgacgcccucgccuuccgcggcgucauggucuccaugaaggagcccggcugguacuccuucggcuucgagaucaaggacaagaagugcgacguccccugcaucggcaucgagaugguccacgacggcggcaaggagaccuggcacuccgccgccaccgccaucuacugccucaugggcuccggccagcuccucugggacaccgucaccggcgucgacauggcccucuga

SEQ ID NO: 126148 - RNA, 1401 nt, Artificial Sequence; identical to SEQ ID NO: 124997
  derived and/or modified CDS sequence (opt2) from neuraminidase__InfluenzaB__AHL93261

SEQ ID NO: 126149 - RNA, 1401 nt, Artificial Sequence; identical to SEQ ID NO: 124997
  derived and/or modified CDS sequence (opt2) from neuraminidase__InfluenzaB__AHL93272

SEQ ID NO: 126150 - RNA, 1401 nt, Artificial Sequence; identical to SEQ ID NO: 124997
  derived and/or modified CDS sequence (opt2) from neuraminidase__InfluenzaB__AHL93283

SEQ ID NO: 126151 - RNA, 1401 nt, Artificial Sequence; identical to SEQ ID NO: 124997
  derived and/or modified CDS sequence (opt2) from neuraminidase__InfluenzaB__AHL93294

SEQ ID NO: 126152 - RNA, 1401 nt, Artificial Sequence
  derived and/or modified CDS sequence (opt2) from neuraminidase__InfluenzaB__AHL93305
augcuccccuccaccauccagacccucacccucuuccucaccuccggcggcguccuccucucccucuacgucuccgccucccucuccuaccuccucuacuccgacauccuccucaaguucucccccaccgagaucaccgcccccaccaugccccucgacugcgccaacgccuccaacguccaggccgucaaccgcuccgccaccaagggcgucacccuccuccuccccgagcccgaguggaccuacccccgccucuccugccccggcuccaccuuccagaaggcccuccucaucuccccccaccgcuucggcgagaccaagggcaacuccgccccccucaucauccgcgagcccuucgucgccugcggccccaacgagugcaagcacuucgcccucacccacuacgccgcccagcccggcggcuacuacaacggcacccgcggcgaccgcaacaagcuccgccaccucaucuccgucaagcucggcaagauccccaccgucgagaacuccaucuuccacauggccgccugguccggcuccgccugccacgacggcaaggaguggaccuacaucggcgucgacggccccgacaacaacgcccuccucaaggucaaguacggcgaggccuacaccgacaccuaccacuccuacgccaacaagauccuccgcacccaggaguccgccugcaacugcaucggcggcaacugcuaccucaugaucaccgacggcuccgccuccggcgucuccgagugccgcuuccucaagauccgcgagggccgcaucaucaaggagaucuuccccaccggccgcgucaagcacaccgaggagugcaccugcggcuucgccuccaacaagaccaucgagugcgccugccgcgacaacuccuacaccgccaagcgccccuucgucaagcucaacgucgagaccgacaccgccgagauccgccucaugugcaccgacaccuaccucgacaccccccgccccaacgacggcuccaucaccggccccugcgaguccaacggcgacaagggcuccggcggcaucaagggcggcuucguccaccagcgcauggaguccaagaucggccgcugguacucccgcaccauguccaagaccgagcgcaugggcaugggccucuacgucaaguacgacggcgaccccugggccgacuccgacgcccucgccuucuccggcgucauggucuccaugaaggagcccggcugguacuccuucggcuucgagaucaaggacaagaagugcgacguccccugcaucggcaucgagaugguccacgacggcggcaaggagaccuggcacuccgccgccaccgccaucuacugccucaugggcuccggccagcuccucugggacaccgucaccggcgucgacauggcccucuga

SEQ ID NO: 126153 - RNA, 1401 nt, Artificial Sequence; identical to SEQ ID NO: 124997
  derived and/or modified CDS sequence (opt2) from neuraminidase__InfluenzaB__AHL93316

SEQ ID NO: 126154 - RNA, 1401 nt, Artificial Sequence
  derived and/or modified CDS sequence (opt2) from neuraminidase__InfluenzaB__AHL93338
augcuccccuccaccauccagacccucacccucuuccucaccuccggcggcguccuccucucccucuacgucuccgccucccucuccuaccuccucuacuccgacauccuccucaaguucucccccaccgagaucaccgcccccaccaugccccucgacugcgccaacgccuccaacguccaggccgucaaccgcuccgccaccaagggcgucacccuccuccuccccgagcccgaguggaccuacccccgccucuccugccccggcuccaccuuccagaaggcccuccucaucuccccccaccgcuucggcgagaccaagggcaacuccgccccccucaucauccgcgagcccuucaucgccugcggccccaacgagugcaagcacuucgcccucacccacuacgccgcccagcccggcggcuacuacaacggcacccgcggcgaccgcaacaagcuccgccaccucaucuccgucaagcucggcaagauccccaccgucgagaacuccaucuuccacauggccgccugguccggcuccgccugccacgacggcaaggaguggaccuacaucggcgucgacggccccgacaacaacgcccuccucaaggucaaguacggcgaggccuacaccgacaccuaccacuccuacgccaacaagauccuccgcacccaggaguccgccugcaacugcaucggcggcaacugcuaccucaugaucaccgacggcuccgccuccggcgucuccgagugccgcuuccucaagauccgcgagggccgcaucaucaaggagaucuuccccaccggccgcgucaagcacaccgaggagugcaccugcggcuucgccuccaacaagaccaucgagugcgccugccgcgacaacuccuacaccgccaagcgccccuucgucaagcucaacgucgagaccgacgccgccgagauccgccucaugugcaccgacaccuaccucgacaccccccgccccaacgacggcuccaucaccggccccugcgaguccaacggcgacaagggcuccggcggcaucaagggcggcuucguccaccagcgcauggaguccaagaucggccgcugguacucccgcaccauguccaagaccgagcgcaugggcaugggccucuacgucaaguacgacggcgaccccugggccgacuccgacgcccucgccuucuccggcgucauggucuccaugaaggagcccggcugguacuccuucggcuucgagaucaaggacaagaagugcgacguccccugcaucggcaucgagaugguccacgacggcggcaaggagaccuggcacuccgccgccaccgccaucuacugccucaugggcuccggccagcuccucugggacaccgucaccggcgucgacauggcccucuga

SEQ ID NO: 126155 - RNA, 1401 nt, Artificial Sequence
  derived and/or modified CDS sequence (opt2) from neuraminidase__InfluenzaB__AHL93349
augcuccccuccaccauccagacccucacccucuuccucaccuccggcggcguccuccucucccucuacgucuccgccucccucuccuaccuccucuacuccgacauccuccucaaguucucccccaccgagaucaccgcccccaccaugccccucgacugcgccaacgccuccaacguccaggccgucaaccgcuccgccaccaagggcgucacccuccuccuccccgagcccgaguggaccuacccccgccucuccugccagggcuccaccuuccagaaggcccuccucaucuccccccaccgcuucggcgagaccaagggcaacuccgccccccucaucauccgcgagcccuucaucgccugcggccccaacgagugcaagcacuucgcccucacccacuacgccgcccagcccggcggcuacuacaacggcacccgcggcgaccgcaacaagcuccgccaccucaucuccgucaagcucggcaagauccccaccgucgagaacuccaucuuccacauggccgccugguccggcuccgccugccacgacggcaaggaguggaccuacaucggcgucgacggccccgacaacaacgcccuccucaaggucaaguacggcgaggccuacaccgacaccuaccacuccuacgccaacaagauccuccgcacccaggaguccgccugcaacugcaucggcggcaacugcuaccucaugaucaccgacggcuccgccuccggcgucuccgagugccgcuuccucaagauccgcgagggccgcaucaucaaggagaucuuccccaccggccgcgucaagcacaccgaggagugcaccugcggcuucgccuccaacaagaccaucgagugcgccugccgcgacaacuccuacaccgccaagcgccccuucgucaagcucaacgucgagaccgacaccgccgagauccgccucaugugcaccgacaccuaccucgacaccccccgccccaacgacggcuccaucaccggccccugcgaguccaacggcgacaagggcuccggcggcaucaagggcggcuucguccaccagcgcauggaguccaagaucggccgcugguacucccgcaccauguccaagaccgagcgcaugggcauggagcucuacgucaaguacgacggcgaccccugggccgacuccgacgcccucgccuucuccggcgucauggucuccaugaaggagcccggcugguacuccuucggcuucgagaucaaggacaagaagugcgacguccccugcaucggcaucgagaugguccacgacggcggcaaggagaccuggcacuccgccgccaccgccaucuacugccucaugggcuccggccagcuccucugggacaccgucaccggcgucaacauggcccucuga

SEQ ID NO: 126156 - RNA, 1401 nt, Artificial Sequence; identical to SEQ ID NO: 124997
  derived and/or modified CDS sequence (opt2) from neuraminidase__InfluenzaB__AHL93371

SEQ ID NO: 126157 - RNA, 1401 nt, Artificial Sequence
  derived and/or modified CDS sequence (opt2) from neuraminidase__InfluenzaB__AHL93382
augcuccccuccaccauccagacccucacccucuuccucaccuccggcggcguccuccucucccucuacgucuccgccucccucuccuaccuccucuacuccgacauccuccucaaguucucccccaccgagaucaccgcccccaccaugccccucgacugcgccaacgccuccaacguccaggccgucaaccgcuccgccaccaagggcgucacccuccuccuccccgagcccgaguggaccuacccccgccucuccugccccggcuccaccuuccagaaggcccuccucaucuccccccaccgcuucggcgagaccaagggcaacuccgccccccucaucauccgcgagcccuucaucgccugcggccccaacgagugcaagcacuucgcccucacccacuacgccgcccagcccggcggcuacuacaacggcacccgcggcgaccgcaacaagcuccgccaccucaucuccgucaagcucggcaagauccccaccgucgagaacuccaucuuccacauggccgccugguccggcuccgccugccacgacggcaaggaguggaccuacaucggcgucgacggccccgacaacaacgcccuccucaaggucaaguacggcgaggccuacaccgacaccuaccacuccuacgccaacaagauccuccgcacccaggaguccgccugcaacugcaucggcggcaacugcuaccucaugaucaccgacggcuccgccuccggcgucuccgagugccgcuuccucaagauccgcgagggccgcaucaucaaggagaucuuccccaccggccgcgucaagcacaccgaggagugcaccugcggcuucgccuccaacaagaccaucgagugcgccugccgcgacaacuccuacaccgccaagcgccccuucgucaagcucaacgucgagaccgacaccgccgagauccgccucaugugcaccgacaccuaccucgacaccccccgccccaacgacggcuccaucaccggccccugcgaguccaacggcgacaagggcuccggcggcaucaagggcggcuucguccaccagcgcauggaguccaagaucggccgcugguacucccgcaccauguccaagaccgagcgcaugggcauggagcucuacgucaaguacgacggcgaccccugggccgacuccgacgcccucgccuucuccggcgucauggucuccaugaaggagcccggcugguacuccuucggcuucgagaucaaggacaagaagugcgacguccccugcaucggcaucgagaugguccacgacggcggcaaggagaccuggcacuccgccgccaccgccaucuacugccucaugggcuccggccagcuccucugggacaccgucaccggcgucaacauggcccucuga

SEQ ID NO: 126158 - RNA, 1401 nt, Artificial Sequence; identical to SEQ ID NO: 124997
  derived and/or modified CDS sequence (opt2) from neuraminidase__InfluenzaB__AHL93393

SEQ ID NO: 126159 - RNA, 1401 nt, Artificial Sequence; identical to SEQ ID NO: 124997
  derived and/or modified CDS sequence (opt2) from neuraminidase__InfluenzaB__AHL93404

SEQ ID NO: 126160 - RNA, 1401 nt, Artificial Sequence; identical to SEQ ID NO: 124997
  derived and/or modified CDS sequence (opt2) from neuraminidase__InfluenzaB__AHL93415

SEQ ID NO: 126161 - RNA, 1401 nt, Artificial Sequence; identical to SEQ ID NO: 124997
  derived and/or modified CDS sequence (opt2) from neuraminidase__InfluenzaB__AHL93426

SEQ ID NO: 126162 - RNA, 1401 nt, Artificial Sequence; identical to SEQ ID NO: 124997
  derived and/or modified CDS sequence (opt2) from neuraminidase__InfluenzaB__AHL93437

SEQ ID NO: 126163 - RNA, 1401 nt, Artificial Sequence; identical to SEQ ID NO: 126157
  derived and/or modified CDS sequence (opt2) from neuraminidase__InfluenzaB__AHL93448

SEQ ID NO: 126164 - RNA, 1404 nt, Artificial Sequence
  derived and/or modified CDS sequence (opt2) from neuraminidase__InfluenzaB__AHL93459
augcuccccuccaccauccagacccucacccucuuccucaccuccggcggcguccuccucucccucuacgucuccgccucccucuccuaccuccucuacuccgacauccuccucaaguucucccccaccgagaucaccgcccccaccaugccccucgacugcgccaacgccuccaacguccaggccgucaaccgcuccgccaccaagggcgucacccuccuccuccuccccgagcccgaguggaccuacccccgccucuccugccccggcuccaccuuccagaaggcccuccucaucuccccccaccgcuucggcgagaccaagggcaacuccgccccccucaucauccgcgagcccuucaucgccugcggccccaacgagugcaagcacuucgcccucacccacuacgccgcccagcccggcggcuacuacaacggcacccgcggcgaccgcaacaagcuccgccaccucaucuccgucaagcucggcaagauccccaccgucgagaacuccaucuuccacauggccgccugguccggcuccgccugccacgacggcaaggaguggaccuacaucggcgucgacggccccgacaacaacgcccuccucaaggucaaguacggcgaggccuacaccgacaccuaccacuccuacgccaacaagauccuccgcacccaggaguccgccugcaacugcaucggcggcaacugcuaccucaugaucaccgacggcuccgccuccggcgucuccgagugccgcuuccucaagauccgcgagggccgcaucaucaaggagaucuuccccaccggccgcgucaagcacaccgaggagugcaccugcggcuucgccuccaacaagaccaucgagugcgccugccgcgacaacuccuacaccgccaagcgccccuucgucaagcucaacgucgagaccgacaccgccgagauccgccucaugugcaccgacaccuaccucgacaccccccgccccaacgacggcuccaucaccggccccugcgaguccaacggcgacaagggcuccggcggcaucaagggcggcuucguccaccagcgcauggaguccaagaucggccgcugguacucccgcaccauguccaagaccgagcgcaugggcaugggccucuacgucaaguacgacggcgaccccugggccgacuccgacgcccucgccuucuccggcgucauggucuccaugaaggagcccggcugguacuccuucggcuucgagaucaaggacaagaagugcgacguccccugcaucggcaucgagaugguccacgacggcggcaaggagaccuggcacuccgccgccaccgccaucuacugccucaugggcuccggccagcuccucugggacaccgucaccggcgucgacauggcccucuga

SEQ ID NO: 126165 - RNA, 1401 nt, Artificial Sequence
  derived and/or modified CDS sequence (opt2) from neuraminidase__InfluenzaB__AHL93470
augcuccccuccaccauccagacccucacccucuuccucaccuccggcggcguccuccucucccucuacgucuccgccucccucuccuaccuccucuacuccgacauccuccucaaguucucccccaccgagaucaccgcccccaccaugccccucgacugcgccaacgccuccaacguccaggccgucaaccgcuccgccaccaagggcgucacccuccuccuccccgagcccgaguggaccuacccccgccucuccugccccggcuccaccuuccagaaggcccuccucaucuccccccaccgcuucggcgagaccaagggcaacuccgccccccucaucauccgcgagcccuucaucgccugcggccccaacgagugcaagcacuucgcccucacccacuacgccgcccagcccggcggcuacuacaacggcacccgcggcgaccgcaacaagcuccgccaccucaucuccgucaagcucggcaagauccccaccgucgagaacuccaucuuccacauggccgccugguccggcuccgccugccacgacggcaaggaguggaccuacaucggcgucgacggccccgacaacaacgcccuccucaaggucaaguacggcgaggccuacaccgacaccuaccacuccuacgccaacaagauccuccgcacccaggaguccgccugcaacugcaucggcggcaacugcuaccucaugaucaccgacggcuccgccuccggcgucuccgagugccgcuuccucaagauccgcgagggccgcaucaucaaggagaucuuccccaccggccgcgucaagcacaccgaggagugcaccugcggcuucgccuccaacaagaccaucgagugcgccugccgcgacaacuccuacaccgccaagcgccccuucgucaagcucaacgucgagaccgacaccgccgagauccgccucaugugcaccgacaccuaccucgacaccccccgccccaacgacggcuccaucaccggccccugcgaguccaacggcgacaagggcuccggcggcaucaagggcggcuucguccaccagcgcauggaguccaagaucggccgcugguacucccgcaccauguccaagaccgagcgcaugggcaugggccucuacgucaaguacgacggcgaccccugggccgacuccgacgcccucaccuucuccggcgucauggucuccaugaaggagcccggcugguacuccuucggcuucgagaucaaggacaagaagugcgacguccccugcaucggcaucgagaugguccacgacggcggcaaggagaccuggcacuccgccgccaccgccaucuacugccucaugggcuccggccagcuccucugggacaccgucaccggcgucgacauggcccucuga

SEQ ID NO: 126166 - RNA, 1401 nt, Artificial Sequence; identical to SEQ ID NO: 124934
  derived and/or modified CDS sequence (opt2) from neuraminidase__InfluenzaB__AHL93481

SEQ ID NO: 126167 - RNA, 1401 nt, Artificial Sequence; identical to SEQ ID NO: 124992
  derived and/or modified CDS sequence (opt2) from neuraminidase__InfluenzaB__AHL93492

SEQ ID NO: 126168 - RNA, 1401 nt, Artificial Sequence; identical to SEQ ID NO: 124853
  derived and/or modified CDS sequence (opt2) from neuraminidase__InfluenzaB__AHL93503

SEQ ID NO: 126169 - RNA, 1401 nt, Artificial Sequence
  derived and/or modified CDS sequence (opt2) from neuraminidase__InfluenzaB__AHL93514
augcuccccuccaccauccagacccucacccucuuccucaccuccggcggcguccuccucucccucuacgucuccgccucccucuccuaccuccucuacuccgacauccuccucaaguucucccccaccgagaucaccgcccccaccaugccccucgacugcgccaacgccuccaacguccaggccgucaaccgcuccgccaccaagggcgucacccuccuccuccccgagcccgaguggaccuacccccgccucuccugccccggcuccaccuuccagaaggcccuccucaucuccccccaccgcuucggcgagaccaagggcaacuccgccccccucaucauccgcgagcccuucaucgccugcggccccaacgagugcaagcacuucgcccucacccacuacgccgcccagcccggcggcuacuacaacggcacccgcggcgaccgcaacaagcuccgccaccucaucuccaucaagcucggcaagauccccaccgucgagaacuccaucuuccacauggccgccugguccggcuccgccugccacgacggcaaggaguggaccuacaucggcgucgacggccccgacaacaacgcccuccucaaggucaaguacggcgaggccuacaccgacaccuaccacuccuacgccaacaagauccuccgcacccaggaguccgccugcaacugcaucggcggcaacugcuaccucaugaucaccgacggcuccgccuccggcgucuccgagugccgcuuccucaagauccgcgagggccgcaucaucaaggagaucuuccccaccggccgcgucaagcacaccgaggagugcaccugcggcuucgccuccaacaagaccaucgagugcgccugccgcgacaacuccuacaccgccaagcgccccuucgucaagcucaacgucgagaccgacaccgccgagauccgccucaugugcaccgacaccuaccucgacaccccccgccccgacgacggcuccaucaccggcuccugcgaguccaacggcgacaagggcuccggcggcaucaagggcggcuucguccaccagcgcauggaguccaagaucggccgcugguacucccgcaccauguccaagaccgagcgcaugggcaugggccucuacgucaaguacgacggcgaccccugggccgacuccgacgcccucaccuucuccggcgucauggucuccaugaaggagcccggcugguacuccuucggcuucgagaucaaggacaagaagugcgacguccccugcaucggcaucgagaugguccacgacggcggcaaggagaccuggcacuccgccgccaccgccaucuacugccucaugggcuccggccagcuccucugggacaccgucaccggcgucgacauggcccucuga

SEQ ID NO: 126170 - RNA, 1401 nt, Artificial Sequence; identical to SEQ ID NO: 124853
  derived and/or modified CDS sequence (opt2) from neuraminidase__InfluenzaB__AHL93525

SEQ ID NO: 126171 - RNA, 1401 nt, Artificial Sequence; identical to SEQ ID NO: 124992
  derived and/or modified CDS sequence (opt2) from neuraminidase__InfluenzaB__AHL93536

SEQ ID NO: 126172 - RNA, 1401 nt, Artificial Sequence
  derived and/or modified CDS sequence (opt2) from neuraminidase__InfluenzaB__AHL93558
augcuccccuccaccauccagacccucacccucuuccucaccuccggcggcguccuccucucccucuacgucuccgccucccucuccuaccuccucuacuccgacauccuccucaaguucucccccaccgagaucaccgcccccgccaugccccucgacugcgccaacgccuccaacguccaggccgucaaccgcuccgccaccaagggcgucacccuccuccuccccgagcccgaguggaccuacccccgccucuccugccccggcuccaccuuccagaaggcccuccucaucuccccccaccgcuucggcgagaccaagggcaacuccgccccccucaucauccgcgagcccuucaucgccugcggccccaacgagugcaagcacuucgcccucacccacuacgccgcccagcccggcggcuacuacaacggcacccgcggcgaccgcaacaagcuccgccaccucaucuccgucaagcucggcaagauccccaccgucgagaacuccaucuuccacauggccgccugguccggcuccgccugccacgacggcaaggaguggaccuacaucggcgucgacggccccgacaacaacgcccuccucaaggucaaguacggcgaggccuacaccgacaccuaccacuccuacgccaacaagauccuccgcacccaggaguccgccugcaacugcaucggcggcaacugcuaccucaugaucaccgacggcuccgccuccggcgucuccgagugccgcuuccucaagauccgcgagggccgcaucaucaaggagaucuuccccaccggccgcgucaagcacaccgaggagugcaccugcggcuucgccuccaacaagaccaucgagugcgccugccgcgacaacuccuacaccgccaagcgccccuucgucaagcucaacgucgagaccgacaccgccgagauccgccucaugugcaccgacaccuaccucgacaccccccgccccaacgacggcuccaucaccggccccugcgaguccgacggcgacaagggcuccggcggcaucaagggcggcuucauccaccagcgcauggaguccaagaucggccgcugguacucccgcaccauguccaagaccgagcgcaugggcaugggccucuacgucaaguacgacggcgaccccugggccgacuccgacgcccucgccuucuccggcgucauggucuccaugaaggagcccggcugguacuccuucggcuucgagaucaaggacaagaagugcgacguccccugcaucggcaucgagaugguccacgacggcggcaaggagaccuggcacuccgccgccaccgccaucuacugccucaugggcuccggccagcuccucugggacaccgucaccggcgucgacauggcccucuga

SEQ ID NO: 126173 - RNA, 1401 nt, Artificial Sequence
  derived and/or modified CDS sequence (opt2) from neuraminidase__InfluenzaB__AHL93569
augcuccccuccaccauccagacccucacccucuuccucaccuccggcggcguccuccucucccucuacgucuccgccucccucuccuaccuccucuacuccgacauccuccucaaguucucccccaccgagaucaccgcccccaccaugccccucgacugcgccaacgccuccaacguccaggccgucaaccgcuccgccaccaagggcgucacccuccuccuccccgagcccgaguggaccuacccccgccucuccugccccggcuccaccuuccagaaggcccuccucaucuccccccaccgcuucggcgagaccaagggcaacuccgccccccucaucauccgcgagcccuucaucgccugcggccccaacgagugcaagcacuucgcccucacccacuacgccgcccagcccggcggcuacuacaacggcacccgcggcgaccgcaacaagcuccgccaccucaucuccgucaagcucggcaagauccccaccgucgagaacuccaucuuccacauggccgccugguccggcuccgccugccacgacggcaaggaguggaccuacaucggcgucgacggccccgacaacaacgcccuccucaaggucaaguacggcgaggccuacaccgacaccuaccacuccuacgccaacaagauccuccgcacccaggaguccgccugcaacugcaucggcggcaacugcuaccucaugaucaccgacggcuccgccuccggcgucuccgagugccgcuuccucaagauccgcgagggccgcaucaucaaggagaucuuccccaccggccgcgucaagcacaccgaggagugcaccugcggcuucgccuccaacaagaccaucgagugcgccugccgcgacaacuccuacaccgccaagcgccccuucgucaagcucaacgucgagaccgacaccgccgagauccgccucaugugcaccgacaccuaccucgacaccccccgccccaacgacggcuccaucaccggccccugcgaguccgacggcgacaagggcuccggcggcaucaagggcggcuucguccaccagcgcauggaguccaagaucggccgcugguacucccgcaccauguccaagaccgagcgcaugggcaugggccucuacgucaaguacgacggcgaccccugggccgacuccgacgcccucaccuucuccggcgucauggucuccaugaaggagcccggcugguacuccuucggcuucgagaucaaggacaagaagugcgacguccccugcaucggcaucgagaugguccacgacggcggcaaggagaccuggcacuccgccgccaccgccaucuacugccucaugggcuccggccagcuccucugggacaccgucaccggcgucgacauggcccucuga

SEQ ID NO: 126174 - RNA, 1401 nt, Artificial Sequence; identical to SEQ ID NO: 124992
  derived and/or modified CDS sequence (opt2) from neuraminidase__InfluenzaB__AHL93580

SEQ ID NO: 126175 - RNA, 1401 nt, Artificial Sequence; identical to SEQ ID NO: 124992
  derived and/or modified CDS sequence (opt2) from neuraminidase__InfluenzaB__AHL93591

SEQ ID NO: 126176 - RNA, 1401 nt, Artificial Sequence
  derived and/or modified CDS sequence (opt2) from neuraminidase__InfluenzaB__AHL93613
augcuccccuccaccauccagacccucacccucuuccucaccuccggcggcguccuccucucccucuacgucuccgccucccucuccuaccuccucuacuccgacauccuccucaaguucucccccaccgagaucaccgcccccaccaugccccucgacugcgccaacgccuccaacguccaggccgucaaccgcuccgccaccaagggcgucacccuccuccuccccgagcccgaguggaccuacccccgccucuccugccccggcuccaccuuccagaaggcccuccucaucuccccccaccgcuucggcgagaccaagggcaacuccgccccccucaucauccgcgagcccuucaucgccugcggccccaacgagugcaagcacuucgcccucacccacuacgccgcccagcccggcggcuacuacaacggcacccgcggcgaccgcaacaagcuccgccaccucaucuccgucaagcucggcaagauccccaccgucgagaacuccaucuuccacauggccgccugguccggcuccgccugccacgacggcaaggaguggaccuacaucggcgucgacggccccgacaacaacgcccuccucaaggucaaguacggcgaggccuacaccgacaccuaccacuccuacgccaacaagauccuccgcacccaggaguccgccugcaacugcaucggcggcaacugcuaccucauggucaccgacggcuccgccuccggcgucuccgagugccgcuuccucaagauccgcgagggccgcaucaucaaggagaucuuccccaccggccgcgucaagcacaccgaggagugcaccugcggcuucgccuccaacaagaccaucgagugcgccugccgcgacaacuccuacaccgccaagcgccccuucgucaagcucaacgucgagaccgacaccgccgagauccgccucaugugcaccgacaccuaccucgacaccccccgccccgacgacggcuccaucaccggccccugcgaguccaacggcgacaagggcuccggcggcaucaagggcggcuucguccaccagcgcauggaguccaagaucggccgcugguacucccgcaccauguccaagaccgagcgcaugggcaugggccucuacgucaaguacgacggcgaccccugggccgacuccgacgcccucgucuucuccggcgucauggucuccaugaaggagcccggcugguacuccuucggcuucgagaucaaggacaagaagugcgacguccccugcaucggcaucgagaugguccacgacggcggcaaggagaccuggcacuccgccgccaccgccaucuacugccucaugggcuccggccagcuccucugggacaccgucaccggcgucgacauggcccucuga

SEQ ID NO: 126177 - RNA, 1401 nt, Artificial Sequence; identical to SEQ ID NO: 124992
  derived and/or modified CDS sequence (opt2) from neuraminidase__InfluenzaB__AHL93624

SEQ ID NO: 126178 - RNA, 1401 nt, Artificial Sequence; identical to SEQ ID NO: 126176
  derived and/or modified CDS sequence (opt2) from neuraminidase__InfluenzaB__AHL93635

SEQ ID NO: 126179 - RNA, 1401 nt, Artificial Sequence; identical to SEQ ID NO: 126176
  derived and/or modified CDS sequence (opt2) from neuraminidase__InfluenzaB__AHL93646

SEQ ID NO: 126180 - RNA, 1401 nt, Artificial Sequence; identical to SEQ ID NO: 124853
  derived and/or modified CDS sequence (opt2) from neuraminidase__InfluenzaB__AHL93657

SEQ ID NO: 126181 - RNA, 1401 nt, Artificial Sequence; identical to SEQ ID NO: 124992
  derived and/or modified CDS sequence (opt2) from neuraminidase__InfluenzaB__AHL93668

SEQ ID NO: 126182 - RNA, 1401 nt, Artificial Sequence
  derived and/or modified CDS sequence (opt2) from neuraminidase__InfluenzaB__AHL93679
augcuccccuccaccauccagacccucacccucuuccucaccuccggcggcguccuccucucccucuacgucuccgcccuccucuccuaccuccucuacuccgacauccuccucaaguucucccccaccgagaucaccgcccccaccaugucccucgacugcgccaacgccuccaacguccaggccgucaaccgcuccgccaccaagggcgucaccuuccuccuccccgagcccgaguggaccuacccccgccucuccugccccggcuccaccuuccagaaggcccuccucaucuccccccaccgcuucggcgagaccaagggcaacuccgccccccucaucauccgcgagcccuucaucgccugcggccccaacgagugcaagcacuucgcccucacccacuacgccgcccagcccggcggcuacuacaacggcacccgcggcgaccgcaacaagcuccgccaccucaucuccgucaagcucggcaagauccccaccgucgagaacuccaucuuccacauggccgccugguccggcuccgccugccacgacggcaaggaguggaccuacaucggcgucgacggccccgacaacgacgcccuccucaaggucaaguacggcgaggccuacaccgacaccuaccacuccuacgccaacaagauccuccgcacccaggaguccgccugcaacugcaucggcggcaacugcuaccucaugaucaccgacggcuccgccuccggcgucuccgagugccgcuuccucaagauccgcgagggccgcaucaucaaggagauccuccccaccggccgcgucaagcacaccgaggagugcaccugcggcuucgccuccaacaagaccaucgagugcgccugccgcgacaacuccuacaccgccaagcgccccuucgucaagcucaacgucgagaccgacaccgccgagauccgccucaugugcaccgacaccuaccucgacaccccccgccccgacgacggcuccaucaccggccccugcgaguccaacggcgacaagggcuccggcggcaucaagggcggcuucguccaccagcgcauggaguccaagaucggccgcugguacucccgcaccauguccaagaccgagcgcaugggcaugggccucuacgucaaguacgacggcgaccccugggccgacuccgacgcccucgccuucuccggcgucauggucuccaugaaggagcccggcugguacuccuucggcuucgagaucaaggacaagaagugcgacguccccugcaucggcaucgagaugguccacgacggcggcaaggagaccuggcacuccgccgccaccgccaucuacugccucaugggcuccggccagcuccucugggacaccgucaccggcgucgacauggcccucuga

SEQ ID NO: 126183 - RNA, 1401 nt, Artificial Sequence; identical to SEQ ID NO: 126176
  derived and/or modified CDS sequence (opt2) from neuraminidase__InfluenzaB__AHL93690

SEQ ID NO: 126184 - RNA, 1401 nt, Artificial Sequence; identical to SEQ ID NO: 126176
  derived and/or modified CDS sequence (opt2) from neuraminidase__InfluenzaB__AHL93701

SEQ ID NO: 126185 - RNA, 1401 nt, Artificial Sequence; identical to SEQ ID NO: 126176
  derived and/or modified CDS sequence (opt2) from neuraminidase__InfluenzaB__AHL93712

SEQ ID NO: 126186 - RNA, 1401 nt, Artificial Sequence
  derived and/or modified CDS sequence (opt2) from neuraminidase__InfluenzaB__AHL93723
augcuccccuccaccauccagaugcucacccucuuccucaccuccggcggcguccuccucucccucuacgucuccgccucccucuccuaccuccucuacuccgacauccuccucaaguucucccccaccgagaucaccgcccccaccaugccccucgacugcgccaacgccuccaacguccacgccgucaaccgcuccgccaccaagggcgucaccuuccuccuccccgagcccgaguggaccuacccccgccucuccugccccggcuccaccuuccagaaggcccuccucaucuccccccaccgcuucggcgagaccaagggcaacuccgccccccucaucauccgcgagcccuucaucgccugcggccccaacgagugcaagcacuucgcccucacccacuacgccgcccagcccggcggcuacuacaacggcacccgcggcgaccgcaacaagcuccgccaccucaucuccgucaagcucggcaagauccccaccgucgagaacuccaucuuccacauggccgccugguccggcuccgccugccacgacggcaaggaguggaccuacaucggcgucgacggccccgacaacaacgcccuccucaagaucaaguacggcgaggccuacaccgacaccuaccacuccuacgccaacaacauccuccgcacccaggaguccgccugcaacugcaucggcggcaacugcuaccucaugaucaccgacggcuccgccuccggcgucuccgagugccgcuuccucaagauccgcgagggccgcaucaucaaggagaucuuccccaccggccgcgucaagcacaccgaggagugcaccugcggcuucgccuccaacaagaccaucgagugcgccugccgcgacaacuccuacaccgccaagcgccccuucgucaagcucaacgucgagaccgacaccgccgagauccgccucaugugcaccgacaccuaccucgacaccccccgccccgacgacggcuccaccaccggccccugcgaguccaacggcgacaagggcuccggcggcaucaagggcggcuucguccaccagcgcauggccuccaagaucggccgcugguacucccgcaccauguccaagaccgagcgcaagggcaugggccucuacgucaaguacgacggcgaccccuggaccgacuccgacgcccucgccuuccgcggcgucauggucuccaugaaggagcccggcugguacuccuucggcuucgagaucaaggacaagaagugcgacguccccugcaucggcaucgagaugguccacgacggcggcaaggagaccuggcacuccgccgccaccgccaucuacugccucaugggcuccggccagcuccucugggacaccgucaccggcgucgacauggcccucuga

SEQ ID NO: 126187 - RNA, 1401 nt, Artificial Sequence; identical to SEQ ID NO: 124992
  derived and/or modified CDS sequence (opt2) from neuraminidase__InfluenzaB__AHL93734

SEQ ID NO: 126188 - RNA, 1401 nt, Artificial Sequence
  derived and/or modified CDS sequence (opt2) from neuraminidase__InfluenzaB__AHL93745
augcuccccuccaccauccagaugcucacccucuuccucaccuccggcggcguccuccucucccucuacgucuccgccucccucuccuaccuccucuacuccgacauccuccucaaguucucccccaccgagaucaccgcccccaccaugccccucgacugcgccaacgccuccaacguccacgccgucaaccgcuccgccaccaagggcgucaccuuccuccuccccgagcccgaguggaccuacccccgccucuccugccccggcuccaccuuccagaaggcccuccucaucuccccccaccgcuucggcgagaccaagggcaacuccgccccccucaucauccgcgagcccuucaucgccugcggccccaacgagugcaagcacuucgcccucacccacuacgccgcccagcccggcggcuacuacaacggcacccgcggcgaccgcaacaagcuccgccaccucaucuccgucaagcucggcaagauccccaccgucgagaacuccaucuuccacauggccgccugguccggcuccgccugccacgacggcaaggaguggaccuacaucggcgucgacggccccgacaacaacgcccuccucaagaucaaguacggcgaggccuacaccgacaccuaccacuccuacgccaacaacguccuccgcacccaggaguccgccugcaacugcaucggcggcaacugcuaccucaugaucaccgacggcuccgccuccggcgucuccgagugccgcuuccucaagauccgcgagggccgcaucaucaaggagaucuuccccaccggccgcgucaagcacaccgaggagugcaccugcggcuucgccuccaacaagaccaucgagugcgccugccgcgacaacuccuacaccgccaagcgccccuucgucaagcucaacgucgagaccgacaccgccgagauccgccucaugugcaccgacaccuaccucgacaccccccgccccgacgacggcuccaucaccggccccugcgaguccaacggcgacaagggcuccggcggcaucaagggcggcuucguccaccagcgcauggccuccaagaucggccgcugguacucccgcaccauguccaagaccgagcgcaagggcaugggccucuacgucaaguacgacggcgaccccuggaccgacuccgacgcccucgccuuccgcggcgucauggucuccaugaaggagcccggcugguacuccuucggcuucgagaucaaggacaagaagugcgacguccccugcaucggcaucgagaugguccacgacggcggcaaggagaccuggcacuccgccgccaccgccaucuacugccucaugggcuccggccagcuccucugggacaccgucaccggcgucgacauggcccucuga

SEQ ID NO: 126189 - RNA, 1401 nt, Artificial Sequence; identical to SEQ ID NO: 125155
  derived and/or modified CDS sequence (opt2) from neuraminidase__InfluenzaB__AHL93756

SEQ ID NO: 126190 - RNA, 1401 nt, Artificial Sequence; identical to SEQ ID NO: 126176
  derived and/or modified CDS sequence (opt2) from neuraminidase__InfluenzaB__AHL93767

SEQ ID NO: 126191 - RNA, 1401 nt, Artificial Sequence
  derived and/or modified CDS sequence (opt2) from neuraminidase__InfluenzaB__AHL93778
augcuccccuccaccauccagacccucauccucuuccucaccuccggcggcguccuccucucccucuacgucuccgcccuccucuccuaccuccucuacuccgacauccuccucaaguucucccccaccgagaucaccgcccccaccaugucccucgacugcgccaacgccuccaacguccaggccgucaaccgcuccgccaccaagggcgucaccuuccuccuccccgagcccgaguggaccuacccccgccucuccugccccggcuccaucuuccagaaggcccuccucaucuccccccaccgcuucggcgagaccaagggcaacuccgccccccucaucauccgcgagcccuucaucgccugcggccccaacgagugcaagcacuucgcccucacccacuacgccgcccagcccggcggcuacuacaacggcacccgcggcgaccgcaacaagcuccgccaccucaucuccgucaagcucggcaagauccccaccgucgagaacuccaucuuccacauggccgccugguccggcuccgccugccacgacggcaaggaguggaccuacaucggcgucgacggccccgacaacgacgcccuccucaaggucaaguacggcgaggccuacaccgacaccuaccacuccuacgccaacaagauccuccgcacccaggaguccgccugcaacugcaucggcggcaacugcuaccucaugaucaccgacggcuccgccuccggcgucuccgagugccgcuuccucaagauccgcgagggccgcaucaucaaggagaucuuccccaccggccgcgucaagcacaccgaggagugcaccugcggcuucgccuccaacaagaccaucgagugcgccugccgcgacaacuccuacaccgccaagcgccccuucgucaagcucaacgucgagaccgacaccgccgagauccgccucaugugcaccgacaccuaccucgacaccccccgccccgacgacggcuccaucaccggccccugcgaguccaacggcgacaagggcuccggcggcaucaagggcggcuucguccaccagcgcauggaguccaagaucggccgcugguacucccgcaccauguccaagaccgagcgcaugggcaugggccucuacgucaaguacgacggcgaccccugggccgacuccgacgcccucgccuucuccggcgucauggucuccaugaaggagcccggcugguacuccuucggcuucgagaucaaggacaagaagugcgacguccccugcaucggcaucgagaugguccacgacggcggcaaggagaccuggcacuccgccgccaccgccaucuacugccucaugggcuccggccagcuccucugggacaccgucaccggcgucgacauggcccucuga

SEQ ID NO: 126192 - RNA, 1401 nt, Artificial Sequence
  derived and/or modified CDS sequence (opt2) from neuraminidase__InfluenzaB__AHL93789
augcuccccuccaccauccagacccucacccucuuccucaccuccggcggcguccuccucucccucuacgucuccgccucccucuccuaccuccucuacuccgacauccuccucaaguucucccccaccggcaucaccgcccccaccaugccccucgacugcgccaacgccuccaacguccaggccgucaaccgcuccgccaccaagggcgucacccuccuccuccccgagcccgaguggaccuacccccgccucuccugccccggcuccaccuuccagaaggcccuccucaucuccccccaccgcuucggcgagaccaagggcaacuccgccccccucaucauccgcgagcccuucaucgccugcggccccaacgagugcaagcacuucgcccucacccacuacgccgcccagcccggcggcuacuacaacggcacccgcggcgaccgcaacaagcuccgccaccucaucuccgucaagcucggcaagauccccaccgucgagaacuccaucuuccacauggccgccugguccggcuccgccugccacgacggcaaggaguggaccuacaucggcgucgacggccccgacaacaacgcccuccucaaggucaaguacggcgaggccuacaccgacaccuaccacuccuacgccaacaagauccuccgcacccaggaguccgccugcaacugcaucggcggcaacugcuaccucauggucaccgacggcuccgccuccggcgucuccgagugccgcuuccucaagauccgcgagggccgcaucaucaaggagaucuuccccaccggccgcgucaagcacaccgaggagugcaccugcggcuucgccuccaacaagaccaucgagugcgccugccgcgacaacuccuacaccgccaagcgccccuucgucaagcucaacgucgagaccgacaccgccgagauccgccucaugugcaccgacaccuaccucgacaccccccgccccgacgacggcuccaucaccggccccugcgaguccaacggcgacaagggcuccggcggcaucaagggcggcuucguccaccagcgcauggaguccaagaucggccgcugguacucccgcaccauguccaagaccgagcgcaugggcaugggccucuacgucaaguacgacggcgaccccugggccgacuccgacgcccucgucuucuccggcgucauggucuccaugaaggagcccggcugguacuccuucggcuucgagaucaaggacaagaagugcgacguccccugcaucggcaucgagaugguccacgacggcggcaaggagaccuggcacuccgccgccaccgccaucuacugccucaugggcuccggccagcuccucugggacaccgucaccggcgucgacauggcccucuga

SEQ ID NO: 126193 - RNA, 1401 nt, Artificial Sequence; identical to SEQ ID NO: 124992
  derived and/or modified CDS sequence (opt2) from neuraminidase__InfluenzaB__AHL93800

SEQ ID NO: 126194 - RNA, 1401 nt, Artificial Sequence; identical to SEQ ID NO: 124992
  derived and/or modified CDS sequence (opt2) from neuraminidase__InfluenzaB__AHL93811

SEQ ID NO: 126195 - RNA, 1401 nt, Artificial Sequence; identical to SEQ ID NO: 125528
  derived and/or modified CDS sequence (opt2) from neuraminidase__InfluenzaB__AHL93822

SEQ ID NO: 126196 - RNA, 1401 nt, Artificial Sequence; identical to SEQ ID NO: 124992
  derived and/or modified CDS sequence (opt2) from neuraminidase__InfluenzaB__AHL93833

SEQ ID NO: 126197 - RNA, 1401 nt, Artificial Sequence
  derived and/or modified CDS sequence (opt2) from neuraminidase__InfluenzaB__AHL93844
augcuccccuccaccauccagacccucacccucuuccucaccuccggcggcguccuccucucccucuacgucuccgccucccucuccuaccuccucuacuccggcauccuccucaaguucucccccaccgagaucaccgcccccaccaugccccucgacugcgccaacgccuccaacguccaggccgucaaccgcuccgccaccaaggaggucacccuccuccuccccgagcccgaguggaccuacccccgccucuccugccccggcuccaccuuccagaaggcccuccucaucuccccccaccgcuucggcgagaccaagggcaacuccgccccccucaucauccgcgagcccuucaucgccugcggccccaacgagugcaagcacuucgcccucacccacuacgccgcccagcccggcggcuacuacaacggcacccgcggcgaccgcaacaagcuccgccaccucaucuccgucaagcucggcaagauccccaccgucgagaacuccaucuuccacauggccgccugguccggcuccgccugccacgacggcaaggaguggaccuacaucggcgucgacggccccgacgacaacgcccuccucaaggucaaguacggcgaggccuacaccgacaccuaccacuccuacgcccacaagauccuccgcacccaggaguccgccugcaacugcaucggcggcaacugcuaccucaugaucaccgacggcuccgccuccggcgucuccgagugccgcuuccucaagauccgcgagggccgcaucaucaaggagaucuuccccaccggccgcgucaagcacaccgaggagugcaccugcggcuucgccuccaacaagaccaucgagugcgccugccgcgacaacuccuacaccgccaagcgccccuucgucaagcucaacgucgagaccgacaccgccgagauccgccucaugugcaccgacaccuaccucgacaccccccgccccaacgacggcuccaucaccggccccugcgaguccaacggcgacaagggcuccggcggcaucaagggcggcuucguccaccagcgcauggaguccaagaucggccgcugguacucccgcaccauguccaagaccgagcgcaugggcaugggccucuacgucaaguacgacggcgaccccugggccgacuccgacgcccucgccuucuccggcgucauggucuccaugaaggagcccggcugguacuccuucggcuucgagaucaaggacaagaagugcgacguccccugcaucggcaucgagaugguccacgacggcggcaaggagaccuggcacuccgccgccaccgccaucuacugccucaugggcuccggccagcuccucugggacaccgucaccggcgucgacauggcccucuga

SEQ ID NO: 126198 - RNA, 1401 nt, Artificial Sequence; identical to SEQ ID NO: 124992
  derived and/or modified CDS sequence (opt2) from neuraminidase__InfluenzaB__AHL93855

SEQ ID NO: 126199 - RNA, 1401 nt, Artificial Sequence; identical to SEQ ID NO: 124992
  derived and/or modified CDS sequence (opt2) from neuraminidase__InfluenzaB__AHL93866

SEQ ID NO: 126200 - RNA, 1401 nt, Artificial Sequence; identical to SEQ ID NO: 124992
  derived and/or modified CDS sequence (opt2) from neuraminidase__InfluenzaB__AHL93877

SEQ ID NO: 126201 - RNA, 1401 nt, Artificial Sequence; identical to SEQ ID NO: 124992
  derived and/or modified CDS sequence (opt2) from neuraminidase__InfluenzaB__AHL93888

SEQ ID NO: 126202 - RNA, 1401 nt, Artificial Sequence
  derived and/or modified CDS sequence (opt2) from neuraminidase__InfluenzaB__AHL93899
augcuccccuccaccauccagaugcucacccucuuccucaccuccggcggcguccuccucucccucuacgucuccgccucccucuccuaccuccucuacuccgacauccuccucaaguucucccccaccgagaucaccgcccccaccaugccccucgacugcgccaacgccuccaacguccacgccgucaaccgcuccgccaccaagggcgucaccuuccuccuccccgagcccgaguggaccuacccccgccucuccugccccggcuccaccuuccagaaggcccuccucaucuccccccaccgcuucggcgagaccaagggcaacuccgccccccucaucauccgcgagcccuucaucgccugcgagcccaacgagugcaagcacuucgcccucacccacuacgccgcccagcccggcggcuacuacaacggcacccgcggcgaccgcaacaagcuccgccaccucaucuccgucaagcucggcaagauccccaccgucgagaacuccaucuuccacauggccgccugguccggcuccgccugccacgacggcaaggaguggaccuacaucggcgucgacggccccgacaacaacgcccuccucaagaucaaguacggcgaggccuacaccgacaccuaccacuccuacgccaacaacauccuccgcacccaggaguccgccugcaacugcaucggcggcaacugcuaccucaugaucaccgacggcuccgccuccggcgucuccgagugccgcuuccucaagauccgcgagggccgcaucaucaaggagaucuuccccaccggccgcgucaagcacaccgaggagugcaccugcggcuucgccuccaacaagaccaucgagugcgccugccgcgacaacuccuacaccgccaagcgccccuucgucaagcucaacgucgagaccgacaccgccgagauccgccucaugugcaccgacaccuaccucgacaccccccgccccgacgacggcuccaccaccggccccugcgaguccaacggcgacaagggcuccggcggcaucaagggcggcuucguccaccagcgcauggccuccaagaucggccgcugguacucccgcaccauguccaagaccgagcgcaagggcaugggccucuacgucaaguacgacggcgaccccuggaccgacuccgacgcccucgccuuccgcggcgucauggucuccaugaaggagcccggcugguacuccuucggcuucgagaucaaggacaagaagugcgacguccccugcaucggcaucgagaugguccacgacggcggcaaggagaccuggcacuccgccgccaccgccaucuacugccucaugggcuccggccagcuccucugggacaccgucaccggcgucgacauggcccucuga

SEQ ID NO: 126203 - RNA, 1401 nt, Artificial Sequence
  derived and/or modified CDS sequence (opt2) from neuraminidase__InfluenzaB__AHL93910
augcuccccuccaccauccagaugcucacccucuuccucaccuccggcggcguccuccucucccucuacgucuccgccucccucuccuaccuccucuacuccgacauccuccucaaguucucccccaccgagaucaccgcccccaccaugccccucgacugcgccaacgccuccaacguccacgccgucaaccgcuccgccaccaagggcgucaccuuccuccuccccgagcccgaguggaccuacccccgccucuccugccccggcuccaccuuccagaaggcccuccucaucuccccccaccgcuucggcgagaccaagggcaacuccgccccccucaucauccgcgagcccuucaucgccugcggccccaacgagugcaagcacuucgcccucacccacuacgccgcccagcccggcggcuacuacaacggcacccgcggcgaccgcaacaagcuccgccaccucaucuccgucaagcucggcaagauccccaccgucgagaacuccaucuuccacauggccgccugguccggcuccgccugccacgacggcaaggaguggaccuacaucggcgucgacggccccgacaacaacgcccuccucaagaucaaguacggcgaggccuacaccgacaccuaccacuccuacgccaacaacauccuccgcacccaggaguccgccugcaacugcaucggcggcaacugcuaccucaugaucaccgacggcuccgccuccggcgucuccgagugccgcuuccucaagauccgcgagggccgcaucaucaaggagaucuuccccaccggccgcgucaagcacaccgaggagugcaccugcggcuucgccuccaacaagaccaucgagugcaccugccgcgacaacuccuacaccgccaagcgccccuucgucaagcucaacgucgagaccgacaccgccgagauccgccucaugugcaccgacaccuaccucgacaccccccgccccgacgacggcggcaucaccggccccugcgaguccaacggcgacaagggcuccggcggcaucaagggcggcuucguccaccagcgcauggccuccaagaucggccgcugguacucccgcaccauguccaagaccgagcgcaagggcaugggccucuacgucaaguacgacggcgaccccuggaccgacuccgacgcccucgccuuccgcggcgucauggucuccaugaaggagcccggcugguacuccuucggcuucgagaucaaggacaagaagugcgacguccccugcaucggcaucgagaugguccacgacggcggcaaggagaccuggcacuccgccgccaccgccaucuacugccucaugggcuccggccagcuccucugggacaccgucaccggcgucgacauggcccucuga

SEQ ID NO: 126204 - RNA, 1401 nt, Artificial Sequence; identical to SEQ ID NO: 124992
  derived and/or modified CDS sequence (opt2) from neuraminidase__InfluenzaB__AHL93921

SEQ ID NO: 126205 - RNA, 1401 nt, Artificial Sequence
  derived and/or modified CDS sequence (opt2) from neuraminidase__InfluenzaB__AHL93932
augcuccccuccaccauccagacccucacccucuuccucaccuccggcggcguccuccucucccucuacgucuccgccucccucuccuaccuccucuacuccgacauccuccucaaguucucccccaccgagaucaccgcccccaccaugccccucgacugcgccaacgccuccaacguccaggccgucaaccgcuccgccaccaagggcgucacccuccuccuccccgagcccgaguggaccuacccccgccucuccugccccggcuccaccuuccagaaggcccuccucaucuccccccaccgcuucggcgagaccaagggcaacuccgccccccucaucauccgcgagcccuucaucgccugcggccccaacgagugcaagcacuucgcccucacccacuacgccgcccagcccggcggcuacuacaacggcacccgcggcgaccgcaacaagcuccgccaccucaucuccgucaagcucggcaagauccccaccgucgagaacuccaucuuccacauggccgccugguccggcuccgccugccacgacggcaaggaguggaccuacaucggcgucgacggccccgacaacaacgcccuccucaaggucaaguacggcgaggccuacaccgacaccuaccacuccuacgccaacaagauccuccgcacccaggaguccgccugcaacugcaucggcggcaacugcuaccucauggucaccgacggcuccgccuccggcgucuccgagugccgcuuccucaagauccgcgagggccgcaucaucaaggagaucuuccccaccggccgcgucaagcacaccgaggagugcaccugcggcuucgccuccaacaagaccaucgagugcgccugccgcgacaacuccuacaccgccaagcgccccuucgucaagcucaacgucgagaccgacaccgccgagauccgccucaugugcaccgacaccuaccucgacaccccccgccccgacgacggcuccaucaccggccccugcgaguccaacggcgacaagggcuccggcggcaucaagggcggcuucguccaccagcgcauggaguccaagaucggccgcugguacucccgcaccauguccaagaccgagcgcaugggcauggagcucuacgucaaguacgacggcgaccccugggccgacuccgacgcccucgccuucuccggcgucauggucuccaugaaggagcccggcugguacuccuucggcuucgagaucaaggacaagaagugcgacguccccugcaucggcaucgagaugguccacgacggcggcaaggagaccuggcacuccgccgccaccgccaucuacugccucaugggcuccggccagcuccucugggacaccgucaccggcgucgacauggcccucuga

SEQ ID NO: 126206 - RNA, 1401 nt, Artificial Sequence; identical to SEQ ID NO: 125155
  derived and/or modified CDS sequence (opt2) from neuraminidase__InfluenzaB__AHL93943

SEQ ID NO: 126207 - RNA, 1401 nt, Artificial Sequence; identical to SEQ ID NO: 124992
  derived and/or modified CDS sequence (opt2) from neuraminidase__InfluenzaB__AHL93954

SEQ ID NO: 126208 - RNA, 1401 nt, Artificial Sequence
  derived and/or modified CDS sequence (opt2) from neuraminidase__InfluenzaB__AHL93965
augcuccccuccaccauccagacccucacccucuuccucaccuccggcggcguccuccucucccucuacgucuccgccucccucuccuaccuccucuacuccgacauccuccucaaguucucccccaccgagaucaccgcccccgccaugccccucgacugcgccaacgccuccaacguccaggccgucaacugcuccgccaccaagggcgucacccuccuccuccccgagcccgaguggaccuacccccgccucuccugccccggcuccaccuuccagaaggcccuccucaucuccccccaccgcuucggcgagaccaagggcaacuccgccccccucaucauccgcgagcccuucaucgccugcggccccaacgagugcaagcacuucgcccucacccacuacgccgcccagcccggcggcuacuacaacggcacccgcggcgaccgcaacaagcuccgccaccucaucuccgucaagcucggcaagauccccaccgucgagaacuccaucuuccacauggccgccugguccggcuccgccugccacgacggcaaggaguggaccuacaucggcgucgacggccccgacaacaacgcccuccucaaggucaaguacggcgaggccuacaccgacaccuaccacuccuacgccaacaagauccuccgcacccaggaguccgccugcaacugcaucggcggcaacugcuaccucaugaucaccgacggcuccgccuccggcgucuccgagugccgcuuccucaagauccgcgagggccgcaucaucaaggagaucuuccccaccggccgcgucaagcacaccgaggagugcaccugcggcuucgccuccaacaagaccaucgagugcgccugccgcgacaacuccuacaccgccaagcgccccuucgucaagcucaacgucgagaccgacaccgccgagauccgccucaugugcaccgacaccuaccucgacaccccccgccccaacgacggcuccaucaccggccccugcgaguccgacggcgacaagggcaacggcggcaucaagggcggcuucguccaccagcgcauggaguccaagaucggccgcugguacucccgcaccauguccaagaccgagcgcaugggcaugggccucuacgucaaguacgacggcgaccccugggccgacuccgacgcccucgccuucuccggcgucauggucuccaugaaggagcccggcugguacuccuucggcuucgagaucaaggacaagaagugcgacguccccugcaucggcaucgagaugguccacgacggcggcaaggagaccuggcacuccgccgccaccgccaucuacugccucaugggcuccggccagcuccucugggacaccgucaccggcgucgacauggcccucuga

SEQ ID NO: 126209 - RNA, 1401 nt, Artificial Sequence; identical to SEQ ID NO: 124911
  derived and/or modified CDS sequence (opt2) from neuraminidase__InfluenzaB__AHL93976

SEQ ID NO: 126210 - RNA, 1401 nt, Artificial Sequence; identical to SEQ ID NO: 126182
  derived and/or modified CDS sequence (opt2) from neuraminidase__InfluenzaB__AHL93987

SEQ ID NO: 126211 - RNA, 1401 nt, Artificial Sequence
  derived and/or modified CDS sequence (opt2) from neuraminidase__InfluenzaB__AHL93998
augcuccccuccaccauccagacccucacccucuuccucaccuccggcggcguccuccucucccucuacgucuccgccucccucuccuaccuccucuacuccgacauccuccucaaguucucccagaccgagaucaccgcccccaucaugccccucgacugcgccaacgccuccaacguccaggccgucaaccgcuccgccgccaagggcgucacccuccuccuccccgagcccgaguggaccuacccccgccucuccugccccggcuccaccuuccagaaggcccuccucaucuccccccaccgcuucggcgagaucaagggcaacuccgccccccucaucauccgcgagcccuucaucgccugcggccccaccgagugcaagcacuucgcccucacccacuacgccgcccagcccggcggcuacuacaacggcacccgcgaggaccgcaacaagcuccgccaccucaucuccgucaagcucggcaagauccccaccgucgagaacuccaucuuccacauggccgccugguccggcuccgccugccacgacggcaaggaguggaccuacaucggcgucgacggccccgacuccaacgcccuccucaagaucaaguacggcgaggccuacaccgacaccuaccacuccuacgccaagaacauccuccgcacccaggaguccgccugcaacugcaucggcggcgacugcuaccucaugaucaccgacggccccgccuccggcgucuccgagugccgcuuccucaagauccgcgagggccgcaucaucaaggagaucuuccccaccggccgcgucaagcacaccgaggagugcaccugcggcuucgccuccaacaagaccaucgagugcgccugccgcgacaaccgcuacaccgccaagcgccccuucgucaagcucaacgucgagaccgacaccgccgagauccgccucaugugcaccgagaccuaccucgacaccccccgccccaacgacggcuccaucaccggccccugcgaguccgacggcgacaagggcuccggcggcaucaagggcggcuucguccaccagcgcauggccuccaagaucggccgcugguacucccgcaccauguccaagaccaagcgcaugggcaugggccucuacgucaaguacgacggcgaccccuggaccgacuccgaggcccucgcccucuccggcgucauggucuccauggaggagcccggcugguacuccuucggcuucgagaucaaggacaagaagugcgacguccccugcaucggcaucgagaugguccacgacggcggcaagaccaccuggcacuccgccgccaccgccaucuacugccucaugggcuccggccagcuccucugggacaccgucaccggcgucgacauggcccucuga

SEQ ID NO: 126212 - RNA, 1401 nt, Artificial Sequence
  derived and/or modified CDS sequence (opt2) from neuraminidase__InfluenzaB__AHL94009
augcuccccuccaccauccagaugcucacccucuuccucaccuccggcggcguccuccucucccucuacgucuccgccucccucuccuaccuccucuacuccgacauccuccucaaguucucccccaccgagaucaccgcccccaccaugccccucgacugcgccaacgccuccaacguccacgccgucaaccgcuccgccaccaagggcgucaccuuccuccuccccgagcccaaguggaccuacccccgccucuccugccccggcuccaccuuccagaaggcccuccucaucuccccccaccgcuucggcgagaccaagggcaacuccgccccccucaucauccgcgagcccuucaucgccugcggccccaacgagugccgccacuucgcccucacccacuacgccgcccagcccggcggcuacuacaacggcacccgcggcgaccgcaacaagcuccgccaccucaucuccgucaagcucggcaagauccccaccgucgagaacuccaucuuccacauggccgccugguccggcuccgccugccacgacggcaaggaguggaccuacaucggcgucgacggccccgacaacaacgcccuccucaagaucaaguacggcgaggccuacaccgacaccuaccacuccuacgccaacaacauccuccgcacccaggaguccgccugcaacugcaucggcggcaacugcuaccucaugaucaccgacggcuccgccuccggcgucuccgagugccgcuuccucaagauccgcgagggccgcaucaucaaggagaucuuccccaccggccgcgucaagcacaccgaggagugcaccugcggcuucgccuccaacaagaccaucgagugcgccugccgcgacaacuccuacaccgccaagcgccccuucgucaagcucaacgucgagaccgacaccgccgagauccgccucaugugcaccgacaccuaccucgacaccccccgccccgacgacggcuccaucaccggccccugcgaguccaacggcgacaagggcuccggcggcaucaagggcggcuucguccaccagcgcauggccuccaagaucggccgcugguacucccgcaccauguccaagaccgagcgcaagggcaugggccucuacgucaaguacgacggcgaccccuggaccgacuccgacgcccucgccuuccgcggcgucauggucuccaugaaggagcccggcugguacuccuucggcuucgagaucaaggacaagaagugcgacguccccugcaucggcaucgagaugguccacgacggcggcaaggagaccuggcacuccgccgccaccgccaucuacugccucaugggcuccggccagcuccucugggacaccgucaccggcgucgacauggcccucuga

SEQ ID NO: 126213 - RNA, 1401 nt, Artificial Sequence; identical to SEQ ID NO: 124992
  derived and/or modified CDS sequence (opt2) from neuraminidase__InfluenzaB__AHL94020

SEQ ID NO: 126214 - RNA, 1401 nt, Artificial Sequence; identical to SEQ ID NO: 124992
  derived and/or modified CDS sequence (opt2) from neuraminidase__InfluenzaB__AHL94031

SEQ ID NO: 126215 - RNA, 1401 nt, Artificial Sequence; identical to SEQ ID NO: 125155
  derived and/or modified CDS sequence (opt2) from neuraminidase__InfluenzaB__AHL94042

SEQ ID NO: 126216 - RNA, 1401 nt, Artificial Sequence
  derived and/or modified CDS sequence (opt2) from neuraminidase__InfluenzaB__AHL94053
augcuccccuccaccauccagacccucacccucuuccucaccuccggcggcguccuccucucccucuaccucuccgcccuccucuccuaccuccucuacuccgacauccuccucaaguucucccccaccgagaucaccgcccccaccaugucccucgacugcgccaacgccuccaacguccaggccgucaaccgcuccgccaccaagggcgucaccuuccuccuccccgagcccgaguggaccuacccccgccucuccugccccggcuccaccuuccagcgcgcccuccucaucuccccccaccgcuucggcgagaccaagggcaacuccgccccccucaucauccgcgagcccuucaucgccugcggccccaacgagugcaagcacuucgcccucacccacuacgccgcccagcccggcggcuacuacaacggcacccgcggcgaccgcaacaagcuccgccaccucaucuccgucaagcucggcaagauccccaccgucgagaacuccaucuuccacauggccgccugguccggcuccgccugccacgacggcaaggaguggaccuacaucggcgucgacggccccgacaacgacgcccuccucaaggucaaguacggcgaggccuacaccgacaccuaccacuccuacgccaacaagauccuccgcacccaggaguccgccugcaacugcaucggcggcaacugcuaccucaugaucaccgacggcuccgccuccggcgucuccgagugccgcuuccucaagauccgcgagggccgcaucaucaaggagaucuuccccaccggccgcgucaagcacaccgaggagugcaccugcggcuucgccuccaacaagaccaucgagugcgccugccgcgacaacuccuacaccgccaagcgccccuucgucaagcucaacgucgagaccgacaccgccgagauccgccucaugugcaccgacaccuaccucgacaccccccgccccgacgacggcuccaucaccggccccugcgaguccaacggcgacaagggcuccggcggcaucaagggcggcuucguccaccagcgcauggaguccaagaucggccgcugguacucccgcaccauguccaagaccgagcgcaugggcaugggccucuacgucaaguacgacggcgaccccugggccgacuccgacgcccucgccuucuccggcgucauggucuccaugaaggagcccggcugguacuccuucggcuucgagaucaaggacaagaagugcgacguccccugcaucggcaucgagaugguccacgacggcggcaaggagaccuggcacuccgccgccaccgccaucuacugccucaugggcuccggccagcuccucugggacaccgucaccggcgucgacauggcccucuga

SEQ ID NO: 126217 - RNA, 1401 nt, Artificial Sequence; identical to SEQ ID NO: 124992
  derived and/or modified CDS sequence (opt2) from neuraminidase__InfluenzaB__AHL94064

SEQ ID NO: 126218 - RNA, 1401 nt, Artificial Sequence; identical to SEQ ID NO: 124992
  derived and/or modified CDS sequence (opt2) from neuraminidase__InfluenzaB__AHL94075

SEQ ID NO: 126219 - RNA, 1401 nt, Artificial Sequence
  derived and/or modified CDS sequence (opt2) from neuraminidase__InfluenzaB__AHL94086
augcuccccuccaccauccagacccucacccucuuccucaccuccggcggcguccuccucucccucuacgucuccgccucccucuccuaccuccucuacuccgacauccuccucaaguucucccgcaccgagaucaccgcccccaucaugccccucgacugcgccaacgccuccaacguccaggccgucaaccgcuccgccaccaagggcgucaccuuccuccuccccgagcccgaguggaccuacccccgccucuccugccccggcuccaccuuccagaaggcccuccucaucuccccccaccgcuucggcgagaccaagggcaacuccgccccccucaucauccgcgagcccuucgucgccugcggccccaaggagugcaagcacuucgcccucacccacuacgccgcccagcccggcggcuacuacaacggcacccgcgaggaccgcaacaagcuccgccaccucaucuccgucaagcucggcaagauccccaccgucgagaacuccaucuuccacauggccgccugguccggcuccgccugccacgacggccgcgaguggaccuacaucggcgucgacggccccgacuccaacgcccuccucaagaucaaguacggcgaggccuacaccgacaccuaccacuccuacgccaagaacauccuccgcacccaggaguccgccugcaacugcaucggcggcgacugcuaccucaugaucaccgacggccccgccuccggcaucuccgagugccgcuuccucaagauccgcgagggccgcaucaucaaggagaucuuccccaccggccgcgucaagcacaccgaggagugcaccugcggcuucgccuccaacaagaccaucgagugcgccugccgcgacaacuccuacaccgccaagcgccccuucgucaagcucaacgucgagaccgacaccgccgagauccgccucaugugcaccgagaccuaccucgacaccccccgccccaacgacggcuccaucaccggccccugcgaguccaacggcgacaagggcuccggcggcaucaagggcggcuucguccaccagcgcauggccuccaagaucggccgcugguacucccgcaccauguccaagaccaagcgcaugggcaugggccucuacgucaaguacgacggcgaccccuggaccgacuccgaggcccucgcccucuccggcgucauggucuccauggaggagcccggcugguacuccuucggcuucgagaucaaggacaagaagugcgacguccccugcaucggcaucgagaugguccacgacggcggcaagaccaccuggcacuccgccgccaccgccaucuacugccucaugggcuccggccagcuccucugggacaccgucaccggcgucaacaugacccucuga

SEQ ID NO: 126220 - RNA, 1401 nt, Artificial Sequence; identical to SEQ ID NO: 125155
  derived and/or modified CDS sequence (opt2) from neuraminidase__InfluenzaB__AHL94095

SEQ ID NO: 126221 - RNA, 1401 nt, Artificial Sequence; identical to SEQ ID NO: 124992
  derived and/or modified CDS sequence (opt2) from neuraminidase__InfluenzaB__AHL94106

SEQ ID NO: 126222 - RNA, 1401 nt, Artificial Sequence
  derived and/or modified CDS sequence (opt2) from neuraminidase__InfluenzaB__AHL94117
augcuccccuccaccauccagaugcucacccucuuccucaccuccggcggcguccuccucucccucuacgucuccgccucccucuccuaccuccucuacuccgacauccuccucaaguucucccccaccgagaucaccgcccccaccaugccccucgacugcgccaacgccuccaacguccacgccgucaaccgcuccgccaccaagggcgucaccuuccuccuccccgagcccgaguggaccuacccccgccucuccugccccggcuccaccuuccagaaggcccuccucaucuccccccaccgcuucggcgagaccaagggcaacuccgccccccucaucauccgcgagcccuucaucgccugcggccccaacgagugcaagcacuucgcccucacccacuacgccgcccagcccggcggcuacuacaacggcacccgcggcgaccgcaacaagcuccgccaccucaucuccgucaagcucggcaagauccccaccgucgagaacuccaucuuccacauggccgccugguccggcuccgccugccacgacggcaaggaguggaccuacaucggcgucgacggccccgacaacaacgcccuccucaagaucaaguacggcgaggccuacaccgacaccuaccacuccuacgccaacaacauccuccgcacccaggaguccgccugcaacugcaucggcggcaacugcuaccucaugaucaccgacggcuccgccuccggcgucuccgagugccgcuuccucaagauccgcgagggccgcaucaucaaggagaucuuccccaccggccgcgucaagcacaccgaggagugcaccugcggcuucgccuccaacaagaccaucgagugcgccugccgcgacaacuccuacaccgccaagcgccccuucgucaagcucaacgucgagaccgacaccgccgagauccgccucaugugcaccgacaccuaccucgacaccccccgccccgacgacggcuccaucaccggccccugcgaguccaacggcgacaagggcuccggcggcaucaagggcggcuucguccaccagcgcauggccuccaagaucggccgcugguacucccgcaccauguccaagaccgagcgcaagggcaugggccuccacgucaaguacgacggcgaccccuggaccgacuccgacgcccucgccuuccgcggcgucauggucuccaugaaggagcccggcugguacuccuucggcuucgagaucaaggacaagaagugcgacguccccugcaucggcaucgagaugguccacgacggcggcaaggagaccuggcacuccgccgccaccgccaucuacugccucaugggcuccggccagcuccucugggacaccgucaccggcgucaacauggcccucuga

SEQ ID NO: 126223 - RNA, 1401 nt, Artificial Sequence; identical to SEQ ID NO: 124992
  derived and/or modified CDS sequence (opt2) from neuraminidase__InfluenzaB__AHL94128

SEQ ID NO: 126224 - RNA, 1401 nt, Artificial Sequence
  derived and/or modified CDS sequence (opt2) from neuraminidase__InfluenzaB__AHL94139
augcuccccuccaccauccagacccucacccucuuccucaccuccggcggcguccuccucucccucuacgucuccgcccuccucuccuaccuccucuacuccgacauccuccucaaguucucccccaccgagaucaccgcccccaccaugucccucgacugcgccaacgccuccaacguccaggccgucaaccgcuccgccaccaagggcgucaccuuccuccuccccgagcccgaguggaccuacccccgccucuccugccccggcuccaccuuccagcgcgcccuccucaucuccccccaccgcuucggcgagaccaagggcaacuccgccccccucaucauccgcgagcccuucaucgccugcggccccaacgagugcaagcacuucgcccucacccacuacgccgcccagcccggcggcuacuacaacggcacccgcggcgaccgcaacaagcuccgccaccucaucuccgucaagcucggcaagauccccaccgucgagaacuccaucuuccacauggccgccugguccggcuccgccugccacgacggcaaggaguggaccuacaucggcgucgacggccccgacaacgacgcccuccucaaggucaaguacggcgaggccuacaccgacaccuaccacuccuacgccaacaagauccuccgcacccaggaguccgccugcaacugcaucggcggcaacugcuaccucaugaucaccgacggcuccgccuccggcgucuccgagugccgcuuccucaagauccgcgagggccgcaucaucaaggagaucuuccccaccggccgcgucaagcacaccgaggagugcaccugcggcuucgccuccaacaagaccaucgagugcgccugccgcgacaacuccuacaccgccaagcgccccuucgucaagcucaacgucgagaccgacaccgccgagaucaagcucaugugcaccgacaccuaccucgacaccccccgccccgacgacggcuccaucaccggccccugcgaguccaacggcgacaagggcuccggcggcaucaagggcggcuucguccaccagcgcauggaguccaagaucggccgcugguacucccgcaccauguccaagaccgagcgcaugggcaugggccucuacgucaaguacgacggcgaccccugggccgacuccgacgcccucgccuucuccggcgucauggucuccaugaaggagcccggcugguacuccuucggcuucgagaucaaggacaagaagugcgacguccccugcaucggcaucgagaugguccacgacggcggcaaggagaccuggcacuccgccgccaccgccaucuacugccucaugggcuccggccagcuccucugggacaccgucaccggcgucgacauggcccucuga

SEQ ID NO: 126225 - RNA, 1401 nt, Artificial Sequence; identical to SEQ ID NO: 126182
  derived and/or modified CDS sequence (opt2) from neuraminidase__InfluenzaB__AHL94150

SEQ ID NO: 126226 - RNA, 1401 nt, Artificial Sequence
  derived and/or modified CDS sequence (opt2) from neuraminidase__InfluenzaB__AHL94161
augcuccccuccaccauccagaugcucacccucuuccucaccuccggcggcguccuccucucccucuacgucuccgccucccucuccuaccuccucuacuccgacauccuccucaaguucucccccaccgagaucaccgcccccaccaugccccucgacugcgccaacgccuccaacguccacgccgucaaccgcuccgccaccaagggcgucaccuuccuccuccccgagcccgaguggaccuacccccgccucuccugccccggcuccaccuuccagaaggcccuccucaucuccccccaccgcuucggcgagaccaagggcaacuccgccccccucaucauccgcgagcccuucaucgccugcggccccaacgagugcaagcacuucgcccucacccacuacgccgcccagcccggcggcuacuacaacggcacccgcggcgaccgcaacaagcuccgccaccucaucuccgucaagcucggcaagauccccaccgucgagaacuccaucuuccacauggccgccugguccggcuccgccugccacgacggcaaggaguggaccuacaucggcgucgacggccccgacaacaacgcccuccucaagaucaaguacggcgaggccuacaccgacaccuaccacuccuacgccaacaacauccuccgcacccaggaguccgccugcaacugcaucggcggcaacugcuaccucaugaucaccgacggcuccgccuccggcgucuccgagugccgcuuccucaagauccgcgagggccgcaucaucaaggagaucuuccccaccggccgcgucaagcacaccgaggagugcaccugcggcuucgccuccaacaagaccaucgagugcgccugccgcgacaacuccuacaccgccaagcgccccuucgucaagcucaacgucgagaccgacaccgccaagauccgccucaugugcaccgacaccuaccucgacaccccccgccccgacgacggcuccaucaccggccccugcgaguccaacggcgacaagggcuccggcggcaucaagggcggcuucguccaccagcgcauggccuccaagaucggccgcugguacucccgcaccauguccaagaccgagcgcaagggcaugggccucuacgucaaguacgacggcgaccccuggaccgacuccgacgcccucgccuuccgcggcgucauggucuccaugaaggagcccggcugguacuccuucggcuucgagaucaaggacaagaagugcgacguccccugcaucggcaucgagaugguccacgacggcggcaaggagaccuggcacuccgccgccaccgccaucuacugccucaugggcuccggccagcuccucugggacaccgucaccggcgucgacauggcccucuga

SEQ ID NO: 126227 - RNA, 1401 nt, Artificial Sequence; identical to SEQ ID NO: 126182
  derived and/or modified CDS sequence (opt2) from neuraminidase__InfluenzaB__AHL94183

SEQ ID NO: 126228 - RNA, 1404 nt, Artificial Sequence
  derived and/or modified CDS sequence (opt2) from neuraminidase__InfluenzaB__AHL94194
augcuccccuccaccauccagacccucacccucuuccucaccuccggcggcguccuccucucccucuacgucuccgcccuccucuccuaccuccucuacuccgacauccuccucaaguucucccccaccgagaucaccgcccccaccaugucccucgacugcgccaacgccuccaacguccaggccgucaaccgcuccgccaccaagggcgucaccuuccuccuccuccccgagcccgaguggaccuacccccgccucuccugccccggcuccaccuuccagcgcgcccuccucaucuccccccaccgcuucggcgagaccaagggcaacuccgccccccucaucauccgcgagcccuucaucgccugcggccccaacgagugcaagcacuucgcccucacccacuacgccgcccagcccggcggcuacuacaacggcacccgcggcgaccgcaacaagcuccgccaccucaucuccgucaagcucggcaagauccccaccgucgagaacuccaucuuccacauggccgccugguccggcuccgccugccacgacggcaaggaguggaccuacaucggcgucgacggccccgacaacgacgcccuccucaaggucaaguacggcgaggccuacaccgacaccuaccacuccuacgccaacaagauccuccgcacccaggaguccgccugcaacugcaucggcggcaacugcuaccucaugaucaccgacggcuccgccuccggcgucuccgagugccgcuuccucaagauccgcgagggccgcaucaucaaggagaucuuccccaccggccgcgucaagcacaccgaggagugcaccugcggcuucgccuccaacaagaccaucgagugcgccugccgcgacaacuccuacaccgccaagcgccccuucgucaagcucaacgucgagaccgacaccgccgagauccgccucaugugcaccgacaccuaccucgacaccccccgccccgacgacggcuccaucaccggccccugcgaguccaacggcgacaagggcuccggcggcaucaagggcggcuucguccaccagcgcauggaguccaagaucggccgcugguacucccgcaccauguccaagaccgagcgcaugggcaugggccucuacgucaaguacgacggcgaccccugggccgacuccgacgcccucgccuucuccggcgucauggucuccaugaaggagcccggcugguacuccuucggcuucgagaucaaggacaagaagugcgacguccccugcaucggcaucgagaugguccacgacggcggcaaggagaccuggcacuccgccgccaccgccaucuacugccucaugggcuccggccagcuccucugggacaccgucaccggcgucgacauggcccucuga

SEQ ID NO: 126229 - RNA, 1401 nt, Artificial Sequence; identical to SEQ ID NO: 124992
  derived and/or modified CDS sequence (opt2) from neuraminidase__InfluenzaB__AHL94205

SEQ ID NO: 126230 - RNA, 1401 nt, Artificial Sequence; identical to SEQ ID NO: 125155
  derived and/or modified CDS sequence (opt2) from neuraminidase__InfluenzaB__AHL94214

SEQ ID NO: 126231 - RNA, 1401 nt, Artificial Sequence
  derived and/or modified CDS sequence (opt2) from neuraminidase__InfluenzaB__AHL94224
augcuccccuccaccauccagaugcucacccucuuccucaccuccggcggcguccuccucucccucuacgucuccgccucccucuccuaccuccucuacuccgacauccuccucaaguucucccccaccgagaucaccgcccccaccaugccccucgacugcgccaacgccuccaacguccacgccgucaaccgcuccgccaccaagggcgucaccuuccuccuccccgagcccgaguggaccuacccccgccucuccugccccggcuccaccuuccagaaggcccuccucaucuccccccaccgcuucggcgagaccaagggcaacuccgccccccucaucauccgcgagcccuucaucgccugcggccccaacgagugcaagcacuucgcccucacccacuacgccgcccagcccggcggcuacuacaacggcacccgcggcgaccgcaacaagcuccgccaccucaucuccgucaagcucggcaagauccccaccgucgagaacuccaucuuccacauggccgccugguccggcuccgccugccacgacggcaaggaguggaccuacaucggcgucgacggccccgacaacaacgcccuccucaagaucaaguacggcgaggccuacaccgacaccuaccacuccuacgccaacaacauccuccgcacccaggaguccgccugcaacugcaucggcggcaacugcuaccucaugaucaccgacggcuccgccuccggcgucuccgagugccgcuuccucaagauccgcgagggccgcaucaucaaggagaucuuccccaccggccgcgucaagcacaccgaggagugcaccugcggcuucgccuccaacaagaccaucgagugcgccugccgcgacaacuccuacaccgccaagcgccccuucgucaagcucaacgucgagaccgacaccgccgagauccgccucaugugcaccgacaccuaccucgacaccccccgccccgacgacggcuccaucaccggccccugcgaguccaacggcgacaagggcuccggcggcaucaagggcggcuucguccaccagcgcauggccuccaagaucggccgcugguacucccgcaccauguccaagaccgagcgcaagggcaugggccucuacgucaaguacgacggcgaccccuggaucgacuccgacgcccucgccuuccgcggcgucauggucuccaugaaggagcccggcugguacuccuucggcuucgagaucaaggacaagaagugcgacguccccugcaucggcaucgagaugguccacgacggcggcaaggagaccuggcacuccgccgccaccgccaucuacugccucaugggcuccggccagcuccucugggacaccgucaccggcgucgacauggcccucuga

SEQ ID NO: 126232 - RNA, 1401 nt, Artificial Sequence; identical to SEQ ID NO: 124992
  derived and/or modified CDS sequence (opt2) from neuraminidase__InfluenzaB__AHL94235

SEQ ID NO: 126233 - RNA, 1401 nt, Artificial Sequence; identical to SEQ ID NO: 125155
  derived and/or modified CDS sequence (opt2) from neuraminidase__InfluenzaB__AHL94246

SEQ ID NO: 126234 - RNA, 1401 nt, Artificial Sequence; identical to SEQ ID NO: 125155
  derived and/or modified CDS sequence (opt2) from neuraminidase__InfluenzaB__AHL94257

SEQ ID NO: 126235 - RNA, 1401 nt, Artificial Sequence; identical to SEQ ID NO: 124853
  derived and/or modified CDS sequence (opt2) from neuraminidase__InfluenzaB__AHL94267

SEQ ID NO: 126236 - RNA, 1401 nt, Artificial Sequence; identical to SEQ ID NO: 124853
  derived and/or modified CDS sequence (opt2) from neuraminidase__InfluenzaB__AHL94278

SEQ ID NO: 126237 - RNA, 1401 nt, Artificial Sequence; identical to SEQ ID NO: 124853
  derived and/or modified CDS sequence (opt2) from neuraminidase__InfluenzaB__AHL94299

SEQ ID NO: 126238 - RNA, 1401 nt, Artificial Sequence
  derived and/or modified CDS sequence (opt2) from neuraminidase__InfluenzaB__AHL94310
augcuccccuccaccauccagacccucacccucuuccucaccuccggcggcguccuccucucccucuacgucuccgccucccucuccuaccuccucuacuccgacauccuccucaaguucucccgcaccgagaucaccgcccccaucaugccccucgacugcgccaacgccuccaacguccaggccgucaaccgcuccgccaccaagggcgucaccccccuccuccccgagcccgaguggaccuacccccgccucuccugccccggcuccaccuuccagaaggcccuccucaucuccccccaccgcuucggcgagaccaagggcaacuccgccccccucaucauccgcgagcccuucaucgccugcggccccaaggagugcaagcacuucgcccucacccacuacgccgcccagcccggcggcuacuacaacggcacccgcgaggaccgcaacaagcuccgccaccucaucuccgucaagcucggcaagauccccaccgucgagaacuccaucuuccacauggccgccugguccggcuccgccugccacgacggccgcgaguggaccuacaucggcgucgacggccccgacuccaacgcccuccucaagaucaaguacggcgaggccuacaccgacaccuaccacuccuacgccaagaacauccuccgcacccaggaguccgccugcaacugcaucggcggcgacugcuaccucaugaucaccgacggcuccgccuccggcaucuccgagugccgcuuccucaagauccgcgagggccgcaucaucaaggagaucuuccccaccggccgcgucaagcacaccgaggagugcaccugcggcuucgccuccaacaagaccaucgagugcgccugccgcgacaacuccuacaccgccaagcgccccuucgucaagcucaacgucgagaccgacaccgccgagauccgccucaugugcaccgagaccuaccucgacaccccccgccccaacgacggcuccaucgccggccccugcgaguccaacggcgacgagggcuccggcggcaucaagggcggcuucguccaccagcgcauggccuccaagaucggccgcugguacucccgcaccauguccaagaccaagcgcaugggcaugggccucuacgucaaguacgacggcgaccccuggaccgacuccgaggcccucgcccucuccggcgucauggucuccauggaggagcccggcugguacuccuucggcuucgagaucaaggacaagaagugcgacguccccugcaucggcaucgagaugguccacgacggcggcaagaccaccuggcacuccgccgccaccgccaucuacugccucaugggcuccggccagcuccucugggacaccgucaccggcgucaacaugacccucuga

SEQ ID NO: 126239 - RNA, 1401 nt, Artificial Sequence; identical to SEQ ID NO: 126238
  derived and/or modified CDS sequence (opt2) from neuraminidase__InfluenzaB__AHL94321

SEQ ID NO: 126240 - RNA, 1401 nt, Artificial Sequence
  derived and/or modified CDS sequence (opt2) from neuraminidase__InfluenzaB__AHL94332
augcuccccuccaccauccagacccucacccucuuccucaccuccggcggcguccuccucucccucuacgucuccgccucccucuccuaccuccucuacuccgacauccuccucaaguucucccgcaccgagaucaccgcccccaucaugccccucgacugcgccaacgccuccaacguccaggccgucaaccgcuccgccaccaagggcgucaccccccuccuccccgagcccgaguggaccuacccccgccucuccugccccggcuccaccuuccagaaggcccuccucaucuccccccaccgcuucggcgagaccaagggcaacuccgccccccucaucauccgcgagcccuucaucgccugcggccccaaggagugcaagcacuucgcccucacccacuacgccgcccagcccggcggcuacuacaacggcacccgcgaggaccgcaacaagcuccgccaccucaucuccgucaagcucggcaagauccccaccgucgagaacuccaucuuccacauggccgccugguccggcuccgccugccacgacggccgcgaguggaccuacaucggcgucgacggccccgacuccaacgcccuccucaagaucaaguacggcgaggccuacaccgacaccuaccacuccuacgccaagaacauccuccgcacccaggaguccgccugcaacugcaucggcggcgacugcuaccucaugaucaccgacggccccgccuccggcaucuccgagugccgcuuccucaagauccgcgagggccgcaucaucaaggagaucuuccccaccggccgcgucaagcacaccgaggagugcaccugcggcuucgccuccaacaagaccaucgagugcgccugccgcgacaacuccuacaccgccaagcgccccuucgucaagcucaacgucgagaccgacaccgccgagauccgccucaugugcaccgagaccuaccucgacaccccccgccccaacgacggcuccaucaccggccccugcgaguccaacggcgacgagggcuccggcggcaucaagggcggcuucguccaccagcgcauggccuccaagaucggccgcugguacucccgcaccauguccaagaccaagcgcaugggcaugggccucuacgucaaguacgacggcgaccccuggaccgacuccgaggcccucgcccucuccggcgucauggucuccauggaggagcccggcugguacuccuucggcuucgagaucaaggacaagaagugcgacguccccugcaucggcaucgagaugguccacgacggcggcaagaccaccuggcacuccgccgccaccgccaucuacugccucaugggcuccggccagcuccucugggacaccgucaccggcgucaacaugacccucuga

SEQ ID NO: 126241 - RNA, 1401 nt, Artificial Sequence; identical to SEQ ID NO: 124853
  derived and/or modified CDS sequence (opt2) from neuraminidase__InfluenzaB__AHL94343

SEQ ID NO: 126242 - RNA, 1401 nt, Artificial Sequence
  derived and/or modified CDS sequence (opt2) from neuraminidase__InfluenzaB__AHL94354
augcuccccuccaccauccagacccucacccucuuccucaccuccggcggcguccuccucucccucuacgucuccgccucccucuccuaccuccucuacuccgacauccuccucaaguucucccccaccgagaucaccgcccccaccaugccccucgacugcgccaacgccuccaacguccaggccgucaaccgcuccgccaccaagggcgucacccuccuccuccccgagcccgaguggaccuacccccgccucuccugccccggcuccaccuuccagaaggcccuccucaucuccccccaccgcuucggcgagaccaagggcaacuccgccccccucaucauccgcgagcccuucaucgccugcggccccaacgagugcaagcacuucgcccucacccacuacgccgcccagcccggcggcuacuacaacggcacccgcggcgaccgcaacaagcuccgccaccucaucuccgucaagcucggcaagauccccaccgucgagaacuccaucuuccacauggccgccugguccggcuccgccugccacgacggcaaggaguggaccuacaucggcgucgacggccccgacaacaacgcccuccucaaggucaaguacggcgaggccuacaccgacaccuaccacuccuacgccaacaagauccuccgcacccaggaguccgccugcaacugcaucggcggcaacugcuaccucaugaucaccgacggcuccgccuccggcgucuccgagugccgcuuccucaagauccgcgagggccgcaucaucaaggagaucuuccccaccggccgcgucaagcacaccgaggagugcaccugcggcuucgccuccaacaagaccaucgagugcgccugccgcgacaaccgcuacaccgccaagcgccccuucgucaagcucaacgucgagaccgacaccgccgagauccgccucaugugcaccgacaccuaccucgacaccccccgccccaacgacggcuccaucaccggccccugcgaguccgacggcgacaagggcuccggcggcaucaagggcggcuucguccaccagcgcaugaaguccaagaucggccgcugguacucccgcaccauguccaagaccgagcgcaugggcaugggccucuacgucaaguacgacggcgaccccugggccgacuccgacgcccucgccuucuccggcgucauggucuccaugaaggagcccggcugguacuccuucggcuucgagaucaaggacaagaagugcgacguccccugcaucggcaucgagaugguccacgacggcggcaaggagaccuggcacuccgccgccaccgccaucuacugccucaugggcuccggccagcuccucugggacaccgucaccggcgucgacauggcccucuga

SEQ ID NO: 126243 - RNA, 1401 nt, Artificial Sequence; identical to SEQ ID NO: 126242
  derived and/or modified CDS sequence (opt2) from neuraminidase__InfluenzaB__AHL94365

SEQ ID NO: 126244 - RNA, 1401 nt, Artificial Sequence
  derived and/or modified CDS sequence (opt2) from neuraminidase__InfluenzaB__AHL94387
augcuccccuccaccauccagacccucacccucuuccucaccuccggcggcguccuccucucccucuacgucuccgccucccucuccuaccuccucuacuccgacauccuccucaaguucucccccaccgagaucaccgcccccaccaugccccucgacugcgccaacgccuccaccguccaggccgucaaccgcuccgccaccaagggcgucacccuccuccuccccgagcccgaguggaccuacccccgccucuccugccccggcuccaccuuccagaaggcccuccucaucuccccccaccgcuucggcgagaccaagggcaacuccgccccccucaucauccgcgagcccuucaucgccugcggccccaacgagugcaagcacuucgcccucacccacuacgccgcccagcccggcggcuacuacaacggcacccgcggcgaccgcaacaagcuccgccaccucaucuccgucaagcucggcaagauccccaccgucgagaacuccaucuuccacauggccgccugguccggcuccgccugccacgacggcaaggaguggaccuaccucggcgucgacggccccgacaacaacgcccuccucaaggucaaguacggcgaggccuacaccgacaccuaccacuccuacgccaacaagauccuccgcacccaggaguccgccugcaacugcaucggcggcaacugcuaccucaugaucaccgacggcuccgccuccggcgucuccgagugccgcuuccucaagauccgcgagggccgcaucaucaaggagaucuuccccaccggccgcgucaagcacaccgaggagugcaccugcggcuucgccuccaacaagaccaucgagugcgccugccgcgacaaccgcuacaccgccaagcgccccuucgucaagcucaacgucgagaccgacaccgccgagauccgccucaugugcaccgacaccuaccucgacaccccccgccccaacgacggcuccaucaccggccccugcgaguccgacggcgacaagggcuccggcggcaucaagggcggcuucguccaccagcgcaugaaguccaagaucggccgcugguacucccgcaccauguccaagaccgagcgcaugggcaugggccucuacgucaaguacgacggcgaccccugggccgacuccgacgcccucgccuucuccggcgucauggucuccaugaaggagcccggcugguacuccuucggcuucgagaucaaggacaagaagugcgacguccccugcaucggcaucgagaugguccacgacggcggcaaggagaucuggcacuccgccgccaccgccaucuacugccucaugggcuccggccagcuccucugggacaccgucaccggcgucgacauggcccucuga

SEQ ID NO: 126245 - RNA, 1404 nt, Artificial Sequence
  derived and/or modified CDS sequence (opt2) from neuraminidase__InfluenzaB__AHL94398
augcuccccuccaccauccagacccucacccucuuccucaccuccggcggcguccuccucucccucuacgucuccgccucccucuccuaccuccucuacuccgacauccuccucaaguucucccccaccgagaucaccgcccccaccaugccccucgacugcgccaacgccuccaacguccaggccgucaaccgcuccgccaccaagggcgucacccuccuccuccuccccgagcccgaguggaccuacccccgccucuccugccccggcuccaccuuccagaaggcccuccucaucuccccccaccgcuucggcgagaccaagggcaacuccgccccccucaucauccgcgagcccuucaucgccugcggccccaacgagugcaagcacuucgcccucacccacuacgccgcccagcccggcggcuacuacaacggcacccgcggcgaccgcaacaagcuccgccaccucaucuccgucaagcucggcaagauccccaccgucgagaacuccaucuuccacauggccgccugguccggcuccgccugccacgacggcaaggaguggaccuacaucggcgucgacggccccgacaacaacgcccuccucaaggucaaguacggcgaggccuacaccgacaccuaccacuccuacgccaacaagauccuccgcacccaggaguccgccugcaacugcaucggcggcaacugcuaccucaugaucaccgacggcuccgccuccggcgucuccgagugccgcuuccucaagauccgcgagggccgcaucaucaaggagaucuuccccaccggccgcgucaagcacaccgaggagugcaccugcggcuucgccuccaacaagaccaucgagugcgccugccgcgacaaccgcuacaccgccaagcgccccuucgucaagcucaacgucgagaccgacaccgccgagauccgccucaugugcaccgacaccuaccucgacaccccccgccccaacgacggcuccaucaccggccccugcgaguccgacggcgacaagggcuccggcggcaucaagggcggcuucguccaccagcgcaugaaguccaagaucggccgcugguacucccgcaccauguccaagaccgagcgcaugggcaugggccucuacgucaaguacgacggcgaccccugggccgacuccgacgcccucgccuucuccggcgucauggucuccaugaaggagcccggcugguacuccuucggcuucgagaucaaggacaagaagugcgacguccccugcaucggcaucgagaugguccacgacggcggcaaggagaccuggcacuccgccgccaccgccaucuacugccucaugggcuccggccagcuccucugggacaccgucaccggcgucgacauggcccucuga

SEQ ID NO: 126246 - RNA, 1401 nt, Artificial Sequence; identical to SEQ ID NO: 126242
  derived and/or modified CDS sequence (opt2) from neuraminidase__InfluenzaB__AHL94409

SEQ ID NO: 126247 - RNA, 1401 nt, Artificial Sequence
  derived and/or modified CDS sequence (opt2) from neuraminidase__InfluenzaB__AHL94431
augcuccccuccaccauccagacccucacccucuuccucaccuccggcggcguccuccucucccucuacgucuccgccucccucuccuaccuccucuacuccgacauccuccucaaguucucccagaccgagaucaccgcccccaucaugccccucgacugcgccaacgccuccaacguccaggccgucaaccacuccgccgccaagggcgucacccucauccuccccgagcccgaguggaccuacccccgccucuccugccccggcuccaccuuccagaaggcccuccucaucuccccccaccgcuucggcgagaucaagggcaacuccgccccccucaucauccgcgagcccuucaucgccugcggccccaccgagugcaagcacuucgcccucacccacuacgccgcccagcccggcggcuacuacaacggcacccgcgaggaccgcaacaagcuccgccaccucaucuccgucaagcucggcaagauccccaccgucgagaacuccaucuuccacauggccgccugguccggcuccgccugccacgacggcaaggaguggaccuacaucggcgucgacggccccgacuccaacgcccuccucaagaucaaguacggcgaggccuacaccgacaccuaccacuccuacgccaagaacauccuccgcacccaggaguccgccugcaacugcaucggcggcgacugcuaccucaugaucaccgacggccccgccuccggcgucuccgagugccgcuuccucaagauccgcgagggccgcaucaucaaggagaucuuccccaccggccgcgucaagcacaccgaggagugcaccugcggcuucgccuccaacaagaccaucgagugcgccugccgcgacaaccgcuacaccgccaagcgccccuucgucaagcucaacgucgagaccgacaccgccgagauccgccucaugugcaccgagaccuaccucgacaccccccgccccaacgacggcuccaucaccggccccugcgaguccgacggcgacaagggcuccggcggcaucaagggcggcuucguccaccagcgcauggccuccaagaucggccgcugguacucccgcaccauguccaagaccaagcgcaugggcaugggccucuacgucaaguacgacggcgaccccuggaccgacuccgaggcccucgcccucuccggcgucaugaucuccauggaggagcccggcugguacuccuucggcuucgagaucaaggacaagaagugcgacguccccugcaucggcaucgagaugguccacgacggcggcaagaccaccuggcacuccgccgccaccgccaucuacugccucaugggcuccggccagcuccucugggacaccgucaccggcgucgacauggcccucuga

SEQ ID NO: 126248 - RNA, 1401 nt, Artificial Sequence
  derived and/or modified CDS sequence (opt2) from neuraminidase__InfluenzaB__AHL94442
augcuccccuccaccauccagacccucacccucuuccucaccuccggcggcguccuccucucccucuacauguccgccucccucuccuaccuccucuacuccgacauccuccucaaguucucccgcaccgagaucaccgcccccaucaugccccucgacugcgccaacgccuccaacguccaggccgucaaccgcuccgccaccaagggcgucaccccccuccuccccgagcccgaguggaccuacccccgccucuccugccccggcuccaccuuccagaaggcccuccucaucuccccccaccgcuucggcgagaccaagggcaacuccgccccccucaucauccgcgagcccuucaucgccugcggccccaaggagugcaagcacuucgcccucacccacuacgccgcccagcccggcggcuacuacaacggcacccgcgaggaccgcaacaagcuccgccaccucaucuccgucaagcucggcaagauccccaccgucgagaacuccaucuuccacauggccgccugguccggcuccgccugccacgacggccgcgaguggaccuacaucggcgucgacggccccgacuccaacgcccuccucaagaucaaguacggcgaggccuacaccgacaccuaccacuccuacgccaagaacauccuccgcacccaggaguccgccugcaacugcaucggcggcgacugcuaccucaugaucaccgacggcuccgccuccggcaucuccgagugccgcuuccucaagauccgcgagggccgcaucaucaaggagaucuuccccaccggccgcgucaagcacaccgaggagugcaccugcggcuucgccuccaacaagaccaucgagugcgccugccgcgacaacuccuacaccgccaagcgccccuucgucaagcucaacgucgagaccgacaccgccgagauccgccucaugugcaccgagaccuaccucgacaccccccgccccaacgacggcuccaucgccggccccugcgaguccaacggcgacgagggcuccggcggcaucaagggcggcuucguccaccagcgcauggccuccaagaucggccgcugguacucccgcaccauguccaagaccaagcgcaugggcaugggccucuacgucaaguacgacggcgaccccuggaccgacuccgaggcccucgcccucuccggcgucauggucuccauggaggagcccggcugguacuccuucggcuucgagaucaaggacaagaagugcgacguccccugcaucggcaucgagaugguccacgacggcggcaagaccaccuggcacuccgccgccaccgccaucuacugccucaugggcuccggccagcuccucugggacaccgucaccggcgucaacaugacccucuga

SEQ ID NO: 126249 - RNA, 1401 nt, Artificial Sequence; identical to SEQ ID NO: 126238
  derived and/or modified CDS sequence (opt2) from neuraminidase__InfluenzaB__AHL94464

SEQ ID NO: 126250 - RNA, 1401 nt, Artificial Sequence; identical to SEQ ID NO: 124853
  derived and/or modified CDS sequence (opt2) from neuraminidase__InfluenzaB__AHL94475

SEQ ID NO: 126251 - RNA, 1401 nt, Artificial Sequence; identical to SEQ ID NO: 126242
  derived and/or modified CDS sequence (opt2) from neuraminidase__InfluenzaB__AHL94486

SEQ ID NO: 126252 - RNA, 1401 nt, Artificial Sequence; identical to SEQ ID NO: 124853
  derived and/or modified CDS sequence (opt2) from neuraminidase__InfluenzaB__AHL94497

SEQ ID NO: 126253 - RNA, 1401 nt, Artificial Sequence; identical to SEQ ID NO: 126238
  derived and/or modified CDS sequence (opt2) from neuraminidase__InfluenzaB__AHL94508

SEQ ID NO: 126254 - RNA, 1401 nt, Artificial Sequence
  derived and/or modified CDS sequence (opt2) from neuraminidase__InfluenzaB__AHL94519
augcuccccuccaccauccagacccucacccucuuccucaccuccggcggcguccuccucucccucuacgucuccgccucccucuccuaccuccucuacuccgacauccuccucaaguucucccccaccgagaucaccgcccccaccaugccccucgacugcgccaacgccuccaacguccaggccgucaaccgcuccgccaccaagggcgucacccuccuccuccccgagcccgaguggaccuacccccgccucuccugccccggcuccaccuuccagaaggcccuccucaucuccccccaccgcuucggcgagaccaagggcaacuccgccccccucaucauccgcgagcccuucaucgccugcggccccaacgagugcaagcacuucgcccucacccacuacgccgcccagcccggcggcuacuacaacggcacccgcggcgaccgcaacaagcuccgccaccucaucuccgucaagcucggcaagauccccaccgucgagaacuccaucuuccacauggccgccugguccggcuccgccugccacgacggcaaggaguggaccuacaucggcgucgacggccccgacaacaacgcccuccucaaggucaaguacggcgaggccuacaccgacaccuaccacuccuacgccaacaagauccuccgcacccaggaguccgccugcaacugcaucggcggcaacugcuaccucaugaucaccgacggcuccgccuccggcgucuccgagugccgcuuccucaagauccgcgagggccgcaucaucaaggagaucuuccccaccggccgcgucaagcacaccgaggagugcaccugcggcuucgccuccaacaagaccaucgagugcgccugccgcgacaacuccuacaccgccaagcgccccuucgucaagcucaacgucgagaccgacaccgccgagauccgccucaugugcaccgacaccuaccucgacaccccccgccccaacgacggcuccaucaccggccccugcgaguccgacggcgacaagggcuccggcggcaucaagggcggcuucguccaccagcgcauggaguccaagaucggccgcugguacucccgcaccauguccaagaccgagcgcaugggcaugggccucuacgucaaguacgacggcgaccccuggaccgacuccgacgcccucgccuucuccggcgucauggucuccaugaaggagcccggcugguacuccuucggcuucgagaucaaggacaagaagugcgacguccccugcaucggcaucgagaugguccacgacggcggcaaggagaccuggcacuccgccgccaccgccaucuacugccucaugggcuccggccagcuccucugggacaccgucaccggcgucgacauggcccucuga

SEQ ID NO: 126255 - RNA, 1401 nt, Artificial Sequence; identical to SEQ ID NO: 126238
  derived and/or modified CDS sequence (opt2) from neuraminidase__InfluenzaB__AHL94530

SEQ ID NO: 126256 - RNA, 1401 nt, Artificial Sequence; identical to SEQ ID NO: 126242
  derived and/or modified CDS sequence (opt2) from neuraminidase__InfluenzaB__AHL94541

SEQ ID NO: 126257 - RNA, 1401 nt, Artificial Sequence
  derived and/or modified CDS sequence (opt2) from neuraminidase__InfluenzaB__AHL94563
augcuccccuccaccauccagacccucacccucuuccucacccucggcggcguccuccucucccucuacgucuccgccucccucuccuaccuccucuacuccgacauccuccucaaguucucccgcaccgagaucaccgcccccaucaugccccucgacugcgccaacgccuccaacguccaggccgucaaccgcuccgccaccaagggcgucacccuccuccuccccgagcccgaguggaccuacccccgccucuccugccccggcuccaccuuccagaaggcccuccucaucuccccccaccgcuucggcgagaccaagggcaacuccgccccccucaucauccgcgagcccuucaucgccugcggccccaaggagugcaagcacuucgcccucacccacuacgccgcccagcccggcggcuacuacaacggcacccgcgaggaccgcaacaagcuccgccaccucaucuccgucaagcucggcaagauccccaccgucgagaacuccaucuuccacauggccgccugguccggcuccgccugccacgacggccgcgaguggaccuacaucggcgucgacggccccgacuccaacgcccuccucaagaucaaguacggcgaggccuacaccgacaccuaccacuccuacgccaagaacauccuccgcacccaggaguccgccugcaacugcaucggcggcgacugcuaccucaugaucaccgacggccccgccuccggcaucuccgagugccgcuuccucaagauccgcgagggccgcaucaucaaggagaucuuccccaccggccgcgucaagcacaccgaggagugcaccugcggcuucgccuccaacaagaccaucgagugcgccugccgcgacaacuccuacaccgccaagcgccccuucgucaagcucaacgucgagaccgacaccgccgagauccgccucaugugcaccgagaccuaccucgacaccccccgccccaacgacggcuccaucaccggccccugcgaguccaacggcgacaagggcuccggcggcaucaagggcggcuucguccaccagcgcauggccuccaagaucggccgcugguacucccgcaccauguccaagaccaagcgcaugggcaugggccucuacgucaaguacgacggcgaccccuggaccgacuccgaggcccucgcccucuccggcgucauggucuccauggaggagcccggcugguacuccuucggcuucgagaucaaggacaagaagugcgacguccccugcaucggcaucgagaugguccacgacggcggcaagaccaccuggcacuccgccgccaccgccaucuacugccucaugggcuccggccagcuccucugggacaccgucaccggcgucaacaugacccucuga

SEQ ID NO: 126258 - RNA, 1401 nt, Artificial Sequence; identical to SEQ ID NO: 126211
  derived and/or modified CDS sequence (opt2) from neuraminidase__InfluenzaB__AHL94574

SEQ ID NO: 126259 - RNA, 1401 nt, Artificial Sequence
  derived and/or modified CDS sequence (opt2) from neuraminidase__InfluenzaB__AHL94585
augcuccccuccaccauccagacccucacccucuuccucaccuccggcggcguccuccucucccucuacgucuccgccucccucuccuaccuccucuacuccgacauccuccucaaguucucccagaccgagaucaccgcccccaucaugccccucgacugcgccaacgccuccaacguccaggccgucaaccgcuccgccgccaagggcgucacccuccuccuccccgagcccgaguggaccuacccccgccucuccugccccggcuccaccuuccagaaggcccuccucaucuccccccaccgcuucggcgagaucaagggcaacuccgccccccucaucauccgcgagcccuucaucgccugcggccccaccgagugcaagcacuucgcccucacccacuacgccgcccagcccggcggcuacuacaacggcacccgcgaggaccgcaacaagcuccgccaccucaucuccgucaagcucggcaagauccccaccgucgagaacuccaucuuccacauggccgccugguccggcuccgccugccacgacggcaaggaguggaccuacaucggcgucgacggccccgacuccaacgcccuccucaagaucaaguacggcgaggccuacaccgacaccuaccacuccuacgccaagaacauccuccgcacccaggaguccgccugcaacugcaucggcggcgacugcuaccucaugaucaccgacggccccgccuccggcgucuccgagugccgcuuccucaagauccgcgagggccgcaucaucaaggagaucuuccccaagggccgcgucaagcacaccgaggagugcaccugcggcuucgccuccaacaagaccaucgagugcgccugccgcgacaaccgcuacaccgccaagcgccccuucgucaagcucaacgucgagaccgacaccgccgagauccgccucaugugcaccgagaccuaccucgacaccccccgccccaacgacggcuccaucaccggccccugcgaguccgacggcgacaagggcuccggcggcaucaagggcggcuucguccaccagcgcauggccuccaagaucggccgcugguacucccgcaccauguccaagaccaagcgcaugggcaugggccucuacgucaaguacgacggcgaccccuggaccgacuccgaggcccucgcccucuccggcgucauggucuccauggaggagcccggcugguacuccuucggcuucgagaucaaggacaagaagugcgacguccccugcaucggcaucgagaugguccacgacggcggcaagaccaccuggcacuccgccgccaccgccaucuacugccucaugggcuccggccagcuccucugggacaccgucaccggcgucgacauggcccucuga

SEQ ID NO: 126260 - RNA, 1401 nt, Artificial Sequence; identical to SEQ ID NO: 126211
  derived and/or modified CDS sequence (opt2) from neuraminidase__InfluenzaB__AHL94596

SEQ ID NO: 126261 - RNA, 1401 nt, Artificial Sequence
  derived and/or modified CDS sequence (opt2) from neuraminidase__InfluenzaB__AHL94607
augcuccccuccaccauccagacccucacccucuuccucaccuccggcggcguccuccucucccucuacgucuccgccucccucuccuaccuccucuacuccgacauccuccucaaguucucccccaccgagaucaccgcccccaccaugccccucgacugcgccaacgccuccaacguccaggccgucaaccgcuccgccaccaagggcgucacccuccuccuccccgagcccgaguggaccuacccccgccucuccugccccggcuccaccuuccagaaggcccuccucaucuccccccaccgcuucggcgagaccaagggcaacuccgccccccucaucauccgcgagcccuucaucgccugcggccccaacgagugcaagcacuucgcccucacccacuacgccgcccagcccggcggcuacuacaacggcacccgcggcgaccgcaacaagcuccgccaccucaucuccgucaagcucggcaagauccccaccgucgagaacuccaucuuccacauggccgccugguccggcuccgccugccacgacggcaaggaguggaccuacaucggcgucgacggccccgacaacaacgcccuccucaaggucaaguacggcgaggccuacaccgacaccuaccacuccuacgccaacaagauccuccgcacccaggaguccgccugcaacugcaucggcggcaacugcuaccucaugaucaccgacggcuccgccuccggcgucuccgagugccgcuuccucaagauccgcgagggccgcaucaucaaggagaucuuccccaccggccgcgucaagcacaccgaggagugcaccugcggcuucgccuccaacaagaccaucgagugcgccugccgcgacaaccgcuacaccgccaagcgccccuucgucaagcucaacgucgagaccgacaccgccgagauccgccucaugugcaccgacaccuaccucgacaccccccgccccaacgacggcuccaucaccggccccugcgaguccgacggcgacaagggcuccggcggcaucaagggcggcuucguccaccagcgccucaaguccaagaucggccgcugguacucccgcaccauguccaagaccgagcgcaugggcaugggccucuacgucaaguacgacggcgaccccugggccgacuccgacgcccucaccuucuccggcgucauggucuccaugaaggagcccggcugguacuccuucggcuucgagaucaaggacaagaagugcgacguccccugcaucggcaucgagaugguccacgacggcggcaaggagaccuggcacuccgccgccaccgccaucuacugccucaugggcuccggccagcuccucugggacaccgucaccggcgucgacauggcccucuga

SEQ ID NO: 126262 - RNA, 1401 nt, Artificial Sequence; identical to SEQ ID NO: 126242
  derived and/or modified CDS sequence (opt2) from neuraminidase__InfluenzaB__AHL94618

SEQ ID NO: 126263 - RNA, 1401 nt, Artificial Sequence; identical to SEQ ID NO: 126238
  derived and/or modified CDS sequence (opt2) from neuraminidase__InfluenzaB__AHL94628

SEQ ID NO: 126264 - RNA, 1401 nt, Artificial Sequence; identical to SEQ ID NO: 126242
  derived and/or modified CDS sequence (opt2) from neuraminidase__InfluenzaB__AHL94639

SEQ ID NO: 126265 - RNA, 1401 nt, Artificial Sequence
  derived and/or modified CDS sequence (opt2) from neuraminidase__InfluenzaB__AHL94650
augcuccccuccaccauccagacccucacccucuuccucaccuccggcggcguccuccucucccucuacgucuccgccucccucuccuaccuccucuacuccgacauccuccucaaguucucccccaccgagaucaccgcccccaccaugccccucgacugcgccaacgccuccaacguccaggccgucaaccgcuccgccaccaagggcgucacccuccuccuccccgagcccgaguggaccuacccccgccucuccugccccggcuccaccuuccagaaggcccuccucaucuccccccaccgcuucggcgagaccaagggcaacuccgccccccucaucauccgcgagcccuucaucgccugcggccccaacgagugcaagcacuucgcccucacccacuacgccgcccagcccggcggcuacuacaacggcacccgcggcgaccgcaacaagcuccgccaccucaucuccgucaagcucggcaagauccccaccgucgagaacuccaucuuccacauggccgccugguccggcuccgccugccacgacggcaaggaguggaccuacaucggcgucgacggccccgacaacaacgcccuccucaaggucaaguacggcgaggccuacaccgacaccuaccacuccuacgccaacaagauccuccgcacccaggaguccgccugcaacugcaucggcggcaacugcuaccucaugaucaccgacggcuccgccuccggcgucuccgagugccgcuuccucaagauccgcgagggccgcaucauccgcgagaucuuccccaccggccgcgucaagcacaccgaggagugcaccugcggcuucgccuccaacaagaccaucgagugcgccugccgcgacaaccgcuacaccgccaagcgccccuucgucaagcucaacgucgagaccgacaccgccgagauccgccucaugugcaccgacaccuaccucgacaccccccgccccaacgacggcuccaucaccggccccugcgaguccgacggcgacaagggcuccggcggcaucaagggcggcuucguccaccagcgcaugaaguccaagaucggccgcugguacucccgcaccauguccaagaccgagcgcaugggcaugggccucuacgucaaguacgacggcgaccccugggccgacuccgacgcccucgccuucuccggcgucauggucuccaugaaggagcccggcugguacuccuucggcuucgagaucaaggacaagaagugcgacguccccugcaucggcaucgagaugguccacgacggcggcaaggagaccuggcacuccgccgccaccgccaucuacugccucaugggcuccggccagcuccucugggacaccgucaccggcgucgacauggcccucuga

SEQ ID NO: 126266 - RNA, 1401 nt, Artificial Sequence
  derived and/or modified CDS sequence (opt2) from neuraminidase__InfluenzaB__AHL94661
augcuccccuccaccauccagacccucacccucuuccucaccuccggcggcguccuccucucccucuacgucuccgccucccucuccuaccuccucuacuccgacauccuccucaaguuccccuccaccgagaucaccgcccccaccaugccccucgacugcgccaacgccuccaacguccaggccgucaaccgcuccgccaccaagggcgucacccuccuccuccccgagcccgaguggaccuacccccgccucuccugccccggcuccaccuuccagaaggcccuccucaucuccccccaccgcuucggcgagaccaagggcaacuccgccccccucaucauccgcgagcccuucaucgccugcggccccaaggagugcaagcacuucgcccucacccacuacgccgcccagcccggcggcuacuacaacggcacccgcggcgaccgcaacaagcuccgccaccucaucuccgucaagcucggcaagauccccaccgucgagaacuccaucuuccacauggccgccugguccggcuccgccugccacgacggcaaggaguggaccuacaucggcgucgacggccccgacaacaacgcccuccucaagaucaaguacggcgaggccuacaccgacaccuaccacuccuacgccaacaacauccuccgcacccaggaguccgccugcaacugcaucggcggcaacugcuaccucaugaucaccgacggcuccgccuccggcgucuccgagugccgcuuccucaagauccgcgagggccgcaucaucaaggagaucuuccccaccggccgcauccagcacaccgaggagugcaccugcggcuucgccuccaacaagaccaucgagugcgccugccgcgacaacuccuacaccgccaagcgccccuucgucaagcucaacgucgagaccgacaccgccgagauccgccucaugugcaccaagaccuaccucgacaccccccgccccgaggacggcuccaucaccggccccugcgaguccaacggcggcaagggcuccggcggcaucaagggcggcuucguccaccagcgcauggccuccaagaucggccgcugguacucccgcaccauguccaagaccgagcgcaagggcaugggccucuacgucaaguacaacggcgaccccugggccgacuccgacgcccucgucuucuccggcgucauggucuccauggaggagcccggcugguacuccuucggcuucgagaucaaggacaagaagugcgacguccccugcaucggcaucgagaugguccacgacggcggcaaggagaccuggcacuccgccgccaccgccaucuacugccucaugggcuccggccagcuccucugggacaccgucaccggcgucaacaugacccucuga

SEQ ID NO: 126267 - RNA, 1401 nt, Artificial Sequence
  derived and/or modified CDS sequence (opt2) from neuraminidase__InfluenzaB__AHL94672
augcuccccuccaccauccagacccucacccucuuccucaccuccggcggcguccuccucucccucuacgucuccgccucccucuccuaccuccucuacuccgacauccuccucaaguucucccgcaccgagaucaccgcccccaucaugccccucgacugcgccaacgccuccaacguccaggccgucaaccgcuccgccaccaagggcgucaccccccuccuccccgagcccgaguggaccuacccccgccucuccugccccggcuccaccuuccagaaggcccuccucaucuccccccaccgcuucggcgagaccaagggcaacuccgccccccucaucauccgcgagcccuucaucgccugcggccccaaggagugcaagcacuucgcccucacccacuacgccgcccagcccggcggcuacuacaacggcacccgcgaggaccgcaacaagcuccgccaccucaucuccgucaagcucggcaagauccccaccgucgagaacuccaucuuccacauggccgccugguccggcuccgccugccacgacggccgcgaguggaccuacaucggcgucgacggccccgacuccaacgcccuccucaagaucaaguacggcgaggccuacaccgacaccuaccacuccuacgccaagaacauccuccgcacccaggaguccgccugcaacugcaucggcggcgacugcuaccucaugaucaccgacggcuccgccuccggcaucuccgagugccgcuuccucaagauccgcgagggccgcaucaucaaggagaucuuccccaccggccgcgucaagcacaccgaggagugcaccugcggcuucgccuccaacaagaccaucgagugcgccugccgcgacaacuccuacaccgccaagcgccccuucgucaagcucaacgucgagaccgacaccgccgagauccgccucaugugcaccgagaccuaccucgacaccccccgccccaacgacggcuccaucuccggccccugcgaguccaacggcgacgagggcuccggcggcaucaagggcggcuucguccaccagcgcauggccuccaagaucggccgcugguacucccgcaccauguccaagaccaagcgcaugggcaugggccucuacgucaaguacgacggcgaccccuggaccgacuccgaggcccucgcccucuccggcgucauggucuccauggaggagcccggcugguacuccuucggcuucgagaucaaggacaagaagugcgacguccccugcaucggcaucgagaugguccacgacggcggcaagaccaccuggcacuccgccgccaccgccaucuacugccucaugggcuccggccagcuccucugggacaccgucaccggcgucaacaugacccucuga

SEQ ID NO: 126268 - RNA, 1401 nt, Artificial Sequence
  derived and/or modified CDS sequence (opt2) from neuraminidase__InfluenzaB__AHL94683
augcuccccuccaccauccagacccucacccucuuccucaccuccggcggcguccuccucucccucuacgucuccgccucccucuccuaccuccucuacuccgacauccuccucaaguucucccgcaccgagaucaccgcccccaucaugccccucgacugcgccaacgccuccaacguccaggccgucaaccgcuccgccaccaagggcgucaccccccuccuccccgagcccgaguggaccuacccccgccucuccugccccggcuccaccuuccagaaggcccuccucaucuccccccaccgcuucggcgagaccaagggcaacuccgccccccucaucauccgcgagcccuucaucgccugcggccccaaggagugcaagcacuucgcccucacccacuacgccgcccagcccggcggcuacuacaacggcacccgcgaggaccgcaacaagcuccgccaccucaucuccgucaagcucggcaagauccccaccgucgagaacuccaucuuccacauggccgccugguccggcuccgccugccacgacggccgcgaguggaccuacaucggcgucgacggccccgacuccaacgcccuccucaagaucaaguacggcgaggccuacaccgacaccuaccacuccuacgccaagaacauccuccgcacccaggaguccgccugcaacugcaucggcggcgacugcuaccucaugaucaccgacggcuccgccuccggcaucuccgagugccgcuuccucaagauccgcgagggccgcaucaucaaggagaucuuccccaccggccgcgucaagcacaccgaggagugcaccugcggcuucgccuccaacaagaccaucgagugcgccugccgcgacaacuccuacaccgccaagcgccccuucgucaagcucaacgucgagaccgacaccgccgagauccgccucaugugcaccgagaccuaccucgacaccccccgccccaacgacggcuccaucaccggccccugcgaguccaacggcggcgagggcuccggcggcaucaagggcggcuucguccaccagcgcauggccuccaagaucggccgcugguacucccgcaccauguccaagaccaagcgcaugggcaugggccucuacgucaaguacgacggcgaccccuggaccgacuccgaggcccucgcccucuccggcgucauggucuccauggaggagcccggcugguacuccuucggcuucgagaucaaggacaagaagugcgacguccccugcaucggcaucgagaugguccacgacggcggcaagaccaccuggcacuccgccgccaccgccaucuacugccucaugggcuccggccagcuccucugggacaccgucaccggcgucaacaugacccucuga

SEQ ID NO: 126269 - RNA, 1401 nt, Artificial Sequence
  derived and/or modified CDS sequence (opt2) from neuraminidase__InfluenzaB__AHL94694
augcuccccuccaccauccagacccucacccucuuccucaccuccggcggcguccuccucucccucuacgucuccgccucccucuccuaccuccucuacuccgacauccuccucaaguucucccccaccgagaucaccgcccccaccaugccccucgacugcgccaacgccuccaacguccaggccgucaaccgcuccgccaccaagggcgucacccuccuccuccccgagcccgaguggaccuacccccgccucuccugccccggcuccaccuuccagaaggcccuccucaucuccccccaccgcuucggcgagaccaagggcaacuccgccccccucaucauccgcgagcccuucaucgccugcggccccaacgagugcaagcacuucgcccucacccacuacgccgcccagcccggcggcuacuacaacggcacccgcggcgaccgcaacaagcuccgccaccucaucuccgucaagcucggcaagauccccaccgucgagaacuccaucuuccacauggccgccugguccggcuccgccugccacgacggcaaggaguggaccuacaucggcgucgacggccccgacaacaacgcccuccucaaggucaaguacggcgaggccuacaccgacaccuaccacuccuacgccaacaagauccuccgcacccaggaguccgccugcaacugcaucggcggcaacugcuaccucaugaucaccgacggcuccgccuccggcgucuccgagugccgcuuccucaagauccgcgagggccgcaucaucaaggagaucuuccccaccggccgcgucaagcacaccgaggagugcaccugcggcuucgccuccaacaagaccaucgagugcgccugccgcgacaaccgcuacaccgccaagcgccccuucgucaagcucaacgucgagaccgacaccgccgagauccgccucaugugcaccgacaccuaccucgacaccccccgccccaacgacggcuccaucaccggccccugcgaguccgacggcgacaagggcuccggcggcaucaagggcggcuucguccaccagcgcaugaaguccaagaucggccgcugguacucccgcaccauguccaagaccgagcgcaugggcaugggccucuacgucaaguacgacggcgaccccugggccgacuccgacgcccucaccuucuccggcgucauggucuccaugaaggagcccggcugguacuccuucggcuucgagaucaaggacaagaagugcgacguccccugcaucggcaucgagaugguccacgacggcggcaaggagaccuggcacuccgccgccaccgccaucuacugccucaugggcuccggccagcuccucugggacaccgucaccggcgucgacauggcccucuga

SEQ ID NO: 126270 - RNA, 1401 nt, Artificial Sequence; identical to SEQ ID NO: 126242
  derived and/or modified CDS sequence (opt2) from neuraminidase__InfluenzaB__AHL94705

SEQ ID NO: 126271 - RNA, 1401 nt, Artificial Sequence; identical to SEQ ID NO: 124853
  derived and/or modified CDS sequence (opt2) from neuraminidase__InfluenzaB__AHL94716

SEQ ID NO: 126272 - RNA, 1401 nt, Artificial Sequence
  derived and/or modified CDS sequence (opt2) from neuraminidase__InfluenzaB__AHL94727
augcuccccuccaccauccagacccucacccucuuccucaccuccggcggcguccuccucucccucuacgucuccgccucccucuccuaccuccucuacuccgacauccuccucaaguuccccuccaccgagaucaccgcccccaccaugccccucgacugcgccaacaccuccaacguccaggccgucaaccgcuccgccaccaagggcgucacccuccuccuccccgagcccgaguggaccuacccccgccucuccugccccggcuccaccuuccagaaggcccuccucaucuccccccaccgcuucggcgagaccaagggcaacuccgccccccucaucauccgcgagcccuucaucgccugcggccccaaggagugcaagcacuucgcccucacccacuacgccgcccagcccggcggcuacuacaacggcacccgcggcgaccgcaacaagcuccgccaccucaucuccgucaagcucggcaagauccccaccgucgagaacuccaucuuccacauggccgccugguccggcuccgccugccacgacggcaaggaguggaccuacaucggcgucgacggccccgacaacaacgcccuccucaagaucaaguacggcgaggccuacaccgacaccuaccacuccuacgccaacaacauccuccgcacccaggaguccgccugcaacugcaucggcggcaacugcuaccucaugaucaccgacggcuccgccuccggcgucuccgagugccgcuuccucaagauccgcgagggccgcaucaucaaggagaucuuccccaccggccgcauccagcacaccgaggagugcaccugcggcuucgccuccaacaagaccaucgagugcgccugccgcgacaacuccuacaccgccaagcgccccuucgucaagcucaacgucgagaccgacaccgccgagauccgccucaugugcaccaagaccuaccucgacaccccccgccccgaggacggcuccaucaccggccccugcgaguccaacggcggcaagggcuccggcggcaucaagggcggcuucguccaccagcgcauggccuccaagaucggccgcugguacucccgcaccauguccaagaccgagcgcaagggcaugggccucuacgucaaguacaacggcgaccccugggccgacuccgacgcccucgucuucuccggcgucauggucuccauggaggagcccggcugguacuccuucggcuucgagaucaaggacaagaagugcgacguccccugcaucggcaucgagaugguccacgacggcggcaaggagaccuggcacuccgccgccaccgccaucuacugccucaugggcuccggccagcuccucugggacaccgucaccggcgucaacaugacccucuga

SEQ ID NO: 126273 - RNA, 1401 nt, Artificial Sequence; identical to SEQ ID NO: 124853
  derived and/or modified CDS sequence (opt2) from neuraminidase__InfluenzaB__AHL94738

SEQ ID NO: 126274 - RNA, 1401 nt, Artificial Sequence
  derived and/or modified CDS sequence (opt2) from neuraminidase__InfluenzaB__AHL94749
augcuccccuccaccauccagacccucacccucuuccucaccuccggcggcguccuccucucccucuacgucuccgccucccucuccuaccuccucuacuccgacauccuccucaaguucucccccaccgagaucaccgcccccaccaugccccucgacugcgccaacgccuccaacguccaggccgucaaccgcuccgccaccaagggcgucacccuccuccuccccgagcccgaguggaccuacccccgccucuccugccccggcuccaccuuccagaaggcccuccucaucuccccccaccgcuucggcgagaccaagggcaacuccgccccccucaucauccgcgagcccuucaucgccugcggccccaacgagugcaagcacuucgcccucacccacuacgccgcccagcccggcggcuacuacaacggcacccgcggcgaccgcaacaagcuccgccaccucaucuccgucaagcucggcaagauccccaccgucgagaacuccaucuuccacauggccgccugguccggcuccgccugccacgacggcaaggaguggaccuacaucggcgucgacggccccgacaacaacgcccuccucaaggucaaguacggcgaggccuacaccgacaccuaccacuccuacgccaacaagauccuccgcacccaggaguccgccugcaacugcaucggcggcaacugcuaccucaugaucaccgacggcuccgccuccggcgucuccgagugccgcuuccucaagauccgcgagggccgcaucaucaaggagaucuuccccaccggccgcgucaagcacaccgaggagugcaccugcggcuucgccuccaacaagaccaucgagugcgccugccgcgacaaccgcuacaccgccaagcgccccuucgucaagcucaacgucgagaccgacaccgccgagauccgccucaugugcaccgacaccuaccucgacaccccccgccccaacgacggcuccaucaccggccccugcgaguccgacggcgacaagggcuccggcggcaucaagggcggcuucguccaccagcgcaugaaguccaagaucggccgcugguacucccgcaccauguccaagaccgagcgcaugggcaugggccucuacgucaaguacgacggcgaccccugggccgacuccgacgcccucgccuucuccggcgucauggucuccaugaaggagcccggcugguacuccuucggcuucgagaucaaggacaagaagugcgacguccccugcaucggcgucgagaugguccacgacggcggcaaggagaccuggcacuccgccgccaccgccaucuacugccucaugggcuccggccagcuccucugggacaccgucaccggcgucgacauggcccucuga

SEQ ID NO: 126275 - RNA, 1401 nt, Artificial Sequence
  derived and/or modified CDS sequence (opt2) from neuraminidase__InfluenzaB__AHL94760
augcuccccuccaccauccagacccucacccucuuccucaccuccggcggcguccuccucucccucuacgucuccgccucccucuccuaccuccucuacuccgacauccuccucaaguucucccagaccgagaucaccgcccccaucaugccccucgacugcgccaacgccuccaacguccaggccgucaaccacuccgccgccaagggcgucacccuccuccuccccgagcccgaguggaccuacccccgccucuccugccccggcuccaccuuccagaaggcccuccucaucuccccccaccgcuucggcgagaucaagggcaacuccgccccccucaucauccgcgagcccuucaucgccugcggccccaccgagugcaagcacuucgcccucacccacuacgccgcccagcccggcggcuacuacaacggcacccgcgaggaccgcaacaagcuccgccaccucaucuccgucaagcucggcaagauccccaccgucgagaacuccaucuuccacauggccgccugguccggcuccgccugccacgacggcaaggaguggaccuacaucggcgucgacggccccgacuccaacgcccuccucaagaucaaguacggcgaggccuacaccgacaccuaccacuccuacgccaagaacauccuccgcacccaggaguccgccugcaacugcaucggcggcgacugcuaccucaugaucaccgacggccccgccuccggcgucuccgagugccgcuuccucaagauccgcgagggccgcaucaucaaggagaucuuccccaccggccgcgucaagcacaccgaggagugcaccugcggcuucgccuccaacaagaccaucgagugcgccugccgcgacaaccgcuacaccgccaagcgccccuucgucaagcucaacgucgagaccgacaccgccgagauccgccucaugugcaccgagaccuaccucgacaccccccgccccaacgacggcuccaucaccggccccugcgaguccgacggcgacaagggcuccggcggcaucaagggcggcuucguccaccagcgcauggccuccaagaucggccgcugguacucccgcaccauguccaagaccaagcgcaugggcaugggccucuacgucaaguacgacggcgaccccuggaccgacuccgaggcccucgcccucuccggcgucauggucuccauggaggagcccggcugguacuccuucggcuucgagaucaaggacaagaagugcgacauccccugcaucggcaucgagaugguccacgacggcggcaagaccaccuggcacuccgccgccaccgccaucuacugccucaugggcuccggccagcuccucugggacaccgucaccggcgucgacauggcccucuga

SEQ ID NO: 126276 - RNA, 1401 nt, Artificial Sequence; identical to SEQ ID NO: 126242
  derived and/or modified CDS sequence (opt2) from neuraminidase__InfluenzaB__AHL94770

SEQ ID NO: 126277 - RNA, 1401 nt, Artificial Sequence; identical to SEQ ID NO: 126240
  derived and/or modified CDS sequence (opt2) from neuraminidase__InfluenzaB__AHL94781

SEQ ID NO: 126278 - RNA, 1401 nt, Artificial Sequence; identical to SEQ ID NO: 126238
  derived and/or modified CDS sequence (opt2) from neuraminidase__InfluenzaB__AHL94791

SEQ ID NO: 126279 - RNA, 1401 nt, Artificial Sequence; identical to SEQ ID NO: 126269
  derived and/or modified CDS sequence (opt2) from neuraminidase__InfluenzaB__AHL94801

SEQ ID NO: 126280 - RNA, 1401 nt, Artificial Sequence; identical to SEQ ID NO: 126238
  derived and/or modified CDS sequence (opt2) from neuraminidase__InfluenzaB__AHL94812

SEQ ID NO: 126281 - RNA, 1401 nt, Artificial Sequence; identical to SEQ ID NO: 126238
  derived and/or modified CDS sequence (opt2) from neuraminidase__InfluenzaB__AHL94821

SEQ ID NO: 126282 - RNA, 1401 nt, Artificial Sequence; identical to SEQ ID NO: 126242
  derived and/or modified CDS sequence (opt2) from neuraminidase__InfluenzaB__AHL94831

SEQ ID NO: 126283 - RNA, 1401 nt, Artificial Sequence
  derived and/or modified CDS sequence (opt2) from neuraminidase__InfluenzaB__AHL94840
augcuccccuccaccauccagacccucacccucuuccucaccuccggcggcguccuccucucccucuacgucuccgccucccucuccuaccuccucuacuccggcauccuccucaaguucucccgcaccgagaucaccgcccccaucaugccccucgacugcgccaacgccuccaacguccaggccgucaaccgcuccgccaccaagggcgucacccuccuccuccccgagcccgaguggaccuacccccgccucuccugccccggcuccaccuuccagaaggcccuccucaucuccccccaccgcuucggcgagaccaagggcaacuccgccccccucaucauccgcgagcccuucaucgccugcggccccaaggagugcaagcacuucgcccucacccacuacgccgcccagcccggcggcuacuacaacggcacccgcgaggaccgcaacaagcuccgccaccucaucuccgucaagcucggcaagauccccaccgucgagaacuccaucuuccacauggccgccugguccggcuccgccugccacgacggccgcgaguggaccuacaucggcgucgacggccccgacuccaacgcccuccucaagaucaaguacggcgaggccuacaccgacaccuaccacuccuacgccaagaacauccuccgcacccaggaguccgccugcaacugcaucggcggcgacugcuaccucaugaucaccgacggccccgccuccggcaucuccgagugccgcuuccucaagauccgcgagggccgcaucaucaaggagaucuuccccaccggccgcgucaagcacaccgaggagugcaccugcggcuucgccuccaacaagaccaucgagugcgccugccgcgacaacuccuacaccgccaagcgccccuucgucaagcucaacgucgagaccgacaccgccgagauccgccucaugugcaccgagaccuaccucgacaccccccgccccaacgacggcuccaucaccggccccugcgaguccaacggcgacaagggcuccggcggcaucaagggcggcuucguccaccagcgcauggccuccaagaucggccgcugguacucccgcaccauguccaagaccaagcgcaugggcaugggccucuacgucaaguacgacggcgaccccuggaccgacuccgaggcccucgcccucuccggcgucauggucuccauggaggagcccggcugguacuccuucggcuucgagaucaaggacaagaagugcgacguccccugcaucggcaucgagaugguccacgacggcggcaagaccaccuggcacuccgccgccaccgccaucuacugccucaugggcuccggccagcuccucugggacaccgucaccggcgucaacaugacccucuga

SEQ ID NO: 126284 - RNA, 1401 nt, Artificial Sequence
  derived and/or modified CDS sequence (opt2) from neuraminidase__InfluenzaB__AHL94851
augcuccccuccaccauccagacccucacccucuuccucaccuccggcggcguccuccucucccucuacgucuccgccucccucuccuaccuccucuacuccgacauccuccucaaguucucccagaccgagaucaccgcccccaucaugccccucgacugcaccaacgccuccaacguccaggccgucaaccgcuccgccgccaagggcgucacccuccuccuccccgagcccgaguggaccuacccccgccucuccugccccggcuccaccuuccagaaggcccuccucaucuccccccaccgcuucggcgagaucaagggcaacuccgccccccucaucauccgcgagcccuucaucgccugcggccccaccgagugcaagcacuucgcccucacccacuacgccgcccagcccggcggcuacuacaacggcacccgcgaggaccgcaacaagcuccgccaccucaucuccgucaagcucggcaagauccccaccgucgagaacuccaucuuccacauggccgccugguccggcuccgccugccacgacggcaaggaguggaccuacaucggcgucgacggccccgacuccaacgcccuccucaagaucaaguacggcgaggccuacaccgacaccuaccacuccuacgccaagaacauccuccgcacccaggaguccgccugcaacugcaucggcggcgacugcuaccucaugaucaccgacggccccgccuccggcgucuccgagugccgcuuccucaagauccgcgagggccgcaucaucaaggagaucuuccccaccggccgcgucaagcacaccgaggagugcaccugcggcuucgccuccaacaagaccaucgagugcgccugccgcgacaaccgcuacaccgccaagcgccccuucgucaagcucaacgucgagaccgacaccgccgagauccgccucaugugcaccgagaccuaccucgacaccccccgccccaacgacggcuccaucaccggccccugcgaguccgacggcgacaagggcuccggcggcaucaagggcggcuucguccaccagcgcaugaccuccaagaucggccgcugguacucccgcaccauguccaagaccaagcgcaugggcaugggccucuacgucaaguacgacggcgaccccuggaccgacuccgaggcccucgcccucuccggcgucauggucuccauggaggagcccggcugguacuccuucggcuucgagaucaaggacaagaagugcgacguccccugcaucggcaucgagaugguccacgacggcggcaagaccaccuggcacuccgccgccaccgccaucuacugccucaugggcuccggccagcuccucugggacaccgucaccggcgucgacauggcccucuga

SEQ ID NO: 126285 - RNA, 1401 nt, Artificial Sequence; identical to SEQ ID NO: 124671
  derived and/or modified CDS sequence (opt2) from neuraminidase__InfluenzaB__AHL94862

SEQ ID NO: 126286 - RNA, 1401 nt, Artificial Sequence; identical to SEQ ID NO: 124853
  derived and/or modified CDS sequence (opt2) from neuraminidase__InfluenzaB__AHL94873

SEQ ID NO: 126287 - RNA, 1401 nt, Artificial Sequence; identical to SEQ ID NO: 126157
  derived and/or modified CDS sequence (opt2) from neuraminidase__InfluenzaB__AHL94884

SEQ ID NO: 126288 - RNA, 1401 nt, Artificial Sequence; identical to SEQ ID NO: 124997
  derived and/or modified CDS sequence (opt2) from neuraminidase__InfluenzaB__AHL94893

SEQ ID NO: 126289 - RNA, 1401 nt, Artificial Sequence; identical to SEQ ID NO: 124997
  derived and/or modified CDS sequence (opt2) from neuraminidase__InfluenzaB__AHL94904

SEQ ID NO: 126290 - RNA, 1401 nt, Artificial Sequence
  derived and/or modified CDS sequence (opt2) from neuraminidase__InfluenzaB__AHL94915
augcuccccuccaccauccagacccucacccucuuccucaccuccggcggcguccuccucucccucuacgucuccgccucccucuccuaccuccucuacuccgacauccuccucaaguucucccccaccgagaucaccgcccccaccaugccccucgacugcgccaacgccuccaacguccaggucgucaaccgcuccgccaccaagggcgucacccuccuccuccccgagcccgaguggaccuacccccgccucuccugccccggcuccaccuuccagaaggcccuccucaucuccccccaccgcuucggcgagaccaagggcaacuccgccccccucaucauccgcgagcccuucaucgccugcggccccaacgagugcaagcacuucgcccucacccacuacgccgcccagcccggcggcuacuacaacggcacccgcggcgaccgcaacaagcuccgccaccucaucuccgucaagcucggcaagauccccaccgucgagaacuccaucuuccacauggccgccugguccggcuccgccugccacgacggcaaggaguggaccuacaucggcgucgacggccccgacaacaacgcccuccucaaggucaaguacggcgaggccuacaccgacaccuaccacuccuacgccaacaagauccuccgcacccaggaguccgccugcaacugcaucggcggcaacugcuaccucaugaucaccgacggcuccgccuccggcgucuccgagugccgcuuccucaagauccgcgagggccgcaucaucaaggagaucuuccccaccggccgcgucaagcacaccgaggagugcaccugcggcuucgccuccaacaagaccaucgagugcgccugccgcgacaacuccuacaccgccaagcgccccuucgucaagcucaacgucgagaccgacaccgccgagauccgccucaugugcaccgacaccuaccucgacaccccccgccccgacgacggcuccaucaccggccccugcgaguccaacggcgacaagggcuccggcggcaucaagggcggcuucguccaccagcgcauggaguccaagaucggccgcugguacucccgcaccauguccaagaccgagcgcaugggcaugggccucuacgucaaguacgacggcgaccccugggccgacuccgacgcccucgccuucuccggcgucauggucuccaugaaggagcccggcugguacuccuucggcuucgagaucaaggacaagaagugcgacguccccugcaucggcaucgagaugguccacgacggcggcaaggagaccuggcacuccgccgccaccgccaucuacugccucaugggcuccggccagcuccucugggacaccgucaccggcgucgacauggcccucuga

SEQ ID NO: 126291 - RNA, 1401 nt, Artificial Sequence; identical to SEQ ID NO: 126157
  derived and/or modified CDS sequence (opt2) from neuraminidase__InfluenzaB__AHL94926

SEQ ID NO: 126292 - RNA, 1401 nt, Artificial Sequence
  derived and/or modified CDS sequence (opt2) from neuraminidase__InfluenzaB__AHL94937
augcuccccuccaccauccagacccucacccucuuccucaccuccggcggcguccuccucucccucuacgucuccgccucccucuccuaccuccucuacuccgacauccuccucaaguucucccccaccgagaucaccgcccccacccucccccucgacugcgccaacgccuccaacguccaggccgucaaccgcuccgccaccaagggcgucacccuccuccuccccgagcccgaguggaccuacccccgccucuccugccccggcuccaccuuccagaaggcccuccucaucuccccccaccgcuucggcgagaccaagggcaacuccgccccccucaucauccgcgagcccuucaucgccugcggccccaacgagugcaagcacuucgcccucacccacuacgccgcccagcccggcggcuacuacaacggcacccgcggcgaccgcaacaagcuccgccaccucaucuccgucaagcucggcaagauccccaccgucgagaacuccaucuuccacauggccgccugguccggcuccgccugccacgacggcaaggaguggaccuacaucggcgucgacggccccgacaacaacgcccuccucaaggucaaguacggcgaggccuacaccgacaccuaccacuccuacgccaacaagauccuccgcacccaggaguccgccugcaacugcaucggcggcaacugcuaccucaugaucaccgacggcuccgccuccggcgucuccgagugccgcuuccucaagauccgcgagggccgcaucaucaaggagaucuuccccaccggccgcgucaagcacaccgaggagugcaccugcggcuucgccuccaacaagaccaucgagugcgccugccgcgacaacuccuacaccgccaagcgccccuucgucaagcucaacgucgagaccgacaccgccgagauccgccucaugugcaccgacaccuaccucgacaccccccgccccaacgacggcuccaucaccggccccugcgaguccaacggcgacaagggcuccggcggcaucaagggcggcuucguccaccagcgcauggaguccaagaucggccgcugguacucccgcaccauguccaagaccgagcgcaugggcaugggccucuacgucaaguacgacggcgaccccugggccgacuccgacgcccucgccuucuccggcgucauggucuccaugaaggagcccggcugguacuccuucggcuucgagaucaaggacaagaagugcgacguccccugcaucggcaucgagaugguccacgacggcggcaaggagaccuggcacuccgccgccaccgccaucuacugccucaugggcuccggccagcuccucugggacaccgucaccggcgucgacauggcccucuga

SEQ ID NO: 126293 - RNA, 1401 nt, Artificial Sequence; identical to SEQ ID NO: 126176
  derived and/or modified CDS sequence (opt2) from neuraminidase__InfluenzaB__AHL94948

SEQ ID NO: 126294 - RNA, 1401 nt, Artificial Sequence; identical to SEQ ID NO: 124992
  derived and/or modified CDS sequence (opt2) from neuraminidase__InfluenzaB__AHL94959

SEQ ID NO: 126295 - RNA, 1401 nt, Artificial Sequence; identical to SEQ ID NO: 124992
  derived and/or modified CDS sequence (opt2) from neuraminidase__InfluenzaB__AHL94969

SEQ ID NO: 126296 - RNA, 1401 nt, Artificial Sequence; identical to SEQ ID NO: 124992
  derived and/or modified CDS sequence (opt2) from neuraminidase__InfluenzaB__AHL94978

SEQ ID NO: 126297 - RNA, 1401 nt, Artificial Sequence
  derived and/or modified CDS sequence (opt2) from neuraminidase__InfluenzaB__AHM00990
augcuccccuccaccauccagacccucacccucuuccucaccuccggcggcguccuccucucccucuacgucuccgccucccucuccuaccuccucuacuccgacauccuccucaaguucucccagaccgagaucaccgcccccaucaugccccucgacugcaccaacgccuccaacguccaggccgucaaccacuccgccgccaagggcgucacccuccuccuccccgagcccgaguggaccuacccccgccucuccugccccggcuccaccuuccagaaggcccuccucaucuccccccaccgcuucggcgagaucaagggcaacuccgccccccucaucauccgcgagcccuucaucgccugcggccccaccgagugcaagcacuucgcccucacccacuacgccgcccagcccggcggcuacuacaacggcacccgcgaggaccgcaacaagcuccgccaccucaucuccgucaagcucggcaagauccccaccgucgagaacuccaucuuccacauggccgccugguccggcuccgccugccacgacggcaaggaguggaccuacaucggcgucgacggccccgacuccaacgcccuccucaagaucaaguacggcgaggccuacaccgacaccuaccacuccuacgccaagaacauccuccgcacccaggaguccgccugcaacugcaucggcggcgacugcuaccucaugaucaccgacggccccgccuccggcgucuccgagugccgcuuccucaagauccgcgagggccgcaucaucaaggagaucuuccccaccggccgcgucaagcacaccgaggagugcaccugcggcuucgccuccaacaagaccaucgagugcgccugccgcgacaaccgcuacaccgccaagcgccccuucgucaagcucaacgucgagaccgacaccgccgagauccgccucaugugcaccgagaccuaccucgacaccccccgccccaacgacggcuccaucaccggccccugcgaguccgacggcgacaagggcuccggcggcaucaagggcggcuucguccaccagcgcauggccuccaagaucggccgcugguacucccgcaccauguccaagaccaagcgcaugggcaugggccucuacgucaaguacgacggcgaccccuggaccgacuccgaggcccucgcccucuccggcgucauggucuccauggaggagcccggcugguacuccuucggcuucgagaucaaggacaagaagugcgacguccccugcaucggcaucgagaugguccacgacggcggcaagaccaccuggcacuccgccgccaccgccaucuacugccucaugggcuccggccagcuccucugggacaccgucaccggcgucgacauggcccucuga

SEQ ID NO: 126298 - RNA, 1401 nt, Artificial Sequence; identical to SEQ ID NO: 126242
  derived and/or modified CDS sequence (opt2) from neuraminidase__InfluenzaB__AHM01001

SEQ ID NO: 126299 - RNA, 1401 nt, Artificial Sequence
  derived and/or modified CDS sequence (opt2) from neuraminidase__InfluenzaB__AHM01012
augcuccccuccaccauccagacccucacccucuuccucaccuccggcggcguccuccucucccucuacgucuccgccucccucuccuaccuccucuacuccgacauccuccucaaguucucccccaccgagaucaccgcccccaccaugccccucgacugcgccaacgccuccaacguccaggccgucaaccgcuccgccaccaagggcgucacccuccuccuccccgagcccgaguggaccuacccccgccucuccugccccggcuccaccuuccagaaggcccuccucaucuccccccaccgcuucggcgagaccaagggcaacuccgccccccucaucauccgcgagcccuucaucgccugcggccccaacgagugcaagcacuucgcccucacccacuacgccgcccagcccggcggcuacuacaacggcacccgcggcgaccgcaacaagcuccgccaccucaucuccgucaagcucggcaagauccccaccgucgagaacuccaucuuccacauggccgccugguccggcuccgccugccacgacggcaaggaguggaccuacaucggcgucgacggccccgacaacaacgcccuccucaaggucaaguacggcgaggccuacaccgacaccuaccacuccuacgccaacaagauccuccgcacccaggaguccgccugcaacugcaucggcggcaacugcuaccucaugaucaccgacggcuccgccuccggcgucuccgagugccgcuuccucaagauccgcgagggccgcaucaucaaggagaucuuccccaccggccgcgucaagcacaccgaggagugcaccugcggcuucgccuccaacaagaccaucgagugcgccugccgcgacaaccgcuacaccgccaagcgccccuucgucaagcucaacgucgagaccgacaccgccgagauccgccucaugugcaccgacaccuaccucgacaccccccgccccaacgacggcuccaucaccggccccugcgaguccgacggcgacaagggcuccggcggcaucaagggcggcuucguccaccagcgcaugaaguccaagaucggccgcugguacucccgcaccauguccaagaccgagcgcaugggcaugggccucuacgucaaguacgacggcgaccccuggaccgacuccgacgcccucgccuucuccggcgucauggucuccaugaaggagcccggcugguacuccuucggcuucgagaucaaggacaagaagugcgacguccccugcaucggcaucgagaugguccacgacggcggcaaggagaccuggcacuccgccgccaccgccaucuacugccucaugggcuccggccagcuccucugggacaccgucaccggcgucgacauggcccucuga

SEQ ID NO: 126300 - RNA, 1401 nt, Artificial Sequence; identical to SEQ ID NO: 126242
  derived and/or modified CDS sequence (opt2) from neuraminidase__InfluenzaB__AHM01023

SEQ ID NO: 126301 - RNA, 1401 nt, Artificial Sequence; identical to SEQ ID NO: 126242
  derived and/or modified CDS sequence (opt2) from neuraminidase__InfluenzaB__AHM01034

SEQ ID NO: 126302 - RNA, 1401 nt, Artificial Sequence
  derived and/or modified CDS sequence (opt2) from neuraminidase__InfluenzaB__AHM01045
augcuccccuccaccauccagacccucacccucuuccucaccuccggcggcguccuccucucccucuacgucuccgccucccucuccuaccuccucuacuccgacauccuccucaaguucucccccaccgagaucaccgcccccaccaugccccucgacugcgccaacgccuccaacguccaggccgucaaccgcuccgccaccaagggcgucacccuccuccuccccgagcccggcuggaccuacccccgccucuccugccccggcuccaccuuccagaaggcccuccucaucuccccccaccgcuucggcgagaccaagggcaacuccgccccccucaucauccgcgagcccuucaucgccugcggccccaacgagugcaagcacuucgcccucacccacuacgccgcccagcccggcggcuacuacaacggcacccgcggcgaccgcaacaagcuccgccaccucaucuccgucaagcucggcaagauccccaccgucgagaacuccaucuuccacauggccgccugguccggcuccgccugccacgacggcaaggaguggaccuacaucggcgucgacggccccgacaacaacgcccuccucaaggucaaguacggcgaggccuacaccgacaccuaccacuccuacgccaacaagauccuccgcacccaggaguccgccugcaacugcaucggcggcaacugcuaccucaugaucaccgacggcuccgccuccggcgucuccgagugccgcuuccucaagauccgcgagggccgcaucaucaaggagaucuuccccaccggccgcgucaagcacaccgaggagugcaccugcggcuucgccuccaacaagaccaucgagugcgccugccgcgacaaccgcuacaccgccaagcgccccuucgucaagcucaacgucgagaccgacaccgccgagauccgccucaugugcaccgacaccuaccucgacaccccccgccccaacgacggcuccaucaccggccccugcgaguccgacggcgacaagggcuccggcggcaucaagggcggcuucguccaccagcgcaugaaguccaagaucggccgcugguacucccgcaccauguccaagaccgagcgcaugggcaugggccucuacgucaaguacgacggcgaccccugggccgacuccgacgcccucgccuucuccggcgucauggucuccaugaaggagcccggcugguacuccuucggcuucgagaucaaggacaagaagugcgacguccccugcaucggcaucgagaugguccacgacggcggcaaggagaccuggcacuccgccgccaccgccaucuacugccucaugggcuccggccagcuccucugggacaccgucgccggcgucgacauggcccucuga

SEQ ID NO: 126303 - RNA, 1401 nt, Artificial Sequence
  derived and/or modified CDS sequence (opt2) from neuraminidase__InfluenzaB__AHM01056
augcuccccuccaccacccagacccucacccucuuccucaccuccggcggcguccuccucucccucuacgucuccgccucccucuccuaccuccucuacuccgacauccuccucaaguucucccccaccgagaucaccgcccccaccaugccccucgacugcgccaacgccuccaacguccaggccgucaaccgcuccgccaccaagggcgucacccuccuccuccccgagcccgaguggaccuacccccgccucuccugccccggcuccaccuuccagaaggcccuccucaucuccccccaccgcuucggcgagaccaagggcaacuccgccccccucaucauccgcgagcccuucaucgccugcggccccaacgagugcaagcacuucgcccucacccacuacgccgcccagcccggcggcuacuacaacggcacccgcggcgaccgcaacaagcuccgccaccucaucuccgucaagcucggcaagauccccaccgucgagaacuccaucuuccacauggccgccugguccggcuccgccugccacgacggcaaggaguggaccuacaucggcgucgacggccccgacaacaacgcccuccucaaggucaaguacggcgaggccuacaccgacaccuaccacuccuacgccaacaagauccuccgcacccaggaguccgccugcaacugcaucggcggcaacugcuaccucaugaucaccgacggcuccgccuccggcgucuccgagugccgcuuccucaagauccgcgagggccgcaucaucaaggagaucuuccccaccggccgcgucaagcacaccgaggagugcaccugcggcuucgccuccaacaagaccaucgagugcgccugccgcgacaaccgcuacaccgccaagcgccccuucgucaagcucaacgucgagaccgacaccgccgagauccgccucaugugcaccgacaccuaccucgacaccccccgccccaacgacggcuccaucaccggccccugcgaguccgacggcgacaagggcuccggcggcaucaagggcggcuucguccaccagcgcaugaaguccaagaucggccgcugguacucccgcaccauguccaagaccgagcgcaugggcaugggccucuacgucaaguacgacggcgaccccugggccgacuccgacgcccucgucuucuccggcgucauggucuccaugaaggagcccggcugguacuccuucggcuucgagaucaaggacaagaagugcgacguccccugcaucggcaucgagaugguccacgacggcggcaaggagaccuggcacuccgccgccaccgccaucuacugccucaugggcuccggccagcuccucugggacaccgucaccggcgucgacauggcccucuga

SEQ ID NO: 126304 - RNA, 1401 nt, Artificial Sequence; identical to SEQ ID NO: 126242
  derived and/or modified CDS sequence (opt2) from neuraminidase__InfluenzaB__AHM01067

SEQ ID NO: 126305 - RNA, 1401 nt, Artificial Sequence; identical to SEQ ID NO: 126211
  derived and/or modified CDS sequence (opt2) from neuraminidase__InfluenzaB__AHM01078

SEQ ID NO: 126306 - RNA, 1401 nt, Artificial Sequence
  derived and/or modified CDS sequence (opt2) from neuraminidase__InfluenzaB__AHM01089
augcuccccuccaccauccagacccucacccucuuccucaccuccggcggcguccuccucucccucuacgucuccgccucccucuccuaccuccucuacuccgacauccuccucaaguucucccccaccgagaucaccgcccccaccaugccccucgacugcgccaacgccuccaacguccaggccgucaaccgcuccgccgccaagggcgucacccuccuccuccccgagcccgaguggaccuacccccgccucuccugccccggcuccaccuuccagaaggcccuccucaucuccccccaccgcuucggcgagaccaagggcaacuccgccccccucaucauccgcgagcccuucaucgccugcggccccaacgagugcaagcacuucgcccucacccacuacgccgcccagcccggcggcuacuacaacggcacccgcggcgaccgcaacaagcuccgccaccucaucuccgucaagcucggcaagauccccaccgucgagaacuccaucuuccacauggccgccugguccggcuccgccugccacgacggcaaggaguggaccuacaucggcgucgacggccccgacaacaacgcccuccucaaggucaaguacggcgaggccuacaccgacaccuaccacuccuacgccaacaagauccuccgcacccaggaguccgccugcaacugcaucggcggcaacugcuaccucaugaucaccgacggcuccgccuccggcgucuccgagugccgcuuccucaagauccgcgagggccgcaucaucaaggagaucuuccccaccggccgcgucaagcacaccgaggagugcaccugcggcuucgccuccaacaagaccaucgagugcgccugccgcgacaaccgcuacaccgccaagcgccccuucgucaagcucaacgucgagaccgacaccgccgagauccgccucaugugcaccgacaccuaccucgacaccccccgccccaacgacggcuccaucaccggccccugcgaguccgacggcgacaagggcuccggcggcaucaagggcggcuucguccaccagcgcaugaaguccaagaucggccgcugguacucccgcaccauguccaagaccgagcgcaugggcaugggccucuacgucaaguacgacggcgaccccugggccgacuccgacgcccucgccuucuccggcgucauggucuccaugaaggagcccggcugguacuccuucggcuucgagaucaaggacaagaagugcgacguccccugcaucggcaucgagaugguccacgacggcggcaaggagaccuggcacuccgccgccaccgccaucuacugccucaugggcuccggccagcuccucugggacaccgucaccggcgucgacauggcccucuga

SEQ ID NO: 126307 - RNA, 1401 nt, Artificial Sequence; identical to SEQ ID NO: 126211
  derived and/or modified CDS sequence (opt2) from neuraminidase__InfluenzaB__AHM01100

SEQ ID NO: 126308 - RNA, 1401 nt, Artificial Sequence; identical to SEQ ID NO: 126242
  derived and/or modified CDS sequence (opt2) from neuraminidase__InfluenzaB__AHM01111

SEQ ID NO: 126309 - RNA, 1401 nt, Artificial Sequence
  derived and/or modified CDS sequence (opt2) from neuraminidase__InfluenzaB__AHM01122
augcuccccuccaccauccagacccucacccucuuccucaccuccggcggcguccuccucucccucuacgucuccgccucccucuccuaccuccucuacuccgacauccuccucaaguucucccccaccgagaucaccgcccccaccaugccccucgacugcgccaacgccuccaacguccaggccgucaaccgcuccgccaccaagggcgucaagcuccuccuccccgagcccgaguggaccuacccccgccucuccugccccggcuccaccuuccagaaggcccuccucaucuccccccaccgcuucggcgagaccaagggcaacuccgccccccucaucauccgcgagcccuucaucgccugcggccccaacgagugcaagcacuucgcccucacccacuacgccgcccagcccggcggcuacuacaacggcacccgcggcgaccgcaacaagcuccgccaccucaucuccgucaagcucggcaagauccccaccgucgagaacuccaucuuccacauggccgccugguccggcuccgccugccacgacggcaaggaguggaccuacaucggcgucgacggccccgacaacaacgcccuccucaaggucaaguacggcgaggccuacaccgacaccuaccacuccuacgccaacaagauccuccgcacccaggaguccgccugcaacugcaucggcggcaacugcuaccucaugaucaccgacggcuccgccuccggcgucuccgagugccgcuuccucaagauccgcgagggccgcaucaucaaggagaucuuccccaccggccgcgucaagcacaccgaggagugcaccugcggcuucgccuccaacaagaccaucgagugcgccugccgcgacaaccgcuacaccgccaagcgccccuucgucaagcucaacgucgagaccgacaccgccgagauccgccucaugugcaccgacaccuaccucgacaccccccgccccaacgacggcuccaucaccggccccugcgaguccgacggcgacaagggcuccggcggcaucaagggcggcuucguccaccagcgcaugaaguccaagaucggccgcugguacucccgcaccauguccaagaccgagcgcaugggcaugggccucuacgucaaguacgacggcgaccccugggccgacuccgacgcccucgccuucuccggcgucauggucuccaugaaggagcccggcugguacuccuucggcuucgagaucaaggacaagaagugcgacguccccugcaucggcaucgagaugguccacgacggcggcaaggagaccuggcacuccgccgccaccgccaucuacugccucaugggcuccggccagcuccucugggacaccgucaccggcgucgacauggcccucuga

SEQ ID NO: 126310 - RNA, 1401 nt, Artificial Sequence; identical to SEQ ID NO: 126242
  derived and/or modified CDS sequence (opt2) from neuraminidase__InfluenzaB__AHM01133

SEQ ID NO: 126311 - RNA, 1401 nt, Artificial Sequence
  derived and/or modified CDS sequence (opt2) from neuraminidase__InfluenzaB__AHM01144
augcuccccuccaccauccagacccucacccucuuccucaccuccggcggcguccuccucucccucuacgucuccgccucccucuccuaccuccucuacuccgacauccuccucaaguucucccccaccgagaucaccgcccccaccaugccccucgacugcgccaacgccuccaacguccaggccgucaaccgcuccgccgccaagggcgucacccuccuccuccccgagcccgaguggaccuacccccgccucuccugccccggcuccaccuuccagaaggcccuccucaucuccccccaccgcuucggcgagaccaagggcaacuccgccccccucaucauccgcgagcccuucaucgccugcggccccaacgagugcaagcacuucgcccucacccacuacgccgcccagcccggcggcuacuacaacggcacccgcggcgaccgcaacaagcuccgccaccucaucuccgucaagcucggcaagauccccaccgucgagaacuccaucuuccacauggccgccugguccggcuccgccugccacgacggcaaggaguggaccuacaucggcgucgacggccccgacaacaacgcccuccucaaggucaaguacggcgaggccuacaccgacaccuaccacuccuacgccaacaagauccuccgcacccaggaguccgccugcaacugcaucggcggcaacugcuaccucaugaucaccgacggcuccgccuccggcaucuccgagugccgcuuccucaagauccgcgagggccgcaucaucaaggagaucuuccccaccggccgcgucaagcacaccgaggagugcaccugcggcuucgccuccaacaagaccaucgagugcgccugccgcgacaaccgcuacaccgccaagcgccccuucgucaagcucaacgucgagaccgacaccgccgagauccgccucaugugcaccgacaccuaccucgacaccccccgccccaacgacggcuccaucaccggccccugcgaguccgacggcgacaagggcuccggcggcaucaagggcggcuucguccaccagcgcaugaaguccaagaucggccgcugguacucccgcaccauguccaagaccgagcgcaugggcaugggccucuacgucaaguacgacggcgaccccugggccgacuccgacgcccucgccuucuccggcgucauggucuccaugaaggagcccggcugguacuccuucggcuucgagaucaaggacaagaagugcgacguccccugcaucggcaucgagaugguccacgacggcggcaaggagaccuggcacuccgccgccaccgccaucuacugccucaugggcuccggccagcuccucugggacaccgucaccggcgucgacauggcccucuga

SEQ ID NO: 126312 - RNA, 1401 nt, Artificial Sequence; identical to SEQ ID NO: 126242
  derived and/or modified CDS sequence (opt2) from neuraminidase__InfluenzaB__AHM01166

SEQ ID NO: 126313 - RNA, 1401 nt, Artificial Sequence
  derived and/or modified CDS sequence (opt2) from neuraminidase__InfluenzaB__AHM01188
augcuccccuccaccauccagacccucacccucuuccucaccuccggcggcguccuccucucccucuacgucuccgccucccucuccuaccuccucuacuccgacauccuccucaaguucucccccaccgagaucaccgcccccaccaugccccucgacugcgccaacgccuccaacguccaggccgucaaccacuccgccaccaagggcgucacccuccuccuccccgagcccgaguggaccuacccccgccucuccugccccggcuccaccuuccagaaggcccuccucaucuccccccaccgcuucggcgagaccaagggcaacuccgccccccucaucauccgcgagcccuucaucgccugcggccccaacgagugcaagcacuucgcccucacccacuacgccgcccagcccggcggcuacuacaacggcacccgcggcgaccgcaacaagcuccgccaccucaucuccgucaagcucggcaagauccccaccgucgagaacuccaucuuccacauggccgccugguccggcuccgccugccacgacggcaaggaguggaccuacaucggcgucgacggccccgacaacaacgcccuccucaaggucaaguacggcgaggccuacaccgacaccuaccacuccuacgccaacaagauccuccgcacccaggaguccgccugcaacugcaucggcggcaacugcuaccucaugaucaccgacggcuccgccuccggcgucuccgagugccgcuuccucaagauccgcgagggccgcaucaucaaggagaucuuccccaccggccgcgucaagcacaccgaggagugcaccugcggcuucgccuccaacaagaccaucgagugcgccugccgcgacaaccgcuacaccgccaagcgccccuucgucaagcucaacgucgagaccgacaccgccgagauccgccucaugugcaccgacaccuaccucgacaccccccgccccaacgacggcuccaucaccggccccugcgaguccgacggcgacaagggcuccggcggcaucaagggcggcuucguccaccagcgcaugaaguccaagaucggccgcugguacucccgcaccauguccaagaccgagcgcaugggcaugggccucuacgucaaguacgacggcgaccccugggccgacuccgacgcccucgucuucuccggcgucauggucuccaugaaggagcccggcugguacuccuucggcuucgagaucaaggacaagaagugcgacguccccugcaucggcaucgagaugguccacgacggcggcaaggagaccuggcacuccgccgccaccgccaucuacugccucaugggcuccggccagcuccucugggacaccgucaccggcgucgacauggcccucuga

SEQ ID NO: 126314 - RNA, 1401 nt, Artificial Sequence; identical to SEQ ID NO: 126306
  derived and/or modified CDS sequence (opt2) from neuraminidase__InfluenzaB__AHM01199

SEQ ID NO: 126315 - RNA, 1401 nt, Artificial Sequence
  derived and/or modified CDS sequence (opt2) from neuraminidase__InfluenzaB__AHM01210
augcuccccuccaccauccagacccucacccucuuccucaccuccggcggcguccuccucucccucuacgucuccgccucccucuccuaccuccucuacuccgacauccuccucaaguucucccccaccgagaucaccgcccccaccaugccccucgacugcgccaacgccuccaacguccaggccgucaaccgcuccgccaccaagggcgucacccuccuccuccccgagcccggcuggaccuacccccgccucuccugccccggcuccaccuuccagaaggcccuccucaucuccccccaccgcuucggcgaggccaagggcaacuccgccccccucaucauccgcgagcccuucaucgccugcggccccaacgagugcaagcacuucgcccucacccacuacgccgcccagcccggcggcuacuacaacggcacccgcggcgaccgcaacaagcuccgccaccucaucuccgucaagcucggcaagauccccaccgucgagaacuccaucuuccacauggccgccugguccggcuccgccugccacgacggcaaggaguggaccuacaucggcgucgacggccccgacaacaacgcccuccucaaggucaaguacggcgaggccuacaccgacaccuaccacuccuacgccaacaagauccuccgcacccaggaguccgccugcaacugcaucggcggcaacugcuaccucaugaucaccgacggcuccgccuccggcgucuccgagugccgcuuccucaagauccgcgagggccgcaucaucaaggagaucuuccccaccggccgcgucaagcacaccgaggagugcaccugcggcuucgccuccaacaagaccaucgagugcgccugccgcgacaaccgcuacaccgccaagcgccccuucgucaagcucaacgucgagaccgacaccgccgagauccgccucaugugcaccgacaccuaccucgacaccccccgccccaacgacggcuccaucaccggccccugcgaguccgacggcgacaagggcuccggcggcaucaagggcggcuucguccaccagcgcaugaaguccaagaucggccgcugguacucccgcaccauguccaagaccgagcgcaugggcaugggccucuacgucaaguacgacggcgaccccugggccgacuccgacgcccucgccuucuccggcgucauggucuccaugaaggagcccggcugguacuccuucggcuucgagaucaaggacaagaagugcgacguccccugcaucggcaucgagaugguccacgacggcggcaaggagaccuggcacuccgccgccaccgccaucuacugccucaugggcuccggccagcuccucugggacaccgucgccggcgucgacauggcccucuga

SEQ ID NO: 126316 - RNA, 1401 nt, Artificial Sequence
  derived and/or modified CDS sequence (opt2) from neuraminidase__InfluenzaB__AHM01221
augcuccccuccaccauccagacccucacccucuuccucaccuccggcggcguccuccucucccucuacgucuccgccucccucuccuaccuccucuacuccgacauccuccucaaguucucccccaccgagaucaccgcccccaccaugccccucgacugcgccaacgccuccaacuuccaggccgucaaccgcuccgccaccaagggcgucaccuuccuccuccccgagcccgaguggaccuacccccgccucuccugccccggcuccaccuuccagaaggcccuccucaucuccccccaccgcuucggcgagaccaagggcaacuccgccccccucaucauccgcgagcccuucaucgccugcggccccaacgagugcaagcacuucgcccucacccacuacgccgcccagcccggcggcuacuacaacggcacccgcggcgaccgcaacaagcuccgccaccucaucuccgucaagcucggcaagauccccaccgucgagaacuccaucuuccacauggccgccugguccggcuccgccugccacgacggcaaggaguggaccuacaucggcgucgacggccccgacaacaacgcccuccucaaggucaaguacggcgaggccuacaccgacaccuaccacuccuacgccaacaagauccuccgcacccaggaguccgccugcaacugcaucggcggcaacugcuaccucaugaucaccgacggcuccgccuccggcgucuccgagugccgcuuccucaagauccgcgagggccgcaucaucaaggagaucuuccccaccggccgcgucaagcacaccgaggagugcaccugcggcuucgccuccaacaagaccaucgagugcgccugccgcgacaaccgcuacaccgccaagcgccccuucgucaagcucaacgucgagaccgacaccgccgagauccgccucaugugcaccgacaccuaccucgacaccccccgccccaacgacggcuccaucaccggccccugcgaguccgacggcgacaagggcuccggcggcaucaagggcggcuucguccaccagcgcaugaaguccaagaucggccgcugguacucccgcaccauguccaagaccgagcgcaugggcaugggccucuacgucaaguacgacggcgaccccugggccgacuccgacgcccucgccuucuccggcgucauggucuccaugaaggagcccggcugguacuccuucggcuucgagaucaaggacaagaagugcgacguccccugcaucggcaucgagaugguccacgacggcggcaaggagaccuggcacuccgccgccaccgccaucuacugccucaugggcuccggccagcuccucugggacaccgucaccggcgucgacauggcccucuga

SEQ ID NO: 126317 - RNA, 1401 nt, Artificial Sequence; identical to SEQ ID NO: 126211
  derived and/or modified CDS sequence (opt2) from neuraminidase__InfluenzaB__AHM01232

SEQ ID NO: 126318 - RNA, 1401 nt, Artificial Sequence; identical to SEQ ID NO: 126242
  derived and/or modified CDS sequence (opt2) from neuraminidase__InfluenzaB__AHM01243

SEQ ID NO: 126319 - RNA, 1401 nt, Artificial Sequence
  derived and/or modified CDS sequence (opt2) from neuraminidase__InfluenzaB__AHM01254
augcuccccuccaccauccagacccucacccucuuccucaccuccggcggcguccuccucucccucuacgucuccgccucccucuccuaccuccucuacuccgacauccuccucaaguucucccccaccgagaucaccgcccccaccaugccccucgacugcgccaacgccuccaacguccaggccgucaaccgcuccgccaccaagggcgucacccuccuccuccccgagcccgaguggaccuacccccgccucuccugccccggcuccaccuuccagaaggcccuccucaucuccccccaccgcuucggcgagaccaagggcaacuccgccccccucaucauccgcgagcccuucaucgccugcggccccaacgagugcaagcacuucgcccucacccacuacgccgcccagcccggcggcuacuacaacggcacccgcggcgaccgcaacaagcuccgccaccucaucuccgucaagcucggcaagauccccaccgucgagaacuccaucuuccacauggccgccugguccggcuccgccugccacgacggcaaggaguggaccuacaucggcgucgacggccccgacaacaacgcccuccucaaggucaaguacggcgaggccuacaccgacaccuaccacuccuacgccaacaagauccuccgcacccaggaguccgccugcaacugcaucggcggcaacugcuaccucaugaucaccgacggcuccgccuccggcgucuccgagugccgcuuccucaagauccgcgagggccgcaucaucaaggagaucuuccccaccggccgcgucaagcacaccgaggagugcaccugcggcuucgccuccaacaagaccaucgagugcgccugccgcgacaaccgcuacaccgccaagcgccccuucgucaagcucaacgucgagaccgacaccgccgagauccgccucaugugcaccgacaccuaccucgacaccccccgccccaacgacggcuccaucaccggccccugcgaguccgacggcgacaagggcuccggcggcaucaagggcggcuucguccaccagcgcaugaaguccaagaucggccgcugguacucccgcaccauguccaagaccgagcgcaugggcaugggccucuacgucaaguacgacggcgaccccugggccgacuccgacgcccucgucuucuccggcgucauggucuccaugaaggagcccggcugguacuccuucggcuucgagaucaaggacaagaagugcgacguccccugcaucggcaucgagaugguccacgacggcggcaaggagaccuggcacuccgccgccaccgccaucuacugccucaugggcuccggccagcuccucugggacaccgucaccggcgucgacauggcccucuga

SEQ ID NO: 126320 - RNA, 1401 nt, Artificial Sequence
  derived and/or modified CDS sequence (opt2) from neuraminidase__InfluenzaB__AHM01265
augcuccccuccaccauccagacccucacccucuuccucaccuccggcggcguccuccucucccucuacgucuccgccucccucuccuaccuccucuacuccgacauccuccucaaguucucccccaccgagaucaccgcccccaccaugccccucgacugcgccaacgccuccaacguccaggccgucaaccgcuccgccaccaagggcgucacccuccuccuccccgagcccgaguggaccuacccccgccucuccugccccggcuccaccuuccagaaggcccuccucaucuccccccaccgcuucggcgagaccaagggcaacuccgccccccucaucauccgcgagcccuucaucgccugcggccccaacgagugcaagcacuucgcccucacccacuacgccgcccagcccggcggcuacuacaacggcacccgcggcgaccgcaacaagcuccgccaccucaucuccgucaagcucggcaagauccccaccgucgagaacuccaucuuccacauggccgccugguccggcuccgccugccacgacggcaaggaguggaccuacaucggcgucgacggccccgacaacaacgcccuccucaaggucaaguacggcgaggccuacaccgacaccuaccacuccuacgccaacaagauccuccgcacccaggaguccgccugcaacugcaucggcggcaacugcuaccucaugaucaccgacggcuccgccuccggcgucuccgagugccgcuuccucaagauccgcgagggccgcaucaucaaggagaucuuccccaccggccgcgucaagcacaccgaggagugcaccugcggcuucgccuccaacaagaccaucgagugcgccugccgcgacaaccgcuacaccgccaagcgccccuucgucaagcucaacgucgagaccgacaccgccgagauccgccucaugugcaccgacaccuaccucgacaccccccgccccaacgacggcuccaucaccggccccugcgaguccgacggcgacgagggcuccggcggcaucaagggcggcuucguccaccagcgcaugaaguccaagaucggccgcugguacucccgcaccauguccaagaccgagcgcaugggcaugggccucuacgucaaguacgacggcgaccccugggccgacuccgacgcccucgccuucuccggcgucauggucuccaugaaggagcccggcugguacuccuucggcuucgagaucaaggacaagaagugcgacguccccugcaucggcaucgagaugguccacgacggcggcaaggagaccuggcacuccgccgccaccgccaucuacugccucaugggcuccggccgccuccucugggacaccgucaccggcgucgacauggcccucuga

SEQ ID NO: 126321 - RNA, 1401 nt, Artificial Sequence
  derived and/or modified CDS sequence (opt2) from neuraminidase__InfluenzaB__AHM01276
augcuccccuccaccauccagacccucacccucuuccucaccuccggcggcguccuccucucccucuacgucuccgccucccucuccuaccuccucuacuccgacauccuccucaaguucucccagaccgagaucaccgcccccaucaugccccucgacugcaccaacgccuccaacguccaggccgucaaccgcuccgccgccaagggcgucacccuccuccuccccgagcccgaguggaccuacccccgccucuccugccccggcuccaccuuccagaaggcccuccucaucuccccccaccgcuucggcgagaucaagggcaacuccgccccccucaucauccgcgagcccuucaucgccugcggccccaccgagugcaagcacuucgcccucacccacuacgccgcccagcccggcggcuacuacaacggcacccgcgaggaccgcaacaagcuccgccaccucaucuccgucaagcucggcaagauccccaccgucgagaacuccaucuuccacauggccgccugguccggcuccgccugccacgacggcaaggaguggaccuacaucggcgucgacggccccgacuccaacgcccuccucaagaucaaguacggcgaggccuacaccgacaccuaccacuccuacgccaagaacauccuccgcacccaggaguccgccugcaacugcaucggcggcgacugcuaccucaugaucaccgacggccccgccuccggcgucuccgagugccgcuuccucaagauccgcgagggccgcaucaucaaggagaucuuccccaccggccgcgucaagcacaccgaggagugcaccugcggcuucgccuccaacaagaccaucgagugcgccugccgcgacaaccgcuacaccgccaagcgccccuucgucaagcucaacgucgagaccgacaccgccgagauccgccucaugugcaccgagaccuaccucgacaccccccgccccaacgacggcuccaucaccggccccugcgaguccgacggcgacaagggcuccggcggcaucaagggcggcuucguccaccagcgcauggccuccaagaucggccgcugguacucccgcaccauguccaagaccaagcgcaugggcaugggccucuacgucaaguacgacggcgaccccuggaccgacuccgaggcccucgcccucuccggcgucauggucuccauggaggagcccggcugguacuccuucggcuucgagaucaaggacaagaagugcgacguccccugcaucggcaucgagaugguccacgacggcggcaagaccaccuggcacuccgccgccaccgccaucuacugccucaugggcuccggccagcuccucugggacaccgucaccggcgucgacauggcccucuga

SEQ ID NO: 126322 - RNA, 1401 nt, Artificial Sequence; identical to SEQ ID NO: 126306
  derived and/or modified CDS sequence (opt2) from neuraminidase__InfluenzaB__AHM01287

SEQ ID NO: 126323 - RNA, 1401 nt, Artificial Sequence; identical to SEQ ID NO: 126306
  derived and/or modified CDS sequence (opt2) from neuraminidase__InfluenzaB__AHM01298

SEQ ID NO: 126324 - RNA, 1401 nt, Artificial Sequence; identical to SEQ ID NO: 126321
  derived and/or modified CDS sequence (opt2) from neuraminidase__InfluenzaB__AHM01309

SEQ ID NO: 126325 - RNA, 1401 nt, Artificial Sequence; identical to SEQ ID NO: 126242
  derived and/or modified CDS sequence (opt2) from neuraminidase__InfluenzaB__AHM01320

SEQ ID NO: 126326 - RNA, 1401 nt, Artificial Sequence; identical to SEQ ID NO: 126306
  derived and/or modified CDS sequence (opt2) from neuraminidase__InfluenzaB__AHM01331

SEQ ID NO: 126327 - RNA, 1401 nt, Artificial Sequence; identical to SEQ ID NO: 126242
  derived and/or modified CDS sequence (opt2) from neuraminidase__InfluenzaB__AHM01342

SEQ ID NO: 126328 - RNA, 1401 nt, Artificial Sequence
  derived and/or modified CDS sequence (opt2) from neuraminidase__InfluenzaB__AHM01353
augcuccccuccaccauccagacccucacccucuuccucaccuccggcggcguccuccucucccucuacgucuccgccucccucuccuaccuccucuacuccgacauccuccucaaguucucccccaccgagaucaccgcccccaccaugccccucgacugcgccaacgccuccaacguccaggccgucaaccgcuccgccaccaagggcgucacccuccuccuccccgagcccggcuggaccuacccccgccucuccugccccggcuccaccuuccagaaggcccuccucaucuccccccaccgcuucggcgagaccaagggcaacuccgccccccucaucauccgcgagcccuucaucgccugcggccccaacgagugcaagcacuucgcccucacccacuacgccgcccagcccggcggcuacuacaacggcacccgcggcgaccgcaacaagcuccgccaccucaucuccgucaagcucggcaagauccccaccgucgagaacuccaucuuccacauggccgccugguccggcuccgccugccacgacggcaaggaguggaccuacaucggcgucgacggccccgacaacaacgcccuccucaaggucaaguacggcgaggccuacaccgacaccuaccacuccuacgccaacaagauccuccgcacccaggaguccgccugcaacugcaucggcggcaacugcuaccucaugaucaccgacggcuccgccuccggcgucuccgagugccgcuuccucaagauccgcgagggccgcaucaucaaggagaucuuccccaccggccgcgucaagcacaccgaggagugcaccugcggcuucgccuccaacaagaccaucgagugcgccugccgcgacaaccgcuacaccgccaagcgccccuucgucaagcucaacgucgagaccgacaccgccgagauccgccucaugugcaccgacaccuaccucgacaccccccgccccaacgacggcuccaucaccggccccugcgaguccgacggcgacaagggcuccggcggcaucaagggcggcuucguccaccagcgcaugaaguccaagaucggccgcugguacucccgcaccauguccaagaccgagcgcaugggcaugggccucuacgucaaguacgacggcgaccccugggccgacuccgacgcccucgccuucuccggcgucauggucuccaugaaggagcccggcugguacuccuucggcuucgagaucaaggacaagaagugcgacguccccugcaucggcaucgagaugguccacgacggcggcaaggagaccuggcacuccgccgccaccgccaucuacugccucaugggcuccggccagcuccucugggacaccgucaccggcgucgacauggcccucuga

SEQ ID NO: 126329 - RNA, 1401 nt, Artificial Sequence
  derived and/or modified CDS sequence (opt2) from neuraminidase__InfluenzaB__AHM01364
augcuccccuccaccauccagacccucacccucuuccucaccuccggcggcguccuccucucccucuacgucuccgccucccucuccuaccuccucuacuccgacauccuccucaaguucucccccaccgagaucaccgcccccaccaugccccucgacugcgccaacgccuccaacguccaggccgucaaccgcuccgccaccaagggcgucacccuccuccuccccgagcccgaguggaccuacccccgccucuccugccccggcuccaccuuccagaaggcccuccucaucuccccccaccgcuucggcgagaccaagggcaacuccgccccccucaucauccgcgagcccuucaucgccugcggccccaacgagugcaagcacuucgcccucacccacuacgccgcccagcccggcggcuacuacaacggcacccgcggcgaccgcaacaagcuccgccaccucaucuccgucaagcucggcaagauccccaccgucgagaacuccaucuuccacauggccgccugguccggcuccgccugccacgacggcaaggaguggaccuacaucggcgucgacggccccgacaacaacgcccuccucaaggucaaguacggcgaggccuacaccgacaccuaccacuccuacgccaacaagauccuccgcacccaggaguccgccugcaacugcaucggcggcaacugcuaccucaugaucaccgacggcuccgccuccggcgucuccgagugccgcuuccucaagauccgcgagggccgcaucaucaaggagaucuuccccaccggccgcgucaagcacaccgaggagugcaccugcggcuucgccuccaacaagaccaucgagugcgccugccgcgacaaccgcuacaccgccaagcgccccuucgucaagcucaacgucgagaccgacaccgccgagauccgccucaugugcaccgacaccuaccucgacaccccccgccccaacgacggcuccaucaccggccccugcgaguccgacggcgacgagggcuccggcggcaucaagggcggcuucguccaccagcgcaugaaguccaagaucggccgcugguacucccgcaccauguccaagaccgagcgcaugggcaugggccucuacgucaaguacgacggcgaccccugggccgacuccgacgcccucgccuucuccggcgucauggucuccaugaaggagcccggcugguacuccuucggcuucgagaucaaggacaagaagugcgacguccccugcaucggcaucgagaugguccacgacggcggcaaggagaccuggcacuccgccgccaccgccaucuacugccucaugggcuccggccagcuccucugggacaccgucaccggcgucgacauggcccucuga

SEQ ID NO: 126330 - RNA, 1401 nt, Artificial Sequence; identical to SEQ ID NO: 126321
  derived and/or modified CDS sequence (opt2) from neuraminidase__InfluenzaB__AHM01375

SEQ ID NO: 126331 - RNA, 1401 nt, Artificial Sequence; identical to SEQ ID NO: 126321
  derived and/or modified CDS sequence (opt2) from neuraminidase__InfluenzaB__AHM01386

SEQ ID NO: 126332 - RNA, 1401 nt, Artificial Sequence; identical to SEQ ID NO: 126242
  derived and/or modified CDS sequence (opt2) from neuraminidase__InfluenzaB__AHM01397

SEQ ID NO: 126333 - RNA, 1401 nt, Artificial Sequence; identical to SEQ ID NO: 126242
  derived and/or modified CDS sequence (opt2) from neuraminidase__InfluenzaB__AHM01408

SEQ ID NO: 126334 - RNA, 1401 nt, Artificial Sequence; identical to SEQ ID NO: 126242
  derived and/or modified CDS sequence (opt2) from neuraminidase__InfluenzaB__AHM01419

SEQ ID NO: 126335 - RNA, 1401 nt, Artificial Sequence
  derived and/or modified CDS sequence (opt2) from neuraminidase__InfluenzaB__AHM01430
augcuccccuccaccauccagacccucacccucuuccucaccuccggcggcguccuccucucccucuacgucuccgccucccucuccuaccuccucuacuccgacauccuccucaaguucucccccaccgagaucaccgcccccaccaugccccucgacugcgccaacgccuccaacguccaggccgucaaccgcuccgccaccaagggcgucacccuccuccuccccgagcccgaguggaccuacccccgccucuccugccccggcuccaccuuccagaaggcccuccucaucuccccccaccgcuucggcgagaccaagggcaacuccgccccccucaucauccgcgagcccuucaucgccugcggccccaacgagugcaagcacuucgcccucacccacuacgccgcccagcccggcggcuacuacaacggcacccgcggcgaccgcaacaagcuccgccaccucaucuccgucaagcucggcaagauccccaccgucgagaacuccaucuuccacauggccgccugguccggcuccgccugccacgacggcaaggaguggaccuacaucggcgucgacggccccgacaacaacgcccuccucaaggucaaguacggcgaggccuacaccgacaccuaccacuccuacgccaacaagauccuccgcacccaggaguccgccugcaacugcaucggcggcaacugcuaccucaugaucaccgacggcuccgccuccggcgucuccgagugccgcuuccucaagauccgcgagggccgcaucaucaaggagaucuuccccaccggccgcgucaagcacaccgaggagugcaccugcggcuucgccuccaacaagaccaucgagugcgccugccgcgacaaccgcuacaccgccaagcgccccuucgucaagcucaacgucgagaccgacaccgccgagauccgccucaugugcaccgacaccuaccucgacaccccccgccccaacgacggcuccaucaccggccccugcgaguccgacggcgacgagggcuccggcggcaucaagggcggcuucguccaccagcgcaugaaguccaagaucggccgcugguacucccgcaccauguccaagaccgagcgcaugggcaugggccucuacgucaaguacgacggcgaccccugggccgacuccgacgcccucgccuucuccggcgucauggucuccaugaaggagcccggcugguacuccuucggcuucgagaucaaggacaagaagugcgacguccccugcaucggcaucgagaugguccacgacggcggcaaggagaccuggcacuccgccgccaccgccaucuacugccucaugggcuccggccgccuccucugggacaccgccaccggcgucgacauggcccucuga

SEQ ID NO: 126336 - RNA, 1401 nt, Artificial Sequence
  derived and/or modified CDS sequence (opt2) from neuraminidase__InfluenzaB__AHM01441
augcuccccuccaccauccagacccucacccucuuccucaccuccggcggcguccuccucucccucuacgucuccgccucccucuccuaccuccucuacuccgacauccuccucaaguucucccagaccgagaucaccgcccccaccaugccccucgacugcgccaacgccuccaacguccaggccgucaaccgcuccgccgccaagggcgucacccuccuccuccccgagcccgaguggaccuacccccgccucuccugccccggcuccaccuuccagaaggcccuccucaucuccccccaccgcuucggcgagaucaagggcaacuccgccccccucaucauccgcgagcccuucaucgccugcggccccaccgagugcaagcacuucgcccucacccacuacgccgcccagcccggcggcuacuacaacggcacccgcgaggaccgcaacaagcuccgccaccucaucuccgucaagcucggcaagauccccaccgucgagaacuccaucuuccacauggccgccugguccggcuccgccugccacgacggcaaggaguggaccuacaucggcgucgacggccccgacuccaacgcccuccucaagaucaaguacggcgaggccuacaccgacaccuaccacuccuacgccaagaacauccuccgcacccaggaguccgccugcaacugcaucggcggcgacugcuaccucaugaucaccgacggccccgccuccggcgucuccgagugccgcuuccucaagauccgcgagggccgcaucaucaaggagaucuuccccaccggccgcgucaagcacaccgaggagugcaccugcggcuucgccuccaacaagaccaucgagugcgccugccgcgacaaccgcuacaccgccaagcgccccuucgucaagcucaacgucgagaccgacaccgccgagauccgccucaugugcaccgagaccuaccucgacaccccccgccccaacgacggcuccaucaccggccccugcgaguccgacggcgacaagggcuccggcggcaucaagggcggcuucguccaccagcgcauggccuccaagaucggccgcugguacucccgcaccauguccaagaccaagcgcaugggcaugggccucuacgucaaguacgacggcgaccccuggaccgacuccgaggcccucgcccucuccggcgucauggucuccauggaggagcccggcugguacuccuucggcuucgagaucaaggacaagaagugcgacguccccugcaucggcaucgagaugguccacgacggcggcaagaccaccuggcacuccgccgccaccgccaucuacugccucaugggcuccggccagcuccucugggacaccgucaccggcgucgacauggcccucuga

SEQ ID NO: 126337 - RNA, 1401 nt, Artificial Sequence; identical to SEQ ID NO: 126242
  derived and/or modified CDS sequence (opt2) from neuraminidase__InfluenzaB__AHM01463

SEQ ID NO: 126338 - RNA, 1401 nt, Artificial Sequence
  derived and/or modified CDS sequence (opt2) from neuraminidase__InfluenzaB__AHM01474
augcuccccuccaccauccagacccucacccucuuccucaccuccggcggcguccuccucucccucuacgucuccgccucccucuccuaccuccucuacuccgacauccuccucaaguucucccagaccgagaucaccgcccccaucaugccccucgacugcaucaacgccuccaacguccaggccgucaaccgcuccgccgccaagggcgucacccuccuccuccccgagcccgaguggaccuacccccgccucuccugccccggcuccaccuuccagaaggcccuccucaucuccccccaccgcuucggcgagaucaagggcaacuccgccccccucaucauccgcgagcccuucaucgccugcggccccaccgagugcaagcacuucgcccucacccacuacgccgcccagcccggcggcuacuacaacggcacccgcgaggaccgcaacaagcuccgccaccucaucuccgucaagcucggcaagauccccaccgucgagaacuccaucuuccacauggccgccugguccggcuccgccugccacgacggcaaggaguggaccuacaucggcgucgacggccccgacuccaacgcccuccucaagaucaaguacggcgaggccuacaccgacaccuaccacuccuacgccaagaacauccuccgcacccaggaguccgccugcaacugcaucggcggcgacugcuaccucaugaucaccgacggccccgccuccggcgucuccgagugccgcuuccucaagauccgcgagggccgcaucaucaaggagaucuuccccaccggccgcgucaagcacaccgaggagugcaccugcggcuucgccuccaacaagaccaucgagugcgccugccgcgacaaccgcuacaccgccaagcgccccuucgucaagcucaacgucgagaccgacaccgccgagauccgccucaugugcaccgagaccuaccucgacaccccccgccccaacgacggcuccaucaccggccccugcgaguccgacggcgacaagggcuccggcggcaucaagggcggcuucguccaccagcgcauggccuccaagaucggccgcugguacucccgcaccauguccaagaccaagcgcaugggcaugggccucuacgucaaguacgacggcgaccccuggaccgacuccgaggcccucgcccucuccggcgucauggucuccauggaggagcccggcugguacuccuucggcuucgagaucaaggacaagaagugcgacguccccugcaucggcaucgagaugguccacgacggcggcaagaccaccuggcacuccgccgccaccgccaucuacugccucaugggcuccggccagcuccucugggacaccgucaccggcgucgacauggcccucuga

SEQ ID NO: 126339 - RNA, 1401 nt, Artificial Sequence
  derived and/or modified CDS sequence (opt2) from neuraminidase__InfluenzaB__AHM01485
augcuccccuccaccauccagacccucacccucuuccucaccuccggcggcguccuccucucccucuacgucuccgccucccucuccuaccuccucuacuccgacauccuccucaaguucucccccaccgagaucaccgcccccaucaugccccucgacugcaccaacgccuccaacguccaggccgucaaccgcuccgccgccaagggcgucacccuccuccuccccgagcccgaguggaccuacccccgccucuccugccccggcuccaccuuccagaaggcccuccucaucuccccccaccgcuucggcgagaucaagggcaacuccgccccccucaucauccgcgagcccuucaucgccugcggccccaccgagugcaagcacuucgcccucacccacuacgccgcccagcccggcggcuacuacaacggcacccgcgaggaccgcaacaagcuccgccaccucaucuccgucaagcucggcaagauccccaccgucgagaacuccaucuuccacauggccgccugguccggcuccgccugccacgacggcaaggaguggaccuacaucggcgucgacggccccgacuccaacgcccuccucaagaucaaguacggcgaggccuacaccgacaccuaccacuccuacgccaagaacauccuccgcacccaggaguccgccugcaacugcaucggcggcgacugcuaccucaugaucaccgacggccccgccuccggcgucuccgagugccgcuuccucaagauccgcgagggccgcaucaucaaggagaucuuccccaccggccgcgucaagcacaccgaggagugcaccugcggcuucgccuccaacaagaccaucgagugcgccugccgcgacaaccgcuacaccgccaagcgccccuucgucaagcucaacgucgagaccgacaccgccgagauccgccucaugugcaccgagaccuaccucgacaccccccgccccaacgacggcuccaucaccggccccugcgaguccgacggcgacaagggcuccggcggcaucaagggcggcuucguccaccagcgcauggccuccaagaucggccgcugguacucccgcaccauguccaagaccaagcgcaugggcaugggccucuacgucaaguacgacggcgaccccuggaccgacuccgaggcccucgcccucuccggcgucauggucuccauggaggagcccggcugguacuccuucggcuucgagaucaaggacaagaagugcgacguccccugcaucggcaucgagaugguccacgacggcggcaagaccaccuggcacuccgccgccaccgccaucuacugccucaugggcuccggccagcuccucugggacaccgucaccggcgucgacauggcccucuga

SEQ ID NO: 126340 - RNA, 1401 nt, Artificial Sequence; identical to SEQ ID NO: 126321
  derived and/or modified CDS sequence (opt2) from neuraminidase__InfluenzaB__AHM01496

SEQ ID NO: 126341 - RNA, 1401 nt, Artificial Sequence
  derived and/or modified CDS sequence (opt2) from neuraminidase__InfluenzaB__AHM01507
augcuccccuccaccauccagacccucacccucuuccucaccuccggcggcguccuccucucccucuacgucuccgccucccucuccuaccuccucuacuccgacauccuccucaaguucucccagaccgagaucaccgcccccaucaugccccucgacugcgccaacgccuccaacguccaggccgucaaccgcuccgccgccaagggcgucacccuccuccuccccgagcccgaguggaccuacccccgccucuccugccccggcuccaccuuccagaaggcccuccucaucuccccccaccgcuucggcgagaucaagggcaacuccgccccccucaucguccgcgagcccuucaucgccugcggccccaccgagugcaagcacuucgcccucacccacuacgccgcccagcccggcggcuacuacaacggcacccgcgaggaccgcaacaagcuccgccaccucaucuccgucaagcucggcaagauccccaccgucgagaacuccaucuuccacauggccgccugguccggcuccgccugccacgacggcaaggaguggaccuacaucggcgucgacggccccgacuccaacgcccuccucaagaucaaguacggcgaggccuacaccgacaccuaccacuccuacgccaagaacauccuccgcacccaggaguccgccugcaacugcaucggcggcgacugcuaccucaugaucaccgacggccccgccuccggcgucuccgagugccgcuuccucaagauccgcgagggccgcaucaucaaggagaucuuccccaccggccgcgucaagcacaccgaggagugcaccugcggcuucgccuccaacaagaccaucgagugcgccugccgcgacaaccgcuacaccgccaagcgccccuucgucaagcucaacgucgagaccgacaccgccgagauccgccucaugugcaccgagaccuaccucgacaccccccgccccaacgacggcuccaucaccggccccugcgaguccgacggcgacaagggcuccggcggcaucaagggcggcuucguccaccagcgcauggccuccaagaucggccgcugguacucccgcaccauguccaagaccaagcgcaugggcaugggccucuacgucaaguacgacggcgaccccuggaccgacuccgaggcccucgcccucuccggcgucauggucuccaucgaggagcccggcugguacuccuucggcuucgagaucaaggacaagaagugcgacguccccugcaucggcaucgagaugguccacgacggcggcaagaccaccuggcacuccgccgccaccgccaucuacugccucaugggcuccggccagcuccucugggacaccgucaccggcgucgacauggcccucuga

SEQ ID NO: 126342 - RNA, 1401 nt, Artificial Sequence; identical to SEQ ID NO: 126321
  derived and/or modified CDS sequence (opt2) from neuraminidase__InfluenzaB__AHM01518

SEQ ID NO: 126343 - RNA, 1401 nt, Artificial Sequence
  derived and/or modified CDS sequence (opt2) from neuraminidase__InfluenzaB__AHM01529
augcuccccuccaccauccagacccucacccucuuccucaccuccggcggcguccuccucucccucuacgucuccgccucccucuccuaccuccucuacuccgacauccuccucaaguucucccagaccgagaucaccgcccccaucaugccccucgacugcaccaacgccuccaacguccaggccgucaaccgcuccgccgccaagggcgucacccuccuccuccccgagcccgaguggaccuacccccgccucuccugccccggcuccaccuuccagaaggcccuccucaucuccccccaccgcuucggcgagaucaagggcaacuccgccccccucaucauccgcgagcccuucaucgccugcggccccaccgagugcaagcacuucgcccucacccacuacgccgcccagcccggcggcuacuacaacggcacccgcgaggaccgcaacaagcuccgccaccucaucuccgucaagcucggcaagauccccaccgucgagaacuccaucuuccacauggccgccugguccggcuccgccugccacgacggcaaggaguggaccuacaucggcgucgacggccccgacuccaacgcccuccucaagaucaaguacggcgaggccuacaccgacaccuaccacuccuacgccaagaacauccuccgcacccaggaguccgccugcaacugcaucggcggcgacugcuaccucaugaucaccgacggccccgccuccggcgucuccgagugccgcuuccucaagauccgcgagggccgcaucaucaaggagauccuccccaccggccgcgucaagcacaccgaggagugcaccugcggcuucgccuccaacaagaccaucgagugcgccugccgcgacaaccgcuacaccgccaagcgccccuucgucaagcucaacgucgagaccgacaccgccgagauccgccucaugugcaccgagaccuaccucgacaccccccgccccaacgacggcuccaucaccggccccugcgaguccgacggcgacaagggcuccggcggcaucaagggcggcuucguccaccagcgcauggccuccaagaucggccgcugguacucccgcaccauguccaagaccaagcgcaugggcaugggccucuacgucaaguacgacggcgaccccuggaccgacuccgaggcccucgcccucuccggcgucauggucuccauggaggagcccggcugguacuccuucggcuucgagaucaaggacaagaagugcgacguccccugcaucggcaucgagaugguccacgacggcggcaagaccaccuggcacuccgccgccaccgccaucuacugccucaugggcuccggccagcuccucugggacaccgucaccggcgucgacauggcccucuga

SEQ ID NO: 126344 - RNA, 1401 nt, Artificial Sequence; identical to SEQ ID NO: 126211
  derived and/or modified CDS sequence (opt2) from neuraminidase__InfluenzaB__AHM01540

SEQ ID NO: 126345 - RNA, 1401 nt, Artificial Sequence; identical to SEQ ID NO: 126321
  derived and/or modified CDS sequence (opt2) from neuraminidase__InfluenzaB__AHM01551

SEQ ID NO: 126346 - RNA, 1401 nt, Artificial Sequence; identical to SEQ ID NO: 126321
  derived and/or modified CDS sequence (opt2) from neuraminidase__InfluenzaB__AHM01562

SEQ ID NO: 126347 - RNA, 1401 nt, Artificial Sequence; identical to SEQ ID NO: 124828
  derived and/or modified CDS sequence (opt2) from neuraminidase__InfluenzaB__AHZ13597

SEQ ID NO: 126348 - RNA, 1404 nt, Artificial Sequence
  derived and/or modified CDS sequence (opt2) from neuraminidase__InfluenzaB__AHZ36701
augcuccccuccaccauccagaugcucacccucuuccucaccuccggcggcguccuccucucccucuacgucuccgccucccucuccuaccuccucuacuccgacauccuccucaaguucucccccaccgagaucaccgcccccaccaugccccucgacugcgccaacgccuccaacguccacgccgucaaccgcuccgccaccaagggcgucaccuuccuccuccuccccgagcccgaguggaccuacccccgccucuccugccccggcuccaccuuccagaaggcccuccucaucuccccccaccgcuucggcgagaccaagggcaacuccgccccccucaucauccgcgagcccuucaucgccugcggccccaacgagugcaagcacuucgcccucacccacuacgccgcccagcccggcggcuacuacaacggcacccgcggcgaccgcaacaagcuccgccaccucaucuccgucaagcucggcaagauccccaccgucgagaacuccaucuuccacauggccgccugguccggcuccgccugccacgacggcaaggaguggaccuacaucggcgucgacggccccgacaacaacgcccuccucaagaucaaguacggcgaggccuacaccgacaccuaccacuccuacgccaacaacauccuccgcacccaggaguccgccugcaacugcaucggcggcaacugcuaccucaugaucaccgacggcuccgccuccggcgucuccgagugccgcuuccucaagauccgcaagggccgcaucaucaaggagaucuuccccaccggccgcgucaagcacaccgaggagugcaccugcggcuucgccuccaacaagaccaucgagugcgccugccgcgacaacuccuacaccgccaagcgccccuucgucaagcucaacgucgagaccgacaccgccgagauccgccucaugugcaccgacaccuaccucgacaccccccgccccgacgacggcuccaucaccggccccugcgaguccaacggcgacaagggcuccggcggcaucaagggcggcuucguccaccagcgcauggccuccaagaucggccgcugguacucccgcaccauguccaagaccgagcgcaugggcaugggccucuacgucaaguacgacggcgaccccuggaccgacuccgacgcccucgccuuccgcggcgucauggucuccaugaaggagcccggcugguacuccuucggcuucgagaucaaggacaagaagugcgacguccccugcaucggcaucgagaugguccacgacggcggcaaggagaccuggcacuccgccgccaccgccaucuacugccucaugggcuccggccagcuccucugggacaccgucaccggcgucgacauggcccucuga

SEQ ID NO: 126349 - RNA, 1404 nt, Artificial Sequence
  derived and/or modified CDS sequence (opt2) from neuraminidase__InfluenzaB__AHZ36756
augcuccccuccaccauccagaugcucacccucuuccucaccuccggcggcguccuccucucccucuacgucuccgccucccucuccuaccuccucuacuccgacauccuccucaaguucucccccaccgagaucaccgcccccaccaugccccucgacugcgccaacgccuccaacguccacgccgucaaccgcuccgccaccaagggcgucaccuuccuccuccuccccgagcccgaguggaccuacccccgccucuccugccccggcuccaccuuccagaaggcccuccucaucuccccccaccgcuucggcgagaccaagggcaacuccgccccccucaucauccgcgagcccuucaucgccugcggccccaacgagugcaagcacuucgcccucacccacuacgccgcccagcccggcggcuacuacaacggcacccgcggcgaccgcaacaagcuccgccaccucaucuccgucaagcucggcaagauccccaccgucgagaacuccaucuuccacauggccgccugguccggcuccgccugccacgacggcaaggaguggaccuacaucggcgucgacggccccgacaacaacgcccuccucaagaucaaguacggcgaggccuacaccgacaccuaccacuccuacgccaacaacauccuccgcacccaggaguccgccugcaacugcaucggcggcaacugcuaccucaugaucaccgacggcuccgccuccggcgucuccgagugccgcuuccucaagauccgcgagggccgcaucaucaaggagaucuuccccaccggccgcgucaagcacaccgaggagugcaccugcggcuucgccuccaacaagaccaucgagugcgccugccgcgacaacuccuacaccgccaagcgccccuucgucaagcucaacgucgagaccgacaccgccgagauccgccucaugugcaccgacaccuaccucgacaccccccgccccgacgacggcuccaucaccggccccugcgaguccaacggcgacaagggcuccggcggcaucaagggcggcuucguccaccagcgcauggccuccaagaucggccgcugguacucccgcaccauguccaagaccgagcgcaugggcaugggccucuacgucaaguacgacggcgaccccuggaccgacuccgacgcccucgccuuccgcggcgucauggucuccaugaaggagcccggcugguacuccuucggcuucgagaucaaggacaagaagugcgacguccccugcaucggcaucgagaugguccacgacggcggcaaggagaccuggcacuccgccgccaccgccaucuacugccucaugggcuccggccagcuccucugggacaccgucaccggcgucgacauggcccucuga

SEQ ID NO: 126350 - RNA, 1401 nt, Artificial Sequence
  derived and/or modified CDS sequence (opt2) from neuraminidase__InfluenzaB__AHZ36767
augcuccccuccaccauccagacccucacccucuuccucaccuccggcggcguccuccucucccucuacgucuccgccucccucuccuaccuccucuacuccgacauccuccucaaguucucccccaccgagaucaccgcccccacccgcccccucgacugcgccaacgccuccaacguccaggccgucaaccgcuccgccaccaagggcgucacccuccuccuccccgagcccgaguggaccuacccccgccucuccugccccggcuccaccuuccagaaggcccuccucaucuccccccaccgcuucggcgagaccaagggcaacuccgccccccucaucauccgcgagcccuucaucgccugcggccccaacgagugcaagcacuucgcccucacccacuacgccgcccagcccggcggcuacuacaacggcacccgcggcgaccgcaacaagcuccgccaccucaucuccgucaagcucggcaagauccccaccgucgagaacuccaucuuccacauggccgccugguccggcuccgccugccacgacggcaaggaguggaccuacaucggcgucgacggccccgacaacaacgcccuccucaaggucaaguacggcgaggccuacaccgacaccuaccacuccuacgccaacaagauccuccgcacccaggaguccgccugcaacugcaucggcggcaacugcuaccucaugaucaccgacggcuccgccuccggcgucuccgagugccgcuuccucaagauccgcgagggccgcaucaucaaggagaucuuccccaccggccgcgucaagcacaccgaggagugcaccugcggcuucgccuccaacaagaccaucgagugcgccugccgcgacaaccgcuacaccgccaagcgccccuucgucaagcucaacgucgagaccgacaccgccgagauccgccucaugugcaccgacaccuaccucgacaccccccgccccaacgacggcuccaucaccggccccugcgaguccgacggcgacaagggcuccggcggcaucaagggcggcuucguccaccagcgcaugaaguccaagaucggccgcugguacucccgcaccauguccaagaccgagcgcaugggcaugggccucuacgucaaguacgacggcgaccccugggccgacuccgacgcccucgccuucuccggcgucauggucuccaugaaggagcccggcugguacuccuucggcuucgagaucaaggacaagaagugcgacguccccugcaucggcaucgagaugguccacgacggcggcaaggagaccuggcacuccgccgccaccgccaucuacugccucaugggcuccggccagcuccucugggacaccgucaccggcgucgacauggcccucuga

SEQ ID NO: 126351 - RNA, 1401 nt, Artificial Sequence
  derived and/or modified CDS sequence (opt2) from neuraminidase__InfluenzaB__AHZ36778
augcuccccuccaccauccagacccucacccucuuccucaccuccggcggcguccuccucucccucuacgucuccgccucccucuccuaccuccucuacuccgacauccuccucaaguuccccuccaccgagaucaccgcccccaccaugccccucgacugcgccaacgccuccaacguccaggccgucaaccgcuccgccaccaagggcgucacccuccuccuccccgagcccgaguggaccuacccccgccucuccugccccggcuccaccuuccagaaggcccuccucaucuccccccaccgcuucggcgagaccaagggcaacuccgccccccucaucauccgcgagcccuucaucgccugcggccccaaggagugcaagcacuucgcccucacccacuacgccgcccagcccggcggcuacuacaacggcacccgcggcgaccgcaacaagcuccgccaccucaucuccgucaagcucggcaagauccccaccgucgagaacuccaucuuccacauggccgccugguccggcuccgccugccacgacggcaaggaguggaccuacaucggcgucgacggccccgacaacaacgcccuccucaagaucaaguacggcgaggccuacaccgacaccuaccacuccuacgccaacaacauccuccgcacccaggaguccgccugcaacugcaucggcggcaacugcuaccucaugaucaccgacggcuccgccuccggcgucuccgagugccgcuuccucaagauccgcgagggccgcaucaucaaggagaucuuccccaccggccgcauccagcacaccgaggagugcaccugcggcuucgccuccaacaagaccaucgagugcgccugccgcgacaacuccuacaccgccaagcgccccuucgucaagcucaacgucgagaccgacaccgccgagauccgccucaugugcaccaagaccuaccucgacaccccccgccccgaggacggcuccaucaccggccccugcgaguccaacggcggcaagggcuccggcggcaucaagggcggcuucguccaccagcgcauggccuccaagaucggccgcugguacucccgcaccauguccaagaccgagcgcaagggcaugggccucuacgucaaguacaacggcgaccccugggccgacuccgacgcccucgucuucuccggcgucaugaucuccauggaggagcccggcugguacuccuucggcuucgagaucaaggacaagaagugcgacguccccugcaucggcaucgagaugguccacgacggcggcaaggagaccuggcacuccgccgccaccgccaucuacugccucaugggcuccggccagcuccucugggacaccgucaccggcgucaacaugacccucuga

SEQ ID NO: 126352 - RNA, 1401 nt, Artificial Sequence
  derived and/or modified CDS sequence (opt2) from neuraminidase__InfluenzaB__AHZ36789
augcuccccuccaccauccagacccucacccucuuccucaccuccggcggcguccuccucucccucuacgucuccgccucccucuccuaccuccucuacuccgacauccuccucaaguucucccccaccgagaucaccgcccagaccaugccccucgacugcgccaacgccuccaacguccaggccgucaaccgcuccgccaccaagggcgucacccuccucccccccgagcccgaguggaccuacccccgccucuccugccccggcuccaccuuccagaaggcccuccucaucuccccccaccgcuucggcgagaccaagggcaacuccgccccccucaucauccgcgagcccuucaucgccugcggccccaacgagugcaagcacuucgcccucacccacuacgccgcccagcccggcggcuacuacaacggcacccgcggcgaccgcaacaagcuccgccaccucaucuccgucaagcucggcaagauccccaccgucgagaacuccaucuuccacauggccgccugguccggcuccgccugccacgacggcaaggaguggaccuacaucggcgucgacggccccgacaacaacgcccuccucaaggucaaguacggcgaggccuacaccgacaccuaccacuccuacgccaacaagauccuccgcacccaggaguccgccugcaacugcaucggcggcaacugcuaccucaugaucaccgacggcuccgccuccggcgucuccgagugccgcuuccucaagauccgcgagggccgcaucaucaaggagaucuuccccaccggccgcgucaagcacaccgaggagugcaccugcggcuucgccuccaacaagaccaucgagugcgccugccgcgacaaccgcuacaccgccaagcgccccuucgucaagcucaacgucgagaccgacaccgccgagauccgccucaugugcaccgacaccuaccucgacaccccccgccccaacgacggcuccaucaccggccccugcgaguccgacggcgacaagggcuccggcggcaucaagggcggcuucguccaccagcgcaugaaguccaagaucggccgcugguacucccgcaccauguccaagaccgagcgcaugggcaugggccucuacgucaaguacgacggcgaccccugggccgacuccgacgcccucgccuucuccggcgucauggucuccaugaaggagcccggcugguacuccuucggcuucgagaugaaggacaagaagugcgacguccccugcaucggcaucgagaugguccacgacggcggcaaggagaccuggcacuccgccgccaccgccaucuacugccucaugggcuccggccagcuccucugggacaccgucaccggcgucgacauggcccucuga

SEQ ID NO: 126353 - RNA, 1401 nt, Artificial Sequence; identical to SEQ ID NO: 126352
  derived and/or modified CDS sequence (opt2) from neuraminidase__InfluenzaB__AHZ36800

SEQ ID NO: 126354 - RNA, 1401 nt, Artificial Sequence
  derived and/or modified CDS sequence (opt2) from neuraminidase__InfluenzaB__AHZ36811
augcuccccuccaccauccagacccucacccucuuccucaccuccggcggcguccuccucucccucuacgucuccgccucccucuccuaccuccucuacuccgacauccuccucaaguucucccagaccgagaucaccgcccccaucaugccccucgacugcaccaacgccuccaacguccaggccgucaaccgcuccgccgccaagggcgucacccuccuccuccccgagcccgaguggaccuacccccgccucuccugccccggcuccaccuuccagaaggcccuccucaucuccccccaccgcuucggcgagaucaagggcaacuccgccccccucaucauccgcgagcccuucaucgccugcggccccaccgagugcaagcacuucgcccucacccacuacgccgcccagcccggcggcuacuacaacggcacccgcgaggaccgcaacaagcuccgccaccucaucuccgucaagcucggcaagauccccaccgucgagaacuccaucuuccacauggccgccugguccggcuccgccugccacgacggcaaggaguggaccuacaucggcgucgacggccccgacuccaacgcccuccucaagaucaaguacggcgaggccuacaccgacaccuaccacuccuacgccaagaacauccuccgcacccaggaguccgccugcaacugcaucggcggcgacugcuaccucaugaucaccgacggccccgccuccggcgucuccgagugccgcuuccucaagauccgcgagggccgcaucauccgcgagaucuuccccaccggccgcgucaagcacaccgaggagugcaccugcggcuucgccuccaacaagaccaucgagugcgccugccgcgacaaccgcuacaccgccaagcgccccuucgucaagcucaacgucgagaccgacaccgccgagauccgccucaugugcaccgagaccuaccucgacaccccccgccccaacgacggcuccaucaccggccccugcgaguccgacggcgacaagggcuccggcggcaucaagggcggcuucguccaccagcgcauggccuccaagaucggccgcugguacucccgcaccauguccaagaccaagcgcaugggcaugggccucuacgucaaguacgacggcgaccccuggaccgacuccgaggcccucgcccucuccggcgucauggucuccauggaggagcccggcugguacuccuucggcuucgagaucaaggacaagaagugcgacguccccugcaucggcaucgagaugguccacgacggcggcaagaccaccuggcacuccgccgccaccgccaucuacugccucaugggcuccggccagcuccucugggacaccgucaccggcgucgacauggcccucuga

SEQ ID NO: 126355 - RNA, 1404 nt, Artificial Sequence; identical to SEQ ID NO: 126349
  derived and/or modified CDS sequence (opt2) from neuraminidase__InfluenzaB__AHZ36822

SEQ ID NO: 126356 - RNA, 1401 nt, Artificial Sequence
  derived and/or modified CDS sequence (opt2) from neuraminidase__InfluenzaB__AHZ36833
augcuccccuccaccauccagacccucacccucuuccucaccuccggcggcguccuccucucccucuacgucuccgccucccucuccuaccuccucuacuccgacauccuccucaaguucucccccaccgagaucaccgcccccacccgcccccucgacugcgccaacgccuccaacguccaggccgucaaccgcuccgccaccaagggcgucacccuccuccuccccgagcccgaguggaccuacccccgccucuccugccccggcuccaccuuccagaaggcccuccucaucuccccccaccgcuucggcgagaccaagggcaacuccgccccccucaucauccgcgagcccuucaucgccugcggccccaacgagugcaagcacuucgcccucacccacuacgccgcccagcccggcggcuacuacaacggcacccgcggcgaccgcaacaagcuccgccaccucaucuccgucaagcucggcaagauccccaccgucgagaacuccaucuuccacauggccgccugguccggcuccgccugccacgacggcaaggaguggaccuacaucggcgucgacggccccgacaacaacgcccuccucaaggucaaguacggcgaggccuacaccgacaccuaccacuccuacgccaacaagauccuccgcacccaggaguccgccugcaacugcaucggcggcaacugcuaccucaugaucaccgacggcuccgccuccggcgucuccgagugccgcuuccucaagguccgcgagggccgcaucaucaaggagaucuuccccaccggccgcgucaagcacaccgaggagugcaccugcggcuucgccuccaacaagaccaucgagugcgccugccgcgacaaccgcuacaccgccaagcgccccuucgucaagcucaacgucgagaccgacaccgccgagauccgccucaugugcaccgacaccuaccucgacaccccccgccccaacgacggcuccaucaccggccccugcgaguccgacggcgacaagggcuccggcggcaucaagggcggcuucguccaccagcgcaugaaguccaagaucggccgcugguacucccgcaccauguccaagaccgagcgcaugggcaugggccucuacgucaaguacgacggcgaccccugggccgacuccgacgcccucgccuucuccggcgucauggucuccaugaaggagcccggcugguacuccuucggcuucgagaucaaggacaagaagugcgacguccccugcaucggcaucgagaugguccacgacggcggcaaggagaccuggcacuccgccgccaccgccaucuacugccucaugggcuccggccagcuccucugggacaccgucaccggcgucgacauggcccucuga

SEQ ID NO: 126357 - RNA, 1401 nt, Artificial Sequence
  derived and/or modified CDS sequence (opt2) from neuraminidase__InfluenzaB__AHZ36844
augcuccccuccaccauccagacccucacccucuuccucaccuccggcggcguccuccucucccucuacgucuccgccucccucuccuaccuccucuacuccgacauccuccucaaguucucccccaccgagaucaccgcccccacccgcccccucgacugcgccaacgccuccaacguccaggccgucaaccgcuccgccaccaaggaggucacccuccuccuccccgagcccgaguggaccuacccccgccucuccugccccggcuccaccuuccagaaggcccuccucaucuccccccaccgcuucggcgagaccaagggcaacuccgccccccucaucauccgcgagcccuucaucgccugcggccccaacgagugcaagcacuucgcccucacccacuacgccgcccagcccggcggcuacuacaacggcacccgcggcgaccgcaacaagcuccgccaccucaucuccgucaagcucggcaagauccccaccgucgagaacuccaucuuccacauggccgccugguccggcuccgccugccacgacggcaaggaguggaccuacaucggcgucgacggccccgacaacaacgcccuccucaaggucaaguacggcgaggccuacaccgacaccuaccacuccuacgccaacaagauccuccgcacccaggaguccgccugcaacugcaucggcggcaacugcuaccucaugaucaccgacggcuccgccuccggcgucuccgagugccgcuuccucaagauccgcgagggccgcaucaucaaggagaucuuccccaccggccgcgucaagcacaccgaggagugcaccugcggcuucgccuccaacaagaccaucgagugcgccugccgcgacaaccgcuacaccgccaagcgccccuucgucaagcucaacgucgagaccgacaccgccgagauccgccucaugugcaccgacaccuaccucgacaccccccgccccaacgacggcuccaucaccggccccugcgaguccgacggcgacaagggcuccggcggcaucaagggcggcuucguccaccagcgcaugaaguccaagaucggccgcugguacucccgcaccauguccaagaccgagcgcaugggcaugggccucuacgucaaguacgacggcgaccccugggccgacuccgacgcccucgccuucuccggcgucauggucuccaugaaggagcccggcugguacuccuucggcuucgagaucaaggacaagaagugcgacguccccugcaucggcaucgagaugguccacgacggcggcaaggagaccuggcacuccgccgccaccgccaucuacugccucaugggcuccggccagcuccucugggacaccgucaccggcgucgacauggcccucuga

SEQ ID NO: 126358 - RNA, 1401 nt, Artificial Sequence
  derived and/or modified CDS sequence (opt2) from neuraminidase__InfluenzaB__AHZ36855
augcuccccuccaccauccagacccucacccucuuccucaccuccggcggcguccuccucucccucuacgucuccgccucccucuccuaccuccucuacuccgacauccuccucaaguucucccccaccgagaucaccguccagaccaugccccucgacugcgccaacgccuccaacguccaggccgucaaccgcuccgccaccaagggcgucacccuccucccccccgagcccgaguggaccuacccccgccucuccugccccggcuccaccuuccagaaggcccuccucaucuccccccaccgcuucggcgagaccaagggcaacuccgccccccucaucauccgcgagcccuucaucgccugcggccccaacgagugcaagcacuucgcccucacccacuacgccgcccagcccggcggcuacuacaacggcacccgcggcgaccgcaacaagcuccgccaccucaucuccgucaagcucggcaagauccccaccgucgagaacuccaucuuccacauggccgccugguccggcuccgccugccacgacggcaaggaguggaccuacaucggcgucgacggccccgacaacaacgcccuccucaaggucaaguacggcgaggccuacaccgacaccuaccacuccuacgccaacaagauccuccgcacccaggaguccgccugcaacugcaucggcggcaacugcuaccucaugaucaccgacggcuccgccuccggcgucuccgagugccgcuuccucaagauccgcgagggccgcaucaucaaggagaucuuccccaccggccgcgucaagcacaccgaggagugcaccugcggcuucgccuccaacaagaccaucgagugcgccugccgcgacaaccgcuacaccgccaagcgccccuucgucaagcucaacgucgagaccgacaccgccgagauccgccucaugugcaccgacaccuaccucgacaccccccgccccaacgacggcuccaucaccggccccugcgaguccgacggcgacaagggcuccggcggcaucaagggcggcuucguccaccagcgcaugaaguccaagaucggccgcugguacucccgcaccauguccaagaccgagcgcaugggcaugggccucuacgucaaguacgacggcgaccccugggccgacuccgacgcccucgccuucuccggcgucauggucuccaugaaggagcccggcugguacuccuucggcuucgagaugaaggacaagaagugcgacguccccugcaucggcaucgagaugguccacgacggcggcaaggagaccuggcacuccgccgccaccgccaucuacugccucaugggcuccggccagcuccucugggacaccgucaccggcgucgacauggcccucuga

SEQ ID NO: 126359 - RNA, 1404 nt, Artificial Sequence; identical to SEQ ID NO: 126349
  derived and/or modified CDS sequence (opt2) from neuraminidase__InfluenzaB__AHZ36866

SEQ ID NO: 126360 - RNA, 1401 nt, Artificial Sequence
  derived and/or modified CDS sequence (opt2) from neuraminidase__InfluenzaB__AHZ36877
augcuccccuccaccauccagacccucacccucuuccucaccuccggcggcguccuccucucccucuacgucuccgccucccucuccuaccuccucuacuccgacauccuccucaaguucuccccccccgagaucaccgcccccaccaugccccucgacugcgccaacgccuccaacguccaggccgucaaccgcuccgccaccaagggcgucacccuccuccuccccgagcccgaguggaccuacccccgccucuccugccccggcuccaccuuccagaaggcccuccucaucuccccccaccgcuucggcgagaccaagggcaacuccgccccccucaucauccgcgagcccuucaucgccugcggccccaacgagugcaagcacuucgcccucacccacuacgccgcccagcccggcggcuacuacaacggcacccgcggcgaccgcaacaagcuccgccaccucaucuccgucaagcucggcaagauccccaccgucgagaacuccaucuuccacauggccgccugguccggcuccgccugccacgacggcaaggaguggaccuacaucggcgucgacggccccgacaacaacgcccuccucaaggucaaguacggcgaggccuacaccgacaccuaccacuccuacgccaacaagauccuccgcacccaggaguccgccugcaacugcaucggcggcaacugcuaccucaugaucaccgacggcuccgccuccggcgucuccgagugccgcuuccucaagauccgcgagggccgcaucaucaaggagaucuuccccaccggccgcgucaagcacaccgaggagugcaccugcggcuucgccuccaacaagaccaucgagugcgccugccgcgacaaccgcuacaccgccaagcgccccuucgucaagcucaacgucgagaccgacaccgccgagauccgccucaugugcaccgacaccuaccucgacaccccccgccccaacgacggcuccaucaccggccccugcgaguccgacggcgacaagggcuccggcggcaucaagggcggcuucguccaccagcgcaugaaguccaagaucggccgcugguacucccgcaccauguccaagaccgagcgcaugggcaugggccucuacgucaaguacgacggcgaccccugggccgacuccgacgcccucgccuucuccggcgucauggucuccaugaaggagcccggcugguacuccuucggcuucgagaucaaggacaagaagugcgacguccccugcaucggcaucgagaugguccacgacggcggcaaggagaccuggcacuccgccgccaccgccaucuacugccucaugggcuccggccagcuccucugggacaccgucaccggcgucgacauggcccucuga

SEQ ID NO: 126361 - RNA, 1404 nt, Artificial Sequence; identical to SEQ ID NO: 126349
  derived and/or modified CDS sequence (opt2) from neuraminidase__InfluenzaB__AHZ36888

SEQ ID NO: 126362 - RNA, 1404 nt, Artificial Sequence; identical to SEQ ID NO: 126349
  derived and/or modified CDS sequence (opt2) from neuraminidase__InfluenzaB__AHZ36899

SEQ ID NO: 126363 - RNA, 1404 nt, Artificial Sequence; identical to SEQ ID NO: 126349
  derived and/or modified CDS sequence (opt2) from neuraminidase__InfluenzaB__AHZ36910

SEQ ID NO: 126364 - RNA, 1401 nt, Artificial Sequence; identical to SEQ ID NO: 126351
  derived and/or modified CDS sequence (opt2) from neuraminidase__InfluenzaB__AHZ36921

SEQ ID NO: 126365 - RNA, 1401 nt, Artificial Sequence
  derived and/or modified CDS sequence (opt2) from neuraminidase__InfluenzaB__AHZ36932
augcuccccuccaccauccagacccucacccucuuccucaccuccggcggcguccuccucucccucuacgucuccgccucccucuccuaccuccucuacuccgacauccuccucaaguucucccccaccgagaucaccgcccagaccaugccccucgacugcgccaacgccuccaacguccaggccgucaaccgcuccgccaccaagggcgucacccuccucccccccgagcccgaguggaccuacccccgccucuccugccccggcuccaccuuccagaaggcccuccucaucuccccccaccgcuucggcgagaccaagggcaacuccgccccccucaucauccgcgagcccuucaucgccugcggccccaacgagugcaagcacuucgcccucacccacuacgccgcccagcccggcggcuacuacaacggcacccgcggcgaccgcaacaagcuccgccaccucaucuccgucaagcucggcaagauccccaccgucgagaacuccaucuuccacauggccgccugguccggcuccgccugccacgacggcaaggaguggaccuacaucggcgucgacggccccgacaacaacgcccuccucaaggucaaguacggcgaggccuacaccgacaccuaccacuccuacgccaacaagauccuccgcacccaggaguccgccugcaacugcaucggcggcaacugcuaccucaugaucaccgacggcuccgccuccggcgucuccgagugccgcuuccucaagauccgcgagggccgcaucaucaaggagaucuuccccaccggccgcgucaagcacaccgaggagugcaccugcggcuucgccuccaacaagaccauggagugcgccugccgcgacaaccgcuacaccgccaagcgccccuucgucaagcucaacgucgagaccgacaccgccgagauccgccucaugugcaccgacaccuaccucgacaccccccgccccaacgacggcuccaucaccggccccugcgaguccgacggcgacaagggcuccggcggcaucaagggcggcuucguccaccagcgcaugaaguccaagaucggccgcugguacucccgcaccauguccaagaccgagcgcaugggcaugggccucuacgucaaguacgacggcgaccccugggccgacuccgacgcccucgccuucuccggcgucauggucuccaugaaggagcccggcugguacuccuucggcuucgagaugaaggacaagaagugcgacguccccugcaucggcaucgagaugguccacgacggcggcaaggagaccuggcacuccgccgccaccgccaucuacugccucaugggcuccggccagcuccucugggacaccgucaccggcgucgacauggcccucuga

SEQ ID NO: 126366 - RNA, 1401 nt, Artificial Sequence
  derived and/or modified CDS sequence (opt2) from neuraminidase__InfluenzaB__AHZ36943
augcuccccuccaccauccagacccucacccucuuccucaccuccggcggcguccuccucucccucuacgucuccgccucccucuccuaccuccucuacuccgacauccuccucaaguucucccccaccgagaucaccgcccccaccaugccccucgacugcgccaacgccuccaacguccaggccgucaaccgcuccgccaccaagggcgucacccuccucccccccgagcccgaguggaccuacccccgccucuccugccccggcuccaccuuccagaaggcccuccucaucuccccccaccgcuucggcgagaccaagggcaacuccgccccccucaucauccgcgagcccuucaucgccugcggccccaacgagugcaagcacuucgcccucacccacuacgccgcccagcccggcggcuacuacaacggcacccgcggcgaccgcaacaagcuccgccaccucaucuccgucaagcucggcaagauccccaccgucgagaacuccaucuuccacauggccgccugguccggcuccgccugccacgacggcaaggaguggaccuacaucggcgucgacggccccgacaacaacgcccuccucaaggucaaguacggcgaggccuacaccgacaccuaccacuccuacgccaacaagauccuccgcacccaggaguccgccugcaacugcaucggcggcaacugcuaccucaugaucaccgacggcuccgccuccggcgucuccgagugccgcuuccucaagauccgcgagggccgcaucaucaaggagaucuuccccaccggccgcgucaagcacaccgaggagugcaccugcggcuucgccuccaacaagaccaucgagugcgccugccgcgacaaccgcuacaccgccaagcgccccuucgucaagcucaacgucgagaccgacaccgccgagauccgccucaugugcaccgacaccuaccucgacaccccccgccccaacgacggcuccaucaccggccccugcgaguccgacggcgacaagggcuccggcggcaucaagggcggcuucguccaccagcgcaugaaguccaagaucggccgcugguacucccgcaccauguccaagaccgagcgcaugggcaugggccucuacgucaaguacgacggcgaccccugggccgacuccgacgcccucgccuucuccggcgucauggucuccaugaaggagcccggcugguacuccuucggcuucgagaugaaggaccgcaagugcgacguccccugcaucggcaucgagaugguccacgacggcggcaaggagaccuggcacuccgccgccaccgccaucuacugccucaugggcuccggccagcuccucugggacaccgucaccggcgucgacauggcccucuga

SEQ ID NO: 126367 - RNA, 1404 nt, Artificial Sequence; identical to SEQ ID NO: 126349
  derived and/or modified CDS sequence (opt2) from neuraminidase__InfluenzaB__AHZ36954

SEQ ID NO: 126368 - RNA, 1401 nt, Artificial Sequence
  derived and/or modified CDS sequence (opt2) from neuraminidase__InfluenzaB__AHZ36965
augcuccccuccaccauccagacccucacccucuuccucaccuccggcggcguccuccucucccucuacgucuccgccucccucuccuaccuccucuacuccgacauccuccucaaguucuccccccccgagaucaacgcccccaccaugccccucgacugcgccaacgccuccaacguccaggccgucaaccgcuccgccaccaagggcgucacccuccuccuccccgagcccgaguggaccuacccccgccucuccugccccggcuccaccuuccagaaggcccuccucaucuccccccaccgcuucggcgagaccaagggcaacuccgccccccucaucauccgcgagcccuucaucgccugcggccccaacgagugcaagcacuucgcccucacccacuacgccgcccagcccggcggcuacuacaacggcacccgcggcgaccgcaacaagcuccgccaccucaucuccgucaagcucggcaagauccccaccgucgagaacuccaucuuccacauggccgccugguccggcuccgccugccacgacggcaaggaguggaccuacaucggcgucgacggccccgacaacaacgcccuccucaaggucaaguacggcgaggccuacaccgacaccuaccacuccuacgccaacaagauccuccgcacccaggaguccgccugcaacugcaucggcggcaacugcuaccucaugaucaccgacggcuccgccuccggcgucuccgagugccgcuuccucaagauccgcgagggccgcaucaucaaggagaucuuccccaccggccgcgucaagcacaccgaggagugcaccugcggcuucgccuccaacaagaccaucgagugcgccugccgcgacaaccgcuacaccgccaagcgccccuucgucaagcucaacgucgagaccgacaccgccgagauccgccucaugugcaccgacaccuaccucgacaccccccgccccaacgacggcuccaucaccggccccugcgaguccgacggcgacaagggcuccggcggcaucaagggcggcuucguccaccagcgcaugaaguccaagaucggccgcugguacucccgcaccauguccaagaccgagcgcaugggcaugggccucuacgucaaguacgacggcgaccccugggccgacuccgacgcccucgccuucuccggcgucauggucuccaugaaggagcccggcugguacuccuucggcuucgagaucaaggacaagaagugcgacguccccugcaucggcaucgagaugguccacgacggcggcaaggagaccuggcacuccgccgccaccgccaucuacugccucaugggcuccggccagcuccucugggacaccgucaccggcgucgacauggcccucuga

SEQ ID NO: 126369 - RNA, 1404 nt, Artificial Sequence; identical to SEQ ID NO: 126349
  derived and/or modified CDS sequence (opt2) from neuraminidase__InfluenzaB__AHZ36976

SEQ ID NO: 126370 - RNA, 1404 nt, Artificial Sequence; identical to SEQ ID NO: 126349
  derived and/or modified CDS sequence (opt2) from neuraminidase__InfluenzaB__AHZ36987

SEQ ID NO: 126371 - RNA, 1401 nt, Artificial Sequence; identical to SEQ ID NO: 126352
  derived and/or modified CDS sequence (opt2) from neuraminidase__InfluenzaB__AHZ36998

SEQ ID NO: 126372 - RNA, 1401 nt, Artificial Sequence
  derived and/or modified CDS sequence (opt2) from neuraminidase__InfluenzaB__AHZ37009
augcuccccuccaccauccagacccucacccucuuccucacccucggcggcguccuccucucccucuacgucuccgccucccucuccuaccuccucuacuccgacauccuccucaaguucucccccaccgagaucaccgcccccaccaugccccucggcugcgccaacgccuccaacguccaggccgucaaccgcuccgccaccaagggcgucacccuccuccuccccgagcccgaguggaccuacccccgccucuccugccccggcuccaccuuccagaaggcccuccucaucuccccccaccgcuucggcgagaccaagggcaacuccgccccccucaucauccgcgagcccuucaucgccugcggccccaacgagugcaagcacuucgcccucacccacuacgccgcccagcccggcggcuacuacaacggcacccgcggcgaccgcaacaagcuccgccaccucaucuccgucaagcucggcaagauccccaccgucgagaacuccaucuuccacauggccgccugguccggcuccgccugccacgacggcaaggaguggaccuacaucggcgucgacggccccgacaacaacgcccuccucaaggucaaguacggcgaggccuacaccgacaccuaccacuccuacgccaacaagauccuccgcacccaggaguccgccugcaacugcaucggcggcaacugcuaccucaugaucaccgacggcuccgccuccggcgucuccgagugccgcuuccucaagauccgcgagggccgcaucaucaaggagaucuuccccaccggccgcgucaagcacaccgaggagugcaccugcggcuucgccuccaacaagaccaucgagugcgccugccgcgacaaccgcuacaccgccaagcgccccuucgucaagcucaacgucgaggccgacaccgccgagauccgccucaugugcaccgacaccuaccucgacaccccccgccccaacgacggcuccaucaccggccccugcgaguccgacggcgacaagggcuccggcggcaucaagggcggcuucguccaccagcgcaugaaguccaagaucggccgcugguacucccgcaccauguccaagaccgagcgcaugggcaugggccucuacgucaaguacgacggcgaccccugggccgacuccgacgcccucgccuucuccggcgucauggucuccaugaaggagcccggcugguacuccuucggcuucgagaucaaggacaagaagugcgacguccccugcaucggcaucgagaugguccacgacggcggcaaggagaccuggcacuccgccgccaccgccaucuacugccucaugggcuccggccagcuccucugggacaccgucaccggcgucgacauggcccucuga

SEQ ID NO: 126373 - RNA, 1401 nt, Artificial Sequence; identical to SEQ ID NO: 126350
  derived and/or modified CDS sequence (opt2) from neuraminidase__InfluenzaB__AHZ37020

SEQ ID NO: 126374 - RNA, 1401 nt, Artificial Sequence; identical to SEQ ID NO: 126352
  derived and/or modified CDS sequence (opt2) from neuraminidase__InfluenzaB__AHZ37031

SEQ ID NO: 126375 - RNA, 1401 nt, Artificial Sequence; identical to SEQ ID NO: 126350
  derived and/or modified CDS sequence (opt2) from neuraminidase__InfluenzaB__AHZ37042

SEQ ID NO: 126376 - RNA, 1401 nt, Artificial Sequence; identical to SEQ ID NO: 126352
  derived and/or modified CDS sequence (opt2) from neuraminidase__InfluenzaB__AHZ37064

SEQ ID NO: 126377 - RNA, 1401 nt, Artificial Sequence; identical to SEQ ID NO: 126350
  derived and/or modified CDS sequence (opt2) from neuraminidase__InfluenzaB__AHZ37075

SEQ ID NO: 126378 - RNA, 1401 nt, Artificial Sequence; identical to SEQ ID NO: 126350
  derived and/or modified CDS sequence (opt2) from neuraminidase__InfluenzaB__AHZ37086

SEQ ID NO: 126379 - RNA, 1401 nt, Artificial Sequence
  derived and/or modified CDS sequence (opt2) from neuraminidase__InfluenzaB__AHZ37097
augcuccccuccaccauccagacccucacccucuuccucaccuccggcggcguccuccucucccucuacgucuccgccucccucuccuaccuccucuacuccgacauccuccucaaguucucccccaccgagaucaccgcccccaccaugccccucgacugcgccaacgccuccaacguccaggccgucaaccgcuccgccaccaagggcgucacccuccucccccccgagcccgaguggaccuacccccgccucuccugccccggcuccaccuuccagaaggcccuccucaucuccccccaccgcuucggcgagaccaagggcaacuccgccccccucaucauccgcgagcccuucaucgccugcggccccaacgagugcaagcacuucgcccucacccacuacgccgcccagcccggcggcuacuacaacggcacccgcggcgaccgcaacaagcuccgccaccucaucuccgucaagcucggcaagauccccaccgucgagaacuccaucuuccacauggccgccugguccggcuccgccugccacgacggcaaggaguggaccuacaucggcgucgacggccccgacaacaacgcccuccucaaggucaaguacggcgaggccuacaccgacaccuaccacuccuacgccaacaagauccuccgcacccaggaguccgccugcaacugcaucggcggcaacugcuaccucaugaucaccgacggcuccgccuccggcgucuccgagugccgcuuccucaagauccgcgagggccgcaucaucaaggagaucuuccccaccggccgcgucaagcacaccgaggagugcaccugcggcuucgccuccaacaagaccaucgagugcgccugccgcgacaaccgcuacaccgccaagcgccccuucgucaagcucaacgucgagaccgacaccgccgagauccgccucaugugcaccgacaccuaccucgacaccccccgccccaacgacggcuccaucaccggccccugcgaguccgacggcgacaagggcuccggcggcaucaagggcggcuucguccaccagcgcaugaaguccaagaucggccgcugguacucccgcaccauguccaagaccgagcgcaugggcaugggccucuacgucaaguacgacggcgaccccugggccgacuccgacgcccucgccuucuccggcgucauggucuccaugaaggagcccggcugguacuccuucggcuucgagaugaaggacaagaagugcgacguccccugcaucggcaucgagaugguccacgacggcggcaaggagaccuggcacuccgccgccaccgccaucuacugccucaugggcuccggccagcuccucugggacaccgucaccggcgucgacauggcccucuga

SEQ ID NO: 126380 - RNA, 1401 nt, Artificial Sequence; identical to SEQ ID NO: 126350
  derived and/or modified CDS sequence (opt2) from neuraminidase__InfluenzaB__AHZ37108

SEQ ID NO: 126381 - RNA, 1401 nt, Artificial Sequence
  derived and/or modified CDS sequence (opt2) from neuraminidase__InfluenzaB__AHZ41774
augcuccccuccaccauccagaugcucacccucuuccucaccuccggcggcguccuccucucccucuacgucuccgccucccucuccuaccuccucuacuccgacauccuccucaaguucucccccaccgagaucaccgcccccaccaugccccucgacugcgccaacgccuccaacguccacgccgucaaccgcuccgccaccaagggcgucaccuuccuccuccccgagcccgaguggaccuacccccgccucuccugccccggcuccaccuuccagaaggcccuccucaucuccccccaccgcuucggcgagaccaagggcaacuccgccccccucaucauccgcgagcccuucaucgccugcggcuccaacgagugccgccacuucgcccucacccacuacgccgcccagcccggcggcuacuacaacggcacccgcggcgaccgcaacaagcuccgccaccucaucuccgucaagcucggcaagauccccaccgucgagaacuccaucuuccacauggccgccugguccggcuccgccugccacgacggcaaggaguggaccuacaucggcgucgacggccccgacaacaacgcccuccucaagaucaaguacggcgaggccuacaccgacaccuaccacuccuacgccaacaacauccuccgcacccaggaguccgccugcaacugcaucggcggcaacugcuaccucaugaucaccgacggcuccgccuccggcgucuccgagugccgcuuccucaagauccgcgagggccgcaucaucaaggagaucuuccccaccggccgcgucaagcacaccgaggagugcaccugcggcuucgccuccaacaagaccaucgagugcgccugccgcgacaacuccuacaccgccaagcgccccuucgucaagcucaacgucgagaccgacaccgccgagauccgccucaugugcaccgacaccuaccucgacaccccccgccccgacgacggcuccaucaccggccccugcgaguccaacggcgacaagggcuccggcggcaucaagggcggcuucguccaccagcgcauggccuccaagaucggccgcugguacucccgcaccauguccaagaccgagcgcaagggcaugggccucuacgucaaguacgacggcgaccccuggaccgacaacgacgcccucgccuuccgcggcgucauggucuccaugaaggagcccggcugguacuccuucggcuucgagaucaaggacaagaagugcgacguccccugcaucggcaucgagaugguccacgacggcggcaaggagaccuggcacuccgccgccaccgccaucuacugccucaugggcuccggccagcuccucugggacaccgucaccggcgucgacauggcccucuga

SEQ ID NO: 126382 - RNA, 1401 nt, Artificial Sequence; identical to SEQ ID NO: 124992
  derived and/or modified CDS sequence (opt2) from neuraminidase__InfluenzaB__AHZ41785

SEQ ID NO: 126383 - RNA, 1401 nt, Artificial Sequence; identical to SEQ ID NO: 124992
  derived and/or modified CDS sequence (opt2) from neuraminidase__InfluenzaB__AHZ41796

SEQ ID NO: 126384 - RNA, 1401 nt, Artificial Sequence
  derived and/or modified CDS sequence (opt2) from neuraminidase__InfluenzaB__AHZ41807
augcuccccuccaccauccagaugcucacccucuuccucaccuccggcggcguccuccucucccucuacgucuccgccucccucuccuaccuccucuacuccgacauccuccucaaguucucccccaccgagaucaccgcccccaccaugccccucgacugcgccaacgccuccaacguccacgccgucaaccgcuccgccaccaagggcgucaccuuccuccuccccgagcccgaguggaccuacccccgccucuccugccccggcuccaccuuccagaaggcccuccucaucuccccccaccgcuucggcgagaccaagggcaacuccgccccccucaucauccgcgagcccuucaucgccugcggccccaacgagugcaagcacuucgcccucacccacuacgccgcccagcccggcggcuacuacaacggcacccgcggcgaccgcaacaagcuccgccaccucaucuccgucaagcucggcaagauccccaccgucgagaacuccaucuuccacauggccgccugguccggcuccgccugccacgacggcaaggaguggaccuacaucggcgucgacggccccgacaacaacgcccuccucaagaucaaguacggcgaggccuacaccgacaccuaccacuccuacgccaacaacauccuccgcacccaggaguccgccugcaacugcaucgagggcaacugcuaccucaugaucaccgacggcuccgccuccggcgucuccgagugccgcuuccucaagauccgcgagggccgcaucaucaaggagaucuuccccaccggccgcgucaagcacaccgaggagugcaccugcggcuucgccuccaacaagaccaucgagugcgccugccgcgacaacuccuacaccgccaagcgccccuucgucaagcucaacgucgagaccgacaccgccgagauccgccucaugugcaccgacaccuaccucgacaccccccgccccgacgacggcuccaucaccggccccugcgaguccaacggcgacaagggcuccggcggcaucaagggcggcuucguccaccagcgcauggccuccaagaucggccgcugguacucccgcaccauguccaagaccgagcgcaagggcaugggccucuacgucaaguacgacggcgaccccuggaccgacuccgacgcccucgccuuccgcggcgucauggucuccaugaaggagcccggcugguacuccuucggcuucgagaucaaggacaagaagugcgacguccccugcaucggcaucgagaugguccacgacggcggcaaggagaccuggcacuccgccgccaccgccaucuacugccucaugggcuccggccagcuccucugggacaccgucaccggcgucgacauggcccucuga

SEQ ID NO: 126385 - RNA, 1401 nt, Artificial Sequence
  derived and/or modified CDS sequence (opt2) from neuraminidase__InfluenzaB__AHZ41818
augcuccccuccaccauccagacccucacccucuuccucaccuccggcggcguccuccucucccucuacgucuccgccucccucuccuaccuccucuacuccgacauccuccucaaguucucccccaccgagaucaccgcccccaccaugccccucgacugcgccaacgccuccaacguccaggccgucaaccgcuccgccaccaagggcgucacccuccuccuccccgagcccgaguggaccuacccccgccucuccugccccggcuccaccuuccagaaggcccuccucaucuccccccaccgcuucggcgagaccaagggcaacuccgccccccucaucauccgcgagcccuucaucgccugcggccccaacgagugcaagcacuucgcccucacccacuacgccgcccagcccggcggcuacuacaacggcacccgcggcgaccgcaacaagcuccgccaccucaucuccgucaagcucggcaagauccccaccgucgagaacuccaucuuccacauggccgccugguccggcuccgccugccacgacggcaaggaguggaccuacaucggcgucgacggccccgacaacaacgcccuccucaaggucaaguacggcgaggccuacaccgacaccuaccacuccuacgccaacaagauccuccgcacccaggaguccgccugcaacugcaucggcggcaacugcuaccucauggucaccgacggcuccgccuccggcgucuccgagugccgcuuccucaagauccgcgagggccgcaucaucaaggagaucuuccccaccggccgcgucaagcacaccgaggagugcaccugcggcuucgccuccaacaagaccaucgagugcgccugccgcgacaacuccuacaccgccaagcgccccuucgucaagcucaacgucgagaccgacaccgccgagauccgccucaugugcaccgacaccuaccucgacaccccccgccccgacgacggcuccaucaccggccccugcgaguccaacggcgacaagggcuccggcggcaucaagggcggcuucguccaccagcgcauggaguccaagaucggccgcugguacucccgcaccauguccaagaccgagcgcaugggcaugggccucuacgucaaguacgacggcgaccccugggccgacuccgacgcccucgucuucuccggcgucauggucuccaugaaggagcccggcugguacuccuucggcuucgagaucaaggacaagaagugcgacguccccugcaucggcaucgagaugguccacgacggcggcaaggagaccuggcacuccgccgccaccgccaucuacugccucaugggcuccggccagcuccucugggacaccgucaccggcgucaacauggcccucuga

SEQ ID NO: 126386 - RNA, 1401 nt, Artificial Sequence; identical to SEQ ID NO: 124992
  derived and/or modified CDS sequence (opt2) from neuraminidase__InfluenzaB__AHZ41829

SEQ ID NO: 126387 - RNA, 1401 nt, Artificial Sequence
  derived and/or modified CDS sequence (opt2) from neuraminidase__InfluenzaB__AHZ41840
augcuccccuccaccauccagaugcucacccucuuccucaccuccggcggcguccuccucucccucuacgucuccgccucccucuccuaccuccucuacuccgacauccuccucaaguucucccccaccgagaucaccgcccccaccaugccccucgacugcgccaacgccuccaacguccacgccgucaaccgcuccgccaccaagggcgucaccuuccuccuccccgagcccgaguggaccuacccccgccucuccugccccggcuccaccuuccagaaggcccuccucaucuccccccaccgcuucggcgagaccaagggcaacuccgccccccucaucauccgcgagcccuucaucgccugcggccccaacgagugccgccacuucgcccucacccacuacgccgcccagcccggcggcuacuacaacggcacccgcggcgaccgcaacaagcuccgccaccucaucuccgucaagcucggcaagauccccaccgucgagaacuccaucuuccacauggccgccugguccggcuccgccugccacgacggcaaggaguggaccuacaucggcgucgacggccccgacaacaacgcccuccucaagaucaaguacggcgaggccuacaccgacaccuaccacuccuacgccaacaacauccuccgcacccaggaguccgccugcaacugcaucggcggcaacugcuaccucaugaucaccgacggcuccgccuccggcgucuccgagugccgcuuccucaagauccgcgagggccgcaucaucaaggagaucuuccccaccggccgcgucaagcacaccgaggagugcaccugcggcuucgccuccaacaagaccaucgagugcgccugccgcgacaacuccuacaccgccaagcgccccuucgucaagcucaacgucgagaccgacaccgccgagauccgccucaugugcaccgacaccuaccucgacaccccccgccccgacgacggcuccaucaccggccccugcgaguccaacggcgacaagggcuccggcggcaucaagggcggcuucguccaccagcgcauggccuccaagaucggccgcugguacucccgcaccauguccaagaccgagcgcaagggcaugggccucuacgucaaguacgacggcgaccccuggaccgacuccgacgcccucgccuuccgcggcgucauggucuccaugaaggagcccggcugguacuccuucggcuucgagaucaaggacaagaagugcgacguccccugcaucggcaucgagaugguccacgacggcggcaaggagaccuggcacuccgccgccaccgccaucuacugccucaugggcuccggccagcuccucugggacaccgucaccggcgucgacauggcccucuga

SEQ ID NO: 126388 - RNA, 1401 nt, Artificial Sequence; identical to SEQ ID NO: 124992
  derived and/or modified CDS sequence (opt2) from neuraminidase__InfluenzaB__AHZ41851

SEQ ID NO: 126389 - RNA, 1401 nt, Artificial Sequence; identical to SEQ ID NO: 126238
  derived and/or modified CDS sequence (opt2) from neuraminidase__InfluenzaB__AHZ41862

SEQ ID NO: 126390 - RNA, 1401 nt, Artificial Sequence
  derived and/or modified CDS sequence (opt2) from neuraminidase__InfluenzaB__AHZ41873
augcuccccuccaccauccagacccucacccucuuccucaccuccggcggcguccuccucucccucuacgucuccgccucccucuccuaccuccucuacuccgacauccuccucaaguucucccccaccgagaucaccgcccccaccaugccccucgacugcgccaacgccuccaacgcccaggccgucaaccgcuccgccaccaagggcgucacccuccuccuccccgagcccgaguggaccuacccccgccucuccugccccggcuccaccuuccagaaggcccuccucaucuccccccaccgcuucggcgagaccaagggcaacuccgccccccucaucauccgcgagcccuucaucgccugcggccccaacgagugcaagcacuucgcccucacccacuacgccgcccagcccggcggcuacuacaacggcacccgcggcgaccgcaacaagcuccgccaccucaucuccgucaagcucggcaagauccccaccgucgagaacuccaucuuccacauggccgccugguccggcuccgccugccacgacggcaaggaguggaccuacaucggcgucgacggccccgacaacaacgcccuccucaaggucaaguacggcgaggccuacaccgacaccuaccacuccuacgccaacaagauccuccgcacccaggaguccgccugcaacugcaucggcggcaacugcuaccucaugaucaccgacggcuccgccuccggcgucuccgagugccgcuuccucaagauccgcgagggccgcaucaucaaggagaucuuccccaccggccgcgucaagcacaccgaggagugcaccugcggcuucgccuccaacaagaccaucgagugcgccugccgcgacaaccgcuacaccgccaagcgccccuucgucaagcucaacgucgagaccgacaccgccgagauccgccucaugugcaccgacaccuaccucgacaccccccgccccaacgacggcuccaucaccggccccugcgaguccgacggcgacaagggcuccggcggcaucaagggcggcuucguccaccagcgcaugaaguccaagaucggccgcugguacucccgcaccauguccaagaccgagcgcaugggcaugggccucuacgucaaguacgacggcgaccccugggccgacuccgacgcccucaccuucuccggcgucauggucuccaugaaggagcccggcugguacuccuucggcuucgagaucaaggacaagaagugcgacguccccugcaucggcaucgagaugguccacgacggcggcaaggagaccuggcacuccgccgccaccgccaucuacugccucaugggcuccggccagcuccucugggacaccgucaccggcgucgacauggcccucuga

SEQ ID NO: 126391 - RNA, 1401 nt, Artificial Sequence; identical to SEQ ID NO: 124828
  derived and/or modified CDS sequence (opt2) from neuraminidase__InfluenzaB__AIL94981

SEQ ID NO: 126392 - RNA, 1401 nt, Artificial Sequence; identical to SEQ ID NO: 124828
  derived and/or modified CDS sequence (opt2) from neuraminidase__InfluenzaB__AIL94992

SEQ ID NO: 126393 - RNA, 1401 nt, Artificial Sequence; identical to SEQ ID NO: 124853
  derived and/or modified CDS sequence (opt2) from neuraminidase__InfluenzaB__AIL95003

SEQ ID NO: 126394 - RNA, 1401 nt, Artificial Sequence
  derived and/or modified CDS sequence (opt2) from neuraminidase__InfluenzaB__AIL95014
augcuccccuccaccauccagacccucacccucuuccucaccuccggcggcguccuccucucccucuacgucuccgccucccucuccuaccuccucuacuccgacauccuccucaaguucucccagaccgagaucaccgcccccaucaugccccucgacugcgccaacgccuccaacguccaggccgucaaccgcuccgccgccaagggcgucacccuccuccuccccgagcccgaguggaccuacccccgccucuccugccccggcuccaccuuccagaaggcccuccucaucuccccccaccgcuucggcgagaccaagggcaacuccgccccccucaucauccgcgagcccuucaucgccugcggccccaccgagugcaagcacuucgcccucacccacuacgccgcccagcccggcggcuacuacaacggcacccgcgaggaccgcaacaagcuccgccaccucaucuccgucaagcucggcaagauccccaccgucgagaacuccaucuuccacauggccgccugguccggcuccgccugccacgacggcaaggaguggaccuacaucggcgucgacggccccgacuccaacgcccuccucaagaucaaguacggcgaggccuacaccgacaccuaccacuccuacgccaagaacauccuccgcacccaggaguccgccugcaacugcaucggcggcgacugcuaccucaugaucaccgacggccccgccuccggcgucuccgagugccgcuuccucaagauccgcgagggccgcaucaucaaggagaucuuccccaccggccgcgucaagcacaccgaggagugcaccugcggcuucgccuccaacaagaccaucgagugcgccugccgcgacaacuccuacaccgccaagcgccccuucgucaagcucaacgucgagaccgacaccgccgagauccgccucaugugcaccgagaccuaccucgacaccccccgccccaacgacggcuccaucaccggccccugcgaguccgacggcgacaagggcuccggcggcaucaagggcggcuucguccaccagcgcauggccuccaagaucggccgcugguacucccgcaccauguccaagaccaagcgcaugggcaugggccucuacgucaaguacgacggcgaccccuggaccgacuccgaggcccucgcccucuccggcgucauggucuccauggaggagcccggcugguacuccuucggcuucgagaucaaggacaagaagugcgacguccccugcaucggcaucgagaugguccacgacggcggcaagaccaccuggcacuccgccgccaccgccaucuacugccucaugggcuccggccagcuccucugggacaccgucaccggcgucgacaugacccucuga

SEQ ID NO: 126395 - RNA, 1401 nt, Artificial Sequence; identical to SEQ ID NO: 124853
  derived and/or modified CDS sequence (opt2) from neuraminidase__InfluenzaB__AIL95025

SEQ ID NO: 126396 - RNA, 1401 nt, Artificial Sequence
  derived and/or modified CDS sequence (opt2) from neuraminidase__InfluenzaB__AIL95036
augcucuccuccaccauccagacccucacccucuuccucaccuccggcggcguccuccucucccucuacgucuccgccucccucuccuaccuccucuacuccgacauccuccucaaguucucccccaaggagaucaccgcccccaccaugccccucgacugcgccaacgccuccaacguccaggccgucaaccacuccgccaccaagggcgucacccuccuccuccccgagcccgaguggaccuacccccgccucuccugccccggcuccaccuuccagaaggcccuccucaucuccccccaccgcuucggcgagaccaagggcaacuccgccccccucaucauccgcgagcccuucaucgccugcggccccaacgagugcaagcacuucgcccucacccacuacgccgcccagcccggcggcuacuacaacggcacccgcggcgaccgcaacaagcuccgccaccucaucuccgucaagcucggcaagauccccaccgucgagaacuccaucuuccacauggccgccugguccggcuccgccugccacgacggcaaggaguggaccuacaucggcgucgacggccccgacaacaacgcccuccucaaggucaaguacggcgaggccuacaccgacaccuaccacuccuacgccaacaagauccuccgcacccaggaguccgccugcaacugcaucggcggcaacugcuaccucaugaucaccgacggcuccgccuccggcgucuccgagugccgcuuccucaagauccgcgagggccgcaucaucaaggagaucuuccccaccggccgcgucaagcacaccgaggagugcaccugcggcuucgccuccaacaagaccaucgagugcgccugccgcgacaacuccuacaccgccaagcgccccuucgucaagcucaacgucgagaccgacaccgccgagauccgccucaugugcaccgacaccuaccucgacaccccccgccccgacgacggcuccaucaccggccccugcgaguccaacggcgacaagggcuccggcggcaucaagggcggcuucguccaccagcgcauggaguccaagaucggccgcugguacucccgcaccauguccaagaccgagcgcaugggcaugggccucuacgucaaguacgacggcgaccccugggccgacuccgacgcccucgccuucuccggcgucauggucuccaugaaggagcccggcugguacuccuucggcuucgagaucaaggacaagaagugcgacguccccugcaucggcaucgagaugguccacgacggcggcaaggagaccuggcacuccgccgccaccgccaucuacugccucaugggcuccggccagcuccucugggacaccgucaccggcgucgacauggcccucuga

SEQ ID NO: 126397 - RNA, 1401 nt, Artificial Sequence; identical to SEQ ID NO: 124853
  derived and/or modified CDS sequence (opt2) from neuraminidase__InfluenzaB__AIL95047

SEQ ID NO: 126398 - RNA, 1401 nt, Artificial Sequence; identical to SEQ ID NO: 124962
  derived and/or modified CDS sequence (opt2) from neuraminidase__InfluenzaB__AIL95058

SEQ ID NO: 126399 - RNA, 1401 nt, Artificial Sequence; identical to SEQ ID NO: 124911
  derived and/or modified CDS sequence (opt2) from neuraminidase__InfluenzaB__AIL95069

SEQ ID NO: 126400 - RNA, 1401 nt, Artificial Sequence
  derived and/or modified CDS sequence (opt2) from neuraminidase__InfluenzaB__AIL95080
augcuccccuccaccauccagacccucacccucuuccucaccuccggcggcguccuccucucccucuacgucuccgccucccucuccuaccuccucuacuccgacauccuccucaaguucucccccaaggagaucaccgcccccaccaugccccucgacugcgccaacgccuccaacguccaggccgucaaccacuccgccaccaagggcgucacccuccuccuccccgagcccgaguggaccuacccccgccucuccugccccggcuccaccuuccagaaggcccuccucaucuccccccaccgcuucggcgagaccaagggcaacuccgccccccucaucauccgcgagcccuucaucgccugcggccccaacgagugcaagcacuucgcccucacccacuacgccgcccagcccggcggcuacuacaacggcacccgcggcgaccgcaacaagcuccgccaccucaucuccgucaagcucggcaagauccccaccgucgagaacuccaucuuccacauggccgccugguccggcuccgccugcaacgacggcaaggaguggaccuacaucggcgucgacggccccgacaacaacgcccuccucaaggucaaguacggcgaggccuacaccgacaccuaccacuccuacgccaacaagauccuccgcacccaggaguccgccugcaacugcaucggcggcaacugcuaccucaugaucaccgacggcuccgccuccggcgucuccgagugccgcuuccucaagauccgcgagggccgcaucaucaaggagaucuuccccaccggccgcgucaagcacaccgaggagugcaccugcggcuucgccuccaacaagaccaucgagugcgccugccgcgacaacuccuacaccgccaagcgccccuucgucaagcucaacgucgagaccgacaccgccgagauccgccucaugugcaccgacaccuaccucgacaccccccgccccgacgacggcuccaucaccggccccugcgaguccaacggcgacaagggcuccggcggcaucaagggcggcuucguccaccagcgcauggaguccaagaucggccgcugguacucccgcaccauguccaagaccgagcgcaugggcaugggccucuacgucaaguacgacggcgaccccugggccgacuccgacgcccucgccuucuccggcgucauggucuccaugaaggagcccggcugguacuccuucggcuucgagaucaaggacaagaagugcgacguccccugcaucggcaucgagaugguccacgacggcggcaaggagaccuggcacuccgccgccaccgccaucuacugccucaugggcuccggccagcuccucugggacaccgucaccggcgucgacauggcccucuga

SEQ ID NO: 126401 - RNA, 1401 nt, Artificial Sequence; identical to SEQ ID NO: 124911
  derived and/or modified CDS sequence (opt2) from neuraminidase__InfluenzaB__AIL95091

SEQ ID NO: 126402 - RNA, 1401 nt, Artificial Sequence; identical to SEQ ID NO: 124853
  derived and/or modified CDS sequence (opt2) from neuraminidase__InfluenzaB__AIL95102

SEQ ID NO: 126403 - RNA, 1401 nt, Artificial Sequence
  derived and/or modified CDS sequence (opt2) from neuraminidase__InfluenzaB__AIL95113
augcuccccuccaccauccagacccucacccucuuccucaccuccggcggcguccuccucucccucuacgucuccgccucccucuccuaccuccucuacuccgacauccuccucaaguucucccccaccggcaucaccgcccccaccaugccccucgacugcgccaacgccuccaacguccaggccgucaaccgcuccgccaccaagggcgucacccuccucccccccgagcccgaguggaccuacccccgccucuccugccccggcuccaccuuccagaaggcccuccucaucuccccccaccgcuucggcgagaccaagggcaacuccgccccccucaucauccgcgagcccuucaucgccugcggccccaacgagugcaagcacuucgcccucacccacuacgccgcccagcccggcggcuacuacaacggcacccgcggcgaccgcaacaagcuccgccaccucaucuccgucaagcucggcaagauccccaccgucgagaacuccaucuuccacauggccgccugguccggcuccgccugccacgacggcaaggaguggaccuacaucggcgucgacggccccgacaacaacgcccuccucaaggucaaguacggcgaggccuacaccgacaccuaccacuccuacgccaacaagauccuccgcacccaggaguccgccugcaacugcaucggcggcaacugcuaccucaugaucaccgacggcuccgccuccggcgucuccgagugccgcuuccucaagauccgcgagggccgcaucaucaaggagaucuuccccaccggccgcgucaagcacaccgaggagugcaccugcggcuucgccuccaacaagaccaucgagugcgccugccgcgacaaccgcuacaccgccaagcgccccuucgucaagcucaacgucgagaccgacaccgccgagauccgccucaugugcaccgacaccuaccucgacaccccccgccccaacgacggcuccaucaccggccccugcgaguccgacggcgacaagggcuccggcggcaucaagggcggcuucguccaccagcgcaugaaguccaagaucggccgcugguacucccgcaccauguccaagaccgagcgcaugggcaugggccucuacgucaaguacgacggcgaccccugggccgacuccgacgcccucgccuucuccggcgucauggucuccaugaaggagcccggcugguacuccuucggcuucgagaugaaggacaagaagugcgacguccccugcaucggcaucgagaugguccacgacggcggcaaggagaccuggcacuccgccgccaccgccaucuacugccucaugggcuccggccagcuccucugggacaccgucaccggcgucgacauggcccucuga

SEQ ID NO: 126404 - RNA, 1401 nt, Artificial Sequence; identical to SEQ ID NO: 126350
  derived and/or modified CDS sequence (opt2) from neuraminidase__InfluenzaB__AIL95124

SEQ ID NO: 126405 - RNA, 1401 nt, Artificial Sequence
  derived and/or modified CDS sequence (opt2) from neuraminidase__InfluenzaB__AKA54777
augcuccccuccaccauccagacccucacccucuuccucaccuccggcggcguccuccucucccucuacgucuccgccucccucuccuaccuccucuacuccgacauccuccucaaguucucccgcaccgaggucaccgcccccaucaugccccucgacugcgccaacgccuccaacguccaggccgucaaccgcuccgccaccaagggcgucaccccccuccuccccgagcccgaguggaccuacccccgccucuccugccccggcuccaccuuccagaaggcccuccucaucuccccccaccgcuucggcgagaccaagggcaacuccgccccccucaucauccgcgagcccuucaucgccugcggccccaaggagugcaagcacuucgcccucacccacuacgccgcccagcccggcggcuacuacaacggcacccgcgaggaccgcaacaagcuccgccaccucaucuccgucaagcucggcaagauccccaccgucgagaacuccaucuuccacauggccgccugguccggcuccgccugccacgacggccgcgaguggaccuacaucggcgucgacggccccgacuccaacgcccuccucaagaucaaguacggcgaggccuacaccgacaccuaccacuccuacgccaagaacauccuccgcacccaggaguccgccugcaacugcaucggcggcgacugcuaccucaugaucaccgacggccccgccuccggcaucuccgagugccgcuuccucaagauccgcgagggccgcaucaucaaggagaucuuccccaccggccgcgucaagcacaccgaggagugcaccugcggcuucgccuccaacaagaccaucgagugcgccugccgcgacaacuccuacaccgccaagcgccccuucgucaagcucaacgucgagaccgacaccgccgagauccgccucaugugcaccaagaccuaccucgacaccccccgccccaacgacggcuccaucaccggccccugcgaguccgacggcgacgagggcuccggcggcaucaagggcggcuucguccaccagcgcauggccuccaagaccggccgcugguacucccgcaccauguccaagaccaagcgcaugggcaugggccucuacgucaaguacgacggcgaccccuggaccgacuccgaggcccucgcccucuccggcgucauggucuccauggaggagcccggcugguacuccuucggcuucgagaucaaggacaagaagugcgacguccccugcaucggcaucgagaugguccacgacggcggcaagaccaccuggcacuccgccgccaccgccaucuacugccucaugggcuccggccagcuccucugggacaccgucaccggcgucaacaugacccucuga

SEQ ID NO: 126406 - RNA, 1401 nt, Artificial Sequence
  derived and/or modified CDS sequence (opt2) from neuraminidase__InfluenzaB__AKA54781
augcuccccuccaccauccagacccucacccucuuccucaccuccggcggcguccuccucucccucuacgucuccgccucccucuccuaccuccucuaccucgacauccuccucaaguuccccuccaccgagaucaccgcccccaccaugccccucgacugcgccaacgccuccaacguccaggccgucaaccgcuccgccaccaagggcgucaccuuccuccuccccgagcccgaguggaccuacccccgccucuccugccccggcuccaccuuccagaaggcccuccucaucuccccccaccgcuucggcgagaccaagggcaacuccgccccccucaucauccgcgagcccuucaucgccugcggccccaaggagugcaagcacuucgcccucacccacuacgccgcccagcccggcggcuacuacaacggcacccgcggcgaccgcaacaagcuccgccaccucaucuccgucaagcucggcaagauccccaccgucgagaacuccaucuuccacauggccgccugguccggcuccgccugccacgacggcaaggaguggaccuacaucggcgucgacggccccgacaacaacgcccuccucaagaucaaguacggcgaggccuacaccgacaccuaccacuccuacgccaacaacauccuccgcacccaggaguccgccugcaacugcaucggcggcaacugcuaccucaugaucaccgacggcuccgccuccggcgucuccgagugccgcuuccucaagauccgcgagggccgcaucaugaaggagaucuuccccaccggccgcacccagcacaccgaggagugcaccugcggcuucgccuccaacaagaccaucgagugcgucugccgcgacaacuccuacaccgccaagcgccccuucgucaagcucaacgucgagaccgacaccgccgagauccgccucaugugcaccaagaccuaccucgacaccccccgccccgacgacggcuccaucaccggccccugcgaguccaacggcggcaagggcuccggcggcaucaagggcggcuucguccaccagcgcauggccuccaagaucggccgcugguacucccgcaccauguccaagaccgagcgcaagggcaugggccucuacgucaaguacaacggcgaccccugggccgacuccgacgcccucaccuucuccggcgucauggucuccauggaggagcccggcugguacuccuucggcuucgagaucaaggacaagaagugcgacguccccugcaucggcaucgagaugguccacgacggcggcaaggagaccuggcacuccgccgccaccgccaucuacugccucaugggcuccggccagcuccucugggacaccgucaccggcgucaacaugacccucuga

SEQ ID NO: 126407 - RNA, 1401 nt, Artificial Sequence
  derived and/or modified CDS sequence (opt2) from neuraminidase__InfluenzaB__AKA54783
augcuccccuccaccauccagacccucacccucuuccucaccuccggcggcguccuccucucccucuacgucuccgccucccucuccuaccuccucuacuccgacauccuccucaaguucucccgcaccgaggucaccgcccccaucaugccccucgacugcgccaacgccuccaacguccaggccgucaaccgcuccgccaccaagggcgucaccccccucuuccccgagcccgaguggaccuacccccgccucuccugccccggcuccaccuuccagaaggcccuccucaucuccccccaccgcuucggcgagaccaagggcaacuccgccccccucaucauccgcgagcccuucaucgccugcggccccaaggagugcaagcacuucgcccucacccacuacgccgcccagcccggcggcuacuacaacggcacccgcgaggaccgcaacaagcuccgccaccucaucuccgucaagcucggcaagauccccaccgucgagaacuccaucuuccacauggccgccugguccggcuccgccugccacgacggccgcgaguggaccuacaucggcgucgacggccccgacuccaacgcccuccucaagaucaaguacggcgaggccuacaccgacaccuaccacuccuacgccaagaacauccuccgcacccaggaguccgccugcaacugcaucggcggcgacugcuaccucaugaucaccgacggccccgccuccggcaucuccgagugccgcuuccucaagauccgcgagggccgcaucaucaaggagaucuuccccaccggccgcgucaagcacaccgaggagugcaccugcggcuucgccuccaacaagaccaucgagugcgccugccgcgacaacuccuacaccgccaagcgccccuucgucaagcucaacgucgagaccgacaccgccgagauccgccucaugugcaccaagaccuaccucgacaccccccgccccaacgacggcuccaucaccggccccugcgaguccgacggcgacgagggcuccggcggcaucaagggcggcuucguccaccagcgcauggccuccaagaucggccgcugguacucccgcaccauguccaagaccaagcgcaugggcaugggccucuacgucaaguacgacggcgaccccuggaccgacuccgaggcccucgcccucuccggcgucauggucuccauggaggagcccggcugguacuccuucggcuucgagaucaaggacaagaagugcgacguccccugcaucggcaucgagaugguccacgacggcggcaagaccaccuggcacuccgccgccaccgccaucuacugccucaugggcuccggccagcuccucugggacaccgucaccggcgucaacaugacccucuga

SEQ ID NO: 126408 - RNA, 1401 nt, Artificial Sequence
  derived and/or modified CDS sequence (opt2) from neuraminidase__InfluenzaB__AKA54785
augcuccccuccaccauccagacccucacccucuuccucaccuccggcggcguccuccucucccucuacgucuccgccucccucuccuaccuccucuacuccgacauccuccucaaguucucccgcaccgaggucaccgcccccaucaugccccucgacugcgccaacgccuccaacguccaggccgucaaccgcuccgccaccaagggcgucaccccccuccuccccgagcccgaguggaccuacccccgccucuccugccccggcuccaccuuccagaaggcccuccucaucuccccccaccgcuucggcgagaccaagggcaacuccgccccccucaucauccgcgagcccuucaucgccugcggccccaaggagugcaagcacuucgcccucacccacuacgccgcccagcccggcggcuacuacaacggcacccgcgaggaccgcaacaagcuccgccaccucaucuccgucaagcucggcaagauccccaccgucgagaacuccaucuuccacauggccgccugguccggcuccgccugccacgacggccgcgaguggaccuacaucggcgucgacggccccgacuccaacgcccuccucaagaucaaguacggcgaggccuacaccgacaccuaccacuccuacgccaagaacauccuccgcacccaggaguccgccugcaacugcaucggcggcgacugcuaccucaugaucaccgacggccccgccuccggcaucuccgagugccgcuuccucaagauccgcgagggccgcaucaucaaggagaucuuccccaccggccgcgucaagcacaccgaggagugcaccugcggcuucgccuccaacaagaccaucgagugcgccugccgcgacaacuccuacaccgccaagcgccccuucgucaagcucaacgucgagaccgacaccgccgagauccgccucaugugcaccaagaccuaccucgacaccccccgccccaacgacggcuccaucaccggccccugcgaguccgacggcaacgagggcuccggcggcaucaagggcggcuucguccaccagcgcauggccuccaagaucggccgcugguacucccgcaccauguccaagaccaagcgcaugggcaugggccucuacgucaaguacgacggcgaccccuggaccgacuccgaggcccucgcccucuccggcgucauggucuccauggaggagcccggcugguacuccuucggcuucgagaucaaggacaagaagugcgacguccccugcaucggcaucgagaugguccacgacggcggcaagaccaccuggcacuccgccgccaccgccaucuacugccucaugggcuccggccagcuccucugggacaccgucaccggcgucaacaugacccucuga

SEQ ID NO: 126409 - RNA, 1401 nt, Artificial Sequence
  derived and/or modified CDS sequence (opt2) from neuraminidase__InfluenzaB__AKA54787
augcuccccuccaccauccagacccucacccucuuccucaccuccggcggcguccuccucucccucuacgucuccgccucccucuccuaccuccucuacuccgacauccuccucaaguucucccagaccgagaucaccgcccccaucaugccccucgacugcgccaacgccuccaacguccaggccgucaaccacuccgccgccaagggcgucacccuccuccuccccgagcccgaguggaccuacccccgccucuccugccccggcuccaccuuccagaaggcccuccucaucuccccccaccgcuucggcgagaucaagggcaacuccgccccccucaucauccgcgagcccuucaucgccugcggccccaccgagugcaagcacuucgcccucacccacuacgccgcccagcccggcggcuacuacaacggcacccgcgaggaccgcaacaagcuccgccaccucaucuccgucaagcucggcaagauccccaccgucgagaacuccaucuuccacauggccgccugguccggcuccgccugccacgacggcaaggaguggaccuacaucggcgucgacggccccgacuccaacgcccuccucaagaucaaguacggcgaggccuacaccgacaccuaccacuccuacgccaagaacauccuccgcacccaggaguccgccugcaacugcaucggcggcgacugcuaccucaugaucaccgacggccccgccuccggcgucuccgagugccgcuuccucaagauccgcgagggccgcaucaucaaggagaucuuccccaccggccgcgucaagcacaccgaggagugcaccugcggcuucgccuccaacaagaccaucgagugcgccugccgcgacaaccgcuacaccgccaagcgccccuucgucaagcucaacgucgagaccgacaccgccgagauccgccucaugugcaccgagaccuaccucgacaccccccgccccaacgacggcuccaucaccggccccugcgaguccgacggcgacaagggcuccggcggcaucaagggcggcuucguccaccagcgcauggccuccaagaucggccgcugguacucccgcaccauguccaagaccaagcgcaugggcaugggccucuacgucaaguacgacggcgaccccuggaccgacuccgaggcccucgcccucuccggcgucauggucuccauggaggagcccggcugguacuccuucggcuucgagaucaaggacaagaagugcgacguccccugcaucggcaucgagaugguccacgacggcggcaagaccaccuggcacuccgccgccaccgccaucuacugccucaugggcuccggccagcuccucugggacaccgucaccggcgucgacauggcccucuga

SEQ ID NO: 126410 - RNA, 1401 nt, Artificial Sequence
  derived and/or modified CDS sequence (opt2) from neuraminidase__InfluenzaB__AKA54789
augcuccccuccaccauccagacccucacccucuuccucaccuccggcggcguccuccucucccucuacgucuccgccucccucuccuaccuccucuacuccgacauccuccucaaguucucccgcaccgaggucaccgcccccaucaugccccucgacugcgccaacgccuccaacguccaggccgucaaccgcuccgccaccaagggcgucaccccccuccuccccgagcccgaguggaccuacccccgccucuccugccccggcuccaccuuccagaaggcccuccucaucuccccccaccgcuucggcgagaccaagggcaacuccgccccccucaucauccgcgagcccuucaucgccugcggccccaaggagugcaagcacuucgcccucacccacuacgccgcccagcccggcggcuacuacaacggcacccgcgaggaccgcaacaagcuccgccaccucaucuccgucaagcucggcaagauccccaccgucgagaacuccaucuuccacauggccgccugguccggcuccgccugccacgacggccgcgaguggaccuacaucggcgucgacggccccgacuccaacgcccuccucaagaucaaguacggcgaggccuacaccgacaccuaccacuccuacgccaagaacauccuccgcacccaggaguccgccugcaacugcaucggcggcgacugcuaccucaugaucaccgacggccccgccuccggcaucuccgagugccgcuuccucaagauccgcgagggccgcaucaucaaggagaucuuccccaccggccgcgucaagcacaccgaggagugcaccugcggcuucgccuccaacaagaccaucgagugcgccugccgcgacaacuccuacaccgccaagcgccccuucgucaagcucaacgucgagaccgacaccgccgagauccgccucaugugcaccaagaccuaccucgacaccccccgccccaacgacggcuccaucaccggccccugcgaguccgacggcgacgagggcuccggcggcaucaagggcggcuucguccaccagcgcauggccuccaagaucggccgcugguacucccgcaccauguccaagaccaagcgcaugggcaugggccucuacgucaaguacgacggcgaccccuggaccgacuccgaggcccucgcccucuccggcgucauggucuccauggaggagcccggcugguacuccuucggcuucgagaucaaggacaagaagugcgacguccccugcaucggcaucgagaugguccacgacggcggcaagaccaccuggcacuccgccgccaccgccaucuacugccucaugggcuccggccagcuccucugggacaccgucaccggcgucaacaugacccucuga

SEQ ID NO: 126411 - RNA, 1401 nt, Artificial Sequence
  derived and/or modified CDS sequence (opt2) from neuraminidase__InfluenzaB__AKA54791
augcuccccuccaccauccagacccucacccucuuccucaccuccggcggcguccuccucucccucuacgucuccgccucccucuccuaccuccucuacuccgacauccuccucaaguucucccgcaccgaggucaccgcccccaucaugccccucgacugcgccaacgccuccaacgcccaggccgucaaccgcuccgccaccaagggcgucaccccccuccuccccgagcccgaguggaccuacccccgccucuccugccccggcuccaccuuccagaaggcccuccucaucuccccccaccgcuucggcgagaccaagggcaacuccgccccccucaucauccgcgagcccuucaucgccugcggccccaaggagugcaagcacuucgcccucacccacuacgccgcccagcccggcggcuacuacaacggcacccgcgaggaccgcaacaagcuccgccaccucaucuccgucaagcucggcaagauccccaccgucgagaacuccaucuuccacauggccgccugguccggcuccgccugccacgacggccgcgaguggaccuacaucggcgucgacggccccgacuccaacgcccuccucaagaucaaguacggcgaggccuacaccgacaccuaccacuccuacgccaagaacauccuccgcacccaggaguccgccugcaacugcaucggcggcgacugcuaccucaugaucaccgacggccccgccuccggcaucuccgagugccgcuuccucaagauccgcgagggccgcaucaucaaggagaucuuccccaccggccgcgucaagcacaccgaggagugcaccugcggcuucgccuccaacaagaccaucgagugcgccugccgcgacaacuccuacaccgccaagcgccccuucgucaagcucaacgucgagaccgacaccgccgagauccgccucaugugcaccaagaccuaccucgacaccccccgccccaacgacggcuccaucaccggccccugcgaguccgacggcgacgagggcuccggcggcaucaagggcggcuucguccaccagcgcauggccuccaagaucggccgcugguacucccgcaccauguccaagaccaagcgcaugggcaugggccucuacgucaaguacgacggcgaccccuggaccgacuccgaggcccucgcccucuccggcgucauggucuccauggaggagcccggcugguacuccuucggcuucgagaucaaggacaagaagugcgacguccccugcaucggcaucgagaugguccacgacggcggcaagaccaccuggcacuccgccgccaccgccaucuacugccucaugggcuccggccagcuccucugggacaccgucaccggcgucaacaucacccucuga

SEQ ID NO: 126412 - RNA, 1401 nt, Artificial Sequence; identical to SEQ ID NO: 126409
  derived and/or modified CDS sequence (opt2) from neuraminidase__InfluenzaB__AKA54793

SEQ ID NO: 126413 - RNA, 1401 nt, Artificial Sequence; identical to SEQ ID NO: 126409
  derived and/or modified CDS sequence (opt2) from neuraminidase__InfluenzaB__AKA54795

SEQ ID NO: 126414 - RNA, 1401 nt, Artificial Sequence; identical to SEQ ID NO: 126410
  derived and/or modified CDS sequence (opt2) from neuraminidase__InfluenzaB__AKA54797

SEQ ID NO: 126415 - RNA, 1401 nt, Artificial Sequence
  derived and/or modified CDS sequence (opt2) from neuraminidase__InfluenzaB__AKA54799
augcuccccuccaccauccagacccucacccucuuccucaccuccggcggcguccuccucucccucuacgucuccgccucccucuccuaccuccucuacuccgacauccuccucaaguucucccagaccgagaucaccgcccccaucaugccccucgacugcgccaacgccuccaacguccaggccgucaaccacuccgccgccaagggcgucacccuccuccuccccgagcccgaguggaccuacccccgccucuccugccccggcuccaccuuccagaaggcccuccucaucuccccccaccgcuucggcgagaucaagggcaacuccgccccccucaucauccgcgagcccuucaucgccugcggccccaccgagugcaagcacuucgcccucacccacuacgccgcccagcccggcggcuacuacaacggcacccgcgaggaccgcaacaagcuccgccaccucaucuccgucaagcucggcaagauccccaccgucgagaacuccaucuuccacauggccgccugguccggcuccgccugccacgacggcaaggaguggaccuacaucggcgucgacggccccgacuccaacgcccuccucaagaucaaguacggcgaggccuacaccgacaccuaccacuccuacgagaagaacauccuccgcacccaggaguccgccugcaacugcaucggcggcgacugcuaccucaugaucaccgacggccccgccuccggcgucuccgagugccgcuuccucaagauccgcgagggccgcaucaucaaggagaucuuccccaccggccgcgucaagcacaccgaggagugcaccugcggcuucgccuccaacaagaccaucgagugcgccugccgcgacaaccgcuacaccgccaagcgccccuucgucaagcucaacgucgagaccgacaccgccgagauccgccucaugugcaccgagaccuaccucgacaccccccgccccaacgacggcuccaucaccggccccugcgaguccgacggcgacaagggcuccggcggcaucaagggcggcuucguccaccagcgcauggccuccaagaucggccgcugguacucccgcaccauguccaagaccaagcgcaugggcaugggccucuacgucaaguacgacggcgaccccuggaccgacuccgaggcccucgcccucuccggcgucauggucuccauggaggagcccggcugguacuccuucggcuucgagaucaaggacaagaagugcgacguccccugcaucggcaucgagaugguccacgacggcggcaagaccaccuggcacuccgccgccaccgccaucuacugccucaugggcuccggccagcuccucugggacaccgucaccggcgucgacauggcccucuga

SEQ ID NO: 126416 - RNA, 1401 nt, Artificial Sequence; identical to SEQ ID NO: 126410
  derived and/or modified CDS sequence (opt2) from neuraminidase__InfluenzaB__AKA54801

SEQ ID NO: 126417 - RNA, 1401 nt, Artificial Sequence
  derived and/or modified CDS sequence (opt2) from neuraminidase__InfluenzaB__AKA54803
augcuccccuccaccauccagacccucacccucuuccucaccuccggcggcguccuccucucccucuacgucuccgccucccucuccuaccuccucuacuccgacauccuccucaaguucucccgcaccgaggucaccgcccccaucaugccccucgacugcgccaacgccuccaacguccaggccgucaaccgcuccgccaccaacggcgucaccccccuccuccccgagcccgaguggaccuacccccgccucuccugccccggcuccaccuuccagaaggcccuccucaucuccccccaccgcuucggcgagaccaagggcaacuccgccccccucaucauccgcgagcccuucaucgccugcggccccaaggagugcaagcacuucgcccucacccacuacgccgcccagcccggcggcuacuacaacggcacccgcgaggaccgcaacaagcuccgccaccucaucuccgucaagcucggcaagauccccaccgucgagaacuccaucuuccacauggccgccugguccggcuccgccugccacgacggccgcgaguggaccuacaucggcgucgacggccccgacuccaacgcccuccucaagaucaaguacggcgaggccuacaccgacaccuaccacuccuacgccaagaacauccuccgcacccaggaguccgccugcaacugcaucggcggcgacugcuaccucaugaucaccgacggccccgccuccggcaucuccgagugccgcuuccucaagauccgcgagggccgcaucaucaaggagaucuuccccaccggccgcgucaagcacaccgaggagugcaccugcggcuucgccuccaacaagaccaucgagugcgccugccgcgacaacuccuacaccgccaagcgccccuucgucaagcucaacgucgagaccgacaccgccgagauccgccucaugugcaccaagaccuaccucgacaccccccgccccaacgacggcuccaucaccggccccugcgaguccgacggcgacgagggcuccggcggcaucaagggcggcuucguccaccagcgcauggccuccaagaucggccgcugguacucccgcaccauguccaagaccaagcgcaugggcaugggccucuacgucaaguacgacggcgaccccuggaccgacuccgaggcccucgcccucuccggcgucauggucuccauggaggagcccggcugguacuccuucggcuucgagaucaaggacaagaagugcgacguccccugcaucggcaucgagaugguccacgacggcggcaagaccaccuggcacuccgccgccaccgccaucuacugccucaugggcuccggccagcuccucugggacaccgucaccggcgucaacaugacccucuga

SEQ ID NO: 126418 - RNA, 1401 nt, Artificial Sequence; identical to SEQ ID NO: 126410
  derived and/or modified CDS sequence (opt2) from neuraminidase__InfluenzaB__AKA54805

SEQ ID NO: 126419 - RNA, 1401 nt, Artificial Sequence
  derived and/or modified CDS sequence (opt2) from neuraminidase__InfluenzaB__AKA54807
augcuccccuccaccauccagacccucacccucuuccucaccuccggcggcguccuccucucccucuacgucuccgccucccucuccuaccuccucuacuccgacauccuccucaaguucucccgcaccgaggucaccgcccccaucaugccccucgacugcgccaacgccuccaacguccaggccgucaaccgcuccgccaccaagggcgucaccccccuccuccccgagcccgaguggaccuacccccgccucuccugccccggcuccaccuuccagaaggcccuccucaucuccccccaccgcuucggcgagaccaagggcaacuccgccccccucaucauccgcgagcccuucaucgccugcggccccaaggagugcaagcacuucgcccucacccacuacgccgcccagcccggcggcuacuacaacggcacccgcgaggaccgcaacaagcuccgccaccucaucuccgucaagcucggcaagauccccaccgucgagaacuccaucuuccacauggccgccugguccggcuccgccugccacgacggccgcgaguggaccuacaucggcgucgacggccccgacuccaacgcccuccucaagaucaaguacggcgaggccuacaccgacaccuaccacuccuacgccaagaacauccuccgcacccaggaguccgccugcaacugcaucggcggcgacugcuaccucaugaucaccgacggccccgccuccggcaucuccgagugccgcuuccucaagauccgcgagggccgcaucaucaaggagaucuuccccaccggccgcgucaagcacaccgaggagugcaccugcggcuucgccuccaacaagaccaucgagugcgccugccgcgacaacuccuacaccgccaagcgccccuucgucaagcucaacgucgagaccgacaccgccgagauccgccucaugugcaccaagaccuaccucgacaccccccgccccaacgacggcuccaucaccggccccugcgaguccgacggcgacgagggcuccggcggcaucaagggcggcuucguccaccagcgcauggccuccaagaucggccgcugguacucccgcaccauguccaagaccaagcgcaugggcaugggccucuacgucaaguacgacggcgaccccuggaccgacuccgaggcccucgcccucuccggcgucauggucuccauggaggagcccggcugguacuccuucggcuucgagaucaaggacaagaagugcgacguccccugcaucggcaucgagaugguccacgacggcggcaagaccaccuggcacuccgccgccaccgccaucuacugccucaugggcuccggccagcuccucugggacaccgucaccggcgucaacaucacccucuga

SEQ ID NO: 126420 - RNA, 1401 nt, Artificial Sequence
  derived and/or modified CDS sequence (opt2) from neuraminidase__InfluenzaB__AKA54809
augcuccccuccaccauccagacccucacccucuuccucaccuccggcggcguccuccucucccucuacgucuccgccucccucuccuaccuccucuacuccgacauccuccucaaguucucccgcaccgaggucaccgcccccaucaugccccucgacugcgccaacgccuccaacguccaggccgucaaccgcuccgccaccaagggcgucaccccccuccuccccgagcccgaguggaccuacccccgccucuccugccccggcuccaccuuccagaaggcccuccucaucuccccccaccgcuucggcgagaccaagggcaacuccgccccccucaucauccgcgagcccuucaucgccugcggccccaaggagugcaagcacuucgcccucacccacuacgccgcccagcccggcggcuacuacaacggcacccgcgaggaccgcaacaagcuccgccaccucaucuccgucaagcucggcaagauccccaccgucgagaacuccaucuuccacauggccgccugguccggcuccgccugccacgacggccgcgaguggaccuacaucggcgucgacggccccgacuccaacgcccuccucaagaucaaguacggcgaggccuacaccgacaccuaccacuccuacgccaagaacauccuccgcacccaggaguccgccugcaacugcaucggcggcgacugcuaccucaugaucaccgacggccccgccuccggcaucuccgagugccgcuuccucaagauccgcgagggccgcaucaucaaggagaucuuccccaccggccgcgucaagcacaccgaggagugcaccugcggcuucgccuccaacaagaccaucgagugcgccugccgcgacaacuccuacaccgccaagcgccccuucgucaagcucaacgucgagaccgacaccgccgagauccgccucaugugcaccaagaccuaccucgacaccccccgccccaacgacggcuccaucaccggccccugcgaguccgacggcgacgagggcuccggcggcaucaagggcggcuucguccaccagcgcauggccuucaagaucggccgcugguacucccgcaccauguccaagaccaagcgcaugggcaugggccucuacgucaaguacgacggcgaccccuggaccgacuccgaggcccucgcccucuccggcgucauggucuccauggaggagcccggcugguacuccuucggcuucgagaucaaggacaagaagugcgacguccccugcaucggcaucgagaugguccacgacggcggcaagaccaccuggcacuccgccgccaccgccaucuacugccucaugggcuccggccagcuccucugggacaccgucaccggcgucaacaugacccucuga

SEQ ID NO: 126421 - RNA, 1401 nt, Artificial Sequence; identical to SEQ ID NO: 126410
  derived and/or modified CDS sequence (opt2) from neuraminidase__InfluenzaB__AKA54811

SEQ ID NO: 126422 - RNA, 1401 nt, Artificial Sequence
  derived and/or modified CDS sequence (opt2) from neuraminidase__InfluenzaB__AKA54813
augcuccccuccaccauccagacccucacccucuuccucaccuccggcggcguccuccucucccucuacgucuccgccucccucuccuaccuccucuacuccgacauccuccucaaguucucccgcaccgaggucaccgcccccaucaugccccucgacugcgccaacgccuccaacguccaggccgucaaccgcuccgccaccaagggcgucaccccccuccuccccgagcccgaguggaccuacccccgccucuccugccccggcuccaccuuccagaaggcccuccucaucuccccccaccgcuucggcgagaccaagggcaacuccgccccccucaucauccgcgagcccuucaucgccugcggccccaaggagugcaagcacuucgcccucacccacuacgccgcccagcccggcggcuacuacaacggcacccgcgaggaccgcaacaagcuccgccaccucaucuccgucaagcucggcaagauccccaccgucgagaacuccaucuuccacauggccgccugguccggcuccgccugccacgacggccgcgaguggaccuacaucggcgucgacggccccgacuccaacgcccuccucaagaucaaguacggcgaggccuacaccgacaccuaccacuccuacgccaagaacauccuccgcacccaggaguccgccugcaacugcaucggcggcgacugcuaccucaugaucaccgacggccccgccuccggcaucuccgagugccgcuuccucaagauccgcgagggccgcaucaucaaggagaucuuccccaccggccgcgucaagcacaccgaggagugcaccugcggcuucgccuccaacaagaccaucgagugcgccugccgcgacaacuccuacaccgccaagcgccccuucgucaagcucaacgucgagaccgacaccgccgagauccgccucaugugcaccaagaccuaccucgacaccccccgccccaacgacggcuccaucaccggccccugcgaguccgacggcgacgagggcuccggcggcaucaagggcggcuucguccaccagcgcauggccuccaagaucggccgcugguacucccgcaccauguccaagaccaagcgcaugggcaugggccucuacgucaaguacgacggcgaccccuggaccgacuccgaggcccucgcccucuccggcgucauggucuccaucgaggagcccggcugguacuccuucggcuucgagaucaaggacaagaagugcgacguccccugcaucggcaucgagaugguccacgacggcggcaagaccaccuggcacuccgccgccaccgccaucuacugccucaugggcuccggccagcuccucugggacaccgucaccggcgucaacaugacccucuga

SEQ ID NO: 126423 - RNA, 1401 nt, Artificial Sequence; identical to SEQ ID NO: 126410
  derived and/or modified CDS sequence (opt2) from neuraminidase__InfluenzaB__AKA54815

SEQ ID NO: 126424 - RNA, 1401 nt, Artificial Sequence
  derived and/or modified CDS sequence (opt2) from neuraminidase__InfluenzaB__AKA54817
augcuccccuccaccauccagacccucacccucuuccucaccuccggcggcguccuccucucccucuacgucuccgccucccucuccuaccuccucuacuccgacauccuccucaaguucucccgcaccgaggucaccgcccccaucaugccccucgacugcgccaacgccuccaacguccaggccgucaaccgcuccgccaccaagggcgucaccccccuccuccccgagcccgaguggaccuacccccgccucuccugccccggcuccaccuuccagaaggcccuccucaucuccccccaccgcuucggcgagaccaagggcaacuccgccccccucaucauccgcgagcccuucaucgccugcggccccaaggagugcaagcacuucgcccucacccacuacgccgcccagcccggcggcuacuacaacggcacccgcgaggaccgcaacaagcuccgccaccucaucuccgucaagcucggcaagauccccaccgucgagaacuccaucuuccacauggccgccugguccggcuccgccugccacgacggccgcgaguggaccuacaucggcgucgacggccccgacuccaacgcccuccucaagaucaaguacggcgaggccuacaccgacaccuaccacuccuacgccaagaacauccuccgcacccaggaguccgccugcaacugcaucggcggcgacugcuaccucaugaucaccgacggccccgccuccggcaucuccgagugccgcuuccucaagauccgcgagggccgcaucaucaaggagaucuuccccaccggccgcgucaagcacaccgaggagugcaccugcggcuucgccuccaacaagaccaucgagugcgccugccgcgacaacuccuacaccgccaagcgccccuucgucaagcucaacgucgagaccgacaccgccgagauccgccucaugugcaccaagaccuaccucgacaccccccgccccaacgacggcuccaucaccggccccugcgaguccgacggcgacgagggcuccggcggcaucaagggcggcuucguccaccagcgcauggccuccaagaucggccgcugguacucccgcaccauguccaagaccaagcgcaugggcaugggccucuacgucaaguacgacggcgaccccuggaccgacuccgaggcccucgcccucuccggcgucauggucuccauggaggagcccggcugguacuccuucggcuucgagaucaaggacaagaagugcgacguccccugcaucggcgucgagaugguccacgacggcggcaagaccaccuggcacuccgccgccaccgccaucuacugccucaugggcuccggccagcuccucugggacaccgucaccggcgucaacaugacccucuga

SEQ ID NO: 126425 - RNA, 1401 nt, Artificial Sequence; identical to SEQ ID NO: 126410
  derived and/or modified CDS sequence (opt2) from neuraminidase__InfluenzaB__AKA54819

SEQ ID NO: 126426 - RNA, 1401 nt, Artificial Sequence; identical to SEQ ID NO: 126410
  derived and/or modified CDS sequence (opt2) from neuraminidase__InfluenzaB__AKA54821

SEQ ID NO: 126427 - RNA, 1401 nt, Artificial Sequence; identical to SEQ ID NO: 126410
  derived and/or modified CDS sequence (opt2) from neuraminidase__InfluenzaB__AKA54823

SEQ ID NO: 126428 - RNA, 1401 nt, Artificial Sequence; identical to SEQ ID NO: 126410
  derived and/or modified CDS sequence (opt2) from neuraminidase__InfluenzaB__AKA54825

SEQ ID NO: 126429 - RNA, 1401 nt, Artificial Sequence; identical to SEQ ID NO: 126410
  derived and/or modified CDS sequence (opt2) from neuraminidase__InfluenzaB__AKA54827

SEQ ID NO: 126430 - RNA, 1401 nt, Artificial Sequence
  derived and/or modified CDS sequence (opt2) from neuraminidase__InfluenzaB__AKA54829
augcuccccuccaccauccagacccucacccucuuccucaccuccggcggcguccuccucucccucuacgucuccgccucccucuccuaccuccucuacuccgacauccuccucaagcucucccgcaccgaggucaccgcccccaucaugccccucgacugcgccaacgccuccaacguccaggccgucaaccgcuccgccaccaagggcgucaccccccuccuccccgagcccgaguggaccuacccccgccucuccugccccggcuccaccuuccagaagacccuccucaucuccccccaccgcuucggcgagaccaagggcaacuccgccccccucaucauccgcgagcccuucaucgccugcggccccaaggagugcaagcacuucgcccucacccacuacgccgcccagcccggcggcuacuacaacggcacccgcgaggaccgcaacaagcuccgccaccucaucuccgucaagcucggcaagauccccaccgucgagaacuccaucuuccacauggccgccugguccggcuccgccugccacgacggccgcgaguggaccuacaucggcgucgacggccccgacuccaacgcccuccucaagaucaaguacggcgaggccuacaccgacaccuaccacuccuacgccaagaacauccuccgcacccaggaguccgccugcaacugcaucggcggcgacugcuaccucaugaucaccgacggccccgccuccggcaucuccgagugccgcuuccucaagauccgcgagggccgcaucaucaaggagaucuuccccaccggccgcgucaagcacaccgaggagugcaccugcggcuucgccuccaacaagaccaucgagugcgccugccgcgacaacuccuacaccgccaagcgccccuucgucaagcucaacgucgagaccgacaccgccgagauccgccucaugugcaccaagaccuaccucgacaccccccgccccaacgacggcuccaucaccggccccugcgaguccgacggcgacgagggcuccggcggcaucaagggcggcuucguccaccagcgcauggccuccaagaucggccgcugguacucccgcaccauguccaagaccaagcgcaugggcaugggccucuacgucaaguacgacggcgaccccuggaccgacuccgaggcccucgcccucuccggcgucauggucuccauggaggagcccggcugguacuccuucggcuucgagaucaaggacaagaagugcgacguccccugcaucggcaucgagaugguccacgacggcggcaagaccaccuggcacuccgccgccaccgccaucuacugccucaugggcuccggccagcuccucugggacaccgucaccggcgucaacaugacccucuga

SEQ ID NO: 126431 - RNA, 1401 nt, Artificial Sequence
  derived and/or modified CDS sequence (opt2) from neuraminidase__InfluenzaB__AKA54831
augcuccccuccaccauccagacccucacccucuuccucaccuccggcggcguccuccucucccucuacgucuccgccucccucuccuaccuccucuacuccgacauccuccucaaguucucccgcaccgaggucaccgcccccaucaugccccucgacugcgccaacgccuccaacguccaggccgucaaccgcuccgccaccaagggcgucaccccccuccuccccgagcccgaguggaccuacccccgccucuccugccccggcuccaccuuccagaaggcccuccucaucuccccccaccgcuucggcgagaccaagggcaacuccgccccccucaucauccgcgagcccuucaucgccugcggccccaaggagugcaagcacuucgcccucacccacuacgccgcccagcccggcggcuacuacaacggcacccgcgaggaccgcaacaagcuccgccaccucaucuccgucaagcucggcaagauccccaccgucgagaacuccaucuuccacauggccgccugguccggcuccgccugccacgacggccgcgaguggaccuacaucggcgucgacggccaggacuccaacgcccuccucaagaucaaguacggcgaggccuacaccgacaccuaccacuccuacgccaagaacauccuccgcacccaggaguccgccugcaacugcaucggcggcgacugcuaccucaugaucaccgacggccccgccuccggcaucuccgagugccgcuuccucaagauccgcgagggccgcaucaucaaggagaucuuccccaccggccgcgucaagcacaccgaggagugcaccugcggcuucgccuccaacaagaccaucgagugcgccugccgcgacaacuccuacaccgccaagcgccccuucgucaagcucaacgucgagaccgacaccgccgagauccgccucaugugcaccaagaccuaccucgacaccccccgccccaacgacggcuccaucaccggccccugcgaguccgacggcgacgagggcuccggcggcaucaagggcggcuucguccaccagcgcauggccuccaagaucggccgcugguacucccgcaccauguccaagaccaagcgcaugggcaugggccucuacgucaaguacgacggcgaccccuggaccgacuccgaggcccucgcccucuccggcgucauggucuccauggaggagcccggcugguacuccuucggcuucgagaucaaggacaagaagugcgacguccccugcaucggcaucgagaugguccacgacggcggcaagaccaccuggcacuccgccgccaccgccaucuacugccucaugggcuccggccagcuccucugggacaccgucaccggcgucaacaugacccucuga

SEQ ID NO: 126432 - RNA, 1401 nt, Artificial Sequence; identical to SEQ ID NO: 126410
  derived and/or modified CDS sequence (opt2) from neuraminidase__InfluenzaB__AKA54833

SEQ ID NO: 126433 - RNA, 1401 nt, Artificial Sequence
  derived and/or modified CDS sequence (opt2) from neuraminidase__InfluenzaB__AKA54837
augcuccccuccaccauccagacccucacccucuuccucaccuccggcggcguccuccucucccucuacgucuccgccucccucuccuaccuccucuacuccgacauccuccucaaguucucccccaccgagaucaccgcccccaccaugccccucgacugcgccaacgccuccaacguccaggccgucaaccgcuccgccaccaagggcgucacccuccuccuccccgagcccgaguggaccuacccccgccucuccugccccggcuccaccuuccagaaggcccuccucaucuccccccaccgcuucggcgagaccaacggcaacuccgccccccucaucguccgcgagcccuucaucgccugcggccccaacgagugcaagcacuucgcccucacccacuacgccgcccagcccggcggcuacuacaacggcacccgcggcgaccgcaacaagcuccgccaccucaucuccgucaagcucggcaagauccccaccgucgagaacuccaucuuccacauggccgccugguccggcuccgccugccacgacggcaaggaguggaccuacaucggcgucgacggccccgacaacaacgcccuccucaaggucaaguacggcgaggccuacaccgacaccuaccacuccuacgccaacaagauccuccgcacccaggaguccgccugcaacugcaucggcggcaacugcuaccucaugaucaccgacggcuccgccuccggcgucuccgagugccgcuuccucaagauccgcgagggccgcaucaucaaggagaucuuccccaccggccgcgucaagcacaccgaggagugcaccugcggcuucgccuccaacaagaccaucgagugcgccugccgcgacaaccgcuacaccgccaagcgccccuucgucaagcucaacgucgagaccgacaccgccgagauccgccucaugugcaccgacaccuaccucgacaccccccgccccaacgacggcuccaucaccggccccugcgaguccgacggcaacgagggcuccggcggcaucaagggcggcuucguccaccagcgcaugaaguccaagaucggccgcugguacucccgcaccauguccaagaccgagcgcaugggcaugggccucuacgucaaguacgacggcgaccccugggccgacuccgacgcccucgccuucuccggcgucauggucuccaugaaggagcccggcugguacuccuucggcuucgagaucaaggacaagaagugcgacguccccugcaucggcaucgagaugguccacgacggcggcaaggagaccuggcacuccgccgccaccgccaucuacugccucaugggcuccggccagcuccucugggacaccgucaccggcgucgacauggcccucuga

SEQ ID NO: 126434 - RNA, 1401 nt, Artificial Sequence
  derived and/or modified CDS sequence (opt2) from neuraminidase__InfluenzaB__AKA54839
augcuccccuccaccauccagacccucacccucuuccucaccuccggcggcguccuccucucccucuacgucuccgccucccucuccuaccuccucuacuccgacauccuccucaaguucucccccaccgagaucaccgcccccaccaugccccucgacugcgccaacgccuccaacguccaggccgucaaccgcuccgccaccaaggaggucacccuccuccuccccgagcccgaguggaccuacccccgccucuccugccccggcuccaccuuccagaaggcccuccucaucuccccccaccgcuucggcgagaccaagggcaacuccgccccccucaucauccgcgagcccuucaucgccugcggccccaacgagugcaagcacuucgcccucacccacuacgccgcccagcccggcggcuacuacaacggcacccgcggcgaccgcaacaagcuccgccaccucaucuccgucaagcucggcaagauccccaccgucgagaacuccaucuuccacauggccgccugguccggcuccgccugccacgacggcaaggaguggaccuacaucggcgucgacggccccgacaacaacgcccuccucaaggucaaguacggcgaggccuacaccgacaccuaccacuccuacgccaacaagauccuccgcacccaggaguccgccugcaacugcaucggcggcaacugcuaccucaugaucaccgacggcuccgccuccggcgucuccgagugccgcuuccucaagauccgcgagggccgcaucaucaaggagaucuuccccaccggccgcgucaagcacaccgaggagugcaccugcggcuucgccuccaacaagaccaucgagugcgccugccgcgacaaccgcuacaccgccaagcgccccuucgucaagcucaacgucgagaccgacaccgccgagauccgccucaugugcaccgacaccuaccucgacaccccccgccccaacgacggcuccaucaccggccccugcgaguccgacggcgacaagggcuccggcggcaucaagggcggcuucguccaccagcgcaugaaguccaagaucggccgcugguacucccgcaccauguccaagaccgagcgcaugggcaugggccucuacgucaaguacgacggcgaccccugggccgacuccgacgcccucgccuucuccggcgucauggucuccaugaaggagcccggcugguacuccuucggcuucgagaucaaggacaagaagugcgacguccccugcaucggcaucgagaugguccacgacggcggcaaggagaccuggcacuccgccgccaccgccaucuacugccucaugggcuccggccagcuccucugggacaccgucaccggcgucgacauggcccucuga

SEQ ID NO: 126435 - RNA, 1401 nt, Artificial Sequence
  derived and/or modified CDS sequence (opt2) from neuraminidase__InfluenzaB__AKA54841
augcuccccuccaccauccagacccucacccucuuccucaccuccggcggcguccuccucucccucuacgucuccgccucccucuccuaccuccucuacuccgacauccuccucaaguucucccccaccgagaucaccgcccccaccaugccccucgacugcgccaacgccuccaacguccaggccgucaaccgcuccgccaccaagggcgucacccuccuccuccccgagcccgaguggaccuacccccgccucuccugccccggcuccaccuuccagaaggcccuccucaucuccccccaccgcuucggcgagaccaagggcaacuccgccccccucaucauccgcgagcccuucaucgccugcggccccaacgagugcaagcacuucgcccucacccacuacgccgcccagcccggcggcuacuacaacggcacccgcggcgaccgcaacaagcuccgccaccucaucuccgucaagcucggcaagauccccaccgucgagaacuccaucuuccacauggccgccugguccggcuccgccugccacgacggcaaggaguggaccuacaucggcgucgacggccccgacaacaacgcccuccucaaggucaaguacggcgaggccuacaccgacaccuaccacuccuacgccaacaagauccuccgcacccaggaguccgccugcaacugcaucggcggcaacugcuaccucaugaucaccgacggcuccgccuccggcgucuccgagugccgcuuccucaagauccgcgagggccgcaucaucaaggagaucuuccccaccggccgcgucaagcacaccgaggagugcaccugcggcuucgccuccaacaagaccaucgagugcgccugccgcgacaaccgcuacaccgccaagcgccccuucgucaagcucaacgucgagaccgacaccgccgagauccgccucaugugcaccgacaccuaccucgacaccccccgccccaacgacggcuccaucaccggccccugcgaguccgacggcgacgagggcuccggcggcaucaagggcggcuucguccaccagcgcaugaaguccaagaucggccgcugguacucccgcaccauguccaagaccgagcgcaugggcaugggccucuacgucaaguacgacggcgaccccugggccgacuccgacgcccucgccuucuccggcgucauggucuccgucaaggagcccggcugguacuccuucggcuucgagaucaaggacaagaagugcgacguccccugcaucggcaucgagaugguccacgacggcggcaaggagaccuggcacuccgccgccaccgccaucuacugccucaugggcuccggccagcuccucugggacaccgucaccggcgucgacaucgcccucuga

SEQ ID NO: 126436 - RNA, 1401 nt, Artificial Sequence
  derived and/or modified CDS sequence (opt2) from neuraminidase__InfluenzaB__AKA54843
augcuccccuccaccauccagacccucacccucuuccucaccuccggcggcguccuccucucccucuacgucuccgccucccucuccuaccuccucuacuccgacauccuccucaaguucucccccaccgagaucaccgcccccaccaugccccucgacugcgccaacgccuccaacguccaggccgucaaccgcuccgccaccaagggcgucacccuccuccuccccgagcccgaguggaccuacccccgccucuccugccccggcuccaccuuccagaaggcccuccucaucuccccccaccgcuucggcgagaccaagggcaacuccgccccccucaucauccgcgagcccuucaucgccugcggccccaacgagugcaagcacuucgcccucacccacuacgccgcccagcccggcggcuacuacaacggcacccgcggcgaccgcaacaagcuccgccaccucaucuccgucaagcucggcaagauccccaccgucgagaacuccaucuuccacauggccgccugguccggcuccgccugccacgacggcaaggaguggaccuacaucggcgucgacggccccgacaacaacgcccuccucaaggucaaguacggcgaggccuacaccgacaccuaccacuccuacgccaacaagauccuccgcacccaggaguccgccugcaacugcaucggcggcaacugcuaccucaugaucaccgacggcuccgccuccggcgucuccgagugccgcuuccucaagauccgcgagggccgcaucaucaaggagaucuuccccaccggccgcgucaagcacaccgaggagugcaccugcggcuucgccuccaacaagaccaucgagugcgccugccgcgacaaccgcuacaccgccaagcgccccuucgucaagcucaacgucgagaccgacaccgccgagauccgccucaugugcaccgacaccuaccucgacaccccccgccccaacgacggcuccaucaccggccccugcgaguccgacggcgacgagggcuccggcggcaucaagggcggcuucguccaccagcgcaugaaguccaagaucggccgcugguacucccgcaccauguccaagaccgagcgcaugggcaugggccucuacgucaaguacgacggcgaccccugggccgacuccgacgcccucgccuucuccggcgucauggucuccgucaaggagcccggcugguacuccuucggcuucgagaucaaggacaagaagugcgacguccccugcaucggcaucgagaugguccacgacggcggcaaggagaccuggcacuccgccgccaccgccaucuacugccucaugggcuccggccagcuccucugggacaccgucaccggcgucgacauggcccucuga

SEQ ID NO: 126437 - RNA, 1401 nt, Artificial Sequence
  derived and/or modified CDS sequence (opt2) from neuraminidase__InfluenzaB__AKA54845
augcuccccuccaccauccagacccucacccucuuccucaccuccggcggcguccuccucucccucuacgucuccgccucccucuccuaccuccucuacuccgacauccuccucaaguucucccccaccgagaucaccgcccccaccaugccccucgacugcgccaacgccuccaacguccaggccgucaaccgcuccgccaccaagggcgucacccuccuccuccccgagcccgaguggaccuacccccgccucuccugccccggcuccaccuuccagaaggcccuccucaucuccccccaccgcuucggcgagaccaacggcaacuccgccccccucaucauccgcgagcccuucaucgccugcggccccaacgagugcaagcacuucgcccucacccacuacgccgcccagcccggcggcuacuacaacggcacccgcggcgaccgcaacaagcuccgccaccucaucuccgucaagcucggcaagauccccaccgucgagaacuccaucuuccacauggccgccugguccggcuccgccugccacgacggcaaggaguggaccuacaucggcgucgacggccccgacaacaacgcccuccucaaggucaaguacggcgaggccuacaccgacaccuaccacuccuacgccaacaagauccuccgcacccaggaguccgccugcaacugcaucggcggcaacugcuaccucaugaucaccgacggcuccgccuccggcgucuccgagugccgcuuccucaagauccgcgagggccgcaucaucaaggagaucuuccccaccggccgcgucaagcacaccgaggagugcaccugcggcuucgccuccaacaagaccaucgagugcgccugccgcgacaaccgcuacaccgccaagcgccccuucgucaagcucaacgucgagaccgacaccgccgagauccgccucaugugcaccgacaccuaccucgacaccccccgccccaacgacggcuccaucaccggccccugcgaguccgacggcgacgagggcuccggcggcaucaagggcggcuucguccaccagcgcaugaaguccaagaucggccgcugguacucccgcaccauguccaagaccgagcgcaugggcaugggccucuacgucaaguacgacggcgaccccugggccgacuccgacgcccucgccuucuccggcgucauggucuccaugaaggagcccggcugguacuccuucggcuucgagaucaaggacaagaagugcgacguccccugcaucggcaucgagaugguccacgacggcggcaaggagaccuggcacuccgccgccaccgccaucuacugccucaugggcuccggccagcuccucugggacaccgucaccggcgucgacauggcccucuga

SEQ ID NO: 126438 - RNA, 1401 nt, Artificial Sequence; identical to SEQ ID NO: 126242
  derived and/or modified CDS sequence (opt2) from neuraminidase__InfluenzaB__AKA54847

SEQ ID NO: 126439 - RNA, 1401 nt, Artificial Sequence
  derived and/or modified CDS sequence (opt2) from neuraminidase__InfluenzaB__AKA54849
augcuccccuccaccauccagacccucacccucuuccucaccuccggcggcguccuccucucccucuacgucuccgccucccucuccuaccuccucuacuccgacauccuccucaaguucuccuccaccgagaucaccgcccccaccaugccccucgacugcgccaacgccuccaacguccaggccgucaaccgcuccgccaccaagggcgucacccuccuccuccccgagcccgaguggaccuacccccgccucuccugccccggcuccaccuuccagaaggcccuccucaucuccccccaccgcuucggcgagaccaacggcaacuccgccccccucaucauccgcgagcccuucaucgccugcggccccaacgagugcaagcacuucgcccucacccacuacgccgcccagcccggcggcuacuacaacggcacccgcggcgaccgcaacaagcuccgccaccucaucuccgucaagcucggcaagauccccaccgucgagaacuccaucuuccacauggccgccugguccggcuccgccugccacgacggcaaggaguggaccuacaucggcgucgacggccccgacaacaacgcccuccucaaggucaaguacggcgaggccuacaccgacaccuaccacuccuacgccaacaagauccuccgcacccaggaguccgccugcaacugcaucggcggcaacugcuaccucaugaucaccgacggcuccgccuccggcgucuccgagugccgcuuccucaagauccgcgagggccgcaucaucaaggagaucuuccccaccggccgcgucaagcacaccgaggagugcaccugcggcuucgccuccaacaagaccaucgagugcgccugccgcgacaaccgcuacaccgccaagcgccccuucgucaagcucaacgucgagaccgacaccgccgagauccgccucaugugcaccgacaccuaccucgacaccccccgccccaacgacggcuccaucaccggccccugcgaguccgacggcgacgagggcggcggcggcaucaagggcggcuucguccaccagcgcaugaaguccaagaucggccgcugguacucccgcaccauguccaagaccgagcgcaugggcaugggccucuacgucaaguacgacggcgaccccugggccgacuccgacgcccucgccuucuccggcgucauggucuccaugaaggagcccggcugguacuccuucggcuucgagaucaaggacaagaagugcgacguccccugcaucggcaucgagaugguccacgacggcggcaaggagaccuggcacuccgccgccaccgccaucuacugccucaugggcuccggccagcuccucugggacaccgucaccggcgucgacauggcccucuga

SEQ ID NO: 126440 - RNA, 1401 nt, Artificial Sequence
  derived and/or modified CDS sequence (opt2) from neuraminidase__InfluenzaB__AKA54851
augcuccccuccaccauccagacccucacccucuuccucaccuccggcggcguccuccucucccucuacgucuccgccucccucuccuaccuccucuacuccgacauccuccucaaguucucccccaccgagaucaccgcccccaccaugccccucgacugcgccaacgccuccaacguccaggccgucaaccgcuccgccaccaagggcgucacccuccuccuccccgagcccgaguggaccuacccccgccucuccugccccggcuccaccuuccagaaggcccuccucaucuccccccaccgcuucggcgagaccaagggcaacuccgccccccucaucauccgcgagcccuucaucgccugcggccccaacgagugcaagcacuucgcccucacccacuacgccgcccagcccggcggcuacuacaacggcacccgcggcgaccgcaacaagcuccgccaccucaucuccgucaagcucggcaagauccccaccgucgagaacuccaucuuccacauggccgccugguccggcuccgccugccacgacggcaaggaguggaccuacaucggcgucgacggccccgacaacaacgcccuccucaaggucaaguacggcgaggccuacaucgacaccuaccacuccuacgccaacaagauccuccgcacccaggaguccgccugcaacugcaucggcggcaacugcuaccucaugaucaccgacggcuccgccuccggcgucuccgagugccgcuuccucaagauccgcgagggccgcaucaucaaggagaucuuccccaccggccgcgucaagcacaccgaggagugcaccugcggcuucgccuccaacaagaccaucgagugcgccugccgcgacaaccgcuacaccgccaagcgccccuucgucaagcucaacgucgagaccgacaccgccgagauccgccucaugugcaccgacaccuaccucgacaccccccgccccaacgacggcuccaucaccggccccugcgaguccgacggcgacaagggcuccggcggcaucaagggcggcuucguccaccagcgcaugaaguccaagaucggccgcugguacucccgcaccauguccaagaccgagcgcaugggcaugggccucuacgucaaguacgacggcgaccccugggccgacuccgacgcccucgccuucuccggcgucauggucuccaugaaggagcccggcugguacuccuucggcuucgagaucaaggacaagaagugcgacguccccugcaucggcaucgagaugguccacgacggcggcaaggagaccuggcacuccgccgccaccgccaucuacugccucaugggcuccggccagcuccucugggacaccgucaccggcgucgacauggcccucuga

SEQ ID NO: 126441 - RNA, 1401 nt, Artificial Sequence
  derived and/or modified CDS sequence (opt2) from neuraminidase__InfluenzaB__AKA54853
augcuccccuccaccauccagacccucacccucuuccucaccuccggcggcguccuccucucccucuacgucuccgccucccucuccuaccuccucuacuccgacauccuccucaaguucucccccaccgagaucaccgcccccaccaugccccucgacugcgccaacgccuccaacguccaggccgucaaccgcuccgccaccaagggcgucacccuccuccuccccgagcccgaguggaccuacccccgccucuccugccccggcuccaccuuccagaaggcccuccucaucuccccccaccgcuucggcgagaccaagggcaacuccgccccccucaucauccgcgagcccuucaucgccugcggccccaacgagugcaagcacuucgcccucacccacuacgccgcccagcccggcggcuacuacaacggcacccgcggcgaccgcaacaagcuccgccaccucaucuccgucaagcucggcaagauccccaccgucgagaacuccaucuuccacauggccgccugguccggcuccgccugccacgacggcaaggaguggaccuacaucggcgucgacggccccgacaacaacgcccuccucaaggucaaguacggcgaggccuacaccgacaccuaccacuccuacgccaacaagauccuccgcacccaggaguccgccugcaacugcaucggcggcaacugcuaccucaugaucaccgacggcuccgccuccggcgucuccgagugccgcuuccucaagauccgcgagggccgcaucaucaaggagaucuuccccaccggccgcgucaagcacaccgaggagugcaccugcggcuucgccuccaacaagaccaucgagugcgccugccgcgacaaccgcuacaccgccaagcgccccuucgucaagcucaacgucgagaccgacaccgccgagauccgccucaugugcaccgacaccuaccucgacaccccccgccccaacgacggcuccaucaccggccccugcgaguccgacggcgacgagggcuccggcggcgucaagggcggcuucguccaccagcgcaugaaguccaagaucggccgcugguacucccgcaccauguccaagaccgagcgcaugggcaugggccucuacgucaaguacgacggcgaccccugggccgacuccgacgcccucgccuucuccggcgucauggucuccgucaaggagcccggcugguacuccuucggcuucgagaucaaggacaagaagugcgacguccccugcaucggcaucgagaugguccacgacggcggcaaggagaccuggcacuccgccgccaccgccaucuacugccucaugggcuccggccagcuccucugggacaccgucaccggcgucgacauggcccucuga

SEQ ID NO: 126442 - RNA, 1401 nt, Artificial Sequence
  derived and/or modified CDS sequence (opt2) from neuraminidase__InfluenzaB__AKA54855
augcuccccuccaccauccagacccucacccucuuccucaccuccggcggcguccuccucucccucuacgucuccgccucccucuccuaccuccucuacuccgacauccuccucaaguucucccccaccgagaucaccgcccccaccaugccccucgacugcgccaacgccuccaacguccaggccgucaaccgcuccgccaccaagggcgucacccuccuccuccccgagcccgaguggaccuacccccgccucuccugccccggcuccaccuuccagaaggcccuccucaucuccccccaccgcuucggcgagaccaagggcaacuccgccccccucaucauccgcgagcccuucaucgccugcggccccaacgagugcaagcacuucgcccucacccacuacgccgcccagcccggcggcuacuacaacggcacccgcggcgaccgcaacaagcuccgccaccucaucuccgucaagcucggcaagauccccaccgucgagaacuccaucuuccacauggccgccugguccggcuccgccugccacgacggcaaggaguggaccuacaucggcgucgacggccccgacaacaacgcccuccucaaggucaaguacggcgaggccuacaccgacaccuaccacuccuacgccaacaagauccuccgcacccaggaguccgccugcaacugcaucggcggcaacugcuaccucaugaucaccgacggcuccgccuccggcgucuccgagugccgcuuccucaagauccgcgagggccgcaucaucaaggagaucuuccccaccggccgcgucaagcacaccgaggagugcaccugcggcuucgccuccaacaagaccaucgagugcgccugccgcgacaaccgcuacaccgccaagcgccccuucgucaagcucgacgucgagaccgacaccgccgagauccgccucaugugcaccgacaccuaccucgacaccccccgccccaacgacggcuccaucaccggccccugcgaguccgacggcgacaagggcuccggcggcaucaagggcggcuucguccaccagcgcaugaaguccaagaucggccgcugguacucccgcaccauguccaagaccgagcgcaugggcaugggccucuacgucaaguacgacggcgaccccugggccgacuccgacgcccucgccuucuccggcgucauggucuccaugaaggagcccggcugguacuccuucggcuucgagaucaaggacaagaagugcgacguccccugcaucggcaucgagaugguccacgacggcggcaaggagaccuggcacuccgccgccaccgccaucuacugccucaugggcuccggccagcuccucugggacaccgucaccggcgucgacauggcccucuga

SEQ ID NO: 126443 - RNA, 1401 nt, Artificial Sequence
  derived and/or modified CDS sequence (opt2) from neuraminidase__InfluenzaB__AKT07927
augccccccuccaccauccagacccucacccucuuccucaccuccggcggcguccuccucucccucuacgucuccgccucccucuccuaccuccucuacuccgacauccuccucaaguucucccccaccgagaucaccgcccccaccaugccccucgacugcgccaacgccuccaacguccaggccgucaaccgcuccgccaccaagggcgucacccuccuccuccccgagcccgaguggaccuacccccgccucuccugccccggcuccaccuuccagaaggcccuccucaucuccccccaccgcuucggcgagacccgcggcaacuccgccccccucaucauccgcgagcccuucaucgccugcggccccaacgagugcaagcacuucgcccucacccacuacgccgcccagcccggcggcuacuacaacggcacccgcggcgaccgcaacaagcuccgccaccucaucuccgucaagcucggcaagauccccaccgucgagaacuccaucuuccacauggccgccugguccggcuccgccugccacgacggcaaggaguggaccuacaucggcgucgacggccccgacaacaacgcccuccucaaggucaaguacggcgaggccuacaccgacaccuaccacuccuacgccaacaagauccuccgcacccaggaguccgccugcaacugcaucggcggcaacugcuaccucaugaucaccgacggcuccgccuccggcgucuccgagugccgcuuccucaagauccgcgagggccgcaucaucaaggagaucuuccccaccggccgcgucaagcacaccgaggagugcaccugcggcuucgccuccaacaagaccaucgagugcgccugccgcgacaacuccuacaccgccaagcgccccuucgucaagcucaacgucgagaccgacaccgccgagauccgccucaugugcaccgacaccuaccucgacaccccccgccccaacgacggcuccaucaccggccccugcgaguccgacggcgacaagggcuccggcggcaucaagggcggcuucguccaccagcgcauggaguccaagaucggccgcugguacucccgcaccauguccaagaccgagcgcaugggcaugggccucuacgucaaguacgacggcgaccccuggaccgacuccgacgcccucgccuucggcggcgucauggucuccaugaaggagcccggcugguacuccuucggcuucgagaucaaggacaagaagugcgacguccccugcaucggcaucgagaugguccacgacggcggcaaggagaccuggcacuccgccgccaccgccaucuacugccucaugggcuccggccagcuccucugggacaccgucaccggcgucgacauggcccucuga

SEQ ID NO: 126444 - RNA, 1401 nt, Artificial Sequence; identical to SEQ ID NO: 125155
  derived and/or modified CDS sequence (opt2) from neuraminidase__InfluenzaB__AKT07931

SEQ ID NO: 126445 - RNA, 1401 nt, Artificial Sequence
  derived and/or modified CDS sequence (opt2) from neuraminidase__InfluenzaB__AKT07933
augcuccccuccaccauccagacccucacccucuuccucaccuccggcggcguccuccucucccucuacgucuccgccucccucuccuaccuccucuacuccgacauccuccucaaguucucccccaccgagaucaccgcccccgccaugccccucgacugcgccaacgccuccaacguccaggccgucaaccgcuccgccaccaagggcgucaccuuccuccuccccgagcccgaguggaccuacccccgccucuccugccccggcuccaccuuccagaaggcccuccucaucuccccccaccgcuucggcgagaccaagggcaacuccgccccccucaucauccgcgagcccuucaucgccugcggccccaacgagugcaagcacuucgcccucacccacuacgccgcccagcccggcggcuacuacaacggcacccgcggcgaccgcaacaagcuccgccaccucaucuccgucaagcucggcaagauccccaccgucgagaacuccaucuuccacauggccgccugguccggcuccgccugccacgacggcaaggaguggaccuacaucggcgucgacggccccgacaacaacgcccuccucaaggucaaguacggcgaggccuacaccgacaccuaccacuccuacgccaacaagauccuccgcacccaggaguccgccugcaacugcaucggcggcaacugcuaccucaugaucaccgacggcuccgccuccggcgucuccgagugccgcuuccucaagauccgcgagggccgcaucaucaaggagaucuuccccaccggccgcgucaagcacaccgaggagugcaccugcggcuucgccuccaacaagaccaucgagugcgccugccgcgacaacuccuacaccgccaagcgccccuucgucaagcucaacgucgagaccgacaccgccgagauccgccucaugugcaccgacaccuaccucgacaccccccgccccaacgacggcuccaucaccggccccugcgaguccgacggcgacaagggcuccggcggcaucaagggcggcuucguccaccagcgcauggaguccaagaucggccgcugguacucccgcaccauguccaagaccgagcgcaugggcaugggccucuacgucaaguacgacggcgaccccugggccgacuccgacgcccucgccuucuccggcgucauggucuccaugaaggagcccggcugguacuccuucggcuucgagaucaaggacaagaagugcgacguccccugcaucggcaucgagaugguccacgacggcggcaaggagaccuggcacuccgccgccaccgccaucuacugccucaugggcuccggccagcuccucugggacaccgucaccggcgucgacauggcccucuga

SEQ ID NO: 126446 - RNA, 1401 nt, Artificial Sequence; identical to SEQ ID NO: 125155
  derived and/or modified CDS sequence (opt2) from neuraminidase__InfluenzaB__AKT07935

SEQ ID NO: 126447 - RNA, 1401 nt, Artificial Sequence; identical to SEQ ID NO: 125155
  derived and/or modified CDS sequence (opt2) from neuraminidase__InfluenzaB__AKT07937

SEQ ID NO: 126448 - RNA, 1401 nt, Artificial Sequence; identical to SEQ ID NO: 124997
  derived and/or modified CDS sequence (opt2) from neuraminidase__InfluenzaB__AKT07939

SEQ ID NO: 126449 - RNA, 1401 nt, Artificial Sequence; identical to SEQ ID NO: 125155
  derived and/or modified CDS sequence (opt2) from neuraminidase__InfluenzaB__AKT07941

SEQ ID NO: 126450 - RNA, 1401 nt, Artificial Sequence; identical to SEQ ID NO: 125155
  derived and/or modified CDS sequence (opt2) from neuraminidase__InfluenzaB__AKT07945

SEQ ID NO: 126451 - RNA, 1401 nt, Artificial Sequence
  derived and/or modified CDS sequence (opt2) from neuraminidase__InfluenzaB__AKT07947
augcuccccuccaccauccagacccucacccucuuccucaccuccggcggcguccuccucucccucuacgucuccgccucccucuccuaccuccucuacuccgacauccuccucaaguucucccccaccgagaucaccgcccccgccaugccccucgacugcgccaacgccuccaacguccaggccgucaaccgcuccgccaccaagggcgucacccuccuccuccccgagcccgaguggaccuacccccgccucuccugccccggcuccaccuuccagaaggcccuccucaucuccccccaccgcuucggcgagaccaagggcaacuccgccccccucaucauccgcgagcccuucaucgccugcggccccaacgagugcaagcacuucgcccucacccacuacgccgcccagcccggcggcuacuacaacggcacccgcggcgaccgcaacaagcuccgccaccucaucuccgucaagcucggcaagauccccaccgucgagaacuccaucuuccacauggccgccugguccggcuccgccugccacgacggcaaggaguggaccuacaucggcgucgacggccccgacaacaacgcccuccucaaggucaaguacggcgaggccuacaccgacaccuaccacuccuacgccaacaagauccuccgcacccaggaguccgccugcaacugcaucggcggcaacugcuaccucaugaucaccgacggcuccgccuccggcgucuccgagugccgcuuccucaagauccgcgagggccgcaucaucaaggagaucuuccccaccggccgcgucaagcacaccgaggagugcaccugcggcuucgccuccaacaagaccaucgagugcgccugccgcgacaacuccuacaccgccaagcgccccuucgucaagcucaacgucgagaccgacaccgccgagauccgccucaugugcaccgacaccuaccucgacaccccccgccccaacgacggcuccaucaccggccccugcgaguccgacggcgacaagggcuccggcggcaucaagggcggcuucguccaccagcgcauggaguccaagaucggccgcugguacucccgcaccauguccaagaccgagcgcaugggcaugggccucuacgucaaguacgacggcgaccccugggccgacuccgacgcccucgccuucuccggcgucauggucuccaugaaggagcccggcugguacuccuucggcuucgagaucaaggacaagaagugcgacguccccugcaucggcgucgacaugguccacgacugcggcaaggagaccuggcacuccgccgccaccgccaucuacugccucaugggcuccggccagcuccucugggacaccgucaccggcgucgacauggcccucuga

SEQ ID NO: 126452 - RNA, 1401 nt, Artificial Sequence; identical to SEQ ID NO: 126410
  derived and/or modified CDS sequence (opt2) from neuraminidase__InfluenzaB__AKU40585

SEQ ID NO: 126453 - RNA, 1401 nt, Artificial Sequence; identical to SEQ ID NO: 126410
  derived and/or modified CDS sequence (opt2) from neuraminidase__InfluenzaB__AKU40596

SEQ ID NO: 126454 - RNA, 1401 nt, Artificial Sequence
  derived and/or modified CDS sequence (opt2) from neuraminidase__InfluenzaB__AKU40607
augcuccccuccaccauccagacccucacccucuuccucaccuccggcggcguccuccucucccucuacgucuccgccucccucuccuaccuccucuacuccgacauccuccucaaguucucccgcaccgaggucaccgcccccaucaccccccucgacugcgccaacgccuccaacgcccaggccgucaaccgcuccgccaccaagggcgucaccccccuccuccccgagcccgaguggaccuacccccgccucuccugccccggcuccaccuuccagaaggcccuccucaucuccccccaccgcuucggcgagaccaagggcaacuccgccccccucaucauccgcgagcccuucaucgccugcggccccaaggagugcaagcacuucgcccucacccacuacgccgcccagcccggcggcuacuacaacggcacccgcgaggaccgcaacaagcuccgccaccucaucuccgucaagcucggcaagauccccaccgucgagaacuccaucuuccacauggccgccugguccggcuccgccugccacgacggccgcgaguggaccuacaucggcgucgacggccccgacuccaacgcccuccucaagaucaaguacggcgaggccuacaccgacaccuaccacuccuacgccaagaacauccuccgcacccaggaguccgccugcaacugcaucggcggcgacugcuaccucaugaucaccgacggccccgccuccggcaucuccgagugccgcuuccucaagauccgcgagggccgcaucaucaaggagaucuuccccaccggccgcgucaagcacaccgaggagugcaccugcggcuucgccuccaacaagaccaucgagugcgccugccgcgacaacuccuacaccgccaagcgccccuucgucaagcucaacgucgagaccgacaccgccgagauccgccucaugugcaccaagaccuaccucgacaccccccgccccaacgacggcuccaucaccggccccugcgaguccgacggcgacgagggcuccggcggcaucaagggcggcuucguccaccagcgcauggccuccaagaucggccgcugguacucccgcaccauguccaagaccaagcgcaugggcaugggccucuacgucaaguacgacggcgaccccuggaccgacuccgaggcccucgcccucuccggcgucauggucuccauggaggagcccggcugguacuccuucggcuucgagaucaaggacaagaagugcgacguccccugcaucggcaucgagaugguccacgacggcggcaagaccaccuggcacuccgccgccaccgccaucuacugccucaugggcuccggccagcuccucugggacaccgucaccggcgucaacaugacccucuga

SEQ ID NO: 126455 - RNA, 1401 nt, Artificial Sequence
  derived and/or modified CDS sequence (opt2) from neuraminidase__InfluenzaB__AKU40618
augcuccccuccaccauccagacccucacccucuuccucaccuccggcggcguccuccucucccucuacgucuccgccucccucuccuaccuccucuacuccgacauccuccucaaguucucccgcaccgaggucaccgcccccaucaugccccucgacugcgccaacgccuccaacguccaggccgucaaccgcuccgccaccaagggcgucaccccccuccuccccgagcccgaguggaccuacccccgccucuccugccccggcuccaccuuccagaaggcccuccucaucuccccccaccgcuucggcgagaccaagggcaacuccgccccccucaucauccgcgagcccuucaucgccugcggccccaaggagugcaagcacuucgcccucacccacuacgccgcccagcccggcggcuacuacaacggcacccgcgaggaccgcaacaagcuccgccaccucaucuccgucaagcucggcaagauccccaccgucgagaacuccaucuuccacauggccgccugguccggcuccgccugccacgacggccgcgaguggaccuacaucggcgucgacggccccgacuccaacgcccuccucaagaucaaguacggcgaggccuacaccgacaccuaccacuccuacgccaagaacauccuccgcacccaggaguccgccugcaacugcaucggcggcgacugcuaccucaugaucaccgacggccccgccuccggcaucuccgagugccgcuuccucaagauccgcgagggccgcaucaucaaggagaucuuccccaccggccgcgucaagcacaccgaggagugcaccugcggcuucgccuccaacaagaccaucgagugcgccugccgcgacaacuccuacaccgccaagcgccccuucgucaagcucaacgucgagaccgacaccgccgagauccgccucaugugcaccaagaccuaccucgacaccccccgccccaacgacggcuccaucaccggccccugcgaguccgacggcgacgagggcuccggcggcaucaagggcggcuucguccaccagcgcauggccuccaagaucggccgcugguacucccgcaccauguccaagaccaagcgcaugggcaugggccucuacgucaaguacgacggcgaccccuggaccgacuccgaggcccucgcccucuccggcgucauggucuccauggaggagcccggcugguacuccuucggcuucgagaucaaggacaacaagugcgacguccccugcaucggcaucgagaugguccacgacggcggcaagaccaccuggcacuccgccgccaccgccaucuacugccucaugggcuccggccagcuccucugggacaccgucaccggcgucaacaugacccucuga

SEQ ID NO: 126456 - RNA, 1401 nt, Artificial Sequence
  derived and/or modified CDS sequence (opt2) from neuraminidase__InfluenzaB__AKU40640
augcuccccuccaccauccagacccucacccucuuccucaccuccggcggcguccuccucucccucuacgucuccgccucccucuccuaccuccucuacuccgacauccuccucaaguucucccgcaccgagaucgccgcccccaucaugccccucgacugcgccaacgccuccaacguccaggccgucaaccgcuccgccaccaagggcgucgcccuccuccuccccgagcccgaguggaccuacccccgccucuccugccccggcuccaccuuccagaaggcccuccucaucuccccccaccgcuucggcgagaccaagggcaacuccgccccccucaucauccgcgagcccuucaucgccugcggccccaaggagugcaagcacuucgcccucacccacuacgccgcccagcccggcggcuacuacaacggcacccgcgaggaccgcaacaagcuccgccaccucaucuccgucaagcucggcaagauccccaccgucgagaacuccaucuuccacauggccgccugguccggcuccgccugccacgacggccgcgaguggaccuacaucggcgucgacggccccgacaacaacgcccuccucaagaucaaguacggcgaggccuacaccgacaccuaccacuccuacgccaagaacauccuccgcacccaggaguccgccugcaacugcaucggcggcgacugcuaccucaugaucaccgacggccccgccuccggcaucuccgagugccgcuuccucaagauccgcgagggccgcaucaucaaggagaucuuccccaccggccgcgucaagcacaccgaggagugcaccugcggcuucgccuccaacaagaccaucgagugcgccugccgcgacaacuccuacaccgccaagcgccccuucgucaagcucaacgucgagaccgacaccgccgagauccgccucaugugcaccgagaccuaccucgacaccccccgccccaacgacggcuccaucaccggccccugcgaguccaacggcgacaagggcuccggcggcaucaagggcggcuucguccaccagcgcauggccuccaagaucggccgcugguacucccgcaccauguccaagaccaagcgcaugggcaugggccucuacgucaaguacgacggcgaccccuggaccgacuccgaggcccucgcccucuccggcgucauggucuccauggaggagcccggcugguacuccuucggcuucgagaucaaggacaagaagugcgacguccccugcaucggcaucgagaugguccacgacggcggcaagaccaccuggcacuccgccgccaccgccaucuacugccucaugggcuccggccagcuccucugggacaccgucaccggcgucaacaugacccucuga

SEQ ID NO: 126457 - RNA, 1401 nt, Artificial Sequence; identical to SEQ ID NO: 126410
  derived and/or modified CDS sequence (opt2) from neuraminidase__InfluenzaB__AKU40662

SEQ ID NO: 126458 - RNA, 1401 nt, Artificial Sequence
  derived and/or modified CDS sequence (opt2) from neuraminidase__InfluenzaB__AKU40673
augcuccccuccaccauccagacccucacccucuuccucaccuccggcggcguccuccucucccucuacgucuccgccucccucuccuaccuccucuacuccgacauccuccucaaguucucccgcaccgaggucaccgcccccaucaugccccucgacugcgccaacgccuccaacguccaggccgucaaccgcuccgccaccaagggcgucaccccccuccuccccgaguccgaguggaccuacccccgccucuccugccccggcuccaccuuccagaaggcccuccucaucuccccccaccgcuucggcgagaccaagggcaacuccgccccccucaucauccgcgagcccuucaucgccugcggccccaaggagugcaagcacuucgcccucacccacuacgccgcccagcccggcggcuacuacaacggcacccgcgaggaccgcaacaagcuccgccaccucaucuccgucaagcucggcaagauccccaccgucgagaacuccaucuuccacauggccgccugguccggcuccgccugccacgacggccgcgaguggaccuacaucggcgucgacggccccgacuccaacgcccuccucaagaucaaguacggcgaggccuacaccgacaccuaccacuccuacgccaagaacauccuccgcacccaggaguccgccugcaacugcaucggcggcgacugcuaccucaugaucaccgacggccccgccuccggcaucuccgagugccgcuuccucaagauccgcgagggccgcaucaucaaggagaucuuccccaccggccgcgucaagcacaccgaggagugcaccugcggcuucgccuccaacaagaccaucgagugcgccugccgcgacaacuccuacaccgccaagcgccccuucgucaagcucaacgucgagaccgacaccgccgagauccgccucaugugcaccaagaccuaccucgacaccccccgccccaacgacggcuccaucaccggccccugcgaguccgacggcgacgagggcuccggcggcaucaagggcggcuucguccaccagcgcauggccuccaagaucggccgcugguacucccgcaccauguccaagaccaagcgcaugggcaugggccucuacgucaaguacgacggcgaccccuggaccgacuccgaggcccucgcccucuccggcgucauggucuccauggaggagcccggcugguacuccuucggcuucgagaucaaggacaagaagugcgacguccccugcaucggcaucgagaugguccacgacggcggcaagaccaccuggcacuccgccgccaccgccaucuacugccucaugggcuccggccagcuccucugggacaccgucaccggcgucaacaugacccucuga

SEQ ID NO: 126459 - RNA, 1401 nt, Artificial Sequence; identical to SEQ ID NO: 126410
  derived and/or modified CDS sequence (opt2) from neuraminidase__InfluenzaB__AKU40684

SEQ ID NO: 126460 - RNA, 1401 nt, Artificial Sequence; identical to SEQ ID NO: 126410
  derived and/or modified CDS sequence (opt2) from neuraminidase__InfluenzaB__AKU40695

SEQ ID NO: 126461 - RNA, 1401 nt, Artificial Sequence; identical to SEQ ID NO: 126410
  derived and/or modified CDS sequence (opt2) from neuraminidase__InfluenzaB__AKU40706

SEQ ID NO: 126462 - RNA, 1401 nt, Artificial Sequence; identical to SEQ ID NO: 126410
  derived and/or modified CDS sequence (opt2) from neuraminidase__InfluenzaB__AKU40717

SEQ ID NO: 126463 - RNA, 1401 nt, Artificial Sequence
  derived and/or modified CDS sequence (opt2) from neuraminidase__InfluenzaB__AKU40728
augcuccccuccaccauccagacccucacccucuuccucaccuccggcggcguccuccucucccucuacgucuccgccucccucuccuaccuccucuacuccgacauccuccucaaguucucccgcaccgaggucaccgcccccaucaugccccucgacugcgccaacgccuccaacgcccaggccgucaaccgcuccgccaccaagggcgucaccccccuccuccccgagcccgaguggaccuacccccgccucuccugccccggcuccaccuuccagaaggcccuccucaucuccccccaccgcuucggcgagaccaagggcaacuccgccccccucaucauccgcgagcccuucaucgccugcggccccaaggagugcaagcacuucgcccucacccacuacgccgcccagcccggcggcuacuacaacggcacccgcgaggaccgcaacaagcuccgccaccucaucuccgucaagcucggcaagauccccaccgucgagaacuccaucuuccacauggccgccugguccggcuccgccugccacgacggccgcgaguggaccuacaucggcgucgacggccccgacuccaacgcccuccucaagaucaaguacggcgaggccuacaccgacaccuaccacuccuacgccaagaacauccuccgcacccaggaguccgccugcaacugcaucggcggcgacugcuaccucaugaucaccgacggccccgccuccggcaucuccgagugccgcuuccucaagauccgcgagggccgcaucaucaaggagaucuuccccaccggccgcgucaagcacaccgaggagugcaccugcggcuucgccuccaacaagaccaucgagugcgccugccgcgacaacuccuacaccgccaagcgccccuucgucaagcucaacgucgagaccgacaccgccgagauccgccucaugugcaccaagaccuaccucgacaccccccgccccaacgacggcuccaucaccggccccugcgaguccgacggcgacgagggcuccggcggcaucaagggcggcuucguccaccagcgcauggccuccaagaucggccgcugguacucccgcaccauguccaagaccaagcgcaugggcaugggccucuacgucaaguacgacggcgaccccuggaccgacuccgaggcccucgcccucuccggcgucauggucuccauggaggagcccggcugguacuccuucggcuucgagaucaaggacaagaagugcgacguccccugcaucggcaucgagaugguccacgacggcggcaagaccaccuggcacuccgccgccaccgccaucuacugccucaugggcuccggccagcuccucugggacaccgucaccggcgucaacaugacccucuga

SEQ ID NO: 126464 - RNA, 1401 nt, Artificial Sequence
  derived and/or modified CDS sequence (opt2) from neuraminidase__InfluenzaB__AKU40739
augcuccccuccaccauccagacccucacccucuuccucaccuccggcggcguccuccucucccucuacgucuccgccucccucuccuaccuccucuacuccgacauccuccucaaguucucccgcaccgaggucaccgcccccaucaugccccucgacugcgccaacgccuccaacguccaggccgucaaccgcuccgccaccaagggcgucaccccccuccuccccgagcccgaguggaccuacccccgccucuccugccccggcuccaccuuccagaaggcccuccucaucuccccccaccgcuucggcgagaccaagggcaacuccgccccccucaucauccgcgagcccuucaucgccugcggccccaaggagugcaagcacuucgcccucacccacuacgccgcccagcccggcggcuacuacaacggcacccgcgaggaccgcaacaagcuccgccaccucaucuccgucaagcucggcaagauccccaccgucgagaacuccaucuuccacauggccgccugguccggcuccgccugccacgacggccgcgaguggaccuacaucggcgucgacggccccgacuccaacgcccuccucaagaucaaguacggcgagaccuacaccgacaccuaccacuccuacgccaagaacauccuccgcacccaggaguccgccugcaacugcaucggcggcgacugcuaccucaugaucaccgacggccccgccuccggcaucuccgagugccgcuuccucaagauccgcgagggccgcaucaucaaggagaucuuccccaccggccgcgucaagcacaccgaggagugcaccugcggcuucgccuccaacaagaccaucgagugcgccugccgcgacaacuccuacaccgccaagcgccccuucgucaagcucaacgucgagaccgacaccgccgagauccgccucaugugcaccaagaccuaccucgacaccccccgccccaacgacggcuccaucaccggccccugcgaguccgacggcgacgagggcuccggcggcaucaagggcggcuucguccaccagcgcauggccuccaagaucggccgcugguacucccgcaccauguccaagaccaagcgcaugggcaugggccucuacgucaaguacgacggcgaccccuggaccgacuccgaggcccucgcccucuccggcgucauggucuccauggaggagcccggcugguacuccuucggcuucgagaucaaggacaagaagugcgacguccccugcaucggcaucgagaugguccacgacggcggcaagaccaccuggcacuccgccgccaccgccaucuacugccucaugggcuccggccagcuccucugggacaccgucaccggcgucaacaugacccucuga

SEQ ID NO: 126465 - RNA, 1401 nt, Artificial Sequence
  derived and/or modified CDS sequence (opt2) from neuraminidase__InfluenzaB__AKU40750
augcuccccuccaccauccagacccucacccucuuccucaccuccggcggcguccuccucucccucuacgucuccgccucccucuccuaccuccucuacuccgacauccuccucaaguucucccgcaccgaggucaccgcccccaucaugccccucgacugcgccaacgccuccaacguccaggccgucaaccgcuccgccaccaagggcgucaucccccuccuccccgagcccgaguggaccuacccccgccucuccugccccggcuccaccuuccagaaggcccuccucaucuccccccaccgcuucggcgagaccaagggcaacuccgccccccucaucauccgcgagcccuucaucgccugcggccccaaggagugcaagcacuucgcccucacccacuacgccgcccagcccggcggcuacuacaacggcacccgcgaggaccgcaacaagcuccgccaccucaucuccgucaagcucggcaagauccccaccgucgagaacuccaucuuccacauggccgccugguccggcuccgccugccacgacggccgcgaguggaccuacaucggcgucgacggccccgacuccaacgcccuccucaagaucaaguacggcgaggccuacaccgacaccuaccacuccuacgccaagaacauccuccgcacccaggaguccgccugcaacugcaucggcggcgacugcuaccucaugaucaccgacggccccgccuccggcaucuccgagugccgcuuccucaagauccgcgagggccgcaucaucaaggagaucuuccccaccggccgcgucaagcacaccgaggagugcaccugcggcuucgccuccaacaagaccaucgagugcgccugccgcgacaacuccuacaccgccaagcgccccuucgucaagcucaacgucgagaccgacaccgccgagauccgccucaugugcaccaagaccuaccucgacaccccccgccccaacgacggcuccaucaccggccccugcgaguccgacggcgacgagggcuccggcggcaucaagggcggcuucguccaccagcgcauggccuccaagaucggccgcugguacucccgcaccauguccaagaccaagcgcaugggcaugggccucuacgucaaguacgacggcgaccccuggaccgacuccgaggcccucgcccucuccggcgucauggucuccauggaggagcccggcugguacuccuucggcuucgagaucaaggacaagaagugcgacguccccugcaucggcaucgagaugguccacgacggcggcaagaccaccuggcacuccgccgccaccgccaucuacugccucaugggcuccggccagcuccucugggacaccgucaccggcgucaacaugacccucuga

SEQ ID NO: 126466 - RNA, 1401 nt, Artificial Sequence; identical to SEQ ID NO: 126410
  derived and/or modified CDS sequence (opt2) from neuraminidase__InfluenzaB__AKU40761

SEQ ID NO: 126467 - RNA, 1401 nt, Artificial Sequence; identical to SEQ ID NO: 126410
  derived and/or modified CDS sequence (opt2) from neuraminidase__InfluenzaB__AKU40772

SEQ ID NO: 126468 - RNA, 1401 nt, Artificial Sequence; identical to SEQ ID NO: 126410
  derived and/or modified CDS sequence (opt2) from neuraminidase__InfluenzaB__AKU40783

SEQ ID NO: 126469 - RNA, 1401 nt, Artificial Sequence
  derived and/or modified CDS sequence (opt2) from neuraminidase__InfluenzaB__AKU40794
augcuccccuccaccauccagacccucacccucuuccucaccuccggcggcguccuccucucccucuacgucuccgccucccucuccuaccuccucuacuccgacauccuccucaaguucucccgcaccgaggucaccgcccccaucaugccccucgacugcgccaacaccuccaacguccaggccgucaaccgcuccgccaccaagggcgucaccccccuccuccccgagcccgaguggaccuacccccgccucuccugccccggcuccaccuuccagaaggcccuccucaucuccccccaccgcuucggcgagaccaagggcaaguccgccccccucaucauccgcgagcccuucaucgccugcggccccaaggagugcaagcacuucgcccucacccacuacgccgcccagcccggcggcuacuacaacggcacccgcgaggaccgcaacaagcuccgccaccucaucuccgucaagcucggcaagauccccaccgucgagaacuccaucuuccacauggccgccugguccggcuccgccugccacgacggccgcgaguggaccuacaucggcgucgacggccccgacuccaacgcccuccucaagaucaaguacggcgaggccuacaccgacaccuaccacuccuacgccaagaacauccuccgcacccaggaguccgccugcaacugcaucggcggcgacugcuaccucaugaucaccgacggccccgccuccggcaucuccgagugccgcuuccucaagauccgcgagggccgcaucaucaaggagaucuuccccaccggccgcgucaagcacaccgaggagugcaccugcggcuucgccuccaacaagaccaucgagugcgccugccgcgacaacuccuacaccgccaagcgccccuucgucaagcucaacgucgagaccgacaccgccgagauccgccucaugugcaccaagaccuaccucgacaccccccgccccaacgacggcuccaucaccggccccugcgaguccgacggcgacgagggcuccggcggcaucaagggcggcuucguccaccagcgcauggccuccaagaucggccgcugguacucccgcaccauguccaagaccaagcgcaugggcaugggccucuacgucaaguacgacggcgaccccuggaccgacuccgaggcccucgcccucuccggcgucauggucuccauggaggagcccggcugguacuccuucggcuucgagaucaaggacaagaagugcgacguccccugcaucggcaucgagaugguccacgacggcggcaagaccaccuggcacuccgccgccaccgccaucuacugccucaugggcuccggccagcuccucugggacaccgucaccggcgucaacaugacccucuga

SEQ ID NO: 126470 - RNA, 1401 nt, Artificial Sequence; identical to SEQ ID NO: 126410
  derived and/or modified CDS sequence (opt2) from neuraminidase__InfluenzaB__AKU40805

SEQ ID NO: 126471 - RNA, 1401 nt, Artificial Sequence; identical to SEQ ID NO: 126410
  derived and/or modified CDS sequence (opt2) from neuraminidase__InfluenzaB__AKU40816

SEQ ID NO: 126472 - RNA, 1401 nt, Artificial Sequence; identical to SEQ ID NO: 126410
  derived and/or modified CDS sequence (opt2) from neuraminidase__InfluenzaB__AKU40827

SEQ ID NO: 126473 - RNA, 1401 nt, Artificial Sequence; identical to SEQ ID NO: 126410
  derived and/or modified CDS sequence (opt2) from neuraminidase__InfluenzaB__AKU40838

SEQ ID NO: 126474 - RNA, 1401 nt, Artificial Sequence; identical to SEQ ID NO: 126410
  derived and/or modified CDS sequence (opt2) from neuraminidase__InfluenzaB__AKU40849

SEQ ID NO: 126475 - RNA, 1401 nt, Artificial Sequence; identical to SEQ ID NO: 126410
  derived and/or modified CDS sequence (opt2) from neuraminidase__InfluenzaB__AKU40860

SEQ ID NO: 126476 - RNA, 1401 nt, Artificial Sequence
  derived and/or modified CDS sequence (opt2) from neuraminidase__InfluenzaB__AKU40871
augcuccccuccaccauccagacccucacccucuuccucaccuccggcggcguccuccucucccucuacgucuccgccucccucuccuaccuccucuacuccgacauccuccucaaguucucccgcaccgaggucaccgcccccaucaugccccucgacugcgccaacgccuccaacguccaggccgucaaccgcuccgccaccaagggcgucgccccccuccuccccgagcccgaguggaccuacccccgccucuccugccccggcuccaccuuccagaaggcccuccucaucuccccccaccgcuucggcgagaccaagggcaacuccgccccccucaucauccgcgagcccuucaucgccugcggccccaaggagugcaagcacuucgcccucacccacuacgccgcccagcccggcggcuacuacaacggcacccgcgaggaccgcaacaagcuccgccaccucaucuccgucaagcucggcaagauccccaccgucgagaacuccaucuuccacauggccgccugguccggcuccgccugccacgacggccgcgaguggaccuacaucggcgucgacggccccgacuccaacgcccuccucaagaucaaguacggcgaggccuacaccgacaccuaccacuccuacgccaagaacauccuccgcacccaggaguccgccugcaacugcaucggcggcgacugcuaccucaugaucaccgacggccccgccuccggcaucuccgagugccgcuuccucaagauccgcgagggccgcaucaucaaggagaucuuccccaccggccgcgucaagcacaccgaggagugcaccugcggcuucgccuccaacaagaccaucgagugcgccugccgcgacaacuccuacaccgccaagcgccccuucgucaagcucaacgucgagaccgacaccgccgagauccgccucaugugcaccaagaccuaccucgacaccccccgccccaacgacggcuccaucaccggccccugcgaguccgacggcgacgagggcuccggcggcaucaagggcggcuucguccaccagcgcauggccuccaagaucggccgcugguacucccgcaccauguccaagaccaagcgcaugggcaugggccucuacgucaaguacgacggcgaccccuggaccgacuccgaggcccucacccucuccggcgucauggucuccauggaggagcccggcugguacuccuucggcuucgagaucaaggacaagaagugcgacguccccugcaucggcaucgagaugguccacgacggcggcaagaccaccuggcacuccgccgccaccgccaucuacugccucaugggcuccggccagcuccucugggacaccgucaccggcgucaacaugacccucuga

SEQ ID NO: 126477 - RNA, 1401 nt, Artificial Sequence; identical to SEQ ID NO: 126410
  derived and/or modified CDS sequence (opt2) from neuraminidase__InfluenzaB__AKU40882

SEQ ID NO: 126478 - RNA, 1401 nt, Artificial Sequence
  derived and/or modified CDS sequence (opt2) from neuraminidase__InfluenzaB__AKU40893
augcuccccuccaccauccagacccucacccucuuccucaccuccggcggcguccuccucucccucuacgucuccgccucccucuccuaccuccucuacuccgacauccuccucaaguucucccccaccgagaucaccgcccccaccaugccccucgacugcgccaacgccuccaacguccaggccgucaaccgcuccgccaccaagggcgucacccuccuccuccccgagcccgaguggaccuacccccgccucuccugccccggcuccaccuuccagaaggcccuccucaucuccccccaccgcuucggcgagaccaagggcaacuccgccccccucaucauccgcgagcccuucaucgccugcggccccaacgagugcaagcacuucgcccucacccacuacgccgcccagcccggcggcuacuacaacggcacccgcggcgaccgcaacaagcuccgccaccucaucuccgucaagcucggcaagauccccaccgucgagaacuccaucuuccacauggccgccugguccggcuccgccugccacgacggcaaggaguggaccuacaucggcgucgacggccccgacaacaacgcccuccucaaggucaaguacggcgaggccuacaccgacaccuaccacuccuacgccaacaagauccuccgcacccaggaguccgccugcaacugcaucggcggcaacugcuaccucaugaucaccgacggcuccgccuccggcgucuccgagugccgcuuccucaagauccgcgagggccgcaucaucaaggagaucuuccccaccggccgcgucaagcacaccgaggagugcaccugcggcuucgccuccaacaagaccaucgagugcgccugccgcgacaaccgcuacaccgccaagcgccccuucgucaagcucaacgucgagaccgacaccgccgagauccgccucaugugcaccgacaccuaccucgacaccccccgccccaacgacggcuccaucaccggccccugcgaguccgacggcgacaagggcuccggcggcaucaagggcggcuucguccaccagcgcaugaaguccaagaucggccgcugguacucccgcaccauguccaagaccgagcgcaugggcaugggccucuacgucaaguacgacggcgaccccugggccgacuccggcgcccucgccuucuccggcgucauggucuccaugaaggagcccggcugguacuccuucggcuucgagaucaaggacaagaagugcgacguccccugcaucggcaucgagaugguccacgacggcggcaaggagaccuggcacuccgccgccaccgccaucuacugccucaugggcuccggccagcuccucugggacaccgucaccggcgucgacauggcccucuga

SEQ ID NO: 126479 - RNA, 1401 nt, Artificial Sequence; identical to SEQ ID NO: 126410
  derived and/or modified CDS sequence (opt2) from neuraminidase__InfluenzaB__AKU40904

SEQ ID NO: 126480 - RNA, 1401 nt, Artificial Sequence
  derived and/or modified CDS sequence (opt2) from neuraminidase__InfluenzaB__AKU40915
augcuccccuccaccauccagacccucacccucuuccucaccuccggcggcguccuccucucccucuacgucuccgccucccucuccuaccuccucuacuccgacauccuccucaaguucucccgcaccgaggucaccgcccccaucaugccccucgacugcgccaacgccuccaacguccaggccgucaaccgcuccgccaccaagggcgucaccccccuccuccccgagcccgaguggaccuacccccgccucuccugccccggcuccaccuuccagaaggcccuccucaucuccccccaccgcuucggcgagaccaagggcaacuccgccccccucaucauccgcgagcccuucaucgccugcggccccaaggagugcaagcacuucgcccucacccacuacgccgcccagcccggcggcuacuacaacggcacccgcgaggaccgcaacaagcuccgccaccucaucuccgucaagcucggcaagauccccaccgucgagaacuccaucuuccacauggccgccugguccggcuccgccugccacgacggccgcgaguggaccuacaucggcgucgacggccccgacuccaacgcccuccucaagaucaaguacggcgaggccuacaccgacaccuaccacuccuacgccaagaacauccuccgcacccaggaguccgccugcaacugcaucggcggcgacugcuaccucaugaucaccgacggccccgccuccggcaucuccgagugccgcuuccucaagauccgcgagggccgcaucaucaaggagaucuuccccaccggccgcgucaagcacaccgaggagugcaccugcggcuucgccuccaacaagaccaucgagugcgccugccgcgacaacuccuacaccgccaagcgccccuucgucaagcucaacgucgagaccgacaccgccgagauccgccucaugugcaccaagaccuaccucgacaccccccgccccaacgacggcuccaucaccggccccugcgaguccgacggcgacgagggcuccggcggcaucaagggcggcuucguccaccagcgcauggccuccaagaucggccgcugguacucccgcaccauguccaagaccaagcgcaugggcaugggccucuacgucaaguacgacggcgaccccuggaccgacuccgaggcccucgcccucuccggcgucaugguccccauggaggagcccggcugguacuccuucggcuucgagaucaaggacaagaagugcgacguccccugcaucggcaucgagaugguccacgacggcggcaagaccaccuggcacuccgccgccaccgccaucuacugccucaugggcuccggccagcuccucugggacaccgucaccggcgucaacaugacccucuga

SEQ ID NO: 126481 - RNA, 1401 nt, Artificial Sequence; identical to SEQ ID NO: 126410
  derived and/or modified CDS sequence (opt2) from neuraminidase__InfluenzaB__AKU40926

SEQ ID NO: 126482 - RNA, 1401 nt, Artificial Sequence; identical to SEQ ID NO: 126464
  derived and/or modified CDS sequence (opt2) from neuraminidase__InfluenzaB__AKU40937

SEQ ID NO: 126483 - RNA, 1401 nt, Artificial Sequence; identical to SEQ ID NO: 126410
  derived and/or modified CDS sequence (opt2) from neuraminidase__InfluenzaB__AKU40948

SEQ ID NO: 126484 - RNA, 1401 nt, Artificial Sequence; identical to SEQ ID NO: 126410
  derived and/or modified CDS sequence (opt2) from neuraminidase__InfluenzaB__AKU40959

SEQ ID NO: 126485 - RNA, 1401 nt, Artificial Sequence; identical to SEQ ID NO: 126410
  derived and/or modified CDS sequence (opt2) from neuraminidase__InfluenzaB__AKU40970

SEQ ID NO: 126486 - RNA, 1401 nt, Artificial Sequence; identical to SEQ ID NO: 126410
  derived and/or modified CDS sequence (opt2) from neuraminidase__InfluenzaB__AKU40981

SEQ ID NO: 126487 - RNA, 1401 nt, Artificial Sequence; identical to SEQ ID NO: 126410
  derived and/or modified CDS sequence (opt2) from neuraminidase__InfluenzaB__AKU40991

SEQ ID NO: 126488 - RNA, 1401 nt, Artificial Sequence; identical to SEQ ID NO: 126410
  derived and/or modified CDS sequence (opt2) from neuraminidase__InfluenzaB__AKU41002

SEQ ID NO: 126489 - RNA, 1401 nt, Artificial Sequence; identical to SEQ ID NO: 126410
  derived and/or modified CDS sequence (opt2) from neuraminidase__InfluenzaB__AKU41013

SEQ ID NO: 126490 - RNA, 1401 nt, Artificial Sequence; identical to SEQ ID NO: 126410
  derived and/or modified CDS sequence (opt2) from neuraminidase__InfluenzaB__AKU41024

SEQ ID NO: 126491 - RNA, 1401 nt, Artificial Sequence; identical to SEQ ID NO: 124997
  derived and/or modified CDS sequence (opt2) from neuraminidase__InfluenzaB__EPI173278

SEQ ID NO: 126492 - RNA, 1401 nt, Artificial Sequence; identical to SEQ ID NO: 124997
  derived and/or modified CDS sequence (opt2) from neuraminidase__InfluenzaB__EPI498049

SEQ ID NO: 126493 - RNA, 1401 nt, Artificial Sequence; identical to SEQ ID NO: 124997
  derived and/or modified CDS sequence (opt2) from neuraminidase__InfluenzaB__AFH57913

SEQ ID NO: 126494 - RNA, 1401 nt, Artificial Sequence; identical to SEQ ID NO: 124997
  derived and/or modified CDS sequence (opt2) from neuraminidase__InfluenzaB__EPI827074

SEQ ID NO: 126495 - RNA, 1401 nt, Artificial Sequence; identical to SEQ ID NO: 124997
  derived and/or modified CDS sequence (opt2) from neuraminidase__InfluenzaB__EPI244698

SEQ ID NO: 126496 - RNA, 1401 nt, Artificial Sequence; identical to SEQ ID NO: 124997
  derived and/or modified CDS sequence (opt2) from neuraminidase__InfluenzaB__EPI244701

SEQ ID NO: 126497 - RNA, 1401 nt, Artificial Sequence; identical to SEQ ID NO: 126410
  derived and/or modified CDS sequence (opt2) from neuraminidase__InfluenzaB__EPI540672

SEQ ID NO: 126498 - RNA, 1401 nt, Artificial Sequence; identical to SEQ ID NO: 126410
  derived and/or modified CDS sequence (opt2) from neuraminidase__InfluenzaB__EPI829465

SEQ ID NO: 126499 - RNA, 1401 nt, Artificial Sequence
  derived and/or modified CDS sequence (opt2) from neuraminidase__InfluenzaB__EPI684428
augcuccccuccaccauccagacccucacccucuuccucaccuccggcggcguccuccucucccucuacgucuccgccucccucuccuaccuccucuacuccgacauccuccucaaguucucccgcaccgaggucaccgcccccaccaugccccucgacugcgccaacgccuccaacguccaggccgucaaccgcuccaccaccaagggcgucaccccccucuuccccgagcccgaguggaccuacccccgccucuccugccccggcuccaccuuccagaaggcccuccucaucuccccccaccgcuucggcgagaccaagggcaacuccgccccccucaucauccgcgagcccuucaucgccugcggccccaaggagugcaagcacuucgcccucacccacuacgccgcccagcccggcggcuacuacaacggcacccgcgaggaccgcaacaagcuccgccaccucaucuccgucaagcucggcaagauccccaccgucgagaacuccaucuuccacauggccgccugguccggcuccgccugccacgacggccgcgaguggaccuacaucggcgucgacggccccgacuccaacgcccuccucaagaucaaguacggcgaggccuacaccgacaccuaccacuccuacgccaagaacauccuccgcacccaggaguccgccugcaacugcaucggcggcgacugcuaccucaugaucaccgacggccccgccuccggcgucuccgagugccgcuuccucaagauccgcgagggccgcaucaucaaggagaucuuccccaccggccgcgucaagcacaccgaggagugcaccugcggcuucgccuccaacaagaccaucgagugcgccugccgcgacaaccgcuacaccgccaagcgccccuucgucaagcucaacgucgagaccgacaccgccgagauccgccucaugugcaccaagaccuaccucgacaccccccgccccaacgacggcuccaucaccggccccugcgaguccgacggcgacgagggcuccggcggcaucaagggcggcuucguccaccagcgcauggccuccaagaucggccgcugguacucccgcaccauguccaagaccaagcgcaugggcaugggccucuacgucaaguacgacggcgaccccuggaccgacuccgaggcccucgcccucuccggcgucauggucuccauggaggagcccggcugguacuccuucggcuucgagaucaaggacaagaagugcgacguccccugcaucggcaucgagaugguccacgacggcggcaagaccaccuggcacuccgccgccaccgccaucuacugccucaugggcuccggccagcuccucugggacaccgucaccggcgucaacaugacccucuga

SEQ ID NO: 126500 - RNA, 1401 nt, Artificial Sequence; identical to SEQ ID NO: 125019
  derived and/or modified CDS sequence (opt2) from neuraminidase__InfluenzaB__AFH58451

SEQ ID NO: 126501 - RNA, 1401 nt, Artificial Sequence; identical to SEQ ID NO: 124997
  derived and/or modified CDS sequence (opt2) from neuraminidase__InfluenzaB__EPI173280

SEQ ID NO: 126502 - RNA, 1401 nt, Artificial Sequence; identical to SEQ ID NO: 124997
  derived and/or modified CDS sequence (opt2) from neuraminidase__InfluenzaB__EPI186302

SEQ ID NO: 126503 - RNA, 1401 nt, Artificial Sequence
  derived and/or modified CDS sequence (opt2) from neuraminidase__InfluenzaB__EPI636339
augcuccccuccaccauccagacccucacccucuuccucaccuccggcggcguccuccucucccucuacgucuccgccucccucuccuaccuccucuacuccgacauccuccucaaguucucccccaccgagaucaccgcccccaccaugccccucgacugcgccaacgccuccaacguccaggccgucaaccgcuccgccaccaagggcgucacccuccuccuccccgagcccgaguggaccuacccccgccucuccugccccggcuccaccuuccagaaggcccuccucaucuccccccaccgcuucggcgagaccaagggcaacuccgccccccucaucauccgcgagcccuucgucgccugcggccccaacgagugcaagcacuucgcccucacccacuacgccgcccagcccggcggcuacuacaacggcacccgcggcgaccgcaacaagcuccgccaccucaucuccgucaagcucggcaagauccccaccgucgagaacuccaucuuccacauggccgccugguccggcuccgccugccacgacggcaaggaguggaccuacaucggcgucgacggccccgacaacaacgcccuccucaaggucaaguacggcgaggccuacaccgacaccuaccacuccuacgccaacaacauccuccgcacccaggaguccgccugcaacugcaucggcggcaacugcuaccucaugaucaccgacggcuccgccuccggcgucuccgagugccgcuuccucaagauccgcgagggccgcaucaucaaggagaucuuccccaccggccgcgucaagcacaccgaggagugcaccugcggcuucgccuccaacaagaccaucgagugcgccugccgcgacaaccgcuacaccgccaagcgccccuucgucaagcucaacgucgagaccgacaccgccgagauccgccucaugugcaccgacaccuaccucgacaccccccgccccaacgacggcuccaucaccggccccugcgaguccgacggcgacaagggcuccggcggcaucaagggcggcuucguccaccagcgcaugaaguccaagaucggccgcugguacucccgcaccauguccaagaccgagcgcaugggcaugggccucuacgucaaguacggcggcgaccccugggccgacuccgacgcccucgccuucuccggcgucauggucuccaugaaggagcccggcugguacuccuucggcuucgagaucaaggacaagaagugcgacguccccugcaucggcaucgagaugguccacgacggcggcaaggagaccuggcacuccgccgccaccgccaucuacugccucaugggcuccggccagcuccucugggacaccgucaccggcgucgacauggcccucuga

SEQ ID NO: 126504 - RNA, 1401 nt, Artificial Sequence; identical to SEQ ID NO: 126503
  derived and/or modified CDS sequence (opt2) from neuraminidase__InfluenzaB__EPI645996

SEQ ID NO: 126505 - RNA, 1401 nt, Artificial Sequence
  derived and/or modified CDS sequence (opt2) from neuraminidase__InfluenzaB__EPI539770
augcuccccuccaccauccagacccucacccucuuccucaccuccggcggcguccuccucucccucuacgucuccgccucccucuccuaccuccucuacuccgacauccuccucaaguucucccgcaccgaggucaccgcccccaucaugccccucgacugcgccaacgccuccaacgcccaggccgucaaccgcuccgccaccaagggcgucaccccccuccuccccgagcccgaguggaccuacccccgccucuccugccccggcuccaccuuccagaaggcccuccucaucuccccccaccgcuucggcgagaccaagggcaacuccgccccccucaucauccgcgagcccuucaucgccugcggccccaaggagugcaagcacuucgcccucacccacuacgccgcccagcccggcggcuacuacaacggcacccgcgaggaccgcaacaagcuccgccaccucaucuccgucaagcucggcaagauccccaccgucgagaacuccaucuuccacauggccgccugguccggcuccgccugccacgacggccgcgaguggaccuacaucggcgucgacggccccgacuccaacgcccuccucaagaucaaguacggcgaggccuacaccgacaccuaccacuccuacgccaagaacauccuccgcacccaggaguccgccugcaacugcaucggcggcgacugcuaccucaugaucaccgacggccccgccuccggcaucuccgagugccgcuuccucaagauccgcgagggccgcaucaucaaggagaucuuccccaccggccgcgucaagcacaccgaggagugcaccugcggcuucgccuccaacaagaccaucgagugcgccugccgcgacaacuccuacaccgccaagcgccccuucgucaagcucaacgucgagaccgacaccgccgagauccgccucaugugcaccaagaccuaccucgacaccccccgccccaacgacggcuccaucaccggccccugcgaguccgacggcgacgagggcuccggcggcaucaagggcggcuucguccaccagcgcauggccuccaagaucggccgcugguacucccgcaccauguccaagaccaagcgcaugggcaugggccucuacgucaaguacgacggcgaccccuggaccgacuccgaggcccucgcccucuccggcgucauggucuccauggaggagcccggcugguacuccuucggcuucgagaucaaggacaagaagugcgacguccccugcaucggcaucgagaugguccacgacggcggcaagaccaccuggcacuccgccgccaccaccaucuacugccucaugggcuccggccagcuccucugggacaccgucaccggcgucaacaucacccucuga

SEQ ID NO: 126506 - RNA, 1401 nt, Artificial Sequence; identical to SEQ ID NO: 126505
  derived and/or modified CDS sequence (opt2) from neuraminidase__InfluenzaB__EPI551248

SEQ ID NO: 126507 - RNA, 1401 nt, Artificial Sequence; identical to SEQ ID NO: 126505
  derived and/or modified CDS sequence (opt2) from neuraminidase__InfluenzaB__EPI544258

SEQ ID NO: 126508 - RNA, 1401 nt, Artificial Sequence; identical to SEQ ID NO: 126410
  derived and/or modified CDS sequence (opt2) from neuraminidase__InfluenzaB__EPI592698

SEQ ID NO: 126509 - RNA, 1401 nt, Artificial Sequence; identical to SEQ ID NO: 126410
  derived and/or modified CDS sequence (opt2) from neuraminidase__InfluenzaB__EPI592706

SEQ ID NO: 126510 - RNA, 1401 nt, Artificial Sequence
  derived and/or modified CDS sequence (opt2) from neuraminidase__InfluenzaB__EPI693093
augcuccccuccaccauccagacccucacccucuuccucaccuccggcggcguccuccucucccucuacgucuccgccucccucuccuaccuccucuacuccgacauccuccucaaguucucccgcaccgaggucaccgcccccaucaugccccucgacugcgccaacgccuccaacguccaggccgucaaccgcuccgccaccaagggcgucaccccccuccuccccgagcccgaguggaccuacccccgccucuccugccccggcuccaccuuccagaaggcccuccucaucuccccccaccgcuucggcgagaccaagggcaacuccgccccccucaucauccgcgagcccuucaucgccugcggccccaaggagugcaagcacuucgcccucacccacuacgccgcccagcccggcggcuacuacaacggcacccgcgaggaccgcaacaagcuccgccaccucaucuccgucaagcucggcaagauccccaccgucgagaacuccaucuuccacauggccgccugguccggcuccgccugccacgacggccgcgaguggaccuacaucggcgucgacggccccgacuccaacgcccuccucaagaucaaguacggcgaggccuacaccgacaccuaccacuccuacgccaagaacauccuccgcacccaggaguccgccugcaacugcaucggcggcgacugcuaccucaugaucaccgacggccccgccuccggcaucuccgagugccgcuuccucaagauccgcgagggccgcaucaucaaggagaucuuccccaccggccgcgucaagcacaccgaggagugcaccugcggcuucgccuccaacaagaccaucgagugcgccugccgcgacaacuccuacaccgccaagcgccccuucgucaagcucaacgucgagaccgacaccgccgagauccgccucaugugcaccaagaccuaccucgacaccccccgccccaacgacggcuccaucaccggccccugcgaguccgacggcgacgagggcuccggcggcaucaagggcggcuucguccaccagcgcauggaguccaagaucggccgcugguacucccgcaccauguccaagaccaagcgcaugggcaugggccucuacgucaaguacgacggcgaccccuggaccgacuccgaggcccucgcccucuccggcgucauggucuccauggaggagcccggcugguacuccuucggcuucgagaucaaggacaagaagugcgacguccccugcaucggcaucgagaugguccacgacggcggcaagaccaccuggcacuccgccgccaccgccaucuacugccucaugggcuccggccagcuccucugggacaccgucaccggcgucaacaugacccucuga

SEQ ID NO: 126511 - RNA, 1401 nt, Artificial Sequence
  derived and/or modified CDS sequence (opt2) from neuraminidase__InfluenzaB__EPI678795
augcuccccuccaccauccagacccucacccucuuccucaccuccggcggcguccuccucucccucuacgucuccgccucccucuccuaccuccucuacuccgacauccuccucaaguucucccccaccgagaucaccgcccccaccaugccccucgacugcgccaacgccuccaacguccaggccgucaaccgcuccgccaccaagggcgucaccuuccuccuccccgagcccgaguggaccuacccccgccucuccugccccggcuccaccuuccagaaggcccuccucaucuccccccaccgcuucggcgagaccaagggcaacuccgccccccucaucauccgcgagcccuucgucgccugcggccccaacgagugcaagcacuucgcccucacccacuacgccgcccagcccggcggcuacuacaacggcacccgcggcgaccgcaacaagcuccgccaccucaucuccgucaagcucggcaagauccccaccgucgagaacuccaucuuccacauggccgccugguccggcuccgccugccacgacggcaaggaguggaccuacaucggcgucgacggccccgacaacaacgcccuccucaaggucaaguacggcgaggccuacaccgacaccuaccacuccuacgccaacaacauccuccgcacccaggaguccgccugcaacugcaucggcggcaacugcuaccucaugaucaccgacggcuccgccuccggcgucuccgagugccgcuuccucaagauccgcgagggccgcaucaucaaggagaucuuccccaccggccgcgucaagcacaccgaggagugcaccugcggcuucgccuccaacaagaccaucgagugcgccugccgcgacaaccgcuacaccgccaagcgccccuucgucaagcucaacgucgagaccgacaccgccgagauccgccucaugugcaccgacaccuaccucgacaccccccgccccaacgacggcuccaucaccggccccugcgaguccgacggcgacaagggcuccggcggcaucaagggcggcuucguccaccagcgcaugaaguccaagaucggccgcugguacucccgcaccauguccaagaccgagcgcaugggcaugggccucuacgucaaguacggcggcaaccccugggccgacuccgacgcccucaccuucuccggcgucauggucuccaugaaggagcccggcugguacuccuucggcuucgagaucaaggacaagaagugcgacguccccugcaucggcaucgagaugguccacgacggcggcaaggagaccuggcacuccgccgccaccgccaucuacugccucaugggcuccggccagcuccucugggacaccgucaccggcgucgacauggcccucuga

SEQ ID NO: 126512 - RNA, 1401 nt, Artificial Sequence; identical to SEQ ID NO: 126511
  derived and/or modified CDS sequence (opt2) from neuraminidase__InfluenzaB__EPI721063

SEQ ID NO: 126513 - RNA, 1401 nt, Artificial Sequence; identical to SEQ ID NO: 124931
  derived and/or modified CDS sequence (opt2) from neuraminidase__InfluenzaB__EPI328903

SEQ ID NO: 126514 - RNA, 1401 nt, Artificial Sequence
  derived and/or modified CDS sequence (opt2) from neuraminidase__InfluenzaB__EPI543192
augcuccccuccaccauccagacccucacccucuuccucaccuccggcggcguccuccucucccucuacgucuccgccucccucuccuaccuccucuaccucgacauccuccucaaguuccccuccaccgagaucaccgcccccaccaugccccucgacugcgccaacgccuccaacguccaggccgucaaccgcuccgccaccaagggcgucacccuccuccuccccgagcccgaguggaccuacccccgccucuccugccccggcuccaccuuccagaaggcccuccucaucuccccccaccgcuucggcgagaccaagggcaacuccgccccccucaucauccgcgagcccuucaucgccugcggccccaaggagugcaagcacuucgcccucacccacuacgccgcccagcccggcggcuacuacaacggcacccgcggcgaccgcaacaagcuccgccaccucaucuccgucaagcucggcaagauccccaccgucgagaacuccaucuuccacauggccgccugguccggcuccgccugccacgacggcaaggaguggaccuacaucggcgucgacggccccgacaacaacgcccuccucaagaucaaguacggcgaggccuacaccgacaccuaccacuccuacgccaacaacauccuccgcacccaggaguccgccugcaacugcaucggcggcaacugcuaccucaugaucaccgacggcuccgccuccggcgucuccgagugccgcuuccucaagauccgcgagggccgcaucaugaaggagaucuuccccaccggccgcacccagcacaccgaggagugcaccugcggcuucgccuccaacaagaccaucgagugcgccugccgcgacaacuccuacaccgccaagcgccccuucgucaagcucaacgucgagaccgacaccgccgagauccgccucaugugcaccaagaccuaccucgacaccccccgccccgacgacggcuccaucaccggccccugcgaguccaacggcggcaagggcuccggcggcaucaagggcggcuucguccaccagcgcauggccuccaagaucggccgcugguacucccgcaccauguccaagaccgagcgcaagggcaugggccucuacaucaaguacaacggcgaccccugggccgacuccgacgcccucaccuucuccggcgucauggucuccauggaggagcccggcugguacuccuucggcuucgagaucaaggacaagaagugcgacguccccugcaucggcaucgagaugguccacgacggcggcaaggagaccuggcacuccgccgccaccgccaucuacugccucaugggcuccggccagcuccucugggacaccgucaccggcgucaacaugacccucuga

SEQ ID NO: 126515 - RNA, 1401 nt, Artificial Sequence; identical to SEQ ID NO: 126514
  derived and/or modified CDS sequence (opt2) from neuraminidase__InfluenzaB__EPI500360

SEQ ID NO: 126516 - RNA, 1401 nt, Artificial Sequence
  derived and/or modified CDS sequence (opt2) from neuraminidase__InfluenzaB__EPI543186
augcuccccuccaccauccagacccucacccucuuccucaccuccggcggcguccuccucucccucuacgucuccgccucccucuccuaccuccucuacuccgacauccuccucaaguucucccgcaccgaggucaccgcccccaucaugccccucgacugcgccaacgccuccaacguccaggccgucaaccgcuccgccaccaagggcgucaccccccuccuccccgagcccgaguggaccuacccccgccucuccugccccggcuccaccuuccagaaggcccuccucaucuccccccaccgcuucggcgagaccaagggcaacuccgccccccucaucauccgcgagcccuucaucgccugcggccccaaggagugcaagcacuucgcccucacccacuacgccgcccagcccggcggcuacuacaacggcacccgcgaggaccgcaacaagcuccgccaccucaucuccgucaagcucggcaagauccccaccgucgagaacuccaucuuccacauggccgccugguccggcuccgccugccacgacggccgcgaguggaccuacaucggcgucgacggccccgacuccaacgcccuccucaagaucaaguacggcgaggccuacaccgacaccuaccacuccuacgccaagaacauccuccgcacccaggaguccgccugcaacugcaucggcggcgacugcuaccucaugaucaccgacggccccgccuccggcaucuccgagugccgcuuccucaagauccgcgagggccgcaucaucaaggagaucuuccccaccggccgcgucaagcacaccgaggagugcaccugcggcuucgccuccaacaagaccaucgagugcgccugccgcgacaacuccuacaccgccaagcgccccuucgucaagcucaacgucgagaccgacaccgccgagauccgccucaugugcaccaagaccuaccucgacaccccccgccccaacgacggcuccaucaccggccccugcgaguccgacggcgacgagggcuccggcggcaucaagggcggcuucguccaccagcgcauggccuccaagaucggccgcugguacucccgcaccauguccaagaccaagcgcaugggcaugggccucuacgucaaguacgacggcgaccccuggaccgacuccgaggcccucgcccucuccggcgucauggucuccauggaggagcccggcugguacuccuucggcuucgagaucaaggacaagaagugcgacguccccugcaucggcaucgagaugguccacgacggcggcaagaccaccuggcacuccgccgccaccgucaucuacugccucaugggcuccggccagcuccucugggacaccgucaccggcgucaacaugacccucuga

SEQ ID NO: 126517 - RNA, 1401 nt, Artificial Sequence; identical to SEQ ID NO: 126516
  derived and/or modified CDS sequence (opt2) from neuraminidase__InfluenzaB__EPI536448

SEQ ID NO: 126518 - RNA, 1401 nt, Artificial Sequence
  derived and/or modified CDS sequence (opt2) from neuraminidase__InfluenzaB__NP_056663
augcuccccuccaccguccagacccucacccuccuccucaccuccggcggcguccuccucucccucuacgucuccgccucccucuccuaccuccucuacuccgacguccuccucaaguucuccuccaccaagaccaccgcccccaccaugucccucgagugcaccaacgccuccaacgcccagaccgucaaccacuccgccaccaaggagaugaccuuccccccccccgagcccgaguggaccuacccccgccucuccugccagggcuccaccuuccagaaggcccuccucaucuccccccaccgcuucggcgagaucaagggcaacuccgccccccucaucauccgcgagcccuucgucgccugcggccccaaggagugccgccacuucgcccucacccacuacgccgcccagcccggcggcuacuacaacggcacccgcaaggaccgcaacaagcuccgccaccucgucuccgucaagcucggcaagauccccaccgucgagaacuccaucuuccacauggccgccugguccggcuccgccugccacgacggccgcgaguggaccuacaucggcgucgacggccccgacaacgacgcccucgucaagaucaaguacggcgaggccuacaccgacaccuaccacuccuacgcccacaacauccuccgcacccaggaguccgccugcaacugcaucggcggcgacugcuaccucaugaucaccgacggcuccgccuccggcaucuccaagugccgcuuccucaagauccgcgagggccgcaucaucaaggagauccuccccaccggccgcgucgagcacaccgaggagugcaccugcggcuucgccuccaacaagaccaucgagugcgccugccgcgacaacuccuacaccgccaagcgccccuucgucaagcucaacgucgagaccgacaccgccgagauccgccucaugugcaccaagaccuaccucgacaccccccgccccgacgacggcuccaucgccggccccugcgaguccaacggcgacaaguggcucggcggcaucaagggcggcuucguccaccagcgcauggccuccaagaucggccgcugguacucccgcaccauguccaagaccaaccgcaugggcauggagcucuacgucaaguacgacggcgaccccuggaccgacuccgacgcccucacccucuccggcgucauggucuccaucgaggagcccggcugguacuccuucggcuucgagaucaaggacaagaagugcgacguccccugcaucggcaucgagaugguccacgacggcggcaaggacaccuggcacuccgccgccaccgccaucuacugccucaugggcuccggccagcuccucugggacaccgucaccggcgucgacauggcccucuga

SEQ ID NO: 126519 - RNA, 1401 nt, Artificial Sequence
  derived and/or modified CDS sequence (opt2) from neuraminidase__InfluenzaB__ABG85180
augcuccccuccaccguccagacccucacccuccuccucaccuccggcggcguccuccucucccucuacgucuccgccucccucuccuaccuccucuacuccgacguccuccucaaguucuccuccaccaagaccaccgcccccaccaugucccucgagugcaccaacgccuccaacgcccagaccgucaacuacuccgccaccaaggagaugaccuuccccccccccgagcccgaguggaccuacccccgccucuccugccagggcuccaccuuccagaaggcccuccucaucuccccccaccgcuucggcgagaucaagggcaacuccgccccccucaucauccgcgagcccuucgucgccugcggccccaaggagugccgccacuucgcccucacccacuacgccgcccagcccggcggcuacuaccacggcacccgcaaggaccgcaacaagcuccgccaccucgucuccgucaagcucggcaagauccccaccgucgagaacuccaucuuccacauggccgccugguccggcuccgccugccacgacggccgcgaguggaccuacaucggcgucgacggccccgacaacgacgcccucgucaagaucaaguacggcgaggccuacaccgacaccuaccacuccuacgcccacaacauccuccgcacccaggaguccgccugcaacugcaucggcggcgacugcuaccucaugaucaccgacggcuccgccuccggcaucuccaagugccgcuuccucaagauccgcgagggccgcaucaucaaggagauccuccccaccggccgcgucgagcacaccgaggagugcaccugcggcuucgccuccaacaagaccaucgagugcgccugccgcgacaacuccuacaccgccaagcgccccuucgucaagcucaacgucgagaccgacaccgccgagauccgccucaugugcaccaagaccuaccucgacaccccccgccccgacgacggcuccaucgccggccccugcgaguccaacggcgacaagggccucggcggcaucaagggcggcuucguccaccagcgcauggccuucaagaucggccgcugguacucccgcaccauguccaagaccaaccgcaugggcauggagcucuacgucaaguacgacggcgaccccuggaccgacuccgacgcccucacccucuccggcgucauggucuccaucgaggagcccggcugguacuccuucggcuucgagaucaaggacaagaagugcgacguccccugcaucggcaucgagaugguccacgacggcggcgaggacaccuggcacuccgccgccaccgccaucuacugccucaugggcuccggccagcuccucugggacaccgucaccggcaucgacauggcccucuga

SEQ ID NO: 126520 - RNA, 1401 nt, Artificial Sequence; identical to SEQ ID NO: 126409
  derived and/or modified CDS sequence (opt2) from neuraminidase__InfluenzaB__EPI376345

SEQ ID NO: 126521 - RNA, 1401 nt, Artificial Sequence; identical to SEQ ID NO: 126409
  derived and/or modified CDS sequence (opt2) from neuraminidase__InfluenzaB__EPI368424

SEQ ID NO: 126522 - RNA, 1401 nt, Artificial Sequence
  derived and/or modified CDS sequence (opt2) from neuraminidase__InfluenzaB__EPI331150
augcuccccuccaccauccagacccucacccucuuccucaccuccggcggcguccuccucucccucuacgucuccgccucccucuccuaccuccucuacuccgacauccuccucaaguucucccccaccgagaucaccgcccccaccaugccccucgacugcgccaacgccuccaacguccaggccaugaaccgcuccgccaccaagggcgucacccuccuccuccccgagcccgaguggaccuacccccgccucuccugccccggcuccaccuuccagaaggcccuccucaucuccccccaccgcuucggcgagaccaagggcaacuccgccccccucaucauccgcgagcccuucaucgccugcggccccaacgagugcaagcacuucgcccucacccacuacgccgcccagcccggcggcuacuacaacggcacccgcggcgaccgcaacaagcuccgccaccucaucuccgucaagcucggcaagauccccaccgucgagaacuccaucuuccacauggccgccugguccggcuccgccugccacgacggcaaggaguggaccuacaucggcgucgacggccccgacaacaacgcccuccucaaggucaaguacggcgaggccuacaccgacaccuaccacuccuacgccaacaagauccuccgcacccaggaguccgccugcaacugcaucggcggcaacugcuaccucaugaucaccgacggcuccgccuccggcgucuccgagugccgcuuccucaagauccgcgagggccgcaucaucaaggagaucuuccccaccggccgcgucaagcacaccgaggagugcaccugcggcuucgccuccaacaagaccaucgagugcgccugccgcgacaacuccuacaccgccaagcgccccuucgucaagcucaacgucgagaccgacaccgccgagauccgccucaugugcaccgacaccuaccucgacaccccccgccccaacgacggcuccaucaccggccccugcgaguccgacggcgacaagggcuccggcggcaucaagggcggcuucguccaccagcgcauggaguccaagaucggccgcugguacucccgcaccauguccaagaccgagcgcaugggcaugggccucuacgucaaguacgacggcgaccccugggccgacuccgacgcccucgccuucuccggcgucauggucuccaugaaggagcccggcugguacuccuucggcuucgagaucaaggacaagaagugcgacguccccugcaucggcaucgagaugguccacgacggcggcaaggagaccuggcacuccgccgccaccgccaucuacugccucaugggcuccggccagcuccucugggacaccgucaccggcgucgacauggcccucuga

SEQ ID NO: 126523 - RNA, 1401 nt, Artificial Sequence; identical to SEQ ID NO: 126522
  derived and/or modified CDS sequence (opt2) from neuraminidase__InfluenzaB__EPI358089

SEQ ID NO: 126524 - RNA, 1401 nt, Artificial Sequence; identical to SEQ ID NO: 124668
  derived and/or modified CDS sequence (opt2) from neuraminidase__InfluenzaB__ABL76698

SEQ ID NO: 126525 - RNA, 1401 nt, Artificial Sequence
  derived and/or modified CDS sequence (opt2) from neuraminidase__InfluenzaB__AAD42328
augcuccccuccaccauccagacccucacccucuuccucaccuccggcggcguccuccucucccucuacgucuccgccucccucuccuaccuccucuacuccgacauccuccucaaguucucccccaccgagaucaccgcccccaccaugccccucgacugcgccaacgccuccaacguccaggccgucaaccgcuccgccaccaagggcaugacccuccuccuccccgagcccgaguggaccuacccccgccucuccugccccggcuccaccuuccagaaggcccuccucaucuccccccaccgcuucggcgagacccgcggcaacuccgccccccucaccauccgcgagcccuucaucgccugcggccccaaggagugcaagcacuucgcccucacccacuacgccgcccagcccggcggcuacuacaacggcacccgcgaggaccgcaacaagcuccgccaccucaucuccgucaagcucggcaagauccccaccgucgagaacuccaucuuccacauggccgccugguccggcuccgccugccacgacggccgcgaguggaccuacaucggcgucgacggccccgacuccaacgcccucaucaagaucaaguacggcgaggccuacaccgacaccuaccacuccuacgccaacaacauccuccgcacccaggaguccgccugcaacugcaucggcggcgacugcuaccucaugaucaccgacggcuccgccuccggcaucuccaagugccgcuuccucaagauccgcgagggccgcaucaucaaggagaucuuccccaccggccgcgucgagcacaccgaggagugcaccugcggcuucgccuccaacaagaccaucgagugcgccugccgcgacaacuccuacaccgccaagcgccccuucgucaagcucaacgucgagaccgacaccgccgagauccgccucaugugcaccgagaccuaccucgacaccccccgccccgacgacggcuccaucaccggccccugcgaguccaacggcgacaagggccgcggcggcaucaagggcggcuucguccaccagcgcauggccuccaagaucggccgcugguacucccgcaccauguccaagaccaagcgcaugggcauggagcucuacgucaaguacgacggcgaccccuggaucgacuccgacgcccucgcccccuccggcgucauggucuccauggaggagcccggcugguacuccuucggcuucgagaucaaggacaagaagugcgacguccccugcaucggcaucgagaugguccacgacggcggcaagaagaccuggcacuccgccgccaccgccaucuacugccucaugggcuccggccagcuccucugggacaccgucaccggcgucgaccgcuccgucuga

SEQ ID NO: 126526 - RNA, 1401 nt, Artificial Sequence; identical to SEQ ID NO: 126211
  derived and/or modified CDS sequence (opt2) from neuraminidase__InfluenzaB__EPI541349

SEQ ID NO: 126527 - RNA, 1401 nt, Artificial Sequence; identical to SEQ ID NO: 126410
  derived and/or modified CDS sequence (opt2) from neuraminidase__InfluenzaB__EPI541759

SEQ ID NO: 126528 - RNA, 1401 nt, Artificial Sequence; identical to SEQ ID NO: 126503
  derived and/or modified CDS sequence (opt2) from neuraminidase__InfluenzaB__EPI826201

SEQ ID NO: 126529 - RNA, 1401 nt, Artificial Sequence; identical to SEQ ID NO: 126242
  derived and/or modified CDS sequence (opt2) from neuraminidase__InfluenzaB__EPI477398

SEQ ID NO: 126530 - RNA, 1401 nt, Artificial Sequence; identical to SEQ ID NO: 126242
  derived and/or modified CDS sequence (opt2) from neuraminidase__InfluenzaB__EPI492570

SEQ ID NO: 126531 - RNA, 1401 nt, Artificial Sequence; identical to SEQ ID NO: 126242
  derived and/or modified CDS sequence (opt2) from neuraminidase__InfluenzaB__EPI498339

SEQ ID NO: 126532 - RNA, 1401 nt, Artificial Sequence; identical to SEQ ID NO: 126463
  derived and/or modified CDS sequence (opt2) from neuraminidase__InfluenzaB__EPI538118

SEQ ID NO: 126533 - RNA, 1401 nt, Artificial Sequence; identical to SEQ ID NO: 126463
  derived and/or modified CDS sequence (opt2) from neuraminidase__InfluenzaB__EPI538124

SEQ ID NO: 126534 - RNA, 1401 nt, Artificial Sequence; identical to SEQ ID NO: 126463
  derived and/or modified CDS sequence (opt2) from neuraminidase__InfluenzaB__EPI556421

SEQ ID NO: 126535 - RNA, 1401 nt, Artificial Sequence; identical to SEQ ID NO: 126463
  derived and/or modified CDS sequence (opt2) from neuraminidase__InfluenzaB__EPI614609

SEQ ID NO: 126536 - RNA, 1401 nt, Artificial Sequence; identical to SEQ ID NO: 124707
  derived and/or modified CDS sequence (opt2) from neuraminidase__InfluenzaB__BAB32609

SEQ ID NO: 126537 - RNA, 1401 nt, Artificial Sequence; identical to SEQ ID NO: 124853
  derived and/or modified CDS sequence (opt2) from neuraminidase__InfluenzaB__EPI271544

SEQ ID NO: 126538 - RNA, 1401 nt, Artificial Sequence; identical to SEQ ID NO: 124853
  derived and/or modified CDS sequence (opt2) from neuraminidase__InfluenzaB__AFH57957

SEQ ID NO: 126539 - RNA, 1401 nt, Artificial Sequence; identical to SEQ ID NO: 124853
  derived and/or modified CDS sequence (opt2) from neuraminidase__InfluenzaB__EPI294881

SEQ ID NO: 126540 - RNA, 1401 nt, Artificial Sequence; identical to SEQ ID NO: 124708
  derived and/or modified CDS sequence (opt2) from neuraminidase__InfluenzaB__ABL77259

SEQ ID NO: 126541 - RNA, 1575 nt, Artificial Sequence
  derived and/or modified CDS sequence (opt2) from glycoprotein__RABV__AB009663.2
auggucccccaggcccuccuccucguccccauccucggcuucucccucugcuucggcaaguuccccaucuacaccauccccgacacccucggccccuggucccccaucgacauccaccaccucuccugccccaacaaccucgucgucgaggacgagggcugcaccaaccucuccggcuucuccuacauggagcucaaggucggcuacaccuccgccaucaaggucaacggcuucaccugcaccggcgucgucaccgaggccgagaccuacaccaacuucgucggcuacgucaccaccaccuucaagcgcaagcacuuccgccccacccccgacgccugccgcgccgccuacaacuggaagauggccggcgacccccgcuacgaggagucccuccacucccccuaccccgacuaccacuggcuccgcaccgucaagaccaccaaggagucccucgucaucaucucccccuccgucgccgaccucgaccccuacgacaacucccuccacucccgcgucuuccccuccggcaagugcuccggcaucacccgcuccuccgucuacugcuccaccaaccacgacuacaccgucuggaugcccgagauccuccgccucggcaccuccugcgacaucuucaccaacucccgcggcaagcgcgucuccaagggcuccaccaccugcggcuucaucgacgagcgcggccucuacaagucccucaagggcgccugcaagcucaagcucugcggcguccucggccuccgccucauggacggcaccugggucuccaugcagaccuccaacgagaccaaguggugcccccccaaccagcucgucaaccuccacgaccuccgcuccgacgagcucgagcaccucgucaucgaggagcucgucaagaagcgcgaggagugccucgacgcccucgaguccaucaucaccaccaaguccgucuccuuccgccgccucucccaccuccgcaagcucguccccggcuucggcaaggccuacaccaucuucaacaagacccucauggaggccgaggcccacuacaaguccguccgcaccuggaacgagaucauccccuccaagggcugccuccgcgucggcggccgcugccacccccacgucaacggcgucuucuucaacggcaucauccucggccccgacggccacguccucauccccgagaugcaguccucccuccuccagcagcacaucgagcuccucgaguccuccgucaucccccucaugcacccccucgccgaccccuucaccgucuucaaggacggcgacgagaccgaggacuucaucgagguccaccuccccgacguccacgagcaggucuccggcgucgaccucggccuccccaacuggggcaaguacguccuccucuccgccggcacccucaucgcccucguccucaucaucuuccucaugaccugcugccgcaaggucgaccgccccgaguccacccagcgcucccuccgcggcaccggccgcaacgucuccgucaccucccaguccggcaaguucaucaacuccugggaguccuacaaguccggcggcgagaccggccucuga

SEQ ID NO: 126542 - RNA, 1575 nt, Artificial Sequence
  derived and/or modified CDS sequence (opt2) from glycoprotein__RABV__AB044824.1
auggucccccaggcccuccuccucguccccauccucggcuucuccuccugcuucggcaaguuccccaucuacaccauccccgacacccucggccccuggucccccaucgacauccaccaccucuccugccccaacaaccucgucgucgaggacgagggcugcaccaaccucuccggcuucuccuacauggagcucaaggucggcuacaucuccgccaucaaggucaacggcuucaccugcaccggcgucgucaccgaggccgagaccuacaccaacuucgucggcuacgucaccaccaccuucaagcgcaagcacuuccgccccacccccgacgccugccgcgccgccuacaacuggaagauggccggcgacccccgcuacgaggagucccuccacucccccuaccccgacuaccacuggcuccgcaccgucaagaccaccaaggagucccucgucaucaucucccccuccgucgccgaccucgaccccuacgacaacucccuccacucccgcgucuuccccuccggcaagugcuccggcaucaccgucuccuccgucuacugcuccaccaaccacgacuacaccgucuggaugcccgagucccuccgccucggcaccuccugcgacaucuucaccaacucccgcggcaagcgcgccuccaagggcuccaagaccugcggcuucgucgacgagcgcggccucuacaagucccucaagggcgccugcaagcucaagcucugcggcguccucggccuccgccucauggacggcaccugggucgccaugcagaccuccaacgagaccaaguggugcccccccgaccagcucgucaaccuccacgaccuccgcuccgacgagaucgagcaccucgucaucgaggagcucgucaagaagcgcgaggagugccucgacgcccucgaguccaucaucaccaccaaguccgucuccuuccgccgccucuccuaccuccgcaagcucguccccggcuucggcaaggccuacaccaucuucaacaagacccucauggaggccgaggcccacuacaaguccguccgcaccuggaacgagaucauccccuccaagggcugccuccgcgucggcggccgcugccacccccacgucaacggcgucuucuucaacggcaucauccucggccccgacggccacguccucauccccgagaugcaguccucccuccuccagcagcacaucgagcuccucgaguccuccgucaucccccucaugcacccccucgccgaccccuucaccgucuucaaggacggcgacgagaccgaggacuucaucgagguccaccuccccgacguccacgagcaggucuccggcgucgaccucggccuccccaacuggggcgaguacguccuccucuccgccggcacccucaucgcccucaugcucaucaucuuccucaugaccugcugccgcaaggucgaccgccccgaguccacccagcgcucccuccgcggcaccggccgcaacgucuccgucaccucccaguccggcaaguucauccccuccugggaguccuacaaguccggcggcgagaccggccucuga

SEQ ID NO: 126543 - RNA, 1575 nt, Artificial Sequence
  derived and/or modified CDS sequence (opt2) from glycoprotein__RABV__AB052666.1
augaucccccaggcccuccucuucgucccccuccucgucuucucccucugcuucggcaaguuccccaucuacaccauccccgacaagcucggccccuggucccccaucgacauccaccaccucuccugccccaacaaccucgucgucgaggacgagggcugcaccaaccucuccggcuucuccuacauggagcucaaggucggcuacaucuccgccaucaaggucaacggcuucaccugcaccggcgucgucaccgaggccgagaccuacaccaacuucgucggcuacgucaccaccaccuucaagcgcaagcacuuccgccccacccccgacgccugccgcgccgccuacaacuggaagauggccggcgacccccgcuacgaggagucccuccacaaccccuaccccgacuaccacuggcuccgcaccgucaagaccaccaaggagucccucgucaucaucucccccuccgucuccgaccucgaccccuacgacaagucccuccacucccgcgucuuccccuccggcaagugcuccggcaucaccgucuccuccaccuacugccccaccaaccacgacuacaccaucuggaugcccgagaacccccgccucggcaccuccugcgacaucuucaccaacucccgcggcaagcgcgccuccaagggcuccaagaccugcggcuucgucgacgagcgcggccucuacaagucccucaagggcgccugcaagcucaagcucugcggcguccucggccuccgccucauggacggcaccugggccgccauccagaccuccgacgaggucaaguggugcccccccgaccagcucgucaacauccacgacuuccgcuccgacgagaucgagcaccucgucgucgaggagcucgucaagaagcgcgaggagugccucgacgcccucgaguccaucaugaccaccaaguccgucuccuuccgccgccucucccaccuccgcaagcucguccccggcuucggcaaggccuacaccaucuucaacaagacccucauggaggccgacgcccacuacaaguccguccgcaccuggaacgagaucauccccuccaagggcugccuccgcgucggcggccgcugccacccccacgucaacggcgucuucuucaacggcaucauccucggccccgacggccacguccucauccccgagaugcaguccucccuccuccagcagcacauggagcuccucgaguccuccgucaucccccucaugcacccccucgccgaccccuccaccgucuucaaggacggcgacgaggccgaggacuucgucgagguccaccuccccgacguccacaagcaggucuccggcgucgaccucggccuccccuccuggggcaaguacguccucauguccgucggcgccaugaucgcccucaugcucaugaucuuccucaugaccugcugccgcaaggccaacggcgccgaguccauccagcaccgccucggcgagaccggccgcaaggucuccgucaccucccaguccggccgcgucaucuccuccugggaguccuacaaguccggcggcgagaccaagcucuga

SEQ ID NO: 126544 - RNA, 1575 nt, Artificial Sequence
  derived and/or modified CDS sequence (opt2) from glycoprotein__RABV__AB085828.1
auggucccccagguccuccucuucgccccccuccucgucuccccccucugcuucggcaaguuccccaucuacaccauccccgacaagcucggccccuggucccccaucgaccuccaccaccucuccugccccaacaaccucgucgucgaggacgagggcugcaccaaccucuccggcuucuccuacauggagcucaaggucggcuacaucuccgccaucaaggucaacggcuucaccugcaccggcgucgucaccgaggccgagaccuacaccaacuucgucggcuacgucaccaccaccuucaagcgcaagcacuuccgccccacccccgacgccugccgcgccgccuacaacuggaagauggccggcgacccccgcuacgaggagucccuccacaaccccuaccccgacuaccacuggcuccgcaccgucaagaccaccaaggagucccucgucaucaucucccccuccgucaccgaccucgaccccuacgacaagucccuccacucccgcgucuuccccggcggcaacugcuccggcaucaccgucuccuccaccuacugcuccaccaaccacgacuacaccaucuggaugcccgagaaccuccgccucggcaccuccugcgacaucuucacccacucccgcggcaagcgcgccuccaagggcgacaagaccugcggcuucgucgacgagcgcggccucuacaagucccucaagggcgccugcaagcucaagcucugcggcguccucggccuccgccucauggacggcaccugggucgccaugcagaccuccgacgagaccaaguggugcccccccggccagcucgucaaccuccacgacuuccgcuccgacgagaucgagcaccucgucgaggaggagcucgucaagaagcgcgaggagugccucgacgcccucgaguccaucaugaccaccaaguccgucuccuuccgccgccucucccaccuccgcaagcucguccccggcuucggcaaggccuacaccaucuucaacaagacccucauggaggccgacgcccacuacaaguccguccagaccuggaacgagaucauccccuccaagggcugccuccgcgucggcgagcgcugccacccccacgucaacggcgucuucuucaacggcaucauccucggcuccgacggccacguccucauccccgagaugcaguccucccuccuccagcagcacauggagcuccucgaguccuccgucaucccccucaugcacccccucgccgaccccuccaccgucuucaaggacggcgacgaggucgaggacuucgucgagguccaccuccccgacguccacaagcaggucuccggcgucgaccucggccuccccaaguggggcaaguacguccucaugaucgccggcgcccucaucgcccucaugcucaucaucuuccucaugaccugcugccgccgcgucaaccgccccgaguccacccaguccaaccucggcggcaccggccgcaacgucuccguccccucccaguccggcaaggucaucuccuccugggaguccuacaaguccggcggcgagacccgccucuga

SEQ ID NO: 126545 - RNA, 1575 nt, Artificial Sequence
  derived and/or modified CDS sequence (opt2) from glycoprotein__RABV__AB110656.1
auggucccccaggcccuccucuucgucccccuccucgccuucuccuucugcuucggcaaguuccccaucuacaccauccccgacaagcucggccccuggucccccaucgacauccaccaccucuccugccccaacaaccucgucgucgaggacgagggcugcaccaaccucuccggcuucuccuacauggagcucaaggucggcuacaucuccgccaucaaggucaacggcuucaccugcaccggcgucgucaccgaggccgagaccuacaccaacuucgucggcuacgucaccaccaccuucaagcgcaagcacuuccgccccacccccgacgccugccgcuccgccuacaacuggaagauggccggcgacccccgcuacgaggagucccuccacaaccccuaccccgacuaccacuggcuccgcaccgucaagaccaccaaggagucccucgucaucaucucccccuccgucgccgaccucgaccccuacgacaagucccuccacucccgcgucuuccccaacggcaagugcuccggcaucaccgucuccuccaccuacugcuccaccaaccacgacuacaccaucuggcuccccgagaacccccgccucggcaccuccugcgacaucuucaccaacucccgcggcaagcgcgccuccaagggcggcaagaccugcggcuucgucgacgagcgcggccucuacaagucccucaagggcgccugcaagcucaagcucugcggcguccucggccuccgccucauggacggcaccugggucgccaugcucaccuccgacgagaccaaguggugcccccccgaccagcucgucaaccuccacgacuuccgcuccgacgagaucgagcaccucgucgucgaggagcucgucaagaagcgcgaggagugccucgacgcccucgaguccaucaugaccaccaaguccgucuccuuccgccgccucucccaccuccgcaagcucguccccggcuucggcaaggccuacaccaucuucaacaagacccucauggaggccgacgcccacuacaaguccauccgcaccuggaacgagaucauccccuccaagggcugccuccgcgucggcggccgcugccacccccacgucaacggcgucuucuucaacggcaucauccucggccccgacggccacguccucauccccgagaugcaguccucccuccuccagcagcacauggagcuccucgaguccuccgucaucccccucaugcacccccucgccgaccccuccaccgucuucaaggacggcgacgaggccgaggacuucgucgagguccaccuccccgacguccacaagcaggucuccggcgucgaccucggccuccccaacuggggcaaguacguccucauguccgccggcguccucaucgcccucaugcucaccaucuuccucaugaccugcugccgccgcgucaaccgccccgacuccacccagcgcucccucggcaugaccggccgcaaggucuccgucaccucccaguccggcaaggucaucuccuccugggaguccuacaaguccggcggcgagacccgccucuga

SEQ ID NO: 126546 - RNA, 1575 nt, Artificial Sequence
  derived and/or modified CDS sequence (opt2) from glycoprotein__RABV__AB110657.1
auggucccccaggcccuccucuucgucccccuccucgccuucuccuucugcuucggcaaguuccccaucuacaccauccccgacaagcucggccccuggucccccaucgacauccaccaccucuccugccccaacaaccucgucgucgaggacgagggcugcaccaaccucuccggcuucuccuacauggagcucaaggucggcuacaucuccgccaucaaggucaacggcuucaccugcaccggcgucgucaccgaggccgagaccuacaccaacuucgucggcuacgucaccaccaccuucaagcgcaagcacuuccgccccacccccgacgccugccgcuccgccuacaacuggaagauggccggcgacccccgcuacgaggagucccuccacaaccccuaccccgacuaccacuggcuccgcaccgucaagaccaccaaggagucccucgucaucaucucccccuccgucgccgaccucgaccccuacgacaagucccuccacucccgcgucuuccccaacggcaagugcuccggcaucaccgucuccuccaccuacugcuccaccaaccacgacuacaccaucuggcuccccgagaacccccgccucggcaccuccugcgacaucuucaccaacucccgcggcaagcgcgccuccaagggcggcaagaccugcggcuucgucgacgagcgcggccucuacaagucccucaagggcgccugcaagcucaagcucugcggcguccucggccuccgccucauggacggcaccugggucgccaugcagaccuccgacgagaccaaguggugcccccccgaccagcucgucaaccuccacgacuuccgcuccgacgagaucgagcaccucgucgucgaggagcucgucaagaagcgcgaggagugccucgacgcccucgaguccaucaugaccaccaaguccgucuccuuccgccgccucucccaccuccgcaagcucguccccggcuucggcaaggccuacaccaucuucaacaagacccucauggaggccgacgcccacuacaaguccauccgcaccuggaacgagaucauccccuccaagggcugccuccgcgucggcggccgcugccacccccacgucaacggcgucuucuucaacggcaucauccucggccccgacggccacguccucauccccgagaugcaguccucccuccuccagcagcacauggagcuccucgaguccuccgucaucccccucaugcacccccucgccgaccccuccaccgucuucaaggacggcgacgaggccgaggacuucgucgagguccaccuccccgacguccacaagcaggucuccggcgucgaccucggccuccccaacuggggcaaguacguccucauguccgccggcguccucaucgcccucaugcucaccaucuuccucaugaccugcugccgccgcgucaaccgccccgacuccacccagcgcucccucggcaugaccggccgcaaggucuccgucaccucccaguccggcaaggucaucuccuccugggaguccuacaaguccggcggcgagacccgccucuga

SEQ ID NO: 126547 - RNA, 1575 nt, Artificial Sequence
  derived and/or modified CDS sequence (opt2) from glycoprotein__RABV__AB110658.1
auggucccccaggcccuccucuucgucccccuccucgccuucuccuucugcuucggcaaguuccccaucuacaccauccccgacaagcucggccccuggucccccaucgacauccaccaccucuccugccccaacaaccucgucgucgaggacgagggcugcaccaaccucuccggcuucuccuacauggagcucaaggucggcuacaucuccgccaucaaggucaacggcuucaccugcaccggcgucgucaccgaggccgagaccuacaccaacuucgucggcuacgucaccaccaccuucaagcgcaagcacuuccgccccacccccgacgccugccgcuccgccuacaacuggaagauggccggcgacccccgcuacgaggagucccuccacaaccccuaccccgacuaccacuggcuccgcaccgucaagaccaccaaggagucccucgucaucaucucccccuccgucgccgaccucgaccccuacgacaagucccuccacucccgcgucuuccccaacggcaagugcuccggcaucaccgucuccuccaccuacugcuccaccaaccacgacuacaccaucuggcuccccgagaacccccgccucggcaccuccugcgacaucuucaccaacucccgcggcaagcgcgccuccaagggcuccaagaccugcggcuucgucgacgagcgcggccucuacaagucccucaagggcgccugcaagcucaagcucugcggcguccucggccuccgccucauggacggcaccugggucgccaugcagaccuccgacgagaccaaguggugcucccccgaccagcucgucaaccuccacgacuuccgcuccgacgagaucgagcaccucgucgucgaggagcucgucaagaagcgcgaggagugccucgacgcccucgaguccaucaugaccaccaaguccgucuccuuccgccgccucucccaccuccgcaagcucguccccggcuucggcaaggccuacaccaucuucaacaagacccucauggaggccgacgcccacuacaaguccauccgcaccuggaacgagaucauccccuccaagggcugccuccgcgucggcggccgcugccacccccacgucaacggcgucuucuucaacggcaucauccucggccccgacggccacguccucauccccgagaugcaguccucccuccuccagcagcacauggagcuccucgaguccuccgucaucccccucaugcacccccucgccgaccccuccaccgucuucaaggacggcgacgaggccgaggacuucgucgagguccaccuccccgacguccacaagcaggucuccggcgucgaccucggccuccccaacuggggcaaguacguccucauguccgccggcguccucaucgcccucaugcucaccaucuuccucaugaccugcugccgccgcgucaaccgccccgacuccacccagcgcucccucggcaugaccggccgcaaggucuccgucaccucccaguccggcaaggucaucuccuccugggaguccuacaaguccggcggcgagacccgccucuga

SEQ ID NO: 126548 - RNA, 1575 nt, Artificial Sequence
  derived and/or modified CDS sequence (opt2) from glycoprotein__RABV__AB110659.1
auggucccccaggcccuccucuucgucccccuccucgccuucuccuucugcuucggcaaguuccccaucuacaccauccccgacaagcucggccccuggucccccaucgacauccaccaccucuccugccccaacaaccucgucgucgaggacgagggcugcaccaaccucuccggcuucuccuacauggagcucaaggucggcuacaucuccgccaucaaggucaacggcuucaccugcaccggcgucgucaccgaggccgagaccuacaccaacuucgucggcuacgucaccaccaccuucaagcgcaagcacuuccgccccacccccgacgccugccgcuccgccuacaacuggaagauggccggcgacccccgcuacgaggagucccuccacaaccccuaccccgacuaccacuggcuccgcaccgucaagaccaccaaggagucccucgucaucaucucccccuccgucgccgaccucgaccccuacgacaagucccuccacucccgcgucuuccccaacggcaagugcuccggcaucaccgucuccuccaccuacugcuccaccaaccacgacuacaccaucuggcuccccgagaacccccgccucggcaccuccugcgacaucuucaccaacucccgcggcaagcgcgccuccaagggcuccaagaccugcggcuucgucgacgagcgcggccucuacaagucccucaagggcgccugcaagcucaagcucugcggcguccucggccuccgccucauggacggcaccugggucgccaugcagaccuccgacgagaccaaguggugcccccccgaccagcucgucaaccuccacgacuuccgcuccgacgagaucgagcaccucgucgucgaggagcucgucaagaagcgcgaggagugccucgacgcccucgaguccaucaugaccaccaaguccgucuccuuccgccgccucucccaccuccgcaagcucguccccggcuucggcaaggccuacaccaucuucaacaagacccucauggaggccgacgcccacuacaaguccauccgcaccuggaacgagaucauccccuccaagggcugccuccgcgucggcggccgcugccacccccacgucaacggcgucuucuucuacggcaucauccucggccccgacggccacguccucauccccgagaugcaguccucccuccuccagcagcacauggagcuccucgaguccuccgucaucccccucaugcacccccucgccgaccccuccaccgucuucaaggacggcgacgaggccgaggacuucgucgagguccaccuccccgacguccacaagcaggucuccggcgucgaccucggccuccccaacuggggcaaguacguccucauguccgccggcguccucaucgcccucaugcucaccaucuuccucaugaccugcugccgccgcgucaaccgccccgacuccacccagcgcucccucggcaugaccggccgcaaggucuccgucaccucccaguccggcaaggucaucuccuccugggaguccuacaaguccggcggcgagacccgccucuga

SEQ ID NO: 126549 - RNA, 1575 nt, Artificial Sequence
  derived and/or modified CDS sequence (opt2) from glycoprotein__RABV__AB110660.1
auggucccccaggcccuccucuucgucccccuccucgccuucuccuucugcuucggcaaguuccccaucuacaccauccccgacaagcucggccccuggucccccaucgacauccaccaccucuccugccccaacaaccucgucgucgaggacgagggcugcgccaaccucuccggcuucuccuacauggagcucaaggucggcuacaucuccgccaucaaggucaacggcuucaccugcaccggcgucgucaccgaggccgagaccuacaccaacuucgucggcuacgucaccaccaccuucaagcgcaagcacuuccgccccacccccgacgccugccgcuccgccuacaacuggaagauggccggcgacccccgcuacgaggagucccuccacaaccccuaccccgacuaccacuggcuccgcaccgucaagaccaccaaggagucccucgucaucaucucccccuccgucgccgaccucgaccccuacgacaagucccuccacucccgcgucuuccccaacggcaagugcuccggcaucaccgucuccuccaccuacugcuccaccaaccacgacuacaccaucuggcuccccgagaacccccgccucggcaccuccugcgacaucuucaccaacucccgcggcaagcgcgccuccaagggcggcaagaccugcggcuucgucgacgagcgcggccucuacaagucccucaagggcgccugcaagcucaagcucugcggcguccucggccuccgccucauggacggcaccugggucgccaugcagaccuccgacgagaccaaguggugcccccccgaccagcucgucaaccuccacgacuuccgcuccgacgagaucgagcaccucgucgucgaggagcucgucaagaagcgcgaggagugccucgacgcccucgaguccaucaugaccaccaaguccgucuccuuccgcggccucucccaccuccgcaagcucguccccggcuucggcaaggccuacaccaucuucaacaagacccucauggaggccgacgcccacuacaaguccauccgcaccuggaacgagaucauccccuccaagggcugccucaccgucggcggccgcugccacccccacgucaacggcgucuucuucaacggcaucauccucggccccgacggccacguccucauccccgagaugcaguccucccuccuccagcagcacauggagcuccucgaguccuccgucaucccccucaugcacccccucgccgaccccuccaccgucuucaaggacggcgacgaggccgaggacuucgucgagguccaccuccccgacguccacaagcaggucuccggcgucgaccucggccuccccaacuggggcaaguacguccucauguccgccggcguccucaucgcccucaugcucaccaucuuccucaugaccugcugccgccgcgucaacggccccgacuccacccagcgcucccucggcaugaccggccgcaaggucuccgucaccucccaguccggcaaggucaucuccuccugggaguccuacaaguccggcggcgagacccgccucuga

SEQ ID NO: 126550 - RNA, 1575 nt, Artificial Sequence
  derived and/or modified CDS sequence (opt2) from glycoprotein__RABV__AB110661.1
auggucccccaggcccuccucuucgucccccuccucgccuucuccuucugcuucggcaaguuccccaucuacaccauccccgacaagcucggccccuggucccccaucgacauccaccaccucuccugccccaacaaccucgucgucgaggacgagggcugcaccaaccucuccggcuucuccuacauggagcucaaggucggcuacaucuccgccaucaaggucaacggcuucaccugcaccggcgucgucaccgaggccgagaccuacaccaacuucgucggcuacgucaccaccaccuucaagcgcaagcacuuccgccccacccccgacgccugccgcuccgccuacaacuggaagauggccggcgacccccgcuacgaggagucccuccacaaccccuaccccgacuaccacuggcuccgcaccgucaagaccaccaaggagucccucgucaucaucucccccuccgucgccgaccucgaccccuacgacaagucccuccacucccgcgucuuccccaacggcaagugcuccggcaucaccgucuccuccaccuacugcuccaccaaccacgacuacaccaucuggcuccccgagaacccccgccucggcaccuccugcgacaucuucaccaacucccgcggcaagcgcgccuccaagggcggcaagaccugcggcuucgucgacgagcgcggccucuacaagucccucaagggcgccugcaagcucaagcucugcggcguccucggccucacccucauggacggcaccugggucgccaugcagaccuccgacgagaccaaguggugcccccccgaccagcucgucaaccuccacgacuuccgcuccgacgagaucgagcaccucgucgucgaggagcucgucaagaagcgcgaggagugccucgacgcccucgaguccaucaugaccaccaaguccgucuccuuccgccgccucucccaccuccgcaagcucguccccggcuucggcaaggccuacaccaucuucaacaagacccucauggaggccgacgcccacuacaaguccauccgcaccuggaacgagaucauccccuccaagggcugccuccgcgucggcggccgcugccacccccacgucaacggcgucuucuuccacggcaucauccucggccccgacggccacguccucauccccgagaugcaguccucccuccuccagcagcacauggagcuccucgaguccuccgucaucccccucaugcacccccucgccgaccccuccaccgucuucaaggacggcgacgaggccgaggacuucgucgagguccaccuccccgacguccacaagcaggucuccggcgucgaccucggccuccccaacuggggcaaguacguccucauguccgccggcguccucaucgcccucaugcucaccaucuuccucaugaccugcugccgccgcgucaaccgccccgacuccacccagcgcucccucggcaugaccggccgcaaggucuccgucaccucccaguccggcaaggucaucuccuccugggaguccuacaaguccggcggcgagacccgccucuga

SEQ ID NO: 126551 - RNA, 1575 nt, Artificial Sequence
  derived and/or modified CDS sequence (opt2) from glycoprotein__RABV__AB110662.1
augauccuccaggcccuccucuucgucccccuccucaucuccucccucugccucggcaaguuccccaucuacaccauccccgacaagcucggccccuggucccccaucgacauccaccaccucuccugccccaacaaccucgucgucgaggacgagggcugcaccaaccucuccggcuucuccuacauggagcucaaggucggcuacaucuccgccaucaaggucaacggcuucaccugcaccggcgucgucaccgaggccgagaccuacaccaacuucgucggcuacgucaccaccaccuucaagcgcaagcacuuccgccccauccccgacgccugccgcgccgccuacaacuggaagauggccggcgacccccgcuacgaggagucccuccagaaccccuaccccgacuaccacuggcuccgcaccgucaagaccaccaaggagucccucaucaucaucucccccuccgucgccgaccucgaccccuacgacaagucccuccacucccgcgucuuccccggcggcaagugccucggcaucaccgucuccuccaccuacugcuccaccaaccacgacuacaccaucuggaugcccgaggagccccgccucggcaccuccugcgacaucuucaccuccuccaagggcaagaaggccuccaagggcggcaagaccugcggcuucgucgacgagcgcggccucuacaagucccucaagggcgccugcaagcucaagcucugcggcguccucggccuccgccucauggacggcaccugggucuccauccccaccuccgacgacaccaaguggugcccccccgaccagcucgucaaccuccacgacuuccacuccgacgagaucgagcaccucgucgucgaggagcucgucaagaagcgcgaggagugccucgacgcccucgaguccaucaugaccaccaaguccgucuccuuccgccgccucuccuaccuccgcaagcucguccccggcuucggcaaggccuacaccaucuucaacaagacccucauggaggccgacgcccacuacaaguccguccgcaccuggaacgagaucauccccuccaagggcugccucaagguccgcgagcgcugccacccccccgucgacggcgucuucuucaacggcaucauccucggccccgacggcaacguccucauccccgagaugcaguccucccuccuccagcagcacauggagcuccucgaguccuccgucaucccccucaugcacccccucgccgaccccuccaccgucuucaaggagggcgacgaggccgaggacuucgucgagguccaccuccccgacguccacaagcagaucuccggcgucgaccucggccuccccuccuggggcaaguaccuccucaugaucgccggcggccucgccacccucguccucaucaucugcuccauggccugcugccgccgcaccaagcgcaccgagucccgccgccgcggcucccgcgaguccgagaagaaggucaccgccaccccccagacccgcaaggucgucuccuccugggagcucuacaaguccgagggcgacgcccgccucuga

SEQ ID NO: 126552 - RNA, 1575 nt, Artificial Sequence
  derived and/or modified CDS sequence (opt2) from glycoprotein__RABV__AB110663.1
augauccuccaggcccuccucuucgucccccuccucaucuccucccucugccucggcaaguuccccaucuacaccauccccgacaagcucggccccuggucccccaucgacauccaccaccucuccugccccaacaaccucgucgucgaggacgagggcugcaccaaccucuccggcuucuccuacauggagcucaaggucggcuacaucuccgccaucaaggucaacggcuucaccugcaccggcgucgucaccgaggccgagaccuacaccaacuucgucggcuacgucaccaccaccuucaagcgcaagcacuuccgccccauccccgacgccugccgcgccgccuacaacuggaagauggccggcgacccccgcuacgaggagucccuccagaaccccuaccccgacuaccacuggcuccgcaccgucaagaccaccaaggagucccucaucaucaucucccccuccgucgccgaccucgaccccuacgacaagucccuccacucccgcgucuuccccggcggcaagugccucggcaucaccgucuccuccaccuacugcuccaccaaccacgacuacaccaucuggaugcccgaggagccccgccucggcaccuccugcgacaucuucaccuccuccaagggcaagaaggccuccaagggcggcaagaccugcggcuucgucgacgagcgcggccucuacaagucccucaagggcgccugcaagcucaagcucugcggcguccucggccuccgccucauggacggcaccugggucuccauccagaccuccgacgacaccaaguggugcccccccgaccagcucgucaaccuccacgacuuccacuccgacgagaucgagcaccucgucgucgaggagcucgucaagaagcgcgaggagugccucgacgcccucgaguccaucaugaccaccaaguccgucuccuuccgccgccucuccuaccuccgcaagcucguccccggcuucggcaaggccuacaccaucuucaacaagacccucauggaggccgacgcccacuacaaguccguccgcaccuggaacgagaucauccccuccaagggcugccucaagguccgcgagcgcugccacccccccgucgacggcgucuucuucaacggcaucauccucggccccgacggcaacguccucauccccgagaugcaguccucccuccuccagcagcacauggagcuccucgaguccuccgucaucccccucaugcacccccucgccgaccccuccaccgucuucaaggagggcgacgaggccgaggacuucgucgagguccaccuccccgacguccacaagcagaucuccggcgucgaccucggccuccccuccuggggcaaguaccuccucaugaucgccggcggccucgccgcccucguccucaucaucugcuccauggccugcugccgccgcaccaagcgcaccgagucccgccgccgcggcuccggcgaguccgagaagaaggucaccgccaccccccagacccgcaaggucgucuccuccugggagcucuacaaguccgagggcgacgcccgccucuga

SEQ ID NO: 126553 - RNA, 1575 nt, Artificial Sequence
  derived and/or modified CDS sequence (opt2) from glycoprotein__RABV__AB110664.1
augauccuccaggcccuccucuucgucccccuccucaucuccucccucugccucggcaaguuccccaucuacaccauccccgacaagcucggccccuggucccccaucgacauccaccaccucuccugccccaacaaccucgucgucgaggacgagggcugcaccaaccucuccggcuucuccuacauggagcucaaggucggcuacaucuccgccaucaaggucaacggcuucaccugcaccggcgucgucaccgaggccgagaccuacaccaacuucgucggcuacgucaccaccaccuucaagcgcaagcacuuccgccccauccccgacgccugccgcgccgccuacaacuggaagauggccggcgacccccgcuacgaggagucccuccagaaccccuaccccgacuaccacuggcuccgcaccgucaagaccaccaaggagucccucaucaucaucucccccuccgucgccgaccucgaccccuacgacaagucccuccacucccgcgucuuccccggcggcaagugccucggcaucaccgucuccuccaccuacugcuccaccaaccacgacuacaccaucuggaugcccgaggagccccgccucggcaccuccugcgacaucuucaccuccuccaagggcaagaaggccuccaagggcggccgcaccugcggcuucgucgacgagcgcggccucuacaagucccucaagggcgccugcaagcucaagcucugcggcguccucggccuccgccucauggacggcaccugggucuccauccagaccuccgacgacaccaaguggugcccccccgaccagcucgucaaccuccacgacuuccacuccgacgagaucgagcaccucgucgucgaggagcucgucaagaagcgcgaggagugccucgacgcccucgaguccaucaugaccaccaaguccgucuccuuccgccgccucuccuaccuccgcaagcucguccccggcuucggcaaggccuacaccaucuucaacaagacccucauggaggccgacgcccacuacaaguccguccgcaccuggaacgagaucauccccuccaaguggugccucaagguccgcgagcgcugccacccccccgucgacggcgucuucuucaacggcaucauccucggccccgacggcaacguccucauccccgagaugcaguccucccuccuccagcagcacauggagcuccucgaguccuccgucaucccccucaugcacccccucgccgaccccuccaccgucuucaaggagggcgacgaggccgaggacuucgucgagguccaccuccccgacguccacaagcagaucuccggcgucgaccucggccuccccuccuggggcaaguaccuccucaugaucgccggcggccucgccacccucguccucaucaucugcuccauggccugcugccgccgcaccaagcgcaccgagucccgccgccgcggcuccggcgaguccgagaagaaggucaccgccaccccccagacccgcaaggucgucuccuccugggagcucuacaaguccgagggcgacgcccgccucuga

SEQ ID NO: 126554 - RNA, 1575 nt, Artificial Sequence
  derived and/or modified CDS sequence (opt2) from glycoprotein__RABV__AB110665.1
augauccuccaggcccuccucuucgucccccuccucaucuccucccucugccucggcaaguuccccaucuacaccauccccgacaagcucggccccuggucccccaucgacauccaccaccucuccugccccaacaaccucgucgucgaggacgagggcugcaccaaccucuccggcuucuccuacauggagcucaaggucggcuacaucuccgccaucaaggucuccggcuucaccugcaccggcgucgucaccgaggccgagaccuacaccaacuucgucggcuacgucaccaccaccuucaagcgcaagcacuuccgccccauccccgacgccugccgcgccgccuacaacuggaagauggccggcgacccccgcuacgaggagucccuccacaaccccuaccccgacuaccacuggcuccgcaccgucaagaccaccaaggagucccucaucaucaucucccccuccgucgccgaccucgaccccuacgacaagucccuccacucccgcgucuuccccggcggcaagugccucggcaucaccgucuccuccaccuacugcuccaccaaccacgacuacaccaucuggaugcccgaggagccccgccucggcaccuccugcgacaucuucaccuccuccaagggcaagaaggccuccaagggcggcaagaccugcggcuucgucgacgagcgcggccucuacaagucccucaagggcgccugcaagcucaagcucugcggcguccucggccuccgccucauggacggcaccugggucuccauccagaccuccgacaacaccaaguggugcccccccgaccagcucgucaaccuccacgacuuccacuccgacgagaucgagcaccucgucgucgaggagcucgucaagaagcgcgaggagugccucgacgcccucgaguccaucaugaccaccaaguccgucuccuuccgccgccucuccuaccuccgcaagcucguccccggcuucggcaaggccuacaccaucuucaacaagacccucauggaggccgacgcccacuacaaguccguccgcaccuggaacgagaucauccccuccaagggcugccucaagguccgcgagcgcugccacccccccgucgacggcgucuucuucaacggcaucauccucggccccgacggcaacguccucauccccgagaugcaguccucccuccuccagcagcacauggagcuccucgaguccuccgucaucccccucaugcacccccucgccgaccccuccaccgucuucaaggagggcgacgaggccgaggacuucgucgagguccaccuccccgacguccacaagcagaucuccggcgucgaccucggccuccccuccuggggcaaguaccuccucaugaucgccggcggccucgccacccucguccucaucaucugcuccauggccugcugccgccgcaccaagcgcaccgagucccgccgccgcggcuccggcgaguccgagaagaaggucaccgucaccccccagaccggcaaggucgucuccuccugggagcucuacaaguccgagggcgacgcccgccucuga

SEQ ID NO: 126555 - RNA, 1575 nt, Artificial Sequence
  derived and/or modified CDS sequence (opt2) from glycoprotein__RABV__AB110666.1
augauccuccaggcccuccucuucguccccuuccucaucuccucccucugccucggcaaguuccccaucuacaccauccccgacaagcucggccccuggucccccaucgacauccaccaccucuccugccccaacaaccucgucgucgaggacgagggcugcaccaaccucuccggcuucuccuacauggagcucaaggucggcuacaucuccgccaucaaggucaacggcuucaccugcaccggcgucgucaccgaggccgagaccuacaccaacuucgucggcuacgucaccaccaccuucaagcgcaagcacuuccgccccauccccgacgccugccgcgccgccuacaacuggaagauggccggcgacccccgcuacgaggagucccuccagaaccccuaccccgacuaccacuggcuccgcaccgucaagaccaccaaggagucccucaucaucaucucccccuccgucgccgaccucgaccccuacgacaagucccuccacucccgcgucuuccccggcggcaagugccucggcaucaccgucuccuccaccuacugcuccaccaaccacgacuacaccaucuggaugcccgaggagccccgccucggcaccuccugcgacaucuucaccuccuccaagggcaagaaggccuccaagggcggcaagaccugcggcuucgucgacgagcgcggccucuacaagucccucaagggcgccugcaagcucaagcucugcggcguccucggccuccgccucauggacggcaccugggucuccauccccaccuccgacgacaccaaguggugcccccccgaccagcucgucaaccuccacgacuuccacuccgacgagaucgagcaccucgucgucgaggagcucgucaagaagcgcgaggagugccucgacgcccucgaguccaucaugaccaccaaguccgucuccuuccgccgccucuccuaccuccgcaagcucguccccggcuucggcaaggccuacaccaucuucaacaagacccucauggaggccgacgcccacuacaaguccguccgcaccuggaacgagaucauccccuccaagggcugccucaagguccgcgagcgcugccacccccccgucgacggcgucuucuucaacggcaucauccucggccccgacggcaacguccucauccccgagaugcaguccucccuccuccagcagcacauggagcuccucgaguccuccgucaucccccucaugcacccccucgccgaccccuccaccgucuucaaggagggcgacgaggccgaggacuucgucgagguccaccuccccgacguccacaagcagaucuccggcgucgaccucggccuccccuccuggggcaaguaccuccucaugaucgccggcggccucgccacccucguccucaucaucugcuccauggccugcugccgccgcaccaagcgcaccgagucccgccgccgcggcuccggcgaguccggcgagaaggucaccaccaccccccagacccgcaaggucgucuccuccugggagcucuacaaguccgagggcgacgcccgccucuga

SEQ ID NO: 126556 - RNA, 1575 nt, Artificial Sequence
  derived and/or modified CDS sequence (opt2) from glycoprotein__RABV__AB110667.1
augauccuccaggcccuccucuucgucccccuccucaucuccuccuccugccucggcaaguuccccaucuacaccauccccgacaagcucggccccuggucccccaucgacauccaccaccucuccugccccaacaaccucgucgucgaggacgagggcugcaccaaccucuccggcuucuccuacauggagcucaaggucggcuacaucuccgccaucaaggucaacggcuucaccugcaccggcgucgucaccgaggccgagaccuacaccaacuucgucggcuacgucaccaccaccuucaagcgcaagcacuuccaccccauccccgacgccugccgcgccgccuacaacuggaagauggccggcgacccccgcuacgaggagucccuccagaaccccuaccccgacuaccacuggcuccgcaccgucaagaccaccaaggagucccucaucaucaucucccccuccgucgccgaccucgaccccuacgacaagucccuccacucccgcgucuuccccggcggcaagugccucggcaucaccgucuccuccaccuacugcuccaccaaccacgacuacaccaucuggaugcccgaggagccccgccucggcaccuccugcgacaucuucaccuccuccaagggcaagaaggccuccaagggcggcaagaccugcggcuucgucgacgagcgcggccucuacaagucccucaagggcgccugcaagcucaagcucugcggcguccucggccuccgccucauggacggcaccugggucuccauccagaccuccgacgacaccaaguggugcccccccgaccagcucgucaaccuccacgacuuccacuccgacgagaucgagcaccucgucgucgaggagcucgucaagaagcgcgaggagugccucgacgcccucgaguccaucaugaccaccaaguccgucuccuuccgccgccucuccuaccuccgcaagcucguccccggcuucggcaaggccuacaccaucuucaacaagacccucauggaggccgacgcccacuacaaguccguccgcaccuggaacgagaucauccccuccaagggcugccucaagguccgcgagcgcugccacccccccgucgacggcgucuucuucaacggcaucauccucggccccgacggcaacguccucauccccgagaugcaguccucccuccuccagcagcacauggagcuccucgaguccuccgucaucccccucaugcacccccucgccgaccccuccaccgucuucaaggagggcgacgaggccgaggacuucgucgagguccaccuccccgacguccacaagcagaucuccggcgucgaccucggccuccccuccuggggcaaguaccuccucaugaucgccggcggccucgccacccucguccucaucaucugcuccauggccugcugccgccgcaccaagcgcaccgagucccgccgccgcggcuccggcgaguccggcaagaaggccaccgccaccccccagacccgcaaggucgucuccuccugggagcucuacaaguccgagggcgacgcccgccucuga

SEQ ID NO: 126557 - RNA, 1575 nt, Artificial Sequence
  derived and/or modified CDS sequence (opt2) from glycoprotein__RABV__AB110668.1
augauccuccaggcccuccucuucgucccccuccucaucuccucccucugccucggcaaguuccccaucuacaccauccccgacaagcucggccccuggucccccaucgacauccaccaccucuccugccccaacaaccucgucgucgaggacgagggcugcaccaaccucuccggcuucuccuacauggagcucaaggucggcuacaucuccgccaucaaggucaacggcuucaccugcaccggcgucgucaccgaggccgagaccuacaccaacuucgucggcuacgucaccaccaccuucaagcgcaagcacuuccgccccauccccgacgccugccgcgccgccuacaacuggaagauggccggcgacccccgcuacgaggagucccuccagaaccccuaccccgacuaccacuggcuccgcaccgucaagaccaccaaggagucccucaucaucaucucccccuccgucgccgaccucgaccccuacgacaagucccuccacucccgcgucuuccccggcggcaagugccucggcaucaccgucuccuccaccuacugcuccaccaaccacgacuacaccaucuggaugcccgaggagccccgccucggcaccuccugcgacaucuucaccuccuccaagggcaagaaggccuccaagggcggcaagaccugcggcuucgucgacgagcgcggccucuacaagucccucaagggcgccugcaagcucaagcucugcggcguccucggccuccgccucauggacggcaccugggucuccauccagaccuccgacgacaccaaguggugcccccccgaccagcucgucaaccuccacgacuuccacuccgacgagaucgagcaccucgucgucgaggagcucgucaagaagcgcgaggagugccucgacgcccucgaguccaucaugaccaccaaguccgucuccuuccgccgccucuccuaccuccgcaagcucguccccggcuucggcaaggccuacaccaucuucaacaagacccucauggaggccgacgcccacuacaaguccguccgcaccuggaacgagaucauccccuccaagggcugccucaagguccgcgagcgcugccacccccccgucgacggcgucuucuucaacggcaucauccucggccccgacggcaacguccucauccccgagaugcaguccucccuccuccagcagcacauggagcuccucgaguccuccgucaucccccucaugcacccccucgccgaccccuccaccgucuucaaggagggcgacgaggccgaggacuucgucgagguccaccuccccgacguccacaagcagaucuccggcgucgaccucggccuccccuccuggggcaaguaccuccucaugaucgccggcggccucgccgcccucguccucaucaucugcuccauggccugcugccgccgcaccaagcgcaccggcucccgccgccgcggcuccggcgaguccgagaagaaggucaccgccaccccccagacccgcaaggucgucuccuccugggagcucuacaaguccgagggcgacgcccgccucuga

SEQ ID NO: 126558 - RNA, 1575 nt, Artificial Sequence
  derived and/or modified CDS sequence (opt2) from glycoprotein__RABV__AB110669.1
augauccuccaggcccuccucuucgucccccuccucaucuccucccucugccucggcaaguuccccaucuacaccauccccgacaagcucggccccuggucccccaucgacauccaccaccucuccugccccaacaaccucgucgucgaggacgagggcugcaccaaccucuccggcuucuccuacauggagcucaaggucggcuacaucuccgccaucaaggucaacggcuucaccugcaccggcgucgucaccgaggccgagaccuacaccaacuucgucggcuacgucaccaccaccuucaagcgcaagcacuuccgccccauccccgacgccugccgcgccgccuacaacuggaagauggccggcgacccccgcuacgaggagucccuccagaaccccuaccccgacuaccacuggcuccgcaccgucaagaccaccaaggagucccucaucaucaucucccccuccgucgccgaccucgaccccuacgacaagucccuccacucccgcgucuuccccggcggcaagugccucggcaucaccgucuccuccaccuacugcuccaccaaccacgacuacaccaucuggaugcccgaggagccccgccucggcaccuccugcgacaucuucaccuccuccaagggcaagaaggccuccaagggcggcaagaccugcggcuucgucgacgagcgcggccucuacaagucccucaagggcgccugcaagcucaagcucugcggcguccucggccuccgccucauggacggcaccugggucuccauccagcaccccgacgacaccaaguggugcccccccgaccagcucgucaaccuccccgacuuccccuccgacgagaucgagcaccucguccucgaggagcucgucaagaagcgcgaggagugccucgacgcccucgaguccaucaugaccaccaaguccgucuccuuccgccgccucuccuaccuccgcaagcucguccccggcuucggcaaggccuacaccaucuucaacaagacccucauggaggccgacgcccacuacaaguccguccgcaccuggaacgagaucauccccuccaagggcugccucaagguccgcgagcgcugccacccccccgucgacgaggucuucuucaacggcaucauccucggccccgacggcaacguccucauccccgagaugcaguccucccuccuccagcagcacauggagcuccucgaguccuccgucaucccccucaugcacccccucgccgaccccuccaccgucuucaaggagggcgacgaggccgaggacuucgucgagguccaccuccccgacguccacaagcagaucuccggcgucgaccucggccuccccuccuggggcaaguaccuccucaugaucgccggcggccucgccgcccucguccucaucaucugcuccauggccugcugccgccgcaccaagcgcaccgagucccgccgccgcggcuccggcgaguccgagaagaaggucaccgccaccccccagaaccgcaaggucgucuccuccugggagcucuacaaguccgagggcgacgcccgccucuga

SEQ ID NO: 126559 - RNA, 1575 nt, Artificial Sequence
  derived and/or modified CDS sequence (opt2) from glycoprotein__RABV__AB128149.1
auggucccccaggcccuccuccucguccccauccucggcuucuccuccugcuucggcaaguuccccaucuacaccauccccgacacccucggccccuggucccccaucgacauccaccaccucuccugccccaacaaccucgucgucgaggacgagggcugcaccaaccucuccggcuucuccuacauggagcucaaggucggccgcaucuccgccaucaaggucaacggcuucaccugcaccggcgucgucaccgaggccgagaccuacaccaacuucgucggcuacgucaccaccaccuucaagcgcaagcacuuccgccccacccccgacgccugccgcgccgccuacaacuggaagauggccggcgacccccgcuacgaggagucccuccacucccccuaccccgacuaccacuggcuccgcaccgucaagaccaccaaggagucccucgucaucaucucccccuccgucgccgaccucgaccccuacgacaacucccuccacucccgcgucuuccccuccggcaagugcuccggcaucaccgucuccuccgucuacugcuccaccaaccacgacuacaccgucuggaugcccgagauccuccgccucggcaccuccugcgacaucuucaccaacucccgcggcaagcgcgccuccaagggcuccaagaccugcggcuucgucgacgagcgcggccucuacaagucccucaagggcgccugcaagcucaagcucugcggcguccucggccuccgccucauggacggcaccugggucgccaugcagaccuccaacgagaccaaguggugcccccccgaccagcucgucaaccuccacgaccuccgcuccgacgagaucgagcaccucgucaucgaggagcucgucaagaagcgcgaggagugccucgacgcccucgaguccaucaucaccaccaaguccgucuccuuccgccgccucuccuaccuccgcaagcucguccccggcuucggcaaggccuacaccaucuucaacaagacccucauggaggccgaggcccacuacaaguccguccgcaccuggaacgagaucauccccuccaagggcugccuccgcgucggcggccgcugccacccccacgucaacggcgucuucuucaacggcaucauccucggccccgacggccacguccucauccccgagaugcaguccucccuccuccagcagcacaucgagcuccucgaguccuccgucaucccccucaugcacccccucgccgaccccuucaccgucuucaaggacggcgacgagaccgaggacuucaucgagguccaccuccccgacguccacgagcaggucuccggcgucgaccucggccuccccaacuggggcgaguacguccuccucuccgccggcacccucaucgcccucaugcucaucaucuuccucaugaccugcugccgcaaggucgaccgccccgaguccacccagcgcucccuccgcggcaccggccgcaacgucuccgucaccucccaguccggcaaguucauccccuccugggaguccuacaaguccggcggcgagaccggccucuga

SEQ ID NO: 126560 - RNA, 1575 nt, Artificial Sequence
  derived and/or modified CDS sequence (opt2) from glycoprotein__RABV__AB285215.1
auggucccccaggcccuccucuucgccccccuccucgucuucucccucugcuucggcaaguuccccaucuacaccauccccgacaagcucggccccuggucccccaucgacauccaccaccucuccugccccaacaaccucgucgucgaggacgagggcugcaccaaccucuccggcuucuccuacauggagcucaaggucggcuacaucuccgccaucaaggucaacggcuucaccugcaccggcgucgucaccgaggccgagaccuacaccaacuucgucggcuacgucaccaccaccuucaagcgcaagcacuuccgccccauccccgacgccugccgcgccgccuacaacuggaagauggccggcgacccccgcuacgaggagucccuccacaaccccuaccccgacuaccacuggcuccgcaccgucaagaccaccaaggagucccucgucaucaucucccccuccgucgccgaccucgaccccuacgacaagucccuccacucccgcgucuuccccuccggcaagugcuccggcaucaccgucuccuccaccuacugcuccaccaaccacgacuacaccaucuggaugcccgagaacccccgccucggcaccuccugcgacaucuucaccaacucccgcggcaagcgcgccuccaagggcggcaagaccugcggcuucgucgacgagcgcggccucuacaagucccucaagggcgccugcaagcucaagcucugcggcguccucggccuccgccucauggacggcaccugggucgccaugcagaccuccgacgagaccaaguggugcccccccgaccagcucgucaacaugcacgacuuccgcuccgacgagaucgagcaccucgucgucgaggagcucgucaagaagcgcgaggagugccucgacgcccucgaguccaucaugaccaccaaguccgucuccuuccgccgccucucccaccuccgcaagcucguccccggcuucggcaaggccuacaccaucuucaacaagacccucauggaggccgacgcccacuacaaguccguccgcaccuggaacgagaucauccccuccaagggcugccuccgcgucggcggccgcugccacccccacgucaacggcgucuucuucaacggcaucauccucggccccgacggccacguccucauccccgagaugcaguccucccuccuccagcagcacauggagcuccucgaguccuccgucaucccccucaugcacccccucgccgaccccuccaccgucuucaaggacggcgacgaggccgaggacuucgucgagguccaccuccccgacguccacaagcaggucuccggcgucgaccucggccuccccaacuggggcaaguacguccuccucuccgccggcacccucaucgcccucaugcucaucaucuuccucaugaccugcugccgccgcgucaaccgccccgaguccacccagcgcucccucggcggcaccggccgcaaggucuccgucaccucccaguccggcaaggucaucuccuccugggaguccuacaaguccggcggcgagacccgccucuga

SEQ ID NO: 126561 - RNA, 1575 nt, Artificial Sequence
  derived and/or modified CDS sequence (opt2) from glycoprotein__RABV__AB362483.1
auggucccccaggcccuccucuucgucccccuccucgucuucucccucugcuucggcaaguuccccaucuacaccauccccgacaagcucggccccuggucccccaucgacauccaccaccucuccugccccaacaaccucgucgucgaggacgagggcugcaccaaccucuccggcuucuccuacauggagcucaaggucggcuacaucuccgccaucaaggucaacggcuucaccugcaccggcgucgucaccgaggccgagaccuacaccaacuucgucggcuacgucaccaccaccuucaagcgcaagcacuuccgccccacccccgacgccugccgcgccgccuacaacuggaagauggccggcgacccccgcuacgaggagucccuccacaaccccuaccccgacuaccacuggcuccgcaccgucaagaccaccaaggagucccucgucaucaucucccccuccgucgccgaccucgaccccuacgacaagucccuccacucccgcgucuuccccuccggcaagugcuccggcaucaccgucuccuccaccuacugcuccaccaaccacgacuacaccaucuggaugcccgagaacccccgccucggcaccuccugcgacaucuucaccaacucccgcggcaagcgcgccuccaagggcuccaagaccugcggcuucgucgacgagcgcggccucuacaagucccucaagggcgccugcaagcucaagcucugcggcguccucggccuccgccucgucgacggcaccuggaucgccaugcagaccuccgacgagaucaaguggugcccccccgaccagcucgucaaccuccacgacuuccgcuccgacgagaucgagcaccucgucgucgaggagcucgucaagaagcgcgaggagugccucgacgcccucgaguccaucgucaccaccaaguccgucuccuuccgccgccucucccaccuccgcaagcucguccccggcuucggcaaggccuacaccaucuucaacaagacccucauggaggccgacgcccacuacaaguccauccgcaccuggaacgagaucauccccuccaagggcugccuccgcgucggcggccgcugccacccccacgucaacggcgucuucuucaacggcaucauccucggccccgacggccacguccucauccccgagaugcaguccucccuccuccagcagcacauggagcuccucgaguccuccgucgucccccucaugcacccccucgccgaccccuccaccgucuucaaggacggcgacgaggccgaggacuucaucgagguccaccuccccgacguccacaagcaggucuccggcgucgaccucggccuccccgacuggggcaaguacguccucauguccgccggcguccucaucgcccucaugcucaucaucucccucaugaccugcugccgcggcguccaccgccccaacuccauccagcaccgccucggcggcaccggccgcaaggucuccgucaccucccaguccggcaaggucaucuccuccugggaguccuacaaguccggcggcgagacccgccucuga

SEQ ID NO: 126562 - RNA, 1575 nt, Artificial Sequence
  derived and/or modified CDS sequence (opt2) from glycoprotein__RABV__AB458799.1
auggucccccagguccuccucuucgucccccuccucgucuucuccuccugcuucggcaaguuccccaucuacaccauccccgacaagcucggccccuggucccccaucgacauccaccaccucuccugccccaacaaccucgucgucgaggacgagggcugcaccaaccucuccggcuucuccuacauggagcucaaggucggcuacaucuccgccaucaaggucaacggcuucaccugcaccggcgucgucaccgaggccgagaccuacaccaacuucgucggcuacgucaccaccaccuucaagcgcaagcacuuccgccccaugcccgacgccugccgcgccgccuacaacuggaagauggccggcgacccccgcuacgaggagucccuccacaaccccuaccccgacuaccacuggcuccgcaccgucaagaccaccaaggagucccucgucaucaucucccccuccgucgccgaccucgaccccuacgacaagucccuccacucccgcgucuuccccggcggcaagugcuccggcaucaccgucuccuccaccugcugcuccaccaaccacgacuacaccaucuggaugcccgagaacccccgccucggcaccuccugcgacaucuucaccaacucccgcggcaagcgcgccuccaagggcggcaagaccugcggcuucgucgacgagcgcggccucuacaagucccucaagggcgccugcaagcucaagcucugcggcguccucggccuccgccucauggacggcaccugggucgccauccagaccuccgacgagaucaaguggugcucccccgaccagcucgucaaccuccacgacuuccacuccgacgagaucgagcaccucgucgucgaggagcucgucaagaagcgcgaggagugccucgacgcccucgagaccaucaugaccaccaaguccgucuccuuccgccgccucucccaccuccgcaagcucguccccggcuucggcaaggccuacaccaucuucaacaagacccucauggaggccgacgcccacuacaaguccauccgcaccuggaacgagaucauccccuccaagggcugccuccgcgucggcggccgcugccacccccacgucaacggcgucuucuucaacggcaucauccucggccccgacggccacguccucauccccgagaugcaguccucccuccuccaccagcacauggagcuccucgaguccuccgucaucccccucaugcacccccucgccgaccccuccaccgucuucaaggacggcgacgaggccgaggacuucgucgagguccaccuccccgacguccacaagcagaucuccggcgucgaccucggccuccccaacuggggcaaguacguccucaucuccgccggcgcccucaccgcccucaugcucaugaucuuccucaugaccugcugccgcaaggccaaccgcgccgaguccauccagcacaaccccggcgagaccggccgcaaggucuccgucaccucccacaacggccgcgucaucuccuccugggaguccuacaaguccggcggcgagaccaagcucuga

SEQ ID NO: 126563 - RNA, 1575 nt, Artificial Sequence
  derived and/or modified CDS sequence (opt2) from glycoprotein__RABV__AB458800.1
auggucccccaggcccuccucuucgucccccuccucgccaucccccucugcuucggcaaguuccccaucuacaccauccccgacaagcucggccccuggucccccaucgacauccaccaccucuccugccccaacaaccucgucgucgaggacgagggcugcaccaaccucuccggcuucuccuacauggagcucaaggucggcuacaucuccgccaucaaggucaacggcuucaccugcaccggcgucgucaccgaggccgagaccuacaccaacuucgucggcuacgucaccaccaccuucaagcgcaagcacuuccgccccacccccgacgccugccgcuccgccuacaacuggaagauggccggcgacccccgcuacgaggagucccuccacaaccccuaccccgacuaccacuggcuccgcaccgucaagaccaccaaggaguccuucgucaucaucucccccuccgucgccgaccucgaccccuacgacaagucccuccacucccgcgucuucccccgcggcaagugcuccggcaucaccgucuccuccaccuacugcuccaccaaccacgacuacaccaucuggaugcccgagaacccccgccucggcaccuccugcgacaucuucaccaacucccgcggcaagcgcgccuccaagggcuccaagaccugcggcuucgucgacgagcgcggccucuacaagucccucaagggcgccugcaagcucaagcucugcggcguccucggccuccgccucauggacggcaccugggucgccauccagaccuccgacgagaccaaguggugcccccccgaccagcucgucaaccuccacgacuuccacuccgacgagaucgagcaccucgucgucgaggagcucgucaagaagcgcgaggagugccucgacgcccucgaguccaucaugaccaccaaguccgucuccuuccgccgccucucccaccuccgcaagcucguccccggcuucggcaaggccuacaccaucuucaacaagacccucauggaggccgacgcccacuacaaguccguccgcaccuggaacgagaucauccccuccaagggcugccuccgcgucggcggccgcugccacccccacgucaacggcgucuucuucaacggcaucauccucggccccgacggccacguccucauccccgagaugcaguccucccuccuccagcagcacauggagcuccucgaguccuccgucaucccccucaugcacccccucgccgaccccuccaccgucuucaaggacggcgacgaggccgaggacuucgucgagguccaccuccccgacguccacaagcaggucuccggcgucgaccucggccuccccuccuggggcaaguacguccucauguccgccggcauccucaccgcccucaugcucaugaucuuccucaugaccugcugccgccgcaccaaccgcgccgaguccauccagcacucccucggcgagaccggccgcaaggucuccgucaccucccaguccggccgcgucaucuccuccugggaguccuacaaguccggcggcgagaccaagcucuga

SEQ ID NO: 126564 - RNA, 1575 nt, Artificial Sequence; identical to SEQ ID NO: 126563
  derived and/or modified CDS sequence (opt2) from glycoprotein__RABV__AB458801.1

SEQ ID NO: 126565 - RNA, 1575 nt, Artificial Sequence; identical to SEQ ID NO: 126563
  derived and/or modified CDS sequence (opt2) from glycoprotein__RABV__AB458802.1

SEQ ID NO: 126566 - RNA, 1575 nt, Artificial Sequence; identical to SEQ ID NO: 126562
  derived and/or modified CDS sequence (opt2) from glycoprotein__RABV__AB458803.1

SEQ ID NO: 126567 - RNA, 1575 nt, Artificial Sequence
  derived and/or modified CDS sequence (opt2) from glycoprotein__RABV__AB458804.1
augaucccccagguccuccucuucgucccccuccucgucuucuccuccugcuucggcaaguuccccaucuacaccauccccgacaagcucggccccuggucccccaucgacauccaccaccucuccugccccaacaaccucgucgucgaggacgagggcugcaccaaccucuccggcuucuccuacauggagcucaaggucggcuacaucuccgccaucaaggucaacggcuucaccugcaccggcgucgucaccgaggccgagaccuacaccaacuucgucggcuacgucaccaccaccuucaagcgcaagcacuuccgccccaugcccgacgccugccgcgccgccuacaacuggaagauggccggcgacccccgcuacgaggagucccuccacaaccccuaccccgacuaccacuggcuccgcaccgucaagaccaccaaggagucccucgucaucaucucccccuccgucgccgaccucgaccccuacgacaagucccuccacucccgcgucuuccccggcggcaagugcuccggcaucaccgucuccuccaccugcugcuccaccaaccacgacuacaccaucuggaugcccgagaacccccgccucggcaccuccugcgacaucuucaccaacucccgcggcaagcgcgccuccaagggcggcaagaccugcggcuucgucgacgagcgcggccucuacaagucccucaagggcgccugcaagcucaagcucugcggcguccucggccuccgccucauggacggcaccugggucgccauccagaccuccgacgagaucaaguggugcucccccgaccagcucgucaaccuccacgacuuccacuccgacgagaucgagcaccucgucgucgaggagcucgucaagaagcgcgaggagugccucgacgcccucgagaccaucaugaccaccaaguccgucuccuuccgccgccucucccaccuccgcaagcucguccccggcuucggcaaggccuacaccaucuucaacaagacccucauggaggccgacgcccacuacaaguccauccgcaccuggaacgagaucauccccuccaagggcugccuccgcgucggcggccgcugccacccccacgucaacggcgucuucuucaacggcaucauccucggccccgacggccacguccucauccccgagaugcaguccucccuccuccaccagcacauggagcuccucgaguccuccgucaucccccucaugcacccccucgccgaccccuccaccgucuucaaggacggcgacgaggccgaggacuucgucgagguccaccuccccgacguccacaagcagaucuccggcgucgaccucggccuccccaacuggggcaaguacguccucaccuccgccggcgcccucaccgcccucaugcucaugaucuuccucaugaccugcugccgcaagaccaaccgcgccgaguccauccagcgcucccccggcgagaccgagcgcaaggucuccgucaccucccacaacggccgcgucaucuccuccugggaguccuacaaguccggcggcgagaccaagcucuga

SEQ ID NO: 126568 - RNA, 1575 nt, Artificial Sequence
  derived and/or modified CDS sequence (opt2) from glycoprotein__RABV__AB458805.1
auggucccccagguccuccucuucgucccccuccucgucuucuccuccugcuucggcaaguuccccaucuacaccauccccgacaagcucggccccuggucccccaucgacauccaccaccucuccugccccaacaaccucgucgucgaggacgagggcugcaccaaccucuccggcuucuccuacauggagcucaaggucggcuacaucuccgccaucaaggucaacggcuucaccugcaccggcgucgucaccgaggccgagaccuacaccaacuucgucggcuacgucaccaccaccuucaagcgcaagcacuuccgccccacccccgacgccugccgcgccgccuacaacuggaagauggccggcgacccccgcuacgaggagucccuccacaaccccuaccccgacuaccacuggcuccgcaccgucaagaccaccaaggagucccucgucaucaucucccccuccgucgccgaccucgaccccuacgacaagucccuccacucccgcgucuuccccggcggcaagugcuccggcaucaccgucuccuccaccugcugcuccaccaaccacgacuacaccaucuggaugcccgagaacccccgccucggcaccuccugcgacaucuucaccaacucccgcggcaagcgcgccuccaagggcggcaagaccugcggcuucgucgacgagcgcggccucuacaagucccucaagggcgccugcaagcucaagcucugcggcguccucggccuccgccucauggacggcaccugggucgccauccagaccuccgacgagaucaaguggugcucccccgaccagcucgucaaccuccacgacuuccacuccgacgagaucgagcaccucgucgucgaggagcucgucaagaagcgcgaggagugccucgacgcccucgagaccaucaugaccaccaaguccgucuccuuccgccgccucucccaccuccgcaagcucguccccggcuucggcaaggccuacaccaucuucaacaagacccucauggaggccgacgcccacuacaaguccauccgcaccuggaacgagaucauccccuccaagggcugccuccgcgucggcggccgcugccacccccacgucaacggcgucuucuucaacggcaucauccucggccccgacggccacguccucauccccgagaugcaguccucccuccuccaccagcacauggagcuccucgaguccuccgucaucccccucaugcacccccucgccgaccccuccaccgucuucaaggacggcgacgaggccgaggacuucgucgagguccaccuccccgacguccacaagcagaucuccggcgucgaccucggccuccccaacuggggcaaguacguccucaucuccgccggcgcccucaccgcccucaugcucaugaucuuccucaugaccuucugccgcaaggccaaccgcgccgaguccauccagcacaaccccggcgagaccggccgcaaggucuccgucaccucccacaacggccgcgucaucuccuccugggaguccuacaaguccggcggcgagaccaagcucuga

SEQ ID NO: 126569 - RNA, 1575 nt, Artificial Sequence; identical to SEQ ID NO: 126563
  derived and/or modified CDS sequence (opt2) from glycoprotein__RABV__AB458806.1

SEQ ID NO: 126570 - RNA, 1575 nt, Artificial Sequence
  derived and/or modified CDS sequence (opt2) from glycoprotein__RABV__AB496676.1
augauccuccaggcccuccucuucgucccccuccucaucuccucccucugccucggcaaguuccccaucuacaccauccccgacaagcucggccccuggucccccaucgacauccaccaccucuccugccccaacaaccucgucgucgaggacgagggcugcaccaaccucuccggcuucuccuacauggagcucaaggucggcuacaucuccgccaucaaggucaacggcuucaccugcaccggcgucgucaccgaggccgagaccuacaccaacuucgucggcuacgucaccaccaccuucaagcgcaagcacuuccgccccguccccgacgccugccgcgccgccuacaacuggaagauggccggcgacccccgcuacgaggagucccuccagaaccccuaccccgacuaccacuggcuccgcaccgucaagaccaccaaggagucccucaucaucaucucccccuccgucgccgaccucgaccccuacgacaagucccuccacucccgcgucuuccccggcggcaagugccucggcaucaccgucuccuccaccuacugcuccaccaaccacgacuacaccaucuggaugcccgaggagccccgccucggcaccuccugcgacaucuucaccuccuccaagggcaagaaggccuccaagggcggcaagaccugcggcuucgucgacgagcgcggccucuacaagucccucaagggcgccugcaagcucaagcucugcggcguccucggccuccgccucauggacggcaccugggucuccauccagaccuccgacgacaccaaguggugcccccccgaccagcucgucaaccuccacgacuuccacuccgacgagaucgagcaccucgucgucgaggagcucgucaagaagcgcgaggagugccucgacgcccucgaguccaucaugaccaccaaguccgucuccuuccgccgccucuccuaccuccgcaagcucguccccggcuucggcaaggccuacaccaucuucaacaagacccucauggaggccgacgcccacuacaaguccguccgcaccuggaacgagaucauccccuccaagggcugccucaagguccgcgagcgcugccacccccccgucgacggcgucuucuucaacggcaucauccucggccccgacggcaacguccucauccccgagaugcaguccucccuccuccagcagcacauggagcuccucgaguccuccgucaucccccucaugcacccccucgccgaccccuccaccgucuucaaggagggcgacgaggccgaggacuucgucgagguccaccuccccgacguccacaagcagaucuccggcgucgaccucggccuccccuccuggggcaaguaccuccucaugaucgccggcggccucgccgcccucguccucaucaucugcuccauggccugcugccgccgcaccaagcgcaccgagucccgccgccgcggcuccggcgaguccgagaagaaggucgccgccaccccccagacccgcaaggucaucuccuccugggagcucuacaaguccgagggcgacgcccgccucuga

SEQ ID NO: 126571 - RNA, 1575 nt, Artificial Sequence
  derived and/or modified CDS sequence (opt2) from glycoprotein__RABV__AB496677.1
augauccuccaggcccuccucuucgucccccuccucaucuccucccucugccucggcaaguuccccaucuacaccauccccgacaagcucggccccuggucccccaucgacauccaccaccucuccugccccaacaaccucgucgucgaggacgagggcugcaccaaccucuccggcuucuccuacauggagcucaaggucggcuacaucuccgccaucaaggucaacggcuucaccugcaccggcgucgucaccgaggccgagaccuacaccaacuucgucggcuacgucaccaccaccuucaagcgcaagcacuuccgccccguccccgacgccugccgcgccgccuacaacuggaagaucaccggcgacccccgcuacgaggagucccuccagaaccccuaccccgacuaccacuggcuccgcaccgucaagaccaccaaggagucccucaucaucaucucccccuccgucgccgaccucgaccccuacgacaagucccuccacucccgcgucuuccccggcggcaagugccucggcaucaccgucuccuccaccuacugcuccaccaaccacgacuacaccaucuggaugcccgaggagccccgccucggcaccuccugcgacaucuucaccuccuccaagggcaagaaggccuccaagggcggcaagaccugcggcuucgucgacgagcgcggccucuacaagucccucaagggcgccugcaagcucaagcucugcggcguccucggccuccgccucauggacggcaccugggucuccauccagaccuccgacgacaccaaguggugcccccccgaccagcucgucaaccuccacgacuuccacuccgacgagaucgagcaccucgucgucgaggagcucgucaagaagcgcgaggagugccucgacgcccucgaguccaucaugaccaccaaguccgucuccuuccgccgccucuccuaccuccgcaagcucguccccggcuucggcaaggccuacaccaucuucaacaagacccucauggaggccgacgcccacuacaaguccguccgcaccuggaacgagaucauccccuccaagggcugccucaagguccgcgagcgcugccacccccccgucgacggcgucuucuucaacggcaucauccucggccccgacggcaacguccucauccccgagaugcaguccucccuccuccagcagcacauggagcuccucgaguccuccgucaucccccucaugcacccccucgccgaccccuccaccgucuucaaggagggcgacgaggccgaggacuucgucgagguccaccuccccgacguccacaagcagaucuccggcgucgaccucggccuccccuccuggggcaaguaccuccucaugaucgccggcggccucgccgcccucguccucaucaucugcuccauggccugcugccgccgcaccaagcgcaccgagucccgccgccgcggcuccggcgaguccgagaagaaggucaccgccaccccccagacccgcaaggucgucuccuccugggagcucuacaaguccgagggcgacgcccgccucuga

SEQ ID NO: 126572 - RNA, 1575 nt, Artificial Sequence
  derived and/or modified CDS sequence (opt2) from glycoprotein__RABV__AB496678.1
augauccuccaggcccuccucuucgucccccuccucaucuccucccucugccucggcaaguuccccaucuacaccauccccgacaagcucggccccuggucccccaucgacauccaccaccucuccugccccaacaaccucgucgucgaggacgagggcugcaccaaccucuccggcuucuccuacauggagcucaaggucggcuacaucuccgccaucaaggucaacggcuucaccugcaccggcgucgucaccgaggccgagaccuacaccaacuucgucggcuacgucaccaccaccuucaagcgcaagcacuuccgccccaugcccgacgccugccgcgccgccuacaacuggaagaugaccggcgacccccgcuacgaggagucccuccagaaccccuaccccgacuaccacuggcuccgcaccgucaagaccaccaaggagucccucaucaucaucucccccuccgucgccgaccucgaccccuacgacaagucccuccacucccgcgucuuccccggcggcaagugccucggcaucaccgucuccuccaccuacugcuccaccaaccacgacuacaccaucuggaugcccgaggagccccgccucggcaccuccugcgacaucuucaccuccuccaagggcaagaaggccuccaagggcggcaagaccugcggcuucgucgacgagcgcggccucuacaagucccucaagggcgccugcaagcucaagcucugcggcguccucggccuccgccucauggacggcaccugggucuccauccagaccuccgacgacaccaaguggugcccccccgaccagcucgucaaccuccacgacuuccacuccgacgagaucgagcaccucgucgucgaggagcucgucaagaagcgcgaggagugccucgacgcccucgaguccaucaugaccaccaaguccgucuccuuccgccgccucuccuaccuccgcaagcucguccccggcuucggcaaggccuacaccaucuucaacaagacccucauggaggccgacgcccacuacaaguccguccgcaccuggaacgagaucauccccuccaagggcugccucaagguccgcgagcgcugccacccccccgucgacggcgucuucuucaacggcaucauccucggccccgacggcaacguccucauccccgagaugcaguccucccuccuccagcagcacauggagcuccucgaguccuccgucaucccccucaugcacccccucgccgaccccuccaccgucuucaaggagggcgacgaggccgaggacuucgucgagguccaccuccccgacguccacaagcagaucuccggcgucgaccucggccuccccuccuggggcaaguaccuccucaugaucgccggcggccucgccgcccucguccucaucaucugcuccauggccugcugccgccgcaccaagcgcaccgagucccgccgccgcggcuccggcgaguccgagaagaaggucaccgccaccccccagacccgcaaggucgucuccuccugggagcucuacaaguccgagggcgacgcccgccucuga

SEQ ID NO: 126573 - RNA, 1575 nt, Artificial Sequence
  derived and/or modified CDS sequence (opt2) from glycoprotein__RABV__AB496679.1
augauccuccaggcccuccucuucgucccccuccucaucuccucccucugccucggcaaguuccccaucuacaccauccccgacaagcucggccccuggucccccaucgacauccaccaccucuccugccccaacaaccucgucgucgaggacgagggcugcaccaaccucuccggcuucuccuacauggagcucaaggucggcuacaucuccgccaucaaggucaacggcuucaccugcaccggcgucgucaccgaggccgagaccuacaccaacuucgucggcuacgucaccaccaccuucaagcgcaagcacuuccgccccauccccgacgccugccgcgccgccuacaacuggaagauggccggcgacccccgcuacgaggagucccuccagaaccccuaccccgacuaccacuggcuccgcaccgucaagaccaccaaggagucccucaucaucaucucccccuccgucgccgaccucgaccccuacgacaagucccuccacucccgcgucuuccccggcggcaagugccucggcaucaccgucuccuccaccuacugcuccaccaaccacgacuacaccaucuggaugcccgaggagccccgccucggcaccuccugcgacaucuucaccuccuccaagggcaagaaggccuccaagggcggcaagaccugcggcuucgucgacgagcgcggccucuacaagucccucaagggcgccugcaagcucaagcucugcggcguccucggccuccgccucauggacggcaccugggucuccauccagaccuccgacgacaccaaguggugcccccccgaccagcucgucaaccuccacgacuuccacuccgacgagaucgagcaccucgucgucgaggagcucgucaagaagcgcgaggagugccucgacgcccucgaguccaucaugaccaccaaguccgucuccuuccgccgccucuccuaccuccgcaagcucguccccggcuucggcaaggccuacaccaucuucaacaagacccucauggaggccgacgcccacuacaaguccguccgcaccuggaacgagaucauccccuccaagggcugccucaagguccgcgagcgcugccacccccccgucgacggcgucuucuucaacggcaucauccucggccccgacggcaacguccucauccccgagaugcaguccucccuccuccagcagcacauggagcuccucgaguccuccgucaucccccucaugcacccccucgccgaccccuccaccgucuucaaggagggcgacgaggccgaggacuucgucgagguccaccuccccgacguccacaagcagaucuccggcgucgaccucggccuccccuccuggggcaaguaccuccucaugaucgccggcggccucgccgcccucguccucaucaucugcuccauggccugcugccgccgcaccaagcagaccgagucccgccgccgcggcuccggcgaguccgagaagaaggucaccgccaccccccagaccaagaaggucgucuccuccugggagcucuacaaguccgagggcgacgcccgccucuga

SEQ ID NO: 126574 - RNA, 1575 nt, Artificial Sequence
  derived and/or modified CDS sequence (opt2) from glycoprotein__RABV__AB496680.1
augauccuccccgcccuccucuucgucccccuccucaucuccucccucugccucggcaaguuccccaucuacaccauccccgacaagcucggccccuggucccccaucgacauccaccaccucuccugccccaacaaccucgucgucgaggacgagggcugcaccaaccucuccggcuucuccuacauggagcucaaggucggcuacaucuccgccaucaaggucaacggcuucaccugcaccggcgucgucaccgaggccgagaccuacaccaacuucgucggcuacgucaccaccaccuucaagcgcaagcacuuccgccccauccccgacgccugccgcgccgccuacaacuggaagauggccggcgacccccgcuacgaggagucccuccagaaccccuaccccgacuaccacuggcuccgcaccgucaagaccaccaaggagucccucaucaucaucucccccuccgucgccgaccucgaccccuacgacaagucccuccacucccgcgucuuccccggcggcaagugccucggcaucaccgucuccuccaccuacugcuccaccaaccacgacuacaccaucuggaugcccgaggagccccgccucggcaccuccugcgacaucuucaccuccuccaagggcaagaaggccuccaagggcggcaagaccugcggcuucgucgacgagcgcggccucuacaagucccucaagggcgccugcaagcucaagcucugcggcguccucggccuccgccucauggacggcaccugggucuccauccagaccuccgacgacaccaaguggugcccccccgaccagcucgucaaccuccacgacuuccacuccgacgagaucgagcaccucgucgucgaggagcucgucaagaagcgcgaggagugccucgacgcccucgaguccaucaugaccaccaaguccgucuccuuccgccgccucuccuaccuccgcaagcucguccccggcuucggcaaggccuacaccaucuucaacaagacccucauggaggccgacgcccacuacaaguccguccgcaccuggaacgagaucauccccuccaagggcugccucaagguccgcgagcgcugccacccccccgucgacggcgucuucuucaacggcaucauccucggccccgacggcaacguccucauccccgagaugcaguccucccuccuccagcagcacauggagcuccucgaguccuccgucaucccccucaugcacccccucgccgaccccuccaccgucuucaaggagggcgacgaggccgaggacuucgucgagguccaccuccccgacguccacaagcagaucuccggcgucgaccucggccuccccuccuggggcaaguaccuccucaugaucgccggcggccucgccacccucguccucaucaucugcuccauggccugcugccgccgcaccaagcgcaccgagucccgccgccgcggcuccggcgaguccgagaagaaggucaccgccaccccccagacccgcaaggucgucuccuccugggagcucuacaaguccgagggcgacgcccgccucuga

SEQ ID NO: 126575 - RNA, 1575 nt, Artificial Sequence
  derived and/or modified CDS sequence (opt2) from glycoprotein__RABV__AB496681.1
augauccuccaggcccuccucuucgucccccuccucaucuccucccucugccucggcaaguuccccaucuacaccauccccgacaagcucggccccuggucccccaucgacauccaccaccucuccugccccaacaaccucgucgucgaggacgagggcugcaccaaccucuccggcuucuccuacauggagcucaaggucggcuacaucuccgccaucaaggucaacggcuucaccugcaccggcgucgucaccgaggccgagaccuacaccaacuucgucggcuacgucaccaccaccuucaagcgcaagcacuuccgccccauccccgacgccugccgcgccgccuacaacuggaagauggccggcgacccccgcuacgaggagucccuccagaaccccuaccccgaguaccacuggcuccgcaccgucaagaccaccaaggagucccucaucaucaucucccccuccgucgccgaccucgaccccuacgacaagucccuccacucccgcgucuuccccggcggcaagugccucggcaucaccgucuccuccaccuacugcuccaccaaccacgacuacaccaucuggaugcccgaggagccccgccucggcaccuccugcgacaucuucaccuccuccaagggcaagaaggccuccaagggcggcaagaccugcggcuucgucgacgagcgcggccucuacaagucccucaagggcgccugcaagcucaagcucugcggcguccucggccuccgccucauggacggcaccugggucuccauccagaccuccgacgacaccaaguggugcccccccgaccagcucgucaaccuccacgacuuccacuccgacgagaucgagcaccucgucgucgaggagcucgucaagaagcgcgaggagugccucgacgcccucgaguccaucaugaccaccaaguccgucuccuuccgccgccucuccuaccuccgcaagcucguccccggcuucggcaaggccuacaccaucuucaacaagacccucauggaggccgacgcccacuacaaguccguccgcaccuggaacgagaucauccccuccaagggcugccucaagguccgcgagcgcugccacccccccgucgacggcgucuucuucaacggcaucauccucggccccgacggcaacguccucauccccgagaugcaguccucccuccuccagcagcacauggagcuccucgaguccuccgucaucccccucaugcacccccucgccgaccccuccaccgucuucaaggagggcgacgaggccgaggacuucgucgagguccaccuccccgacguccacaagcagaucuccggcgucgaccucggccuccccuccuggggcaaguaccuccucaugaucgccggcggccucgccacccucguccucaucaucugcuccauggccugcugccgccgcaccaagcgcaccgagucccgccgccgcggcuccggcgaguccgagaagaacgucaccgccaccccccagacccgcaaggucgucuccuccugggagcucuacaaguccgagggcgacgcccgccucuga

SEQ ID NO: 126576 - RNA, 1575 nt, Artificial Sequence
  derived and/or modified CDS sequence (opt2) from glycoprotein__RABV__AB496682.1
augauccuccaggcccuccucuucgucccccuccucaucuccuccuccugccucggcaaguuccccaucuacaccauccccgacaagcucggccccuggucccccaucgacauccaccaccucuccugccccaacaaccucgucgucgaggacgagggcugcaccaaccucuccggcuucuccuacauggagcucaaggucggcuacaucuccgccaucaaggucaacggcuucaccugcaccggcgucgucaccgaggccgagaccuacaccaacuucgucggcuacgucaccaccaccuucaagcgcaagcacuuccgccccauccccgacgccugccgcgccgccuacaacuggaagauggccggcgacccccgcuacgaggagucccuccagaaccccuaccccgacuaccacuggcuccgcaccgucaagaccaccaaggagucccucaucaucaucucccccuccgucgccgaccucgaccccuacgacaagucccuccacucccgcgucuuccccggcggcaagugccucggcaucaccgucuccuccaccuacugcuccaccaaccacgacuacaccaucuggaugcccgaggagccccgccucggcaccuccugcgacaucuucaccuccuccaagggcaagaaggccuccaagggcggcaagaccugcggcuucgucgacgagcgcggccucuacaagucccucaagggcgccugcaagcucaagcucugcggcguccucggccuccgccucauggacggcaccugggucuccauccagaccuccgacgacaccaaguggugcccccccgaccagcucgucaaccuccacgacuuccacuccgacgagaucgagcaccucgucgucgaggagcucgucaagaagcgcgaggagugccucgacgcccucgaguccaucaugaccaccaaguccgucuccuuccgccgccucuccuaccuccgcaagcucguccccggcuucggcaaggccuacaccaucuucaacaagacccucauggaggccgacgcccacuacaaguccguccgcaccuggaacgagaucauccccuccaagggcugccucaagguccgcgagcgcugccacccccccgucgacggcgucuucuucaacggcaucauccucggccccgacggcaacguccucauccccgagaugcaguccucccuccuccagcagcacauggagcuccucgaguccuccgucaucccccucaugcacccccucgccgaccccuccaccgucuucaaggagggcgacgaggccgaggacuucgucgagguccaccuccccgacguccacaagcagaucuccggcgucgaccucggccuccccuccuggggcaaguaccuccucaugaucgccggcggccucgccacccucguccucaucaucugcuccgucgccugcugccgccgcaccaagcgcaccgagucccgccgccgcggcuccggcgaguccggcaagaaggucaccaccaccccccagacccgcaaggucgucuccuccugggagcucuacaaguccgagggcgacgcccgccucuga

SEQ ID NO: 126577 - RNA, 1575 nt, Artificial Sequence
  derived and/or modified CDS sequence (opt2) from glycoprotein__RABV__AB496683.1
augauccuccaggcccuccucuucgucccccuccucaucuccucccucugccucggcaaguuccccaucuacaccauccccgacaagcucggccccuggucccccaucgacauccaccaccucuccugccccaacaaccucgucgucgaggacgagggcugcaccaaccucuccggcuucuccuacauggagcucaaggucggcuacaucuccgccaucaaggucaacggcuucaccugcaccggcgucgucaccgaggccgagaccuacaccaacuucgucggcuacgucaccaccaccuucaagcgcaagcacuuccgccccguccccgacgccugccgcgccgccuacaacuggaagauggccggcgacccccgcuacgaggagucccuccagaaccccuaccccgacuaccacuggcuccgcaccgucaagaccaccaaggagucccucaucaucaucucccccuccgucgccgaccucgaccccuacgacaagucccuccacucccgcgucuuccccggcggcaagugccucggcaucaccgucuccuccaccuacugcuccaccaaccacgacuacaccaucuggaugcccgaggagccccgccucggcaccuccugcgacaucuucaccuccuccaagggcaagaaggccuccaagggcggcaagaccugcggcuucgucgacgagcgcggccucuacaagucccucaagggcgccugcaagcucaagcucugcggcguccucggccuccgccucauggacggcaccugggucuccauccagaccuccgacgacaccaaguggugcccccccgaccagcucgucaaccuccacgacuuccacuccgacgagaucgagcaccucgucgucgaggagcucgucaagaagcgcgaggagugccucgacgcccucgaguccaucaugaccaccaaguccgucuccuuccgccgccucuccuaccuccgcaagcucguccccggcuucggcaaggccuacaccaucuucaacaagacccucauggaggccgacgcccacuacaaguccguccgcaccuggaacgagaucauccccuccaagggcugccucaagguccgcgagcgcugccacccccccgucgacggcgucuucuucaacggcaucauccucggccccgacggcaacguccucauccccgagaugcaguccucccuccuccagcagcacauggagcuccucgaguccuccgucaucccccucaugcacccccucgccgaccccuccaccgucuucaaggagggcgacgaggccgaggacuucgucgagguccaccuccccgacguccacaagcagaucuccggcgucgaccucggccuccccuccuggggcaaguaccuccucaugaucgccggcggccucgccgcccucguccucaucaucugcuccauggccugcugccgccgcaccaagcgcaccgagucccgccgccgcggcuccggcgaguccgagaagaaggucaccgccaccccccagacccgcaaggucgucuccuccugggagcucuacaaguccgagggcgacgcccgccucuga

SEQ ID NO: 126578 - RNA, 1575 nt, Artificial Sequence
  derived and/or modified CDS sequence (opt2) from glycoprotein__RABV__AB496684.1
augauccuccaggcccuccucuucgucccccuccucaucuccucccucugccucggcaaguuccccaucuacaccauccccgacaagcucggccccuggucccccaucgacauccaccaccucuccugccccaacaaccucgucgucgaggacgagggcugcaccaaccucuccggcuucuccuacauggagcucaaggucggcuacaucuccgccaucaaggucaacggcuucaccugcaccggcgucgucaccgaggccgagaccuacaccaacuucgucggcuacgucaccaccaccuucaagcgcaagcacuuccgccccauccccgacgccugccgcgccgccuacaacuggaagauggccggcgacccccgcuacgaggagucccuccagaaccccuaccccgacuaccacuggcuccgcaccgucaagaccaccaaggagucccucaucaucaucucccccuccgucgccgaccucgaccccuacgacaagucccuccacucccgcgucuuccccggcggcaagugccucggcaucaccgucuccuccaccuacugcuccaccaaccacgacuacaccaucuggaugcccgaggagccccgccucggcaccuccugcgacaucuucaccuccuccaagggcaagaaggccuccaagggcggcaagaccugcggcuucgucgacgagcgcggccucuacaagucccucaagggcgccugcaagcucaagcucugcggcguccucggccuccgccucauggacggcaccugggucuccauccagaccuccgacgacaccaaguggugcccccccgaccagcucgucaaccuccacgacuuccacuccgacgagaucgagcaccucgucgucgaggagcucgucaagaagcgcgaggagugccucgacgcccucgaguccaucaugaccaccaaguccgucuccuuccgccgccucuccuaccuccgcaagcucguccccggcuucggcaaggccuacaccaucuucaacaagacccucauggaggccgacgcccacuacaaguccguccgcaccuggaacgagaucauccccuccaagggcugccucaagguccgcgagcgcugccacccccccgucgacggcgucuucuucaacggcaucauccucggccccgacggcaacguccucauccccgagaugcaguccucccuccuccagcagcacauggagcuccucgaguccuccgucaucccccucaugcacccccucgccgaccccuccaccgucuucaaggagggcgacgaggccgaggacuucgucgagguccaccuccccgacguccacaagcagaucuccggcgucgaccucggccuccccuccuggggcaaguaccuccucaugaucgccggcggccucgccgcccucguccucaucaucugcuccauggccugcugccgccgcaccaagcgcaccgagucccgccgccgcggcuccggcgaguccgagaagaaggucaccgccgccccccagacccgcaaggucgucuccuccugggagcucuacaaguccgagggcgacgcccgccucuga

SEQ ID NO: 126579 - RNA, 1575 nt, Artificial Sequence
  derived and/or modified CDS sequence (opt2) from glycoprotein__RABV__AB496685.1
augauccuccaggcccuccucuucgucccccuccucaucuccucccucugccucggcaaguuccccaucuacaccauccccgacaagcucggccccuggucccccaucgacauccaccaccucuccugccccaacaaccucgucgucgaggacgagggcugcaccaaccucuccggcuucuccuacauggagcucaaggucggcuacaucuccgccaucaaggucaacggcuucaccugcaccggcgucgucaccgaggccgagaccuacaccaacuucgucggcuacgucaccaccaccuucaagcgcaagcacuuccgccccauccccgacgccugccgcgccgccuacaacuggaagauggccggcgacccccgcuacgaggagucccuccagaaccccuaccccgacuaccacuggcuccgcaccgucaagaccaccaaggagucccucaucaucaucucccccuccgucgccgaccucgaccccuacgacaagucccuccacucccgcgucuuccccggcggcaagugccucggcaucaccgucuccuccaccuacugcuccaccaaccacgacuacaccaucuggaugcccgaggagccccgccucgagaccuccugcgacaucuucaccuccuccaagggcaagaaggccuccaagggcggcaagaccugcggcuucgucgacgagcgcggccucuacaagucccucaagggcgccugcaagcucaagcucugcggcguccucggccuccgccucauggacggcaccugggucuccauccagaccuccgacgacaccaaguggugcccccccgaccagcucgucaaccuccacgacuuccacuccgacgagaucgagcaccucgucgucgaggagcucgucaagaagcgcgaggagugccucgacgcccucgaguccaucaugaccaccaaguccgucuccuuccgccgccucuccuaccuccgcaagcucguccccggcuucggcaaggccuacaccaucuucaacaagacccucauggaggccgacgcccacuacaaguccguccgcaccuggaacgagaucauccccuccaagggcugccucaagguccgcgagcgcugccacccccccgucgacggcgucuucuucaacggcaucauccucggccccgacggcaacguccucauccccgagaugcaguccucccuccuccagcagcacauggagcuccucgaguccuccgucaucccccucaugcacccccucgccgaccccuccaccgucuucaaggagggcgacgaggccgaggacuucgucgagguccaccuccccgacguccacaagcagaucuccggcgucgaccucggccuccccuccuggggcaaguaccuccucaugaucgccggcggccucgccacccucguccucaucaucugcuccauggccugcugccgccgcgccaagcgcaccgagucccgccgccgcggcucccgcgaguccgagaagaaggucaccgccgccccccagacccgcaaggucgucuccuccugggagcucuacaaguccgagggcgacgcccgccucuga

SEQ ID NO: 126580 - RNA, 1575 nt, Artificial Sequence; identical to SEQ ID NO: 126552
  derived and/or modified CDS sequence (opt2) from glycoprotein__RABV__AB496686.1

SEQ ID NO: 126581 - RNA, 1575 nt, Artificial Sequence
  derived and/or modified CDS sequence (opt2) from glycoprotein__RABV__AB496687.1
augauccuccaggcccuccucuucgucccccuccucaucuccucccucugccucggcaaguuccccaucuacaccauccccgacaagcucggccccuggucccccaucgacauccaccaccucuccugccccaacaaccucgucgucgaggacgagggcugcaccaaccucuccggcuucuccuacauggagcucaaggucggcuacaucuccgccaucaaggucaacggcuucaccugcaccggcgucgucaccgaggccgagaccuacaccaacuucgucggcuacgucaccaccaccuucaagcgcaagcacuuccgccccguccccgacgccugccgcgccgccuacaacuggaagauggccggcgacccccgcuacgaggagucccuccagaaccccuaccccgacuaccacuggcuccgcaccgucaagaccaccaaggagucccucaucaucaucucccccuccgucgccgaccucgaccccuacgacaagucccuccacucccgcgucuuccccggcggcaagugccucggcaucaccgucuccuccaccuacugcuccaccaaccacgacuacaccaucuggaugcccgaggagccccgccucggcaccuccugcgacaucuucaccuccuccaagggcaagaaggccuccaagggcggcaagaccugcggcuucgucgacgagcgcggccucuacaagucccucaagggcgccugcaagcucaagcucugcggcguccucggccuccgccucauggacggcaccugggucuccauccagaccuccgacgacaccaaguggugcccccccgaccagcucgucaaccuccacgacuuccacuccgacgagaucgagcaccucgucgucgaggagcucgucaagaagcgcgaggagugccucgacgcccucgaguccaucaugaccaccaaguccgucuccuuccgccgccucuccuaccuccgcaagcucguccccggcuucggcaaggccuacaccaucuucaacaagacccucauggaggccgacgcccacuacaaguccguccgcaccuggaacgagaucauccccuccaagggcugccucaagguccgcgagcgcugccacccccccgucgacggcgucuucuucaacggcaucauccucggccccgacggcaacguccucauccccgagaugcaguccucccuccuccagcagcacauggagcuccucgaguccuccgucaucccccucaugcacccccucgccgaccccuccaccgucuucaaggagggcgacgaggccgaggacuucgucgagguccaccuccccgacguccacaagcagaucuccggcgucgaccucggccuccccuccuggggcaaguaccuccucaugaucgccggcggccucgccgcccucguccucaucaucugcuccauggccugcugccgccgcaccaagcgcaccgagucccgccgccgcggcuccggcgaguccgagaagaaggucaccgccaccccccagacccgcaaggucaucuccuccugggagcucuacaaguccgagggcgacgcccgccucuga

SEQ ID NO: 126582 - RNA, 1575 nt, Artificial Sequence
  derived and/or modified CDS sequence (opt2) from glycoprotein__RABV__AB496689.1
augauccuccaggcccuccgcuucgucccccuccucaucuccucccucugccucggcaaguuccccaucuacaccauccccgacaagcucggccccuggucccccaucgacauccaccaccucuccugccccaacaaccucgucgucgaggacgagggcugcaccaaccucuccggcuucuccuacauggagcucaaggucggcuacaucuccgccaucaaggucaacggcuucaccugcaccggcgucgucaccgaggccgagaccuacaccaacuucgucggcuacgucaccaccaccuucaagcgcaagcacuuccgccccauccccgacgccugccgcgccgccuacaacuggaagauggccggcgacccccgcuacgaggagucccuccagaaccccuaccccgacuaccacuggcuccgcaccgucaagaccaccaaggagucccucaucaucaucucccccuccgucgccgaccucgaccccuacgacaagucccuccacucccgcgucuuccccggcggcaagugccucggcaucaccgucuccuccaccuacugcuccaccaaccacgacuacaccaucuggaugcccgaggagccccgccucggcaccuccugcgacaucuucaccuccuccaagggcaagaaggccuccaagggcggcaagaccugcggcuucgucgacgagcgcggccucuacaagucccucaagggcgccugcaagcucaagcucugcggcguccucggccuccgccucauggacggcaccugggucuccauccagaccuccgacgacaccaaguggugcccccccgaccagcucgucaaccuccacgacuuccacuccgacgagaucgagcaccucgucgucgaggagcucgucaagaagcgcgaggagugccucgacgcccucgaguccaucaugaccaccaaguccgucuccuuccgccgccucuccuaccuccgcaagcucguccccggcuucggcaaggccuacaccaucuucaacaagacccucauggaggccgacgcccacuacaaguccguccgcaccuggaacgagaucauccccuccaagggcugccucaagguccgcgagcgcugccacccccccgucgacggcgucuucuucaacggcaucauccucggccccgacggcaacguccucauccccgagaugcaguccucccuccuccagcagcacauggagcuccucgaguccuccgucaucccccucaugcacccccucgccgaccccuccaccgucuucaaggagggcgacgaggccgaggacuucgucgagguccaccuccccgacguccacaagcagaucuccggcgucgaccucggccuccccuccuggggcaaguaccuccucaugaucgccggcggccucgccgcccucguccucaucaucugcuccauggccugcugccgccgcaccaagcgcaccgagucccgccgccgcggcuccggcgaguccgagaagaaggucaccgccaccccccagacccgcaaggucgucuccuccugggagcucuacaaguccgagggcgacgcccgccucuga

SEQ ID NO: 126583 - RNA, 1575 nt, Artificial Sequence
  derived and/or modified CDS sequence (opt2) from glycoprotein__RABV__AB496690.1
augauccuccaggcccuccucuucgucccccuccucaucuccucccucugccucggcaaguuccccaucuacaccauccccgacaagcucggccccuggucccccaucgacauccaccaccucuccugccccaacaaccucgucgucgaggacgagggcugcaccaaccucuccggcuucuccuacauggagcucaaggucggcuacaucuccgccaucaaggucaacggcuucaccugcaccggcgucgucaccgaggccgagaccuacaccaacuucgucggcuacgucaccaccaccuucaagcgcaagcacuuccgccccauccccgacgccugccgcgccgccuacaacuggaagauggccggcgacccccgcuacgaggagucccuccagaaccccuaccccgacuaccacuggcuccgcaccgucaagaccaccaaggagucccucaucaucaucucccccuccgucgccgaccucgaccccuacgacaagucccuccacucccgcgucuuccccggcggcaagugccucggcaucaccgucuccuccaccuacugcuccaccaaccacgacuacaccaucuggaugcccgaggagccccgccucggcaccuccugcgacaucuucaccuccuccaagggcaagaaggccuccaagggcggcaagaccugcggcuucgucgacgagcgcggccucuacaagucccucaagggcgccugcaagcucaagcucugcggcguccucggccuccgccucauggacggcaccugggucuccauccagaccuccgacgacaccaaguggugcccccccgaccagcucgucaaccuccacgacuuccacuccgacgagaucgagcaccucgucgucgaggagcucgucaagaagcgcgaggagugccucgacgcccucgaguccaucaugaccaccaaguccgucuccuuccgccgccucuccuaccuccgcaagcucguccccggcuucggcaaggccuacaccaucuucaacaagacccucauggaggccgacgcccacuacaaguccguccgcaccuggaacgagaucauccccuccaagggcugccucaagguccgcgagcgcugccacccccccgucgacggcgucuucuucaacggcaucauccucggccccgacggcaacguccucauccccgagaugcaguccucccuccuccagcagcacauggagcuccucgaguccuccgucaucccccucaugcacccccucgccgaccccuccaccgucuucaaggagggcgacgaggccgaggacuucgucgagguccaccuccccgacguccacaagcagaucuccggcgucgaccucggccuccccuccuggggcaaguaccuccucaugaucgccggcggccucgccgcccucguccucaucaucugcuccauggccugcugccgccgcaccaagcgcaccgagucccgccgccgcggcuccggcgaguccgagaagaaggucaccgccaccccccagacccgcaaggucaucuccuccugggagcucuacaaguccgagggcgacgcccgccucuga

SEQ ID NO: 126584 - RNA, 1575 nt, Artificial Sequence
  derived and/or modified CDS sequence (opt2) from glycoprotein__RABV__AB496691.1
augauccuccaggcccuccucuucgucccccuccucaucuccucccucugccucggcaaguuccccaucuacaccauccccgacaagcucggccccuggucccccaucgacauccaccaccucuccugccccaacaaccucgucgucgaggacgagggcugcaccaaccucuccggcuucuccuacauggagcucaaggucggcuacaucuccgccaucaaggucaacggcuucaccugcaccggcgucgucaccgaggccgagaccuacaccaacuucgucggcuacgucaccaccaccuucaagcgcaagcacuuccgccccauccccgacgccugccgcgccgccuacaacuggaagauggccggcgacccccgcuacgaggagucccuccagaaccccuaccccgacuaccacuggcuccgcaccgucaagaccaccaaggagucccucaucaucaucucccccuccgucgccgaccucgaccccuacgacaagucccuccacucccgcgucuuccccggcggcaagugccucggcaucaccgucuccuccaccuacugcuccaccaaccacgacuacaccaucuggaugcccgaggagccccgccucggcaccuccugcgacaucuucaucuccuccaagggcaagaaggccuccaagggcggcaagaccugcggcuucgucgacgagcgcggccucuacaagucccucaagggcgccugcaagcucaagcucugcggcguccucggccuccgccucauggacggcaccugggucuccauccagaccuccgacgacaccaaguggugcccccccgaccagcucgucaaccuccacgacuuccacuccgacgagaucgagcaccucgucgucgaggagcucgucaagaagcgcgaggagugccucgacgcccucgaguccaucaugaccaccaaguccgucuccuuccgccgccucuccuaccuccgcaagcucguccccggcuucggcaaggccuacaccaucuucaacaagacccucauggaggccgacgcccacuacaaguccguccgcaccuggaacgagaucauccccuccaagggcugccucaagguccgcgagcgcugccacccccccgucgacggcgucuucuucaacggcaucauccucggccccgacggcaacguccucauccccgagaugcaguccucccuccuccagcagcacauggagcuccucgaguccuccgucaucccccucaugcacccccucgccgaccccuccaccgucuucaaggagggcgacgaggccgaggacuucgucgagguccaccuccccgacguccacaagcagaucuccggcgucgaccucggccuccccuccuggggcaaguaccuccucaugaucgccggcggccucgccacccucguccucaucaucugcuccauggccugcugccgccgcaccaagcgcaccgagucccgccgccgcggcucccgcgaguccgagaagaaggucaccgccgccccccagacccgcaaggucgucuccuccugggagcucuacaaguccgagggcgacgcccgccucuga

SEQ ID NO: 126585 - RNA, 1575 nt, Artificial Sequence; identical to SEQ ID NO: 126578
  derived and/or modified CDS sequence (opt2) from glycoprotein__RABV__AB496692.1

SEQ ID NO: 126586 - RNA, 1575 nt, Artificial Sequence; identical to SEQ ID NO: 126552
  derived and/or modified CDS sequence (opt2) from glycoprotein__RABV__AB496694.1

SEQ ID NO: 126587 - RNA, 1575 nt, Artificial Sequence; identical to SEQ ID NO: 126552
  derived and/or modified CDS sequence (opt2) from glycoprotein__RABV__AB496695.1

SEQ ID NO: 126588 - RNA, 1575 nt, Artificial Sequence; identical to SEQ ID NO: 126582
  derived and/or modified CDS sequence (opt2) from glycoprotein__RABV__AB496696.1

SEQ ID NO: 126589 - RNA, 1575 nt, Artificial Sequence
  derived and/or modified CDS sequence (opt2) from glycoprotein__RABV__AB496697.1
augauccuccaggcccuccgcuucgucccccuccucaucuccucccucugccucggcaaguuccccaucuacaccauccccgacaagcucggccccuggucccccaucgacauccaccaccucuccugccccaacaaccucgucgucgaggacgagggcugcaccaaccucuccggcuucuccuacauggagcucaaggucggcuacaucuccgccaucaaggucaacggcuucaccugcaccggcgucgucaccgaggccgagaccuacaccaacuucgucggcuacgucaccaccaccuucaagcgcaagcacuuccgccccauccccgacgccugccgcgccgccuacaacuggaagauggccggcgacccccgcuacgaggagucccuccagaaccccuaccccgacuaccacuggcuccgcaccgucaagaccaccaaggagucccucaucaucaucucccccuccgucgccgaccucgaccccuacgacaagucccuccacucccgcgucuuccccggcggcaagugccucggcaucaccgucuccuccaccuacugcuccaccaaccacgacuacaccaucuggaugcccgaggagccccgccucggcaccuccugcgacaucuucaccuccuccaagggcaagaaggccuccaagggcggcaagaccugcggcuucgucgacgagcgcggccucuacaagucccucaagggcgccugcaagcucaagcucugcggcguccucggccuccgccucauggacggcaccugggucuccauccagaccuccgacgacaccaaguggugcccccccgaccagcucgucaaccuccacgacuuccacuccgacgagaucgagcaccucgucgucgaggagcucgucaagaagcgcgaggagugccucgacgcccucgaguccaucaugaccaccaaguccgucuccuuccgccgccucuccuaccuccgcaagcucguccccggcuucggcaaggccuacaccaucuucaacaagacccucauggaggccgacgcccacuacaaguccguccgcaccuggaacgagaucauccccuccaagggcugccucaagguccgcgagcgcugccacccccccgucgacggcgucuucuucaacggcaucauccucggccccgacggcaacguccucauccccgagaugcaguccucccuccuccagcagcacauggagcuccucgaguccuccgucaucccccucaugcacccccucgccgaccccuccaccgucuucaaggagggcgacgaggccgaggacuucgucgagguccaccuccccgacguccacaagcagaucuccggcgucgaccucggccuccccuccuggggcaaguaccuccucaugaucgccggcggccucgccgcccucguccucaucaucugcuccauggccugcugccgccgcaccaagcgcaccgagucccgccgccgcggcuccggcgaguccgagaagaaggucaccgucaccccccagacccgcaaggucgucuccuccugggagcucuacaaguccgagggcgacgcccgccucuga

SEQ ID NO: 126590 - RNA, 1575 nt, Artificial Sequence
  derived and/or modified CDS sequence (opt2) from glycoprotein__RABV__AB496698.1
augauccuccaggccauccucuucgucccccuccucaucuccucccucugccucggcaaguuccccaucuacaccauccccgacaagcucggccccuggucccccaucgacauccaccaccucuccugccccaacaaccucgucgucgaggacgagggcugcaccaaccucuccggcuucuccuacauggagcucaaggucggcuacaucuccgccaucaaggucaacggcuucaccugcaccggcgucgucaccgaggccgucaccuacaccaacuucgucggcuacgucaccaccaccuucaagcgcaagcacuuccgccccguccccgacgccugccgcaccgccuacaacuggaagauggccggcgacccccgcuacgaggagucccuccagaaccccuaccccgacuaccacuggcuccgcaccgucaagaccaccaaggagucccucaucaucaucucccccuccgucgccgaccucgaccccuacgacaagucccuccacucccgcgucuuccccggcggcaagugccucggcaucaccgucuccuccaccuacugcuccaccaaccacgacuacaccaucuggaugcccgaggagccccgccucggcaccuccugcgacaucuucaccuccuccaagggcaagaaggccuccaagggcggcaagaccugcggcuucgucgacgagcgcggccucuacaagucccucaagggcgccugcaagcucaagcucugcggcguccucggccuccgccucauggacggcaccugggucuccauccagaccuccgacgacaccaaguggugcccccccgaccagcucgucaaccuccacgacuuccacuccgacgagaucgagcaccucgucgucgaggagcucgucaagaagcgcgaggagugccucgacgcccucgaguccaucaugaccaccaaguccgucuccuuccgccgccucuccuaccuccgcaagcucguccccggcuucggcaaggccuacaccaucuucaacaagacccucauggaggccgacgcccacuacaaguccguccgcaccuggaacgagaucauccccuccaagggcugccucaagguccgcgagcgcugccacccccccgucgacggcgucuucuucaacggcaucauccucggccccgacggcaacguccucauccccgagaugcaguccucccuccuccagcagcacauggagcuccucgaguccuccgucaucccccucaugcacccccucgccgaccccuccaccgucuucaaggagggcgacgaggccgaggacuucgucgagguccaccuccccgacguccacaagcagaucuccggcgucgaccucggccuccccuccuggggcaaguaccuccucaugaucgccggcggccucgccacccucguccucaucaucugcuccauggccugcugccgccgcaccaagcgcaccgagucccgccgccgcggcuccggcgaguccggcaagaaggucaccgccaccccccagacccgcaaggucgucuccuccugggagcucuacaaguccgagggcgacgcccgccucuga

SEQ ID NO: 126591 - RNA, 1575 nt, Artificial Sequence
  derived and/or modified CDS sequence (opt2) from glycoprotein__RABV__AB496699.1
augauccuccaggccauccucuucgucccccuccucaucuccucccucugccucggcaaguuccccaucuacaccauccccgacaagcucggccccuggucccccaucgacauccaccaccucuccugccccaacaaccucgucgucgaggacgagggcugcaccaaccucuccggcuucuccuacauggagcucaaggucggcuacaucuccgccaucaaggucaacggcuucaccugcaccggcgucgucaccgaggccgagaccuacaccaacuucgucggcuacgucaccaccaccuucaagcgcaagcacuuccgccccguccccgacgccugccgcaccgccuacaacuggaagauggccggcgacccccgcuacgaggagucccuccagaaccccuaccccgacuaccacuggcuccgcaccgucaagaccaccaaggagucccucaucaucaucucccccuccgucgccgaccucgaccccuacgacaagucccuccacucccgcgucuuccccggcggcaagugccucggcaucaccgucuccuccaccuacugcuccaccaaccacgacuacaccaucuggaugcccgaggagccccgccucggcaccuccugcgacaucuucaccuccuccaagggcaagaaggccuccaagggcggcaagaccugcggcuucgucgacgagcgcggccucuacaagucccucaagggcgccugcaagcucaagcucugcggcguccucggccuccgccucauggacggcaccugggucuccauccagaccuccgacgacaccaaguggugcccccccgaccagcucgucaaccuccacgacuuccacuccgacgagaucgagcaccucgucgucgaggagcucgucaagaagcgcgaggagugccucgacgcccucgaguccaucaugaccaccaaguccgucuccuuccgccgccucuccuaccuccgcaagcucguccccggcuucggcaaggccuacaccaucuucaacaagacccucauggaggccgacgcccacuacaaguccguccgcaccuggaacgagaucauccccuccaagggcugccucaagguccgcgagcgcugccacccccccgucgacggcgucuucuucaacggcaucauccucggccccgacggcaacguccucauccccgagaugcaguccucccuccuccagcagcacauggagcuccucgaguccuccgucaucccccucaugcacccccucgccgaccccuccaccgucuucaaggagggcgacgaggccgaggacuucgucgagguccaccuccccgacguccacaagcagaucuccggcgucgaccucggccuccccuccuggggccgcuaccuccucaugaucgccggcggccucgccacccucguccucaucaucugcuccauggccugcugccgccgcaccaagcgcaccgagucccgccgccgcggcuccggcgaguccggcaagaaggucaccgccaccccccagacccgcaaggucgucuccuccugggagcucuacaaguccgagggcgacgcccgccucuga

SEQ ID NO: 126592 - RNA, 1575 nt, Artificial Sequence
  derived and/or modified CDS sequence (opt2) from glycoprotein__RABV__AB496701.1
augauccuccaggccauccucuucgucccccuccucaucuccucccucugccucggcaaguuccccaucuacaccauccccgacaagcucggccccuggucccccaucgacauccaccaccucuccugccccaacaaccucgucgucgaggacgagggcugcaccaaccucuccggcuucuccuacauggagcucaaggucggcuacaucuccgccaucaaggucaacggcuucaccugcaccggcgucgucaccgaggccgagaccuacaccaacuucgucggcuacgucaccaccaccuucaagcgcaagcacuuccgccccguccccgacgccugccgcaccgccuacaacuggaagauggccggcgacccccgcuacgaggagucccuccagaaccccuaccccgacuaccacuggcuccgcaccguccgcaccaccaaggagucccucaucaucaucucccccuccgucgccgaccucgaccccuacgacaagucccuccacucccgcgucuuccccggcggcaagugccucggcaucaccgucuccuccaccuacugcuccaccaaccacgacuacaccaucuggaugcccgaggagccccgccucggcaccuccugcgacaucuucaccuccuccaagggcaagaaggccuccaagggcggcaagaccugcggcuucgucgacgagcgcggccucuacaagucccucaagggcgccugcaagcucaagcucugcggcguccucggccuccgccucauggacggcaccugggucuccauccagaccuccgacgacaccaaguggugcccccccgaccagcucgucaaccuccacgacuuccacuccgacgagaucgagcaccucgucgucgaggagcucgucaagaagcgcgaggagugccucgacgcccucgaguccaucaugaccaccaaguccgucuccuuccgccgccucuccuaccuccgcaagcucguccccggcuucggcaaggccuacaccaucuucaacaagacccucauggaggccgacgcccacuacaaguccguccgcaccuggaacgagaucauccccuccaagggcugccucaagguccgcgagcgcugccacccccccgucgacggcgucuucuucaacggcaucauccucggccccgacggcaacguccucauccccgagaugcaguccucccuccuccagcagcacauggagcuccucgaguccuccgucaucccccucaugcacccccucgccgaccccuccaccgucuucaaggagggcgacgaggccgaggacuucgucgagguccaccuccccgacguccacaagcagaucuccggcgucgaccucggccuccccuccuggggcaaguaccuccucaugaucgccggcggccucgccacccucguccucaucaucugcuccauggccugcugccgccgcaccaagcgcaccgagucccgccgccgcggcuccggcgaguccggcaagaaggucaccgccaccccccagacccgcaaggucgucuccuccugggagcucuacaaguccgagggcgacgcccgccucuga

SEQ ID NO: 126593 - RNA, 1575 nt, Artificial Sequence
  derived and/or modified CDS sequence (opt2) from glycoprotein__RABV__AB496703.1
augauccuccaggccauccucuucgucccccuccucaucuccucccucugccucggcaaguuccccaucuacaccauccccgacaagcucggccccuggucccccaucgacauccaccaccucuccugccccaacaaccucgucgucgaggacgagggcugcaccaaccucuccggcuucuccuacauggagcucaaggucggcuacaucuccgccaucaaggucaacggcuucaccugcaccggcgucgucaccgaggccgagaccuacaccaacuucgucggcuacgucaccaccaccuucaagcgcaagcacuuccgccccguccccgacgccugccgcaccgccuacaacuggaagauggccggcgacccccgcuacgaggagucccuccagaaccccuaccccgacuaccacuggcuccgcaccgucaagaccaccaaggagucccucaucaucaucucccccuccgucgccgaccucgaccccuacgacaagucccuccacucccgcgucuuccccggcggcaagugccucggcaucaccgucuccuccaccuacugcuccaccaaccacgacuacaccaucuggaugcccgaggagccccgccucggcaccuccugcgacaucuucaccuccuccaagggcaagaaggccuccaagggcggccgcaccugcggcuucgucgacgagcgcggccucuacaagucccucaagggcgccugcaagcucaagcucugcggcguccucggccuccgccucauggacggcaccugggucuccauccagaccuccgacgacaccaaguggugcccccccgaccagcucgucaaccuccacgacuuccacuccgacgagaucgagcaccucgucgucgaggagcucgucaagaagcgcgaggagugccucgacgcccucgaguccaucaugaccaccaaguccgucuccuuccgccgccucuccuaccuccgcaagcucguccccggcuucggcaaggccuacaccaucuucaacaagacccucauggaggccgacgcccacuacaaguccguccgcaccuggaacgagaucauccccuccaagggcugccucaagguccgcgagcgcugccacccccccgucgacggcgucuucuucaacggcaucauccucggccccgacggcaacguccucauccccgagaugcaguccucccuccuccagcagcacauggagcuccucgaguccuccgucaucccccucaugcacccccucgccgaccccuccaccgucuucaaggagggcgacgaggccgaggacuucgucgagguccaccuccccgacguccacaagcagaucuccggcgucgaccucggccuccccuccuggggccgcuaccuccucaugaucgccggcggccucgccacccucguccucaucaucugcuccauggccugcugccgccgcaccaagcgcaccgagucccgccgccgcggcuccggcgaguccggcaagaaggucaccgccaccccccagacccgcaaggucgucuccuccugggagcucuacaaguccgagggcgacgcccgccucuga

SEQ ID NO: 126594 - RNA, 1575 nt, Artificial Sequence; identical to SEQ ID NO: 126590
  derived and/or modified CDS sequence (opt2) from glycoprotein__RABV__AB496705.1

SEQ ID NO: 126595 - RNA, 1575 nt, Artificial Sequence
  derived and/or modified CDS sequence (opt2) from glycoprotein__RABV__AB517659.1
auggucccccaggcccuccuccucgucccccuccucgccgucuccuucugcuucggcaaguuccccaucuacaccauccccgacaagcucggccccuggucccccaucgacauccaccaccucuccugccccaacaaccucgucgucgaggacgagggcugcaccaaccucuccggcuucuccuacauggagcucaaggucggcuacaucuccgccaucaaggucaacggcuucaccugcaccggcgucgucaccgaggccgagaccuacaccaacuucgucggcuacgucaccaccaccuucaagcgcaagcacuuccgccccacccccgacgccugccgcuccgccuacaacuggaagauggccggcgacccccgcuacgaggagucccuccacaaccccuaccccgacuaccacuggcuccgcaccgucaagaccaccaaggagucccucgucaucaucucccccuccgucgccgaccucgaccccuacgacaagucccuccacucccgcgucuuccccuccggcaagugcuccggcaucaccgucuccuccaccuacugcuccaccaaccacgacuacaccaucuggcuccccgagaacccccgccucggcaccuccugcgacaucuucaccaacucccgcggcaagcgcgccuccaagggcuccaagaccugcggcuucgucgacgagcgcggccucuacaagucccucaagggcgccugcaagcucaagcucugcggcguccucggccuccgccucauggacggcaccugggucgccaugcagaccuccgacgagaccaaguggugcccccccgaccagcucgucaaccuccacgacuuccgcuccgacgagaucgagcaccucgucgucgaggagcucgucaagaagcgcgaggagugccucgacgcccucgaguccaucaugaccaccaaguccgucuccuuccgccgccucucccaccuccgcaagcucguccccggcuucggcaaggccuacaccaucuucaacaagacccucauggaggccgacgcccacuacaaguccguccgcaccuggaacgagaucauccccuccaagggcugccuccgcgucggcggccgcugccacccccacgucaacggcgucuucuucaacggcaucauccucggccccgacggccacguccucauccccgagaugcaguccucccuccuccagcagcacauggagcuccucgaguccuccgucaucccccucaugcacccccucgccgaccccuccaccgucuucaaggacggcgacgaggccgaggacuucgucgagguccaccuccccgacguccacaagcaggucuccggcgucgaccucggccuccccaacuggggcaaguacguccucauguccgccggcguccucaucgcccucaugcucaucaucuuccucaugaccugcugccgccgcgucaaccgccccgacuccacccagcgcuccuucggccgcaccggccgcaaggucuccgucaccucccaguccggcaaggucaucuccuccugggaguccuacaaguccggcggcgagacccgccucuga

SEQ ID NO: 126596 - RNA, 1575 nt, Artificial Sequence
  derived and/or modified CDS sequence (opt2) from glycoprotein__RABV__AB517660.1
auggucccccagacccuccucuucgucccccuccucgucuucucccucugcuucggcaaguuccccaucuacaccauccccgacaagcucggccccuggucccccaucgacauccaccaccucuccugccccaacaaccucgucgucgaggacgagggcugcaccaaccucuccggcuucuccuacauggagcucaaggucggcuacaucuccgccaucaaggucaacggcuucaccugcaccggcgucgucaccgaggccgagaccuacaccaacuucgucggcuacgucaccaccaccuucaagcgcaagcacuuccgccccacccccgacgccugccgcgccgccuacaacuggaagauggccggcgacccccgcuacgaggagucccuccacaaccccuaccccgacuaccacuggcuccgcaccgucaagaccaccaaggagucccucgucaucaucucccccuccgucgccgaccucgaccccuacgacaagucccuccacucccgcgucuuccccuccggcaagugccucggcaucaccgucuccuccaccuacugcuccaccaaccacgacuacaccgucuggcgccccgagaacccccgccucggcaccuccugcgacaucuucaccaacucccgcggcaagcgcgccuccaagggcuccaagaccugcggcuucgucgacgagcgcggcugguacaaguccuggaagggcgccugcaagcucaagcucugcggcguccucggccuccgccucaucgacggcaccuggaucgccaugcagaccuccgaggagaccaaguggugcccccccgaccagcucgucaaccuccacgacuuccgcuccgacgagaucgagcaccucgucgucgaggagcucgucaagaagcgcgaggagugccucgacgcccucgaguccaucaugaccaccaaguccgucuccuuccgccgccucucccaccuccgcaagcucguccccggcuucggcaaggccuacaccaucuucaacaagacccucauggaggccgacgcccacuacaaguccauccgcaccuggaacgagaucauccccuccaagggcugccuccgcgucggcggcaagugccacccccacgucaacggcgucuucuucaacggcaucauccucggccccgacggccacguccucauccccgagaugcaguccucccuccuccagcagcacauggagcuccucgaguccuccgucaucccccucaugcacccccucgccgaccccuacaccgucuucaaggacggcgacgaggccgaggacuucgucgagguccaccuccccgacguccacaagcucgucuccggcgucgaccucggccuccccaacuggggcaaguaccuccucauguccgucggcguccucaucgcccucaugcucaucaucuuccucaugaccugcugccgcggcguccaccgccccgacuccgcccagcagaagcucggcggcaccggccgccgcgucuccaucaccucccagggcggccgcgucaucuccuccugggaguccuacaaguccggcggcgacacccgccucuga

SEQ ID NO: 126597 - RNA, 1575 nt, Artificial Sequence; identical to SEQ ID NO: 126546
  derived and/or modified CDS sequence (opt2) from glycoprotein__RABV__AB518487.1

SEQ ID NO: 126598 - RNA, 1575 nt, Artificial Sequence; identical to SEQ ID NO: 126546
  derived and/or modified CDS sequence (opt2) from glycoprotein__RABV__AB518488.1

SEQ ID NO: 126599 - RNA, 1575 nt, Artificial Sequence
  derived and/or modified CDS sequence (opt2) from glycoprotein__RABV__AB518489.1
auggucccccaggcccuccucuucgucccccuccucgccuucuccuucugcuucggcaaguuccccaucuacaccauccccgacaagcucggccccuggucccccaucgacauccaccaccucuccugccccaacaaccucgucgucgaggacgagggcugcaccaaccucuccggcuucuccuacauggagcucaaggucggcuacaucuccgccaucaaggucaacggcuucaccugcaccggcgucgucaccgaggccgagaccuacaccaacuucgucggcuacgucaccaccaccuucaagcgcaagcacuuccgccccacccccgacgccugccgcuccgccuacaacuggaagauggccggcgacccccgcuacgaggagucccuccacaaccccuaccccgacuaccacuggcuccgcaccgucaagaccaccaaggagucccucgucaucaucucccccuccgucgccgaccucgaccccuacgacaagucccuccacucccgcgucuuccccaacggcaagugcuccggcaucaccgucuccuccaccuacugcuccaccaaccacgacuacaccaucuggcuccccgagaacccccgccucggcaccuccugcgacaucuucaccaacucccgcggcaagcgcgccuccaagggcuccaagaccugcggcuucgucgacgagcgcggccucuacaagucccucaagggcgccugcaagcucaagcucugcggcguccucggccuccgccucauggacggcaccugggucgccaugcagaccuccgacgagaccaaguggugcccccccgaccagcucgucaaccuccacgacuuccgcuccgacgagaucgagcaccucgucgucgaggagcucgucaagaagcgcgaggagugccucgacgcccucgaguccaucaugaccaccaaguccgucuccuuccgccgccucucccaccuccgcaagcucguccccggcuucggcaaggccuacaccaucuucaacaagacccucauggaggccgacgcccacuacaaguccauccgcaccuggaacgagaucauccccuccaagggcugccuccgcgucggcggccgcugccacccccacgucaacggcgucuucuucaacggcaucauccucggccccgacggccacguccucauccccgagaugcaguccucccuccuccagcagcacauggagcuccucgaguccuccgucaucccccucaugcacccccucgccgaccccuccaccgucuucaaggacggcgacgaggccgaggacuucgucgagguccaccuccccgacguccacaagcaggucuccggcgucgaccucggccuccccaacuggggcaaguacguccucauguccgccggcguccucaucgcccucaugcucaccaucuuccucaugaccugcugccgccgcgucaaccgccccgacuccacccagcgcucccucggcaugaccggccgcaaggucuccgucaccucccaguccggcaaggucaucuccuccugggaguccuacaaguccggcggcgagacccgccucuga

SEQ ID NO: 126600 - RNA, 1575 nt, Artificial Sequence
  derived and/or modified CDS sequence (opt2) from glycoprotein__RABV__AB518490.1
auggucccccaggcccuccucuucgucccccuccucgccuucuccuucugcuucggcaaguuccccaucuacaccauccccgacaagcucggccccuggucccccaucgacauccaccaccucuccugccccaacaaccucgucgucgaggacgagggcugcaccaaccucuccggcuucuccuacauggagcucaaggucggcuacaucuccgccaucaaggucaacggcuucaccugcaccggcgucgucaccgaggccgagaccuacaccaacuucgucggcuacgucaccaccaccuucaagcgcaagcacuuccgccccacccccgacgccugccgcuccgccuacaacuggaagauggccggcgacccccgcuacgaggagucccuccacaaccccuaccccgacuaccacuggcuccgcaccgucaagaccaccaaggagucccucgucaucaucucccccuccgucgccgaccucgaccccuacgacaagucccuccacucccgcgucuuccccaacggcaagugcuccggcaucaccgucuccuccaccuacugcuccaccaaccacgacuacaccaucuggcuccccgagaacccccgccucggcaccuccugcgacaucuucaccaacucccgcggcaagcgcgccuccaagggcggcaagaccugcggcuucgucgacgagcgcggccucuacaagucccucaagggcgccugcaagcucaagcucugcggcguccucggccuccgccucauggacggcaccugggucgccaugcagaccuccgacgaggccaaguggugcccccccgaccagcucgucaaccuccacgacuuccgcuccgacgagaucgagcaccucgucgucgaggagcucgucaagaagcgcgaggagugccucgacgcccucgaguccaucaugaccaccaaguccgucuccuuccgccgccucucccaccuccgcaagcucguccccggcuucggcaaggccuacaccaucuucaacaagacccucauggaggccgacgcccacuacaaguccauccgcaccuggaacgagaucauccccuccaagggcugccuccgcgucggcggccgcugccacccccacgucaacggcgucuucuucaacggcaucauccucggccccgacggccacguccucauccccgagaugcaguccucccuccuccagcagcacauggagcuccucgaguccuccgucaucccccucaugcacccccucgccgaccccuccaccgucuucaaggacggcgacgaggccgaggacuucgucgagguccaccuccccgacguccacaagcaggucuccggcgucgaccucggccuccccaacuggggcaaguacguccucauguccgccggcguccucaucgcccucaugcucaccaucuuccucaugaccugcugccgccgcgucaaccgccccgacuccacccagcgcucccucggcaugaccggccgcaaggucuccgucaccucccaguccggcaaggucaucuccuccugggaguccuacaaguccggcggcgagacccgccucuga

SEQ ID NO: 126601 - RNA, 1575 nt, Artificial Sequence
  derived and/or modified CDS sequence (opt2) from glycoprotein__RABV__AB518492.1
auggucccccaggcccuccucuucgucccccuccucgccgucuccuucugcuucggcaaguuccccaucuacaccauccccgacaagcucggccccuggucccccaucgacauccaccaccucuccugccccaacaaccucgucgucgaggacgagggcugcaccaaccucuccggcuucuccuacauggagcucaaggucggcuacaucuccgccaucaaggucaacggcuucaccugcaccggcgucgucaccgaggccgagaccuacaccaacuucgucggcuacgucaccaccaccuucaagcgcaagcacuuccgccccacccccgacgccugccgcuccgccuacaacuggaagauggccggcgacccccgcuacgaggagucccuccacaaccccuaccccgacuaccacuggcuccgcaccgucaagaccaccaaggagucccucgucaucaucucccccuccgucgccgaccucgaccccuacgacaagucccuccacucccgcgucuuccccuccggcaagugcuccggcaucaccgucuccuccaccuacugcuccaccaaccacgacuacaccaucuggcuccccgagaacccccgccucggcaccuccugcgacaucuucaccaacucccgcggcaagcgcgccuccaagggcuccaagaccugcggcuucgucgacgagcgcggccucuacaagucccucaagggcgccugcaagcucaagcucugcggcguccucggccuccgccucauggacggcaccugggucgccaugcagaccuccgacgagaccaaguggugcccccccgaccagcucgucaaccuccacgacuuccgcuccgacgagaucgagcaccucgucgucgaggagcucgucaagaagcgcgaggagugccucgacgcccucgaguccaucaugaccaccaaguccgucuccuuccgccgccucucccaccuccgcaagcucguccccggcuucggcaaggccuacaccaucuucaacaagacccucauggaggccgacgcccacuacaaguccguccgcaccuggaacgagaucauccccuccaagggcugccuccgcgucggcggccgcugccacccccacgucaacggcgucuucuucaacggcaucauccucggccccgacggccacguccucauccccgagaugcaguccucccuccuccagcagcacauggagcuccucgaguccuccgucaucccccucaugcacccccucgccgaccccuccaccgucuucaaggacggcgacgaggccgaggacuucgucgagguccaccuccccgacguccacaagcaggucuccggcgucgaccucggccuccccaacuggggcaaguacguccucauguccgccggcguccucaccgcccucaugcucaucaucuuccucaugaccugcugccgccgcgucaaccgccccgacuccacccagcgcucccucggccgcaccggccgcaaggucuccgucaccucccaguccggcaaggucaucuccuccugggaguccuacaaguccggcggcgagacccgccucuga

SEQ ID NO: 126602 - RNA, 1575 nt, Artificial Sequence
  derived and/or modified CDS sequence (opt2) from glycoprotein__RABV__AB518493.1
auggucccccaggcccuccucuucgucccccuccucgucuucucccucugcuccggcaaguucccccucuacaccauccccgacaagcucggccccuggucccccaucgacauccaccaccucuccugccccaacaaccucgucgucgaggacgagggcugcaccaaccucuccggcuucuccuacauggagcucaaggucggcuacaucuccgccaucaaggucaacggcuucaccugcaccggcgucgucaccgaggccgagaccuacaccaacuucgucggcuacgucaccaccaccuucaagcgcaagcacuuccgccccacccccgacgccugccgcgccgccuacaacuggaagauggccggcgacccccgcuacgaggagucccuccacaaccccuaccccgacuaccacuggcuccgcaccgucaagaccaccaaggagucccucgucgucaucucccccuccgucgccgaccucgaccccuacgacaagucccuccacucccgcgucuuccccuccggcaagugcuccggcaucaccgucuccuccaccuacugcuccaccaaccacgacuacaccaucuggaugcccgagaacccccgccucggcaccuccugcgacaucuucaccaacucccgcggcaagcgcgccuccaagggcuccaagaccugcggcuucgucgacgagcgcggccucuacaagucccucaagggcgccugcaagcucaagcucugcggcguccucggccuccgccucauggacggcaccugggucgccaugcagaucuccgacgagaccaaguggugcccccccgaccagcucgucaaccuccacgacuuccgcuccgacgagaucgagcaccucgucgucgaggagcucgucaagaagcgcgaggagugccucgacgcccucgaguccaucaugaccaccaaguccgucuccuuccgccgccucucccaccuccgcaagcucguccccggcuucggcaaggccuacaccaucuucaacaagacccucauggaggccgacgcccacuacaaguccauccgcaccuggaacgagaucauccccuccaagggcugccuccgcgucggcggccgcugccacccccacgucuccggcgucuucuucaacggcaucauccucggccccgacggccacguccucauccccgagaugcaguccucccuccuccagcagcacauggagcuccucgaguccuccgucaucccccucaugcacccccucgccgaccccuccaccgucuucaaggacggcgacgaggccgaggacuucgucgagguccaccuccccgacguccacaagcaggucuccggcgucgaccucggccuccccaacuggggcaaguacguccucauguccgccggcgcccucaucgcccucaugcucaucaucuuccucaugaccugcugccgccgcgucaaccgccucgacuccacccagcaccgccucggcggcaccggccgcaaggucuccgucaccccccagggcggcaaggucaucuccuccugggaguccuacaaguccggcggcgagacccgccucuga

SEQ ID NO: 126603 - RNA, 1575 nt, Artificial Sequence
  derived and/or modified CDS sequence (opt2) from glycoprotein__RABV__AB518494.1
auggucccccaggcccuccucuucgucccccuccucgucuucucccucugcuucggcaaguucccccucuacaccauccccgacaagcucggccccuggucccccaucgacauccaccaccucuccugccccaacaaccucgucgucgaggacgagggcugcaccaaccucuccggcuucuccuacauggagcucaaggucggcuacaucuccgccaucaaggucaacggcuucaccugcaccggcgucgucaccgaggccgagaccuacaccaacuucgucggcuacgucaccaccaccuucaagcgcaagcacuuccgccccacccccgacgccugccgcgccgccuacaacuggaagauggccggcgacccccgcuacgaggagucccuccacaaccccuaccccgacuaccacuggcuccgcaccgucaagaccaccaaggagucccucgucgucaucucccccuccgucgccgaccucgaccccuacgacaagucccuccacucccgcgucuuccccuccggcaagugcuccggcaucaccgucuccuccaccuacugcuccaccaaccacgacuacaccaucuggaugcccgagaacccccgccucggcaccuccugcgacaucuucaccaacucccgcggcaagcgcgccuccaagggcuccaagaccugcggcuucgucgacgagcgcggccucuacaagucccucaagggcgccugcaagcucaagcucugcggcguccucggccuccgccucauggacggcaccugggucgccaugcagaucuccgacgagaccaaguggugcccccccgaccagcucgucaaccuccacgacuuccgcuccgacgagaucgagcaccucgucgucgaggagcucgucaagaagcgcgaggagugccucgacgcccucgaguccaucaugaccaccaaguccgucuccuuccgccgccucucccaccuccgcaagcucguccccggcuucggcaaggccuacaccaucuucaacaagacccucauggaggccgacgcccacuacaaguccauccgcaccuggaacgagaucauccccuccaagggcugccuccgcgucggcggccgcugccacccccacgucuccggcgucuucuucaacggcaucauccucggccccgacggccacguccucauccccgagaugcaguccucccuccuccagcagcacauggagcuccucgaguccuccgucaucccccucaugcacccccucgccgaccccuccaccgucuucaaggacggcgacgaggccgaggacuucgucgagguccaccuccccgacguccacaagcaggucuccggcgucgaccucggccuccccaacuggggcaaguacguccucauguccgccggcgcccucaucgcccucauggucaucaucuuccucaugaccugcugccgccgcgucaaccgccucgacuccacccagcaccgccucggcggcaccggccgcaaggucuccgucaccccccagggcggcaaggucaucuccuccugggaguccuacaaguccggcggcgagacccgccucuga

SEQ ID NO: 126604 - RNA, 1575 nt, Artificial Sequence; identical to SEQ ID NO: 126602
  derived and/or modified CDS sequence (opt2) from glycoprotein__RABV__AB518495.1

SEQ ID NO: 126605 - RNA, 1575 nt, Artificial Sequence
  derived and/or modified CDS sequence (opt2) from glycoprotein__RABV__AB519641.1
augauccuccaggcccuccucuucgucccccuccucaucuccucccucugccucggcaaguuccccaucuacaccauccccgacaagcucggccccuggucccccaucgacauccaccaccucuccugccccaacaaccucgucgucgaggacgagggcugcaccaaccucuccggcuucuccuacauggagcucaaggucggcuacaucuccgccaucaaggucaacggcuucaccugcaccggcgucgucaccgaggccgagaccuacaccaacuucgucggcuacgucaccaccaccuucaagcgcaagcacuuccgccccguccccgacgccugccgcgccgccuacaacuggaagauggccggcgacccccgcuacgaggagucccuccagaaccccuaccccgacuaccacuggcuccgcaccgucaagaccaccaaggagucccucaucaucaucucccccuccgucgccgaccucgaccccuacgacaagucccuccacucccgcgucuuccccggcggcaagugccucggcaucaccgucuccuccaccuacugcuccaccaaccacgacuacaccaucuggaugcccgaggagccccgccucggcaccuccugcgacaucuucaccuccuccaagggcaagaaggccuccaagggcggcaagaccugcggcuucgucgacgagcgcggccucuacaagucccucaagggcgccugcaagcucaagcucugcggcguccucggccuccgccucauggacggcaccugggucuccauccagaccuccgacgacaccaaguggugcccccccgaccagcucgucaaccuccacgacuuccacuccgacgagaucgagcaccucgucgucgaggagcucgucaagaagcgcgaggagugccucgacgcccucgaguccaucaugaccaccaaguccaucuccuuccgccgccucuccuaccuccgcaagcucguccccggcuucggcaaggccuacaccaucuucaacaagacccucauggaggccgacgcccacuacaaguccguccgcaccuggaacgagaucauccccuccaagggcugccucaagguccgcgagcgcugccacccccccgucgacggcgucuucuucaacggcaucauccucggccccgacggcaacguccucauccccgagaugcaguccucccuccuccagcagcacauggagcuccucgaguccuccgucaucccccucaugcacccccucgccgaccccuccaccgucuucaaggagggcgacgaggccgaggacuucgucgagguccaccuccccgacguccacaagcagaucuccggcgucgaccucggccuccccuccuggggcaaguaccuccucaugaucgccggcggccucgccgcccucguccucaucaucugcuccauggccugcugccgccgcaccaagcgcaccgagucccgccgccgcggcuccggcgaguccgagaagaaggucaccgccaccccccagacccgcaaggucaucuccuccugggagcucuacaaguccgagggcgacgcccgccucuga

SEQ ID NO: 126606 - RNA, 1575 nt, Artificial Sequence
  derived and/or modified CDS sequence (opt2) from glycoprotein__RABV__AB519642.1
augauccuccaggcccuccucuucgucccccuccucaucuccucccucugccucggcaaguuccccaucuacaccauccccgacaagcucggccccuggucccccaucgacauccaccaccucuccugccccaacaaccucgucgucgaggacgagggcugcaccaaccucuccggcuucuccuacauggagcucaaggucggcuacaucuccgccaucaaggucaacggcuucaccugcaccggcgucgucaccgaggccgagaccuacaccaacuucgucggcuacgucaccaccaccuucaagcgcaagcacuuccgccccauccccgacgccugccgcgccgccuacaacuggaagauggccggcgacccccgcuacgaggagucccuccagaaccccuaccccgacuaccacuggcuccgcaccgucaagaccaccaaggagucccucaucaucaucucccccuccgucgccgaccucgaccccuacgacaagucccuccacucccgcgucuuccccggcggcaagugccucggcaucaccgucuccuccaccuacugcuccaccaaccacgacuacaccaucuggaugcccgaggagccccgccucggcaccuccugcgacaucuucaccuccuccaagggcaagaaggccuccaagggcggcaagaccugcggcuucgucgacgagcgcggccucuacaagucccucaagggcgccugcaagcucaagcucugcggcguccucggccuccgccucauggacggcaccugggucuccauccagaccuccgacgacaccaaguggugcccccccgaccagcucgucaaccuccacgacuuccacuccgacgagaucgagcaccucgucgucgaggagcucgucaagaagcgcgaggagugccucgacgcccucgaguccaucaugaccaccaaguccgucuccuuccgccgccucuccuaccuccgcaagcucguccccggcuucggcaaggccuacaccaucuucaacaagacccucauggaggccgacgcccacuacaaguccguccgcaccuggaacgagaucauccccuccaagggcugccucaagguccgcgagcgcugccacccccccgucgacggcgucuucuucaacggcaucauccucggccccgacggcaacguccucauccccgagaugcaguccucccuccuccagcagcacauggagcuccucgaguccuccgucaucccccucaugcacccccucgccgaccccuccaccgucuucaaggagggcgacgaggccgaggacuucgucgagguccaccuccccgacguccacaagcagaucuccggcgucgaccucggccuccccuccuggggcaaguaccuccucaugaucgccggcggccucgccacccucguccucaucaucugcuccauggccugcugccgccgcaccaagcgcaccgagucccgccgccgcgacucccaggaguccgagaagaaggucaccgucaccccccagacccgcaaggucgucuccuccugggagcucuacaaguccgagggcgacgccucccucuga

SEQ ID NO: 126607 - RNA, 1575 nt, Artificial Sequence
  derived and/or modified CDS sequence (opt2) from glycoprotein__RABV__AB563791.1
augaucccccaggcccuccucuucgucccccuccucgucuucucccucugcuucggcaaguuccccaucuacaccauccccgacaagcucggccccuggucccccaucgacauccaccaccucuccugccccaacaaccucgucgucgaggacgagggcugcaccaaccucuccggcuucuccuacauggagcucaaggucggcuacaucuccgccaucaaggucaacggcuucaccugcaccggcgucgucaccgaggccgagaccuacaccaacuucgucggcuacgucaccaccaccuucaagcgcaagcacuuccgccccacccccgacgccugccgcgccgccuacaacuggaagauggccggcgacccccgcuacgaggagucccuccacaaccccuaccccgacuaccacuggcuccgcaccgucaagaccaccaaggagucccucgucaucaucucccccuccgucgccgaccucgaccccuacgacaagucccuccacucccgcgucuuccccuccggcaagugcuccggcaucaccgucuccuccaccuacugcuccaccaaccacgacuacaccaucuggaugcccgagaacccccgccucggcaccuccugcgacaucuucaccaacucccgcggcaagcgcgccuccaagggcuccaagaccugcggcuucgucgacgagcgcggccucuacaagucccucaagggcgccugcaagcucaagcucugcggcguccucggccuccgccucauggacggcaccugggccgccauccagaccuccgacgagaccaaguggugcccccccgaccagcucgucaaccuccacgacuuccgcuccgacgagaucgagcaccucgucgucgaggagcucgucaagaagcgcgaggagugccucgacgcccucgaguccaucaugaccaccaaguccgucuccuuccgccgccucucccaccuccgcaagcucguccccggcuucggcaaggccuacaccaucuucaacaagacccucauggaggccgacgcccacuacaaguccguccgcaccuggaacgagaucauccccuccaagggcugccuccgcgucggcggccgcugccacccccacgucaacggcgucuucuucaacggcaucauccucggccccgacggccacguccucauccccgagaugcaguccucccuccuccagcagcacauggagcuccucgaguccuccgucaucccccucaugcacccccucgccgaccccuccaccgucuucaaggacgacgacgaggccgaggacuucgucgagguccaccuccccgacguccacaagcaggucuccggcgucgaccucggccuccccuccuggggcaaguacguccucauguccgccggcguccucaccgcccucaugcucaugaucuuccucaugaccugcugccgccgcgccaaccgcgucgaguccgcccagcacucccucggcgagcgcggccgcaaggucuccgucaccucccaguccggccgcgucaucuccuccugggaguccuacaaguccggcggcgagaccaagcucuga

SEQ ID NO: 126608 - RNA, 1575 nt, Artificial Sequence
  derived and/or modified CDS sequence (opt2) from glycoprotein__RABV__AB563794.1
augaucccccaggcccuccucuucgucccccuccucgucuucucccucugcuucggcaaguuccccaucuacaccauccccgacaagcucggccccuggucccccaucgacauccaccaccucuccugccccaacaaccucgucgucgaggacgagggcugcaccaaccucuccggcuucuccuacauggagcucaaggucggcuacaucuccgccaucaaggucaacggcuucaccugcaccggcgucgucaccgaggccgagaccuacaccaacuucgucggcuacgucaccaccaccuucaagcgcaagcacuuccgccccacccccgacgccugccgcgccgccuacaacuggaagauggccggcgacccccgcuacgaggagucccuccacaaccccuaccccgacuaccacuggcuccgcaccgucaagaccaccaaggagucccucgucaucaucucccccuccgucgccgaccucgaccccuacgacaagucccuccacucccgcgucuuccccuccggcaagugcuccggcaucaccgucuccuccaccuacugcuccaccaaccacgacuacaccaucuggaugcccgagaacccccgccucggcaccuccugcgacaucuucaccaacucccgcggcaagcgcgccuccaagggcuccaagaccugcggcuucgucgacgagcgcggccucuacaagucccucaagggcgccugcaagcucaagcucugcggcguccucggccuccgccucauggacggcaccugggccgccauccagaccuccgacgagaccaaguggugcccccccgaccagcucgucaaccuccacgacuuccgcuccgacgagaucgagcaccucgucgucgaggagcucgucaagaagcgcgaggagugccucgacgcccucgaguccaucaugaccaccaaguccgucuccuuccgccgccucucccaccuccgcaagcucguccccggcuucggcaaggccuacaccaucuucaacaagacccucauggaggccgacgcccacuacaaguccguccgcaccuggaacgagaucauccccuccaagggcugccuccgcgucggcggccgcugccacccccacgucaacggcgucuucuucaacggcaucauccucggccccgacggccacguccucauccccgagaugcaguccucccuccuccagcagcacauggagcuccucgaguccuccgucaucccccucaugcacccccucgccgaccccuccaccgucuucaaggacgacgacgaggccgaggacuucgucgagguccaccuccccgacguccacaagcaggucuccggcgucgaccucggccuccccuccuggggcaaguacguccucauguccgccggcguccucaccgcccucaugcucaugaucuuccucaugaccugcugccgccgcgccaaccgcgccgaguccgcccagcacucccucggcgagcgcggccgcaaggucuccgucaccucccaguccggccgcgucaucuccuccugggaguccuacaaguccggcggcgagaccaagcucuga

SEQ ID NO: 126609 - RNA, 1575 nt, Artificial Sequence
  derived and/or modified CDS sequence (opt2) from glycoprotein__RABV__AB563797.1
augaucccccaggcccuccucuucgucccccuccucgucuucucccucugcuucggcaaguuccccaucuacaccauccccgacaagcucggccccuggucccccaucgacauccaccaccucuccugccccaacaaccucgucgucgaggacgagggcugcaccaaccucuccggcuucuccuacauggagcucaaggucggcuacaucuccgccaucaaggucaacggcuucaccugcaccggcgucgucaccgaggccgagaccuacaccaacuucgucggcuacgucaccaccaccuucaagcgcaagcacuuccgccccacccccgacgccugccgcgccgccuacaacuggaagauggccggcgacccccgcuacgaggagucccuccacaaccccuaccccgacuaccacuggcuccgcaccgucaagaccaccaaggagucccucgucaucaucucccccuccgucgccgaccucgaccccuacgacaagucccuccacucccgcgucuuccccuccggcaagugcuccggcaucaccgucuccuccaccuacugcuccaccaaccacgacuacaccaucuggaugcccgagaacccccgccucggcaccuccugcgacaucuucaccaacucccgcggcaagcgcgccuccaagggcuccaagaccugcggcuucgucgacgagcgcggccucuacaagucccucaagggcgccugcaagcucaagcucugcggcguccucggccuccgccucauggacggcaccugggccgccauccagaccuccgacgagaccaaguggugcccccccgaccagcucgucaaccuccacgacuuccgcuccgacgagaucgagcaccucgucgucgaggagcucgucaagaagcgcgaggagugccucgacgcccucgaguccaucaugaccaccaaguccgucuccuuccgccgccucucccaccuccgcaagcucguccccggcuucggcaaggccuacaccaucuucaacaagacccucauggaggccgacgcccacuacaaguccauccgcaccuggaacgagaucauccccuccaagggcugccuccgcgucggcggccgcugccacccccacgucaacggcgucuucuucaacggcaucauccucggccccgacggccacguccucauccccgagaugcaguccucccuccuccagcagcacauggagcuccucgaguccuccgucaucccccucaugcacccccucgccgaccccuccaccgucuucaaggacgacgacgagaccgaggacuucgucgagguccaccuccccgacguccacaagcaggucuccggcgucgaccucggccuccccuccuggggcaaguacguccucauguccgccggcguccucaccgcccucaugcucaugaucuuccucaugaccugcugccgccgcgccaaccgcgucgaguccgcccagcacucccucggcgagcgcggccgcaaggucuccgucaccucccaguccggccgcgucaucuccuccugggaguccuacaaguccggcggcgagaccaagcucuga

SEQ ID NO: 126610 - RNA, 1575 nt, Artificial Sequence
  derived and/or modified CDS sequence (opt2) from glycoprotein__RABV__AB563798.1
augaucccccaggcccuccucuucgucccccuccucgucuucucccucugcuucggcaaguuccccaucuacaccauccccgacaagcucggccccuggucccccaucgacauccaccaccucuccugccccaacaaccucgucgucgaggacgagggcugcaccaaccucuccggcuucuccuacauggagcucaaggucggcuacaucuccgccaucaaggucaacggcuucaccugcaccggcgucgucaccgaggccgagaccuacaccaacuucgucggcuacgucaccaccaccuucaagcgcaagcacuuccgccccacccccgacgccugccgcgccgccuacaacuggaagauggccggcgacccccgcuacgaggagucccuccacaaccccuaccccgacuaccacuggcuccgcaccgucaagaccaccaaggagucccucgucaucaucucccccuccgucgccgaccucgaccccuacgacaagucccuccacucccgcgucuuccccuccggcaagugcuccggcaucaccgucuccuccaccuacugcuccaccaaccacgacuacaccaucuggaugcccgagaacccccgccucggcaccuccugcgacaucuucaccaacucccgcggcaagcgcgccuccaagggcuccaagaccugcggcuucgucgacgagcgcggccucuacaagucccucaagggcgccugcaagcucaagcucugcggcguccucggccuccgccucauggacggcaccugggccgccauccagaccuccgacgagaccaaguggugcccccccgaccagcucgucaaccuccacgacuuccgcuccgacgagaucgagcaccucgucgucgaggagcucgucaagaagcgcgaggagugccucgacgcccucgaguccaucaugaccaccaaguccgucuccuuccgccgccucucccaccuccgcaagcucguccccggcuucggcaaggccuacaccaucuucaacaagacccucauggaggccgacgcccacuacaaguccguccgcaccuggaacgagaucauccccuccaagggcugccuccgcgucggcggccgcugccacccccacgucaacggcgucuucuucaacggcaucauccucggccccgacggccacguccucauccccgagaugcaguccucccuccuccagcagcacauggagcuccucgaguccuccgucaucccccucaugcacccccucgccgaccccuccaccgucuucaaggacgacgacgaggccgaggacuucgucgagguccaccuccccgacguccacaagcaggucuccggcgucgaccucggccuccccuccuggggcaaguacguccucauguccgccggcguccucaccgcccucaugcucaugaucuuccucaugaccugcugccgccgcgccaaccgcgccgaguccgcccagcacucccucggcgagggcggccgcaaggucuccgucaccucccaguccggccgcgucaucuccuccugggaguccuacaaguccggcggcgagaccaagcucuga

SEQ ID NO: 126611 - RNA, 1575 nt, Artificial Sequence
  derived and/or modified CDS sequence (opt2) from glycoprotein__RABV__AB563800.1
augaucccccaggcccuccucuucgucccccuccucgucuucucccucugcuucggcaaguuccccaucuacaccauccccgacaagcucggccccuggucccccaucgacauccaccaccucuccugccccaacaaccucgucgucgaggacgagggcugcaccaaccucuccggcuucuccuacauggagcucaaggucggcuacaucuccgccaucaaggucaacggcuucaccugcaccggcgucgucaccgaggccgagaccuacaccaacuucgucggcuacgucaccaccaccuucaagcgcaagcacuuccgccccacccccgacgccugccgcgccgccuacaacuggaagauggccggcgacccccgcuacgaggagucccuccacaaccccuaccccgacuaccacuggcuccgcaccgucaagaccaccaaggagucccucgucaucaucucccccuccgucgccgaccucgaccccuacgacaagucccuccacucccgcgucuuccccuccggcaagugcuccggcaucaccgucuccuccaccuacugcuccaccaaccacgacuacaccaucuggaugcccgagaacccccgccucggcaccuccugcgacaucuucaccaacucccgcggcaagcgcgccuccaagggcuccaagaccugcggcuucgucgacgagcgcggccucuacaagucccucaagggcgccugcaagcucaagcucugcggcguccucggccuccgccucauggacggcaccugggccgccauccagaccuccgacgagaccaaguggugcccccccgaccagcucgucaaccuccacgacuuccgcuccgacgagaucgagcaccucgucgucgaggagcucgucaagaagcgcgaggagugccucgacgcccucgaguccaucaugaccaccaaguccgucuccuuccgccgccucucccaccuccgcaagcucguccccggcuucggcaaggccuacaccaucuucaacaagacccucauggaggccgacgcccacuacaaguccguccgcaccuggaacgagaucauccccuccaagggcugccuccgcgucggcggccgcugccacccccacgucaacggcgucuucuucaacggcaucauccucggccccgacggccacguccucauccccgagaugcaguccucccuccuccagcagcacauggagcuccucgaguccuccgucaucccccucaugcacccccucgccgaccccuccaccgucuucaaggacgacgacgaggccgaggacuucgucgagguccaccuccccgacguccacaagcaggucuccggcgucgaccucggccuccccuccuggggcaaguacguccucauguccgccggcguccucaccgcccucaugcucaugaucuuccucaugaccugcugccgccgcgccaaccgcgccgaguccgcccagcacucccucggcgagcgcggccgcaaggucuccgucaccucccaguccggccgcgucaucuccuccugggaguccuacaagaacggcggcgagaccaagcucuga

SEQ ID NO: 126612 - RNA, 1575 nt, Artificial Sequence
  derived and/or modified CDS sequence (opt2) from glycoprotein__RABV__AB563803.1
augaucccccaggcccuccucuucgucccccuccucgucuucucccucugcuucggcaaguuccccaucuacaccauccccgacaagcucggccccuggucccccaucgacauccaccaccucuccugccccaacaaccucgucgucgaggacgagggcugcaccaaccucuccggcuucuccuacauggagcucaaggucggcuacaucuccgccaucaaggucaacggcuucaccugcaccggcgucgucaccgaggccgagaccuacaccaacuucgucggcuacgucaccaccaccuucaagcgcaagcacuuccgccccacccccgacgccugccgcgccgccuacaacuggaagauggccggcgacccccgcuacgaggagucccuccacaaccccuaccccgacuaccacuggcuccgcaccgucaagaccaccaaggagucccucgucaucaucucccccuccgucgccgaccucgaccccuacgacaagucccuccacucccgcgucuuccccuccggcaagugcuccggcaucaccgucuccuccaccuacugcuccaccaaccacgacuacaccaucuggaugcccgagaacccccgccucggcaccuccugcgacaucuucaccaacucccgcggcaagcgcgccuccaagggcuccaagaccugcggcuucgucgacgagcgcggccucuacaagucccucaagggcgccugcaagcucaagcucugcggcguccucggccuccgccucauggacggcaccugggccgccauccagaccuccgacgagaccaaguggugcccccccgaccagcucgucaaccuccacgacuuccgcuccgacgagaucgagcaccucgucgucgaggagcucgucaagaagcgcgaggagugccucgacgcccucgaguccaucaugaccaccaaguccgucuccuuccgccgccucucccaccuccgcaagcucguccccggcuucggcaaggccuacaccaucuucaacaagacccucauggaggccgacgcccacuacaaguccguccgcaccuggaacgagaucauccccuccaagggcugccuccgcgucggcggccgcugccacccccacgucaacggcgucuucuucaacggcaucauccucggccccgacggccacguccucauccccgagaugcaguccucccuccuccagcagcacauggagcuccucgaguccuccgucaucccccucaugcacccccucgccgaccccuccaccgucuucaaggacgacgacgaggccgaggacuucgucgagguccaccuccccgacguccacaagcaggucuccggcgucgaccucggccuccccuccuggggcaaguacguccucauguccgccggcguccucaccgcccucaugcucaugaucuuccucaugaccugcugccgccgcgccaaccgcgccgaguccggccagcacucccucggcgagcgcggccgcaaggucuccgucaccucccaguccggccgcgucaucuccuccugggaguccuacaaguccggcggcgagaccaagcucuga

SEQ ID NO: 126613 - RNA, 1575 nt, Artificial Sequence; identical to SEQ ID NO: 126608
  derived and/or modified CDS sequence (opt2) from glycoprotein__RABV__AB563806.1

SEQ ID NO: 126614 - RNA, 1575 nt, Artificial Sequence
  derived and/or modified CDS sequence (opt2) from glycoprotein__RABV__AB563807.1
augaucccccaggcccucauguucgccccccuccucgucuucucccucugcuucggcaaguuccccaucuacaccauccccgacaagcucggccccuggucccccaucgacauccaccaccucuccugccccaacaaccucgucgucgaggacgagggcugcaccaaccucuccggcuucuccuacauggagcucaaggucggcuacaucuccgccaucaaggucaacggcuucaccugcaccggcgucgucaccgaggccgagaccuacaccaacuucgucggcuacgucaccaccaccuucaagcgcaagcacuuccgccccacccccgacgccugccgcgccgccuacaacuggaagauggccggcgacccccgcuacgaggagucccuccacaaccccuaccccgacuaccacuggcuccgcaccgucaagaccaccaaggagucccucgucaucaucucccccuccgucgccgaccucgaccccuacgacaagucccuccacucccgcgucuuccccuccggcaagugcuccggcaucaccgucuccuccaccuacugcuccaccaaccacgacuacaccaucuggaugcccgagaacccccgccucggcaccuccugcgacaucuucaccaacucccgcggcaagcgcgccuccaagggcuccaagaccugcggcuucgucgacgagcgcggccucuacaagucccucaagggcgccugcaagcucaagcucugcggcguccucggccuccgccucauggacggcaccugggccgccauccagaccuccgacgagaccaaguggugcccccccgaccagcucgucaaccuccacgacuuccgcuccgacgagaucgagcaccucgucgucgaggagcucgucaagaagcgcgaggagugccucgacgcccucgaguccaucaugaccaccaaguccgucuccuuccgccgccucucccaccuccgcaagcucguccccggcuucggcaaggccuacaccaucuucaacaagacccucauggaggccgacgcccacuacaaguccguccgcaccuggaacgagaucauccccuccaagggcugccuccgcgucggcggccgcugccacccccacgucaacggcgucuucuucaacggcaucauccucggccccgacggccacguccucauccccgagaugcaguccucccuccuccagcagcacauggagcuccucgaguccuccgucaucccccucaugcacccccucgccgaccccuccaccgucuucaaggacgacggcgaggccgaggacuucgucgagguccaccuccccgacguccacaagcaggucuccggcgucgaccucggccuccccuccuggggcaaguacguccucauguccgccggcguccucaccgcccucaugcucaugaucuuccucaugaccugcugccgccgcgccaaccgcgccgaguccgcccagcacucccucggcgagcgcggccgcaaggucuccgucaccucccaguccggccgcgucaucuccuccugggaguccuacaaguccggcggcgagacccgccucuga

SEQ ID NO: 126615 - RNA, 1575 nt, Artificial Sequence
  derived and/or modified CDS sequence (opt2) from glycoprotein__RABV__AB563809.1
augaucccccaggcccuccucuucgucccccuccucgucuucucccucugcuucggcaaguuccccaucuacaccauccccgacaagcucggccccuggucccccaucgacauccaccaccucuccugccccaacaaccucgucgucgaggacgagggcugcaccaaccucuccggcuucuccuaccucgagcucaaggucggcuacaucuccgccaucaaggucaacggcuucaccugcaccggcgucgucaccgaggccgagaccuacaccaacuucgucggcuacgucaccaccaccuucaagcgcaagcacuuccgccccacccccgacgccugccgcgccgccuacaacuggaagauggccggcgacccccgcuacgaggagucccuccacaaccccuaccccgacuaccacuggcuccgcaccgucaagaccaccaaggagucccucgucaucaucucccccuccgucgccgaccucgaccccuacgacaagucccuccacucccgcgucuuccccuccggcaagugcuccggcaucaccgucuccuccaccuacugcuccaccaaccacgacuacaccaucuggaugcccgagaacccccgccucggcaccuccugcgacaucuucaccaacucccgcggcaagcgcgccuccaagggcuccaagaccugcggcuucgucgacgagcgcggccucuacaagucccucaagggcgccugcaagcucaagcucugcggcguccucggccuccgccucauggacggcaccugggccgccauccagaccuccgacgagaccaaguggugcccccccgaccagcucgucaaccuccacgacuuccgcuccgacgagaucgagcaccucgucgucgaggagcucgucaagaagcgcgaggagugccucgacgcccucgaguccaucaugaccaccaaguccgucuccuuccgccgccucucccaccuccgcaagcucguccccggcuucggcaaggccuacaccaucuucaacaagacccucauggaggccgacgcccacuacaaguccguccgcaccuggaacgagaucauccccuccaagggcugccuccgcgucggcggccgcugccacccccacgucaacggcgucuucuucaacggcaucauccucggccccgacggccacguccucauccccgagaugcaguccucccuccuccagcagcacauggagcuccucgaguccuccgucaucccccucaugcacccccucgccgaccccuccaccgucuucaaggacgacgacgaggccgaggacuucgucgagguccaccuccccgacguccacaagcaggucuccggcgucgaccucggccuccccuccuggggcaaguacguccucauguccgccggcguccucaccgcccucaugcucaugaucuuccucaugaccugcugccgccgcgccaaccgcgccgaguccgcccagcacucccucggcgagggcggccgcaaggucuccgucaccucccaguccggccgcgucaucuccuccugggaguccuacaaguccggcggcgagaccaagcucuga

SEQ ID NO: 126616 - RNA, 1575 nt, Artificial Sequence
  derived and/or modified CDS sequence (opt2) from glycoprotein__RABV__AB563812.1
augaucccccaggcccuccucuucgucccccuccucgucuucucccucugcuucggcaaguuccccaucuacaccauccccgacaagcucggccccuggucccccaucgacauccaccaccucuccugccccaacaaccucgucgucgaggacgagggcugcaccaaccucuccggcuucuccuacauggagcucaaggucggcuacaucuccgccaucaaggucaacggcuucaccugcaccggcgucgucaccgaggccgagaccuacaccaacuucgucggcuacgucaccaccaccuucaagcgcaagcacguccgccccacccccgacgccugccgcgccgccuacaacuggaagauggccggcgacccccgcuacgaggagucccuccacaaccccuaccccgacuaccacuggguccgcaccgucaagaccaccaaggagucccucgucaucaucucccccuccgucgccgaccucgaccccuacgacaagucccuccacucccgcgucuuccccuccggcaagugcuccggcaucaccgucuccuccaccuacugcuccaccaaccacgacuacaccaucuggaugcccgagaacccccgccucggcaccuccugcgacaucuucaccaacucccgcggcaagcgcgccuccaagggcuccaagaccugcggcuucgucgacgagcgcggccucuacaagucccucaagggcgccugcaagcucaagcucugcggcguccucggccuccgccucauggacggcaccugggccgccauccagaccuccgacgagaccaaguggugcccccccgaccagcucgucaaccuccacgacuuccgcuccgacgagaucgagcaccucgucgucgaggagcucgucaagaagcgcgaggagugccucgacgcccucgaguccaucaugaccaccaaguccgucuccuuccgccgccucucccaccuccgcaagcucguccccggcuucggcaaggccuacaccaucuucaacaagacccucauggaggccgacgcccacuacaaguccguccgcaccuggaacgagaucauccccuccaagggcugccuccgcgucggcggccgcugccacccccacgucaacggcgucuucuucaacggcaucauccucggccccgacggccacguccucauccccgagaugcaguccucccuccuccagcagcacauggagcuccucgaguccuccgucaucccccucaugcacccccucgccgaccccuccaccgucuucaaggacgacgacgaggccgaggacuucgucgagguccaccuccccgacguccacaagcaggucuccggcgucgaccucggccuccccuccuggggcaaguacguccucauguccgccggcguccucaccgcccucaugcucaugaucuuccucaugaccugcugccgccgcaccaaccgcgccgaguccgcccagcacucccuccgcgagcgcggccgcaaggucuccgucaccucccaguccggccgcgucaucuccuccugggaguccuacaaguccggcggcgagaccaagcucuga

SEQ ID NO: 126617 - RNA, 1575 nt, Artificial Sequence
  derived and/or modified CDS sequence (opt2) from glycoprotein__RABV__AB563813.1
augaucccccaggcccuccucuucgucccccuccucgucuucucccucugcuucggcaaguuccccaucuacaccauccccgacaagcucggccccuggucccccaucgacauccaccaccucuccugccccaacaaccucgucgucgaggacgagggcugcaccaaccucuccggcuucuccuacauggagcucaaggucggcuacaucuccgccaucaaggucaacggcuucaccugcaccggcgucgucaccgaggccgagaccuacaccaacuucgucggcuacgucaccaccaccuucaagcgcaagcacuuccgccccacccccgacgccugccgcgccgccuacaacuggaagauggccggcgacccccgcuacgaggagucccuccacaaccccuaccccgacuaccacuggcuccgcaccgucaagaccaccaaggagucccucgucaucaucucccccuccgucgccgaccucgaccccuacgacaagucccuccacucccgcgucuuccccuccggcaagugcuccggcaucaccgucuccuccaccuacugcuccaccaaccacgacuacaccaucuggaugcccgagaacccccgccucggcgccuccugcgacaucuucaccaacucccgcggcaagcgcgccuccaagggcuccaagaccugcggcuucgucgacgagcgcggccucuacaagucccucaagggcgccugcaagcucaagcucugcggcguccucggccuccgccucauggacggcaccugggccgccauccagaccuccgacgagaccaaguggugcccccccgaccagcucgucaaccuccacgacuuccgcuccgacgagaucgagcaccucgucgucgaggagcucgucaagaagcgcgaggagugccucgacgcccucgaguccaucaugaccaccaaguccgucuccuuccgccgccucucccaccuccgcaagcucguccccggcuucggcaaggccuacaccaucuucaacaagacccucauggaggccgacgcccacuacaaguccguccgcaccuggaacgagaucauccccuccaagggcugccuccgcgucggcggccgcugccacccccacgucaacggcgucuucuucaacggcaucauccucggccccgacggccacguccucauccccgagaugcaguccucccuccuccagcagcacauggagcuccucgaguccuccgucaucccccucaugcacccccucgccgaccccuccaccgucuucaaggacgacgacgaggccgaggacuucgucgagguccaccuccccgacguccacaagcaggucuccggcgucgaccucggccuccccuccuggggcaaguacguccucauguccgccggcguccucaccgcccucaugcucaugaucuuccucaugaccugcugccgccgcgccaaccgcgucgaguccgagcagcacucccucggccagcgcggccgcaaggucuccgucaccucccaguccggccgcgucaucuccuccugggaguccuacaaguccggcggcgagaccaagcucuga

SEQ ID NO: 126618 - RNA, 1575 nt, Artificial Sequence; identical to SEQ ID NO: 126607
  derived and/or modified CDS sequence (opt2) from glycoprotein__RABV__AB563816.1

SEQ ID NO: 126619 - RNA, 1575 nt, Artificial Sequence
  derived and/or modified CDS sequence (opt2) from glycoprotein__RABV__AB563817.1
augaucccccaggcccuccucuucgucccccuccucgucuucucccucugcuucggcaaguuccccaucuacaccauccccgacaagcucggccccuggucccccaucgacauccaccaccucuccugccccaacaaccucgucgucgaggacgagggcugcaccaaccucuccggcuucuccuacauggagcucaaggucggcuacaucuccgccaucaaggucaacggcuucaccugcaccggcgucgucaccgaggccgagaccuacaccaacuucgucggcuacgucaccaccaccuucaagcgcaagcacuuccgccccacccccgacgccugccgcgccgccuacaacuggaagauggccggcgacccccgcuacgaggagucccuccacaaccccuaccccgacuaccacuggcuccgcaccgucaagaccaccaaggagucccucgucaucaucucccccuccgucgccgaccucgaccccuacgacaagucccuccacucccgcgucuuccccuccggcaagugcuccggcaucaccgucuccuccaccuacugcuccaccaaccacgacuacaccaucuggaugcccgagaacccccgccucggcaccuccugcgacaucuucaccaacucccgcggcaagcgcgccuccaagggcuccaagaccugcggcuucgucgacgagcgcggccucuacaagucccucaagggcgccugcaagcucaagcucugcggcguccucggccuccgccucauggacggcaccugggccgccauccagaccuccgacgagaccaaguggugcccccccgaccagcucgucaaccuccacgacuuccgcuccgacgagaucgagcaccucgucgucgaggagcucgucaagaagcgcgaggagugccucgacgcccucgaguccaucaugaccaccaaguccgucuccuuccgccgccucucccaccuccgcaagcucguccccggcuucggcaaggccuacaccaucuucaacaagacccucauggaggccgacgcccacuacaaguccguccgcaccuggaacgagaucauccccuccaagggcugccuccgcgucggcggccgcugccacccccacgucaacggcgucuucuucaacggcaucauccucggccccgacggccacguccucauccccgagaugcaguccucccuccuccagcagcacauggagcuccucgaguccuccgucaucccccucaugcacccccucgccgaccccuccaccgucuucaaggacgacgacgaggccgaggacuucgucgagguccaccuccccgacguccacaagcaggucuccggcgucgaccucggccuccccuccuggggcaaguacguccucauguccgccggcgcccucaccgcccucaugcucaugaucuuccucaugaccugcugccgccgcgccaaccgcgccgaguccgcccagcacucccucggcgagcgcggccgcaaggucuccgucaccucccaguccggccgcgucaucuccuccugggaguccuacaaguccggcggcgagaccaagcucuga

SEQ ID NO: 126620 - RNA, 1575 nt, Artificial Sequence; identical to SEQ ID NO: 126607
  derived and/or modified CDS sequence (opt2) from glycoprotein__RABV__AB563819.1

SEQ ID NO: 126621 - RNA, 1575 nt, Artificial Sequence
  derived and/or modified CDS sequence (opt2) from glycoprotein__RABV__AB563820.1
augaucccccaggcccuccucuucgucccccuccucgucuucucccucugcuucggcaaguuccccaucuacaccauccccgacaagcucggccccuggucccccaucgacauccaccaccucuccugccccaacaaccucgucgucgaggacgagggcugcaccaaccucuccggcuucuccuacauggagcucaaggucggcuacaucuccgccaucaaggucaacggcuucaccugcaccggcgucgucaccgaggccgagaccuacaccaacuucgucggcuacgucaccaccaccuucaagcgcaagcacuuccgccccaugcccgacgccugccgcgccgccuacaacuggaagauggccggcgacccccgcuacgaggagucccuccacaaccccuaccccgacuaccacuggcuccgcaccgucaagaccaccaaggagucccucgucaucaucucccccuccgucgccgaccucgaccccuacgacaagucccuccacucccgcgucuuccccuccggcaagugcuccggcaucaccgucuccuccaccuacugcuccaccaaccacgacuacaccaucuggaugcccgagaacccccgccucggcaccuccugcgacaucuucaucaacucccgcggcaagcgcgccuccaagggcuccaagaccugcggcuucgucgacgagcgcggccucuacaagucccucaagggcgccugcaagcucaagcucugcggcguccucggccuccgccucauggacggcaccugggccgccauccagaccuccgacgagaccaaguggugcccccccgaccagcucgucaaccuccacgacuuccgcuccgacgagaucgagcaccucgucgucgaggagcucgucaagaagcgcgaggagugccucgacgcccucgaguccaucaugaccaccaaguccgucuccuuccgccgccucucccaccuccgcaagcucguccccggcuucggcaaggccuacaccaucuucaacaagacccucauggaggccgacgcccacuacaaguccguccgcaccuggaacgagaucauccccuccaagggcugccuccgcgucggcggccgcugccacccccacgucaacggcgucuucuucaacggcaucauccucggccccgacggccacguccucauccccgagaugcaguccucccuccuccagcagcacauggagcuccucgaguccuccgucaucccccucaugcacccccucgccgaccccuccaccgucuucaaggacgacgacgaggccgaggacuucgucgagguccaccuccccgacguccacaagcaggucuccggcgucgaccucggccuccccuccuggggcaaguacguccucauguccgccggcguccucaccgcccucaugcucaugaucuuccucaugaccugcugccgccgcuccaaccgcgccaaguccgagcagcacucccucggcgagcgcggccgcaaggucuccgucaccucccaguccggccgcgucaucuccuccugggaguccuacaagcgcggcggcgagaccaagcucuga

SEQ ID NO: 126622 - RNA, 1575 nt, Artificial Sequence
  derived and/or modified CDS sequence (opt2) from glycoprotein__RABV__AB563821.1
augaucccccaggcccuccucuucgucccccuccucgucuucucccucugcuucggcaaguuccccaucuacaccauccccgacaagcucggccccuggucccccaucgacauccaccaccucuccugccccaacaaccucgucgucgaggacgagggcugcaccaaccucuccggccucuccuacauggagcucaaggucggcuacaucuccgccaucaaggucaacggcuucaccugcaccggcgucgucaccgaggccgagaccuacaccaacuucgucggcuacgucaccaccaccuucaagcgcaagcacuuccgccccacccccgacgccugccgcgccgccuacaacuggaagauggccggcgacccccgcuacgaggagucccuccacaaccccuaccccgacuaccacuggcuccgcaccgucaagaccaccaaggagucccucgucaucaucucccccuccgucgccgaccucgaccccuacgacaagucccuccacucccgcgucuuccccuccggcaagugcuccggcaucaccgucuccuccaccuacugcuucaccaaccacgacuacaccaucuggaugcccgagaacccccgccucggcaccuccugcgacaucuucaccaacucccgcggcaagcgcgccuccaagggcuccaagaccugcggcuucgucgacgagcgcggccucuacaagucccucaagggcgccugcaagcucaagcucugcggcguccucggccuccgccucauggacggcaccugggccgccauccagaccuccgacgagaccaaguggugcccccccgaccagcucgucaaccuccacgacuuccgcuccgacgagaucgagcaccucgucgucgaggagcucgucaagaagcgcgaggagugccucgacgcccucgaguccaucaugaccaccaaguccgucuccuuccgccgccucucccaccuccgcaagcucguccccggcuucggcaaggccuacaccaucuucaacaagacccucauggaggccgacgcccacuacaaguccguccgcaccugggacgagaucauccccuccaagggcugccuccgcgucggcggccgcugccacccccacgucaacggcgucuucuucaacggcaucauccucggccccgacggccacguccucauccccgagaugcaguccucccuccuccagcagcacauggagcuccucgaguccuccgucaucccccucaugcacccccucgccgaccccuccaccgucuucaaggacgacgacgaggccgaggacuucgucgagguccaccuccccgacguccacaagcaggucuccggcgucgaccucggccuccccuccuggggcaaguacguccucauguccgccggcguccucaccgcccucaugcucaugaucuuccucaugaccugcugccgccgcgccaaccgcgccgaguccgcccagcacucccucggcgagcgcggccgcaaggucuccgucaccucccaguccggccgcgucaucuccuccugggaguccuacaaguccggcggcgagaccaagcucuga

SEQ ID NO: 126623 - RNA, 1575 nt, Artificial Sequence; identical to SEQ ID NO: 126607
  derived and/or modified CDS sequence (opt2) from glycoprotein__RABV__AB563822.1

SEQ ID NO: 126624 - RNA, 1575 nt, Artificial Sequence
  derived and/or modified CDS sequence (opt2) from glycoprotein__RABV__AB563823.1
augaucccccaggcccuccuccucgucccccuccucgucuucucccucugcuucggcaaguuccccaucuacaccauccccgacaagcucggccccuggucccccaucgacauccaccaccucuccugccccaacaaccucgucgucgaggacgagggcugcaccaaccucuccggcuucuccuacauggagcucaaggucggcuacaucuccgccaucaaggucaacggcuucaccugcaccggcgucgucaccgaggccgagaccuacaccaacuucgucggcuacgucaccaccaccuucaagcgcaagcacuuccgccccacccccgacgccugccgcgccgccuacaacuggaagauggccggcgacccccgcuacgaggagucccuccacaaccccuaccccgacuaccacuggcuccgcaccgucaagaccaccaaggagucccucgucaucaucucccccuccgucgccgaccucgaccccuacgacaagucccuccacucccgcgucuuccccuccggcaagugcuccggcaucaccgucuccuccaccuacugcuccaccaaccacgacuacaccaucuggaugcccgagaacccccgccucggcaccuccugcgacaucuucaccaacucccgcggcaagcgcgccuccaagggcuccaagaccugcggcuucgucgacgagcgcggccucuacaagucccucaagggcgccugcaagcucaagcucugcggcguccucggccuccgccucauggacggcaccugggccgccauccagaccuccgacgagaccaaguggugcccccccgaccagcucgucaaccuccacgacuuccgcuccgacgagaucgagcaccucgucgucgaggagcucgucaagaagcgcgaggagugccucgacgcccucgaguccaucaugaccaccaaguccgucuccuuccgccgccucucccaccuccgcaagcucguccccggcuucggcaaggccuacaccaucuucaacaagacccucauggaggccgacgcccacuacaaguccguccgcaccuggaacgagaucauccccuccaagggcugccuccgcgucggcggccgcugccacccccacgucaacggcgucuucuucaacggcaucauccucggccccgacggccacguccucauccccgagaugcaguccucccuccuccagcagcacauggagcuccucgaguccuccgucaucccccucaugcacccccucgccgaccccuccaccgucuucaaggacgacgacgaggccgaggacuucgucgagguccaccuccccgacguccacaagcaggucuccggcgucgaccucggccuccccuccuggggcaaguacguccucauguccgccggcguccucaccgcccucaugcucaugaucuuccucaugaccugcugccgccgcgccaaccgcgucgaguccgcccagcacucccucggcgagcgcggccgcaaggucuccgucaccucccaguccggccgcgucaucuccuccugggaguccuacaaguccggcggcgagaccaagcucuga

SEQ ID NO: 126625 - RNA, 1575 nt, Artificial Sequence; identical to SEQ ID NO: 126607
  derived and/or modified CDS sequence (opt2) from glycoprotein__RABV__AB563824.1

SEQ ID NO: 126626 - RNA, 1575 nt, Artificial Sequence
  derived and/or modified CDS sequence (opt2) from glycoprotein__RABV__AB563826.1
augaucccccaggcccuccucuucgucccccuccucgucuucucccucugcuucggcaaguuccccaucuacaccauccccgacaagcucggccccuggucccccaucgacauccaccaccucuccugccccaacaaccucgucgucgaggacgagggcugcaccaaccucuccggcuucuccuacauggagcucaaggucggcuacaucuccgccaucaaggucaacggcuucaccugcaccggcgucgucaccgaggccgagaccuacaccaacuucgucggcuacgucaccaccaccuucaagcgcaagcacuuccgccccacccccgacgccugccgcgccgccuacaacuggaagauggccggcgacccccgcuacgaggagucccuccacaaccccuaccccgacuaccacuggcuccgcaccgucaagaccaccaaggagucccucgucaucaucucccccuccgucgccgaccucgaccccuacgacaagucccuccacucccgcgucuuccccuccggcaagugcuccggcaucaccgucuccuccaccuacugcuccaccaaccacgacuacaccaucuggaugcccgagaacccccgccucggcaccuccugcgacaucuucaccaacucccgcggcaagcgcgccuccaagggcuccaagaccugcggcuucgucgacgagcgcggccucuacaagucccucaagggcgccugcaagcucaagcucugcggcguccucggccuccgccucauggacggcaccugggccgccauccagaccuccgacgagaccaaguggugcccccccgaccagcucgucaaccuccacgacuuccgcuccgacgagaucgagcaccucgucgucgaggagcucgucaagaagcgcgaggagugccucgacgcccucgaguccaucaugaccaccaaguccgucuccuuccgccgccucucccaccuccgcaagcucguccccggcuucggcaaggccuacaccaucuucaacaagacccucauggaggccgacgcccacuacaaguccguccgcaccuggaacgagaucauccccuccaagggcugccuccgcgucggcggccgcugccacccccacgucaacggcgucuucuucaacggcaucauccucggccccgacggccacguccucauccccgagaugcaguccucccuccuccagcagcacauggagcuccucgaguccuccgucaucccccucaugcacccccucgccgaccccuccuccgucuucaaggacgacgacgaggccgaggacuucgucgagguccaccuccccgacguccacaagcaggucuccggcgucgaccucggccuccccuccuggggcaaguacguccucauguccgccggcguccucaccgcccucaugcucaugaucuuccucaugaccugcugccgccgcgccaaccgcgucgaguccgcccagcacucccucggcgagcgcggccgcaaggucuccgucaccucccaguccggccgcgucaucuccuccugggaguccuacaaguccggcggcgagaccaagcucuga

SEQ ID NO: 126627 - RNA, 1575 nt, Artificial Sequence
  derived and/or modified CDS sequence (opt2) from glycoprotein__RABV__AB563827.1
augaucccccaggcccuccucuucgucccccuccucgucuucucccucugcuucggcaaguuccccaucuacaccauccccgacaagcucggccccuggucccccaucgacauccaccaccucuccugccccaacaaccucgucgucgaggacgagggcugcaccaaccucuccggcuucuccuacauggagcucaaggucggcuacaucuccgccaucaaggucaacggcuucaccugcaccggcgucgucaccgaggccgagaccuacaccaacuucgucggcuacgucaccaccaccuucaagcgcaagcacuuccgccccacccccgacgccugccgcgccgccuacaacuggaagauggccggcgacccccgcuacgaggagucccuccacaaccccuaccccgacuaccacuggcuccgcaccgucaagaccaccaaggagucccucgucaucaucucccccuccgucgccgaccucgaccccuacgacaagucccuccacucccgcgucuuccccuccggcaagugcuccggcaucaccgucuccuccaccuacugcuccaccaaccacgacuacaccaucuggaugcccgagaacccccgccucggcaccuccugcgacaucuucaccaacucccgcggcaagcgcgccuccaagggcuccaagaccugcggcuucgucgacgagcgcggccucuacaagucccucaagggcgccugcaagcucaagcucugcggcguccucggccuccgccucauggacggcaccugggucgccauccagaccuccgacgagaccaaguggugcccccccgaccagcucgucaaccuccacgacuuccgcuccgacgagaucgagcaccucgucgucgaggagcucgucaagaagcgcgaggagugccucgacgcccucgaguccaucaugaccaccaaguccgucuccuuccgccgccucucccaccuccgcaagcucguccccggcuucggcaaggccuacaccaucuucaacaagacccucauggaggccgacgcccacuacaaguccguccgcaccuggaacgagaucauccccuccaagggcugccuccgcgucggcggccgcugccacccccacgucaacggcgucuucuucaacggcaucauccucggccccgacggccacguccucauccccgagaugcaguccucccuccuccagcagcacauggagcuccucgaguccuccgucaucccccucaugcacccccucgccgaccccuccaccgucuucaaggacgacgacgaggccgaggacuucgucgagguccaccuccccgacguccacaagcaggucuccggcgucgaccucggccuccccuccuggggcaaguacguccucauguccgccggcguccucaccgcccucaugcucaugaucuuccucaugaccugcugccgccgcgccaaccgcgucgaguccgcccagcacucccucggcgagcgcggccgcaaggucuccgucaccucccaguccggccgcgucaucuccuccugggaguccuacaaguccggcggcgagaccaagcucuga

SEQ ID NO: 126628 - RNA, 1575 nt, Artificial Sequence
  derived and/or modified CDS sequence (opt2) from glycoprotein__RABV__AB563830.1
augaucccccaggcccuccuccucgucccccuccucgucuucucccucugcuucggcaaguuccccaucuacaccauccccgacaagcucggccccuggucccccaucgacauccaccaccucuccugccccaacaaccucgucgucgaggacgagggcugcaccaaccucuccggcuucuccuacauggagcucaaggucggcuacaucuccgccaucaaggucaacggcuucaccugcaccggcgucgucaccgaggccgagaccuacaccaacuucgucggcuacgucaccaccaccuucaagcgcaagcacuuccgccccacccccgacgccugccgcgccgccuacaacuggaagauggccggcgacccccgcuacgaggagucccuccacaaccccuaccccgacuaccacuggcuccgcaccgucaagaccaccaaggagucccucgucaucaucucccccuccgucgccgaccucgaccccuacgacaagucccuccacucccgcgucuuccccuccggcaagugcuccggcaucaccgucuccuccaccuacugcuccaccaaccacgacuacaccaucuggaugcccgagaacccccgccucggcaccuccugcgacaucuucaccaacucccgcggcaagcgcgccuccaagggcuccaagaccugcggcuucgucgacgagcgcggccucuacaagucccucaagggcgccugcaagcucaagcucugcggcguccucggccuccgccucauggacggcaccugggccgccauccagaccuccgacgagaccaaguggugcccccccgaccagcucgucaaccuccacgacuuccgcuccgacgagaucgagcaccucgucgucgaggagcucgucaagaagcgcgaggagugccucgacgcccucgaguccaucaugaccaccaaguccgucuccuuccgccgccucucccaccuccgcaagcucguccccggcuucggcaaggccuacaccaucuucaacaagacccucauggaggccgacgcccacuacaaguccguccgcaccuggaacgagaucauccccuccaagggcugccuccgcgucggcggccgcugccacccccacgucaacggcgucuucuucaacggcaucauccucggccccgacggccacguccucauccccgagaugcaguccucccuccuccagcagcacauggagcuccucgaguccuccgucaucccccucaugcacccccucgccgaccccuccaccgucuucaaggacgacgacgaggccgaggacuucgucgagguccaccuccccgacguccacaagcaggucuccggcgucgaccucggccuccccuccuggggcaaguacguccucauguccgccggcauccucaccgcccucaugcucaugaucuuccucaugaccugcugccgccgcgccaaccgcgucgaguccgcccagcacucccucggcgagcgcggccgcaaggucuccgucaccucccaguccggccgcgucaucuccuccugggaguccuacaaguccggcggcgagaccaagcucuga

SEQ ID NO: 126629 - RNA, 1575 nt, Artificial Sequence; identical to SEQ ID NO: 126624
  derived and/or modified CDS sequence (opt2) from glycoprotein__RABV__AB563836.1

SEQ ID NO: 126630 - RNA, 1575 nt, Artificial Sequence
  derived and/or modified CDS sequence (opt2) from glycoprotein__RABV__AB563837.1
augaucccccaggcccuccucuucgucccccuccucgucuucucccucugcuucggcaaguuccccaucuacaccauccccgacaagcucggccccuggucccccaucgacauccaccaccucuccugccccaacaaccucgucgucgaggacgagggcugcaccaaccucuccggcuucuccuacauggagcucaaggucggcuacaucuccgccaucaaggucaacggcuucaccugcaccggcgucgucaccgaggccgagaccuacaccaacuucgucggcuacgucaccaccaccuucaagcgcaagcacuuccgccccacccccgacgccugccgcgccgccuacaacuggaagauggccggcgacccccgcuacgaggagucccuccacaaccccuaccccgacuaccacuggcuccgcaccgucaagaccaccaaggagucccucgucaucaucucccccuccgucgccgaccucgaccccuacgacaagucccuccacucccgcgucuuccccuccggcaagugcuccggcaucaccgucuucuccaccuacugcuccaccaaccacgacuacaccaucuggaugcccgagaacccccgccucggcaccuccugcgacaucuucaccaacucccgcggcaagcgcgccuccaagggcuccaagaccugcggcuucgucgacgagcgcggccucuacaagucccucaagggcgccugcaagcucaagcucugcggcguccucggccuccgccucauggacggcaccugggccgccauccagaccuccgacgagaccaaguggugcccccccgaccagcucgucaaccuccacgacuuccgcuccgacgagaucgagcaccucgucgucgaggagcucgucaagaagcgcgaggagugccucgacgcccucgaguccaucaugaccaccaaguccgucuccuuccgccgccucucccaccuccgcaagcucguccccggcuucggcaaggccuacaccaucuucaacaagacccucauggaggccgacgcccacuacaaguccguccgcaccuggaacgagaucauccccuccaagggcugccuccgcgucggcggccgcugccacccccacgucaacggcgucuucuucaacggcaucauccucggccccgacggccacguccucauccccgagaugcaguccucccuccuccagcagcacauggagcuccucgaguccuccgucaucccccucaugcacccccucgccgaccccuccaccgucuucaaggacgacgacgaggccgaggacuucgucgagguccaccuccccgacguccacaagcaggucuccggcgucgaccucggccuccccuccuggggcaaguacguccucauguccgccggcguccucaccgcccucaugcucaugaucuuccucaugaccugcugccgccgcgccaaccgcgucgaguccgcccagcacucccucggcgagcgcggccgcaaggucuccgucaccucccaguccggccgcgucaucuccuccugggaguccuacaaguccggcggcgagaccaagcucuga

SEQ ID NO: 126631 - RNA, 1575 nt, Artificial Sequence
  derived and/or modified CDS sequence (opt2) from glycoprotein__RABV__AB563838.1
augaucccccaggcccuccucuucgucccccuccucgucuucucccucugcuucggcaaguuccccaucuacaccauccccgacaagcucggccccuggucccccaucgacauccaccaccucuccugccccaacaaccucgucgucgaggacgagggcugcaccaaccucuccggcuucuccuacauggagcucaaggucggcuacaucuccgccaucaaggucaacggcuucaccugcaccggcgucgucaccgaggccgagaccuacaccaacuucgucggcuacgucaccaccaccuucaagcgcaagcacuuccgccccacccccgacgccugccgcgccgccuacaacuggaagauggccggcgacccccgcuacgaggagucccuccacaaccccuaccccgacuaccacuggcuccgcaccgucaagaccaccaaggagucccucgucaucaucucccccuccgucgccgaccucgaccccuacgacaagucccuccacucccgcgucuuccccuccggcaagugcuccggcaucaccgucuccuccaccuacugcuccaccaaccacgacuacaccaucuggaugcccgagaacccccgccucggcaccuccugcgacaucuucaccaacucccgcggcaagcgcgccuccaagggcuccaagaccugcggcuucgucgacgagcgcggccucuacaagucccucaagggcgccugcaagcucaagcucugcggcguccucggccuccgccucauggacggcaccugggccgccauccagaccuccgacgagaccaaguggugcccccccgaccagcucgucaaccuccacgacuuccgcuccgacgagaucgagcaccucgucgucgaggagcucgucaagaagcgcgaggagugccucgacgcccucgaguccaucaugaccaccaaguccgucuccuuccgccgccucucccaccuccgcaagcucguccccggcuucggcaaggccuacaccaucuucaacaagacccucauggaggccgacgcccacuacaaguccguccgcaccuggaacgagaucauccccuccaagggcugccuccgcgucggcggccgcugccacccccacgucaacggcgucuucuucaacggcaucauccucggccccgacggccacguccucauccccgagaugcaguccucccuccuccagcagcacauggagcuccucgaguccuccgucaucccccucaugcacccccucgccgaccccuccaccgucuucaaggacgacgacgaggccgaggacuucgucgagguccaccuccccgacguccacaagcaggucuccggcgucgaccucggccuccccuccuggggcaaguacguccucauguccgccggcguccucaccgcccucaugcucaugaucuuccucaugaccugcugccgccgcaccaaccgcgccgaguccgcccagcacucccucggcgagcgcggccgcaaggucuccgucaccucccaguccggccgcgucaucuccuccugggaguccuacaaguccggcggcgagaccaagcucuga

SEQ ID NO: 126632 - RNA, 1575 nt, Artificial Sequence
  derived and/or modified CDS sequence (opt2) from glycoprotein__RABV__AB563839.1
augaucccccaggcccuccucuucgucccccuccucgucuucucccucugcuucggcaaguuccccaucuacaccauccccgacaagcucggccccuggucccccaucgacauccaccaccucuccugccccaacaaccucgucgucgaggacgagggcugcaccaaccucuccggcuucuccuacauggagcucaaggucggcuacaucuccgccaucaaggucaacggcuucaccugcaccggcgucgucaccgaggccgagaccuacaccaacuucgucggcuacgucaccaccaccuucaagcgcaagcacuuccgccccacccccgacgccugccgcgccgccuacaacuggaagauggccggcgacccccgcuacgaggagucccuccacaaccccuaccccgacuaccacuggcuccgcaccgucaagaccaccaaggagucccucgucaucaucucccccuccgucgccgaccucgaccccuacgacaagucccuccacucccgcgucuuccccuccggcaagugcuccggcaucaccgucuccuccaccuacugcuccaccaaccacgacuacaccaucuggaugcccgagaacccccgccucggcaccuccugcgacaucuucaccaacucccgcggcaagcgcgccuccaagggcuccaagaccugcggcuucgucgacgagcgcggccucuacaagucccucaagggcgccugcaagcucaagcucugcggcguccucggccuccgccucauggacggcaccugggccgccauccagaccuccgacgagaccaaguggugcccccccgaccagcucgucaaccuccacgacuuccgcuccgacgagaucgagcaccucgucgucgaggagcucgucaagaagcgcgaggagugccucgacgcccucgaguccaucaugaccaccaaguccgucuccuuccgccgccucucccaccuccgcaagcucguccccggcuucggcaaggccuacaccaucuucaacaagacccucauggaggccgacgcccacuacaaguccguccgcaccuggaacgagaucauccccuccaagggcugccuccgcgucggcggccgcugccacccccacgucaacggcgucuucuucaacggcaucauccucggccccgacggccacguccucauccccgagaugcaguccucccuccuccagcagcacauggagcuccucgaguccuccgucaucccccucaugcacccccucgccgaccccuccaccgucuucaaggacgacgacgaggccgaggacuucgucgagguccaccuccccgacguccacaagcaggucuccggcgucgaccucggccuccccuccuggggcaaguacguccucaugugcgccggcguccucaccgcccucaugcucaugaucuuccucaugaccugcugccgccgcgccaaccgcgccgaguccgcccagcacucccucggcgagcgcggccgcaaggucuccgucaccucccaguccggccgcgucaucuccuccugggaguccuacaaguccggcggcgagaccaagcucuga

SEQ ID NO: 126633 - RNA, 1575 nt, Artificial Sequence
  derived and/or modified CDS sequence (opt2) from glycoprotein__RABV__AB563841.1
augaucccccaggcccuccucuucgucccccuccucgucuucucccucugcuucggcaaguuccccaucuacaccauccccgacaagcucggccccuggucccccaucgacauccaccaccucuccugccccaacaaccucgucgucgaggacgagggcugcaccaaccucuccggcuucuccuacauggagcucaaggucggcuacaucuccgccaucaaggucaacggcuucaccugcaccggcgucgucaccgaggccgagaccuacaccaacuucgucggcuacgucaccaccaccuucaagcgcaagcacuuccgccccacccccgacgccugccgcgccgccuacaacuggaagauggccggcgacccccgcuacgaggagucccuccacaaccccuaccccgacuaccacuggcuccgcaccgucaagaccaccaaggagucccucgucaucaucucccccuccgucgccgaccucgaccccuacgacaagucccuccacucccgcgucuuccccuccggccgcugcuccggcaucaccgucuccuccaccuacugcuccaccaaccacgacuacaccaucuggaugcccgagaacccccgccucggcaccuccugcgacaucuucaccaacucccgcggcaagcgcgccuccaagggcuccaagaccugcggcuucgucgacgagcgcggccucuacaagucccucaagggcgccugcaagcucaagcucugcggcguccucggccuccgccucauggacggcaccugggccgccauccagaccuccgacgagaccaaguggugcccccccgaccagcucgucaaccuccacgacuuccgcuccgacgagaucgagcaccucgucgucgaggagcucgucaagaagcgcgaggagugccucgacgcccucgaguccaucaugaccaccaaguccgucuccuuccgccgccucucccaccuccgcaagcucguccccggcuucggcaaggccuacaccaucuucaacaagacccucauggaggccgacgcccacuacaaguccguccgcaccuggaacgagaucauccccuccaagggcugccuccgcgucggcggccgcugccacccccacgucaacggcgucuucuucaacggcaucauccucggccccgacggccacguccucauccccgagaugcaguccucccuccuccagcagcacauggagcuccucgaguccuccgucaucccccucaugcacccccucgccgaccccuccaccgucuucaaggacgacgacgaggccgaggacuucgucgagguccaccuccccgacguccacaagcaggucuccggcgucgaccucggccuccccuccuggggcaaguacguccucauguccgccggcguccucaccgcccucaugcucaugaucuuccucaccaccugcugccgccgcgccgaccgcgccgaguccgcccagcacucccucggcgagcgcggccgcaaggucuccgucaccucccaguccggccgcgucaucuccuccugggaguccuacaaguccggcggcgagaccaagcucuga

SEQ ID NO: 126634 - RNA, 1575 nt, Artificial Sequence
  derived and/or modified CDS sequence (opt2) from glycoprotein__RABV__AB563842.1
augaucccccaggcccuccucuucgucccccuccucgucuucucccucugcuucggcaaguuccccaucuacaccauccccgacaagcucggccccuggucccccaucgacauccaccaccucuccugccccaacaaccucgucgucgaggacgagggcugcaccaaccucuccggcuucuccuacauggagcucaaggucggcuacaucuccgccaucaaggucaacggcuucaccugcaccggcgucgucaccgaggccgagaccuacaccaacuucgucggcuacgucaccaccaccuucaagcgcaagcacuuccgccccacccccgacgccugccgcgccgccuacaacuggaagauggccggcgacccccgcuacgaggagucccuccacaaccccuaccccgacuaccacuggcuccgcaccgucaagaccaccaaggagucccucgucaucaucucccccuccgucgccgaccucgaccccuacgacaagucccuccacucccgcgucuuccccuccggcaagugcuccggcaucaccgucuccuccaccuacugcuccaccaaccacgacuacaccaucuggaugcccgagaacccccgccucggcaccuccugcgacaucuucaccaacucccgcggcaagcgcgccuccaagggcuccaagaccugcggcuucgucgacgagcgcggccucuacaagucccucaagggcgccugcaagcucaagcucugcggcguccucggccuccgccucauggacggcaccugggccgccauccagaccuccgacgagaccaaguggugcccccccgaccagcucgucaaccuccacgacuuccgcuccgacgagaucgagcaccucgucgucgaggagcucgucaagaagcgcgaggagugccucgacgcccucgaguccaucaugaccaccaaguccgucuccuuccgccgccucucccaccuccgcaagcucguccccggcuucggcaaggccuacaccaucuucaacaagacccucauggaggccgacgcccacuacaaguccguccgcaccuggaacgagaucauccccuccaagggcugccuccgcgucggcggccgcugccacccccacgucaacggcgucuucuucaacggcaucauccucggccccgacggccacguccucauccccgagaugcaguccucccuccuccagcagcacauggagcuccucgaguccuccgucaucccccucaugcacccccucgccgaccccuccaccgucuucaaggacgacgacgaggccgaggacuucgucgagguccaccuccccgacguccacaagcaggucuccggcgucgaccucggccuccccuccuggggcaaguacguccucauguccgccggcguccucaccgcccucaugcucaugaucuuccucaugaccugcugccgccgcgccaaccgcgccgaguccgcccagcacucccuccgcgagcgcggccgcaaggucuccgucaccucccaguccggccgcgucaucuccuccugggaguccuacaaguccggcggcgagaccaagcucuga

SEQ ID NO: 126635 - RNA, 1575 nt, Artificial Sequence
  derived and/or modified CDS sequence (opt2) from glycoprotein__RABV__AB563843.1
augaucccccaggcccuccucuucgucccccuccucgucuucucccucugcuucggcaaguuccccaucuacaccauccccgacaagcucggccccuggucccccaucgacauccaccaccucuccugccccaacaaccucgucgucgaggacgagggcugcaccaaccucuccggcuucuccuacauggagcucaaggucggcuacaucuccgccaucaaggucaacggcuucaccugcaccggcgucgucaccgaggccgagaccuacaccaacuucgucggcuacgucaccaccaccuucaagcgcaagcacuuccgccccacccccgacgccugccgcgccgccuacaacuggaagauggccggcgacccccgcuacgaggagucccuccacaaccccuaccccgacuaccacuggcuccgcaccgucaagaccaccaaggagucccucgucaucaucucccccuccgucgccgaccucgaccccuacgacaagucccuccacucccgcgucuuccccuccggcaagugcuccggcaucaccgucuccuccaccuacugcuccaccaaccacgacuacaccaucuggaugcccgagaacccccgccucggcaccuccugcgacaucuucaccaacucccgcggcaagcgcgccuccaagggcuccaagaccugcggcuucgucgacgagcgcggccucuacaagucccucaagggcgccugcaagcucaagcucugcggcguccucggccuccgccucauggacggcaccugggccgccauccagaccuccgacgagaccaaguggugcccccccgaccagcucgucaaccuccacgacuuccgcuccgacgagaucgagcaccucgucgucgaggagcucgucaagaagcgcgaggagugccucgacgcccucgaguccaucaugaccaccaaguccgucuccuuccgccgccucucccaccuccgcaagcucguccccggcuucggcaaggccuacaccaucuucaacaagacccucauggaggccgacgcccacuacaaguccguccgcaccuggaacgagaucauccccuccaagggcugccuccgcgucggcggccgcugccacccccacgucaacggcgucuucuucaacggcaucauccucggccccgacggccacguccucauccccgagaugcaguccucccuccuccagcagcacauggagcuccucgaguccuccgucaucccccucaugcacccccucgccgaccccuccaccgucuucaaggacgacgacgaggccgaggacuucgucgagguccaccuccccgacguccacaagcaggucuccggcgucgaccucggccuccccuccuggggcaaguacguccucauguccgccggcguccucaccgcccucaugcucaugaucuuccucaccaccugcugccgccgcgccgaccgcgccgaguccgcccagcacucccucggcgagcgcggccgcaaggucuccgucaccucccaguccggccgcgucaucuccuccugggaguccuacaaguccggcggcgagaccaagcucuga

SEQ ID NO: 126636 - RNA, 1575 nt, Artificial Sequence; identical to SEQ ID NO: 126608
  derived and/or modified CDS sequence (opt2) from glycoprotein__RABV__AB563844.1

SEQ ID NO: 126637 - RNA, 1575 nt, Artificial Sequence
  derived and/or modified CDS sequence (opt2) from glycoprotein__RABV__AB563845.1
augaacccccaggcccucauguucgucccccuccucgucuucucccucugcuucggcaaguuccccaucuacaccauccccgacaagcucggccccuggucccccaucgacauccaccaccucuccugccccaacaaccucgucgucgaggacgagggcugcaccaaccucuccggcuucuccuacauggagcucaaggucggcuacaucuccgccaucaaggucaacggcuucaccugcaccggcgucgucaccgaggccgagaccuacaccaacuucgucggcuacgucaccaccaccuucaagcgcaagcacuuccgccccacccccgacgccugccgcgccgccuacaacuggaagauggccggcgacccccgcuacgaggagucccuccacaaccccuaccccgacuaccacuggcuccgcaccgucaagaccaccaaggagucccucgucaucaucucccccuccgucgccgaccucgaccccuacgacaagucccuccacucccgcgucuuccccuccggcaagugcuccggcaucaccgucuccuccaccuacugcuccaccaaccacgacuacaccaucuggaugcccgagaacccccgccucggcaccuccugcgacaucuucaccaacucccgcggcaagcgcgccuccaagggcuccaagaccugcggcuucgucgacgagcgcggccucuacaagucccucaagggcgccugcaagcucaagcucugcggcguccucggccuccgccucauggacggcaccugggccgccauccagaccuccgacgagaccaaguggugcccccccgaccagcucgucaaccuccacgacuuccgcuccgacgagaucgagcaccucgucgucgaggagcucgucaagaagcgcgaggagugccucgacgcccucgaguccaucaugaccaccaaguccgucuccuuccgccgccucucccaccuccgcaagcucguccccggcuucggcaaggccuacaccaucuucaacaagacccucauggaggccgacgcccacuacaaguccguccgcaccuggaacgagaucauccccuccaagggcugccuccgcgucggcggccgcugccacccccacgucaacggcgucuucuucaacggcaucauccucggccccgacggccacguccucauccccgagaugcaguccucccuccuccagcagcacauggagcuccucgaguccuccgucaucccccucaugcacccccucgccgaccccuccaccgucuucaaggacgacgacgaggccgaggacuucgucgagguccaccuccccgacguccacaagcaggucuccggcgucgaccucggccuccccuccuggggcaaguacguccucauguccgccggcguccucaccgcccucaugcucaugaucuuccucaugaccugcugccgccgcgccaaccgcgccgaguccgcccagcacucccucggcgagcgcggccgcaaggucuccgucaccucccaguccggccgcgucaucuccuccugggaguccuacaaguccggcggcgagaccaagcucuga

SEQ ID NO: 126638 - RNA, 1575 nt, Artificial Sequence
  derived and/or modified CDS sequence (opt2) from glycoprotein__RABV__AB563846.1
augaucccccaggcccuccucuucgucccccuccucgucuucucccucugcuucggcaaguuccccaucuacaccauccccgacaagcucggccccuggucccccaucgacauccaccaccucuccugccccaacaaccucgucgucgaggacgagggcugcaccaaccucuccggcuucuccuacauggagcucaaggucggcuacaucuccgccaucaaggucaacggcuucaccugcaccggcgucgucaccgaggccgagaccuacaccaacuucgucggcuacgucaccaccaccuucaagcgcaagcacuuccgccccacccccgacgccugccgcgccgccuacaacuggaagauggccggcgacccccgcuacgaggagucccuccacaaccccuaccccgacuaccacuggcuccgcaccgucaagaccaccaaggagucccucgucaucaucucccccuccgucgccgaccucgaccccuacgacaagucccuccacucccgcgucuuccccuccggcaagugcuccggcaucaccgucuccuccaccuacugcuccaccaaccacgacuacaccaucuggaugcccgagaacccccgccucggcaccuccugcgacaucuucaccaacucccgcggcaagcgcgccuccaagggcuccaagaccugcggcuucgucgacgagcgcggccucuacaagucccucaagggcgccugcaagcucaagcucugcggcguccucggccuccgccucauggacggcaccugggccgccauccagaccuccgacgagaccaaguggugcccccccgaccagcucgucaaccuccacgacuuccgcuccgacgagaucgagcaccucgucgucgaggagcucgucaagaagcgcgaggagugccucgacgcccucgaguccaucaugaccaccaaguccgucuccuuccgccgccucucccaccuccgcaagcucguccccggcuucggcaaggccuacaccaucuucaacaagacccucauggaggccgacgcccacuacaaguccguccgcaccuggaacgagaucauccccuccaagggcugccuccgcgucggcggccgcugccacccccacgucaacggcgucuucuucaacggcaucauccucggccccgacggccacguccucauccccgagaugcaguccucccuccuccagcagcacauggagcuccucgaguccuccgucaucccccucaugcacccccucgccgaccccuccaccgucuucaaggacgacgacgaggccgaggacuucgucgagguccaccuccccgacguccacaagcaggucuccggcgucgaccucggccuccccuccuggggcaaguacguccucauguccgccggcguccucaccgcccucaugcucaugaucuuccucaccaccugcugccgccgcgccaaccgcgccgaguccgcccagcacucccucggcgagcgcggccgcaaggucuccgucaccucccaguccggccgcgucaucuccuccugggaguccuacaaguccggcggcgagaccaagcucuga

SEQ ID NO: 126639 - RNA, 1575 nt, Artificial Sequence; identical to SEQ ID NO: 126638
  derived and/or modified CDS sequence (opt2) from glycoprotein__RABV__AB563847.1

SEQ ID NO: 126640 - RNA, 1575 nt, Artificial Sequence
  derived and/or modified CDS sequence (opt2) from glycoprotein__RABV__AB563848.1
augaucccccaggcccuccucuucgucccccuccucgucuucucccucugcuucggcaaguuccccaucuacaccauccccgacaagcucggccccuggucccccaucgacauccaccaccucuccugccccaacaaccucgucgucgaggacgagggcugcaccaaccucuccggcuucuccuacauggagcucaaggucggcuacaucuccgccaucaaggucaacggcuucaccugcaccggcgucgucaccgaggccgagaccuacaccaacuucgucggcuacgucaccaccaccuucaagcgcaagcacuuccgccccacccccgacgccugccgcgccgccuacaacuggaagauggccggcgacccccgcuacgaggagucccuccacaaccccuaccccgacuaccacuggcuccgcaccgucaagaccaccaaggagucccucgucaucaucucccccuccgucgccgaccucgaccccuacgacaagucccuccacucccgcgucuuccccuccggcaagugcuccggcaucaccgucuccuccaccuacugcuccaccaaccacgacuacaccaucuggaugcccgagaacccccgccucggcaccuccugcgacaucuucaccaacucccgcggcaagcgcgccuccaagggcuccaagaccugcggcuucgucgacgagcgcggccucuacaagucccucaagggcgccugcaagcucaagcucugcggcguccucggccuccgccucauggacggcaccugggccgccauccagaccuccgacgagaccaaguggugcccccccgaccagcucgucaaccuccacgacuuccgcuccgacgagaucgagcaccucgucgucgaggagcucgucaagaagcgcgaggagugccucgacgcccucgaguccaucaugaccaccaaguccgucuccuuccgccgccucucccaccuccgcaagcucguccccggcuucggcaaggccuacaccaucuucaacaagacccucauggaggccgacgcccacuacaaguccguccgcaccuggaacgagaucauccccuccaagggcugccuccgcgucggcggccgcugccacccccacgucaacggcgucuucuucaacggcaucauccucggccccgacggccacguccucauccccgagaugcaguccucccuccuccagcagcacauggagcuccucgaguccuccgucaucccccucaugcacccccucgccgaccccuccaccgucuucaaggacgacgacgaggccgaggacuucgucgagguccaccuccccgacguccacaagcaggucuccggcgucgaccucggccuccccuccuggggcaaguacguccucauguccgccggcguccucaccgcccucaugcucaccaucuuccucaugaccugcugccgccgcgccaaccgcgccgaguccgcccagcacucccucggcgagcgcggccgcaaggucuccgucaccucccaguccggccgcgucaucuccuccugggaguccuacaaguccggcggcgagaccaagcucuga

SEQ ID NO: 126641 - RNA, 1575 nt, Artificial Sequence
  derived and/or modified CDS sequence (opt2) from glycoprotein__RABV__AB563849.1
augaucccccaggcccuccucuucgucccccuccucgucuucucccucugcuucggcaaguuccccaucuacaccauccccgacaagcucggccccuggucccccaucgacauccaccaccucuccugccccaacaaccucgucgucgaggacgagggcugcaccaaccucuccggcuucuccuacauggagcucaaggucggcuacaucuccgccaucaaggucaacggcuucaccugcaccggcgucgucaccgaggccgagaccuacaccaacuucgucggcuacgucaccaccaccuucaagcgcaagcacuuccgccccacccccgacgccugccgcgccgccuacaacuggaagauggccggcgacccccgcuacgaggagucccuccacaaccccuaccccgacuaccacuggcuccgcaccgucaagaccaccaaggagucccucgucaucaucucccccuccgucgccgaccucgaccccuacgacaagucccuccacucccgcgucuuccccuccggcaagugcuccggcaucaccgucuccuccaccuacugcuccaccaaccacgacuacaccaucuggaugcccgagaacccccgccucggcaccuccugcgacaucuucaccaacucccgcggcaagcgcgccuccaagggcuccaagaccugcggcuucgucgacgagcgcggccucuacaagucccucaagggcgccugcaagcucaagcucugcggcguccucggccuccgccucauggacggcaccugggccgccauccagaccuccgacgagaccaaguggugcccccccgaccagcucgucaaccuccacgacuuccgcuccgacgagaucgagcaccucgucgucgaggagcucgucaagaagcgcgaggagugccucgacgcccucgaguccaucaugaccaccaaguccgucuccuuccgccgccucucccaccuccgcaagcucguccccggcuucggcaaggccuacaccaucuucaacaagacccucauggaggccgacgcccacuacaaguccguccgcaccuggaacgagaucauccccuccaagggcugccuccgcgucggcggccgcugccacccccacgucaacggcgucuucuucaacggcaucauccucggccccgacggccacguccucauccccgagaugcaguccucccuccuccagcagcacauggagcuccucgaguccuccgucaucccccucaugcacccccucgccgaccccuccaccgucuucaaggacgacgacgaggccgaggacuucgucgagguccaccuccccgacguccacaagcaggucuccggcgucgaccucggccuccccuccuggggcaaguacguccucauguccgccggcguccucaccgcccucaugcucaugaucuuccucaccaccugcuaccgccgcgccaaccgcgccgaguccgcccagcacucccucggcgagaagggccgcaaggucuccgucaccucccaguccggccgcgucaucuccuccugggaguccuacaaguccggcggcgagaccaagcucuga

SEQ ID NO: 126642 - RNA, 1575 nt, Artificial Sequence; identical to SEQ ID NO: 126635
  derived and/or modified CDS sequence (opt2) from glycoprotein__RABV__AB563850.1

SEQ ID NO: 126643 - RNA, 1575 nt, Artificial Sequence; identical to SEQ ID NO: 126640
  derived and/or modified CDS sequence (opt2) from glycoprotein__RABV__AB563851.1

SEQ ID NO: 126644 - RNA, 1575 nt, Artificial Sequence
  derived and/or modified CDS sequence (opt2) from glycoprotein__RABV__AB563852.1
augaacccccaggcccucauguucgucccccuccucgucuucucccucugcuucggcaaguuccccaucuacaccauccccgacaagcucggccccuggucccccaucgacauccaccaccucuccugccccaacaaccucgucgucgaggacgagggcugcaccaaccucuccggcuucuccuacauggagcucaaggucggcuacaucuccgccaucaaggucaacggcuucaccugcaccggcgucgucaccgaggccgagaccuacaccaacuucgucggcuacgucaccaccaccuucaagcgcaagcacuuccgccccacccccgacgccugccgcgccgccuacaacuggaagauggccggcgacccccgcuacgaggagucccuccacaaccccuaccccgacuaccacuggcuccgcaccgucaagaccaccaaggagucccucgucaucaucucccccuccgucgccgaccucgaccccuacgacaagucccuccacucccgcgucuuccccuccggcaagugcuccggcaucaccgucuccuccaccuacugcuccaccaaccacgacuacaccaucuggaugcccgagaacccccgccucggcaccuccugcgacaccuucaccaacucccgcggcaagcgcgccuccaagggcuccaagaccugcggcuucgucgacgagcgcggccucuacaagucccucaagggcgccugcaagcucaagcucugcggcguccucggccuccgccucauggacggcaccugggccgccauccagaccuccgacgagaccaaguggugcccccccgaccagcucgucaaccuccacgacuuccgcuccgacgagaucgagcaccucgucgucgaggagcucgucaagaagcgcgaggagugccucgacgcccucgaguccaucaugaccaccaaguccgucuccuuccgccgccucucccaccuccgcaagcucguccccggcuucggcaaggccuacaccaucuucaacaagacccucauggaggccgacgcccacuacaaguccguccgcaccuggaacgagaucauccccuccaagggcugccuccgcgucggcggccgcugccacccccacgucaacggcgucuucuucaacggcaucauccucggccccgacggccacguccucauccccgagaugcaguccucccuccuccagcagcacauggagcuccucgaguccuccgucaucccccucaugcacccccucgccgaccccuccaccgucuucaaggacgacgacgaggccgaggacuucgucgagguccaccuccccgacguccacaagcaggucuccggcgucgaccucggccuccccuccuggggcaaguacguccucauguccgccggcguccucaccgcccucaugcucaugaucuuccucaugaccugcugccgccgcgccaaccgcgccgaguccgcccagcacucccucggcgagcgcggccgcaaggucuccgucaccucccaguccggccgcgucaucuccuccugggaguccuacaaguccggcggcgagaccaagcucuga

SEQ ID NO: 126645 - RNA, 1575 nt, Artificial Sequence
  derived and/or modified CDS sequence (opt2) from glycoprotein__RABV__AB563854.1
augaucccccaggcccucauguucgucccccuccucgucuucucccucugcuucggcaaguuccccaucuacaccauccccgacaagcucggccccuggucccccaucgacauccaccaccucuccugccccaacaaccucgucgucgaggacgagggcugcaccaaccucuccggcuucuccuacauggagcucaaggucggcuacaucuccgccaucaaggucaacggcuucaccugcaccggcgucgucaccgaggccgagaccuacaccaacuucgucggcuacgucaccaccaccuucaagcgcaagcacuuccgccccacccccgacgccugccgcgccgccuacaacuggaagauggccggcgacccccgcuacgaggagucccuccacaaccccuaccccgacuaccacuggcuccgcaccgucaagaccaccaaggagucccucgucaucaucucccccuccgucgccgaccucgaccccuacgacaagucccuccacucccgcgucuuccccuccggcaagugcuccggcaucaccgucuccuccaccuacugcuccaccaaccacgacuacaccaucuggaugcccgagaacccccgccucggcaccuccugcgacaucuucaccaacucccgcggcaagcgcgccuccaagggcuccaagaccugcggcuucgucgacgagcgcggccucuacaagucccucaagggcgccugcaagcucaagcucugcggcguccucggccuccgccucauggacggcaccugggccgccauccagaccuccgacgagaccaaguggugcccccccgaccagcucgucaaccuccacgacuuccgcuccgacgagaucgagcaccucgucgucgaggagcucgucaagaagcgcgaggagugccucgacgcccucgaguccaucaugaccaccaaguccgucuccuuccgccgccucucccaccuccgcaagcucguccccggcuucggcaaggccuacaccaucuucaacaagacccucauggaggccgacgcccacuacaaguccguccgcaccuggaacgagaucauccccuccaagggcugccuccgcgucggcggccgcugccacccccacgucaacggcgucuucuucaacggcaucauccucggccccgacggccacguccucauccccgagaugcaguccucccuccuccagcagcacauggagcuccucgaguccuccgucaucccccucaugcacccccucgccgaccccuccaccgucuucaaggacgacgacgaggccgaggacuucgucgagguccaccuccccgacguccacaagcaggucuccggcgucgaccucggccuccccuccuggggcaaguacguccucauguccgccggcguccucaccgcccucaugcucaugaucuuccucaugaccugcugccgccgcgccaaccgcgccgaguccgcccagcacucccucggcgagcgcggccgcaaggucuccgucaccucccaguccggccgcgucaucuccuccugggaguccuacaaguccggcggcgagaccaagcucuga

SEQ ID NO: 126646 - RNA, 1575 nt, Artificial Sequence; identical to SEQ ID NO: 126637
  derived and/or modified CDS sequence (opt2) from glycoprotein__RABV__AB563855.1

SEQ ID NO: 126647 - RNA, 1575 nt, Artificial Sequence; identical to SEQ ID NO: 126637
  derived and/or modified CDS sequence (opt2) from glycoprotein__RABV__AB563856.1

SEQ ID NO: 126648 - RNA, 1575 nt, Artificial Sequence
  derived and/or modified CDS sequence (opt2) from glycoprotein__RABV__AB563857.1
augaacccccaggcccucauguucgucccccuccucgucuucucccucugcuucggcaaguuccccaucuacaccauccccgacaagcucggccccuggucccccaucgacauccaccaccucuccugccccaacaaccucgucgucgaggacgagggcugcaccaaccucuccggcuucuccuacauggagcucaaggucggcuacaucuccgccaucaaggucaacggcuucaccugcaccggcgucgucaccgaggccgagaccuacaccaacuucgucggcuacgucaccaccaccuucaagcgcaagcacuuccgccccacccccgacgccugccgcgccgccuacaacuggaagauggccggcgacccccgcuacgaggagucccuccacaaccccuaccccgacuaccacuggcuccgcaccgucaagaccaccaaggagucccucgucaucaucucccccuccgucgccgaccucgaccccuacgacaagucccuccacucccgcgucuuccccuccggcaagugcuccggcaucaccgucuccuccaccuacugcuccaccaaccacgacuacaccaucuggaugcccgagaacccccgccucggcaccuccugcgacauccucaccaacucccgcggcaagcgcgccuccaagggcuccaagaccugcggcuucgucgacgagcgcggccucuacaagucccucaagggcgccugcaagcucaagcucugcggcguccucggccuccgccucauggacggcaccugggccgccauccagaccuccgacgagaccaaguggugcccccccgaccagcucgucaaccuccacgacuuccgcuccgacgagaucgagcaccucgucgucgaggagcucgucaagaagcgcgaggagugccucgacgcccucgaguccaucaugaccaccaaguccgucuccuuccgccgccucucccaccuccgcaagcucguccccggcuucggcaaggccuacaccaucuucaacaagacccucauggaggccgacgcccacuacaaguccguccgcaccuggaacgagaucauccccuccaagggcugccuccgcgucggcggccgcugccacccccacgucaacggcgucuucuucaacggcaucauccucggccccgacggccacguccucauccccgagaugcaguccucccuccuccagcagcacauggagcuccucgaguccuccgucaucccccucaugcacccccucgccgaccccuccaccgucuucaaggacgacgacgaggccgaggacuucgucgagguccaccuccccgacguccacaagcaggucuccggcgucgaccucggccuccccuccuggggcaaguacguccucauguccgccggcguccucaccgcccucaugcucaugaucuuccucaugaccugcugccgccgcgccaaccgcgccgaguccgcccagcacucccucggcgagcgcggccgcaaggucuccgucaccucccaguccggccgcgucaucuccuccugggaguccuacaaguccggcggcgagaccaagcucuga

SEQ ID NO: 126649 - RNA, 1575 nt, Artificial Sequence; identical to SEQ ID NO: 126608
  derived and/or modified CDS sequence (opt2) from glycoprotein__RABV__AB563860.2

SEQ ID NO: 126650 - RNA, 1575 nt, Artificial Sequence; identical to SEQ ID NO: 126608
  derived and/or modified CDS sequence (opt2) from glycoprotein__RABV__AB563861.1

SEQ ID NO: 126651 - RNA, 1575 nt, Artificial Sequence
  derived and/or modified CDS sequence (opt2) from glycoprotein__RABV__AB563862.1
augaucccccaggcccuccucuucgucccccuccucgucuucucccucugcuucggcaaguuccccaucuacaccauccccgacaagcucggccccuggucccccaucgacauccaccaccucuccugccccaacaaccucgucgucgaggacgagggcugcaccaaccucuccggcuucuccuacauggagcucaaggucggcuacaucuccgccaucaaggucaacggcuucaccugcaccggcgucgucaccgaggccgagaccuacaccaacuucgucggcuacgucaccaccaccuucaagcgcaagcacuuccgccccacccccgacgccugccgcgccgccuacaacuggaagauguccggcgacccccgcuacgaggagucccuccacaaccccuaccccgacuaccacuggcuccgcaccgucaagaccaccaaggagucccucgucaucaucucccccuccgucgccgaccucgaccccuacgacaagucccuccacucccgcgucuuccccuccggcaagugcuccggcaucaccgucuccuccaccuacugcuccaccaaccacgacuacaccaucuggaugcccgagaacccccgccucggcaccuccugcgacaucuucaccaacucccgcggcaagcgcgccuccaagggcuccaagaccugcggcuucgucgacgagcgcggccucuacaagucccucaagggcgccugcaagcucaagcucugcggcguccucggccuccgccucauggacggcaccugggccgccauccagaccuccgacgagaccaaguggugcccccccgaccagcucgucaaccuccacgacuuccgcuccgacgagaucgagcaccucgucgucgaggagcucgucaagaagcgcgaggagugccucgacgcccucgaguccaucaugaccaccaaguccgucuccuuccgccgccucucccaccuccgcaagcucguccccggcuucggcaaggccuacaccaucuucaacaagacccucauggaggccgacgcccacuacaaguccguccgcaccuggaacgagaucauccccuccaagggcugccuccgcgucggcggccgcugccacccccacgucaacggcgucuucuucaacggcaucauccucggccccgacggccacguccucauccccgagaugcaguccucccuccuccagcagcacauggagcuccucgaguccuccgucaucccccucaugcacccccucgccgaccccuccaccgucuucaaggacgacgacgaggccgaggacuucgucgagguccaccuccccgacguccacaagcaggucuccggcgucgaccucggccuccccuccuggggcaaguacguccucauguccgccggcguccucaccgcccucaugcucaugaucuuccucaugaccugcugccgccgcgccaaccgcaccgaguccgcccagcacucccucggcgagcgcggccgcaaggucuccgucaccucccaguccggccgcgucaucuccuccugggaguccuacaaguccggcggcgagaccaagcucuga

SEQ ID NO: 126652 - RNA, 1575 nt, Artificial Sequence
  derived and/or modified CDS sequence (opt2) from glycoprotein__RABV__AB563863.1
augaucccccaggcccuccucuucgucccccuccucgucuucucccucugcuucggcaaguuccccaucuacaccauccccgacaagcucggccccuggucccccaucgacauccaccaccucuccugccccaacaaccucgucgucgaggacgagggcugcaccaaccucuccggcuucuccuacauggagcucaaggucggcuacaucuccgccaucaaggucaacggcuucaccugcaccggcgucgucaccgaggccgagaccuacaccaacuucgucggcuacgucaccaccaccuucaagcgcaagcacuuccgccccacccccgacgccugccgcgccgccuacaacuggaagauggccggcgacccccgcuacgaggagucccuccacaaccccuaccccgacuaccacuggcuccgcaccgucaagaccaccaaggagucccucgucaucaucucccccuccgucgccgaccucgaccccuacgacaagucccuccacucccgcgucuuccccuccggcaagugcuccggcaucaccgucuccuccaccuacugcuccaccaaccacgacuacaccaucuggaugcccgagaacccccgccucggcaccuccugcgacaucuucaccaacucccgcggcaagcgcgccuccaagggcuccaagaccugcggcuucgucgacgagcgcggccucuacaagucccucaagggcgccugcaagcucaagcucugcggcguccucggccuccgccucauggacggcaccugggccgccauccagaccuccgacgagaccaaguggugcccccccgaccagcucgucaaccuccacgacuuccgcuccgacgagaucgagcaccucgucgucgaggagcucgucaagaagcgcgaggagugccucgacgcccucgaguccaucaugaccaccaaguccgucuccuuccgccgccucucccaccuccgcaagcucguccccggcuucggcaaggccuacaccaucuucaacaagacccucauggaggccgacgcccacuacaaguccguccgcaccuggaacgagaucauccccuccaagggcugccuccgcgucggcggccgcugccacccccacgucaacggcgucuucuucaacggcaucauccucggccccgacggccacguccucauccccgagaugcaguccucccuccuccagcagcacauggagcuccucgaguccuccgucaucccccucaugcacccccucgccgaccccuccaccgucuucaaggacgacgacgaggccgaggacuucgucgagguccaccuccccgacguccacaagcaggucuccggcgucgaccucggccuccccuccuggggcaaguacguccucauguccgccggcguccucaccgcccucaugcucaugaucuuccucaugaccugcugccgccgcgccaaccgcgccgaguccgcccagcacucccucggcgagaagggccgcaaggucuccgucaccucccaguccggccgcgucaucuccuccugggaguccuacaaguccggcggcgagaccaagcucuga

SEQ ID NO: 126653 - RNA, 1575 nt, Artificial Sequence
  derived and/or modified CDS sequence (opt2) from glycoprotein__RABV__AB563864.1
augaucccccaggcccuccucuucgucccccuccucgucuucucccucugcuucggcaaguuccccaucuacaccauccccgacaagcucggccccuggucccccaucgacauccaccaccucuccugccccaacaaccucgucgucgaggacgagggcugcaccaaccucuccggcuucuccuacauggagcucaaggucggcuacaucuccgccaucaaggucaacggcuucaccugcaccggcgucgucaccgaggccgagaccuacaccaacuucgucggcuacgucaccaccaccuucaagcgcaagcacuuccgccccacccccgacgccugccgcgccgccuacaacuggaagauggccggcgacccccgcuacgaggagucccuccacaaccccuaccccgacuaccacuggcuccgcaccgucaagaccaccaaggagucccucgucaucaucucccccuccgucgccgaccucgaccccuacgacaagucccuccacucccgcgucuuccccuccggcaagugcuccggcaucaccgucuccuccaccuacugcuccaccaaccacgacuacaccaucuggaugcccgagaacccccgccucggcaccuccugcgacaucuucaccaacucccgcggcaagcgcgccuccaagggcuccaagaccugcggcuucgucgacgagcgcggccucuacaagucccucaagggcgccugcaagcucaagcucugcggcguccucggccuccgccucaucgacggcaccugggccgccauccagaccuccgacgagaccaaguggugcccccccgaccagcucgucaaccuccacgacuuccgcuccgacgagaucgagcaccucgucgucgaggagcucgucaagaagcgcgaggagugccucgacgcccucgaguccaucaugaccaccaaguccgucuccuuccgccgccucucccaccuccgcaagcucguccccggcuucggcaaggccuacaccaucuucaacaagacccucauggaggccgacgcccacuacaaguccguccgcaccuggaacgagaucauccccuccaagggcugccuccgcgucggcggccgcugccacccccacgucaacggcgucuucuucaacggcaucauccucggccccgacggccacguccucauccccgagaugcaguccucccuccuccagcagcacauggagcuccucgaguccuccgucaucccccucaugcacccccucgccgaccccuccaccgucuucaaggacgacgacgaggccgaggacuucgucgagguccaccuccccgacguccacaagcaggucuccggcgucgaccucggccuccccuccuggggcaaguacguccucauguccgccggcguccucaccgcccucaugcucaugaucuuccucaccaccugcugccgccgcgccaaccgcgccgaguccgcccagcacucccucggcgagcgcggccgcaaggucuccgccaccucccaguccggccgcgucaucuccuccugggaguccuacaaguccggcggcgagaccaagcucuga

SEQ ID NO: 126654 - RNA, 1575 nt, Artificial Sequence
  derived and/or modified CDS sequence (opt2) from glycoprotein__RABV__AB563865.1
augaucccccaggcccuccucuucgucccccuccucgucuucucccucugcuucggcaaguuccccaucuacaccauccccgacaagcucggccccuggucccccaucgacauccaccaccucuccugccccaacaaccucgucgucgaggacgagggcugcaccaaccucuccggcuucuccuacauggagcucaaggucggcuacaucuccgccaucaaggucuccggcuucaccugcaccggcgucgucaccgaggccgagaccuacaccaacuucgucggcuacgucaccaccaccuucaagcgcaagcacuuccgccccacccccgacgccugccgcgccgccuacaacuggaagauggccggcgacccccgcuacgaggagucccuccacaaccccuaccccgacuaccacuggcuccgcaccgucaagaccaccaaggagucccucgucaucaucucccccuccgucgccgaccucgaccccuacgacaagucccuccacucccgcgucuuccccuccggcaagugcuccggcaucaccgucuccuccaccuacugcuccaccaaccacgacuacaccaucuggaugcccgagaacccccgccucggcaccuccugcgacaucuucaccaacucccgcggcaagcgcgccuccaagggcuccaagaccugcggcuucgucgacgagcgcggccucuacaagucccucaagggcgccugcaagcucaagcucugcggcguccucggccuccgccucauggacggcaccugggccgccauccagaccuccgacgagaccaaguggugcccccccgaccagcucgucaaccuccacgacuuccgcuccgacgagaucgagcaccucgucgucgaggagcucgucaagaagcgcgaggagugccucgacgcccucgaguccaucaugaccaccaaguccgucuccuuccgccgccucucccaccuccgcaagcucguccccggcuucggcaaggccuacaccaucuucaacaagacccucauggaggccgacgcccacuacaaguccguccgcaccuggaacgagaucauccccuccaagggcugccuccgcgucggcggccgcugccacccccacgucaacggcgucuucuucaacggcaucauccucggccccgacggccacguccucauccccgagaugcaguccucccuccuccagcagcacauggagcuccucgaguccuccgucaucccccucaugcacccccucgccgaccccuccaccgucuucaaggacgacgacgaggccgaggacuucgucgagguccaccuccccgacguccacaagcaggucuccggcgucgaccucggccuccccuccuggggcaaguacguccucauguccgccggcgcccucaccgcccucaugcucaugaucuuccucaugaccugcugccgccgcgccaaccgcgccgaguccgcccagcacucccucggcgagggcggccgcaaggucuccgucaccucccaguccggccgcgucaucuccuccugggaguccuacaaguccggcggcgagaccaagcucuga

SEQ ID NO: 126655 - RNA, 1575 nt, Artificial Sequence
  derived and/or modified CDS sequence (opt2) from glycoprotein__RABV__AB563867.1
augaucccccaggcccuccucuucgucccccuccucgucuucucccucugcuucggcaaguuccccaucuacaccauccccgacaagcucggccccuggucccccaucgacauccaccaccucuccugccccaacaaccucgucgucgaggacgagggcugcaccaaccucuccggcuucuccuacauggagcucaaggucggcuacaucuccgccaucaaggucuccggcuucaccugcaccggcgucgucaccgaggccgagaccuacaccaacuucgucggcuacgucaccaccaccuucaagcgcaagcacuuccgccccacccccgacgccugccgcgccgccuacaacuggaagauggccggcgacccccgcuacgaggagucccuccacaaccccuaccccgacuaccacuggcuccgcaccgucaagaccaccaaggagucccucgucaucaucucccccuccgucgccgaccucgaccccuacgacaagucccuccacucccgcgucuuccccuccggcaagugcuccggcaucaccgucuccuccaccuacugcuccaccaaccacgacuacaccaucuggaugcccgagaacccccgccucggcaccuccugcgacaucuucaccaacucccgcggcaagcgcgccuccaagggcuccaagaccugcggcuucgucgacgagcgcggccucuacaagucccucaagggcgccugcaagcucaagcucugcggcguccucggccuccgccucauggacggcaccugggccgccauccagaccuccgacgagaccaaguggugcccccccgaccagcucgucaaccuccacgacuuccgcuccgacgagaucgagcaccucgucgucgaggagcucgucaagaagcgcgaggagugccucgacgcccucgaguccaucaugaccaccaaguccgucuccuuccgccgccucucccaccuccgcaagcucguccccggcuucggcaaggccuacaccaucuucaacaagacccucauggaggccgacgcccacuacaaguccguccgcaccuggaacgagaucauccccuccaagggcugccuccgcgucggcggccgcugccacccccacgucaacggcgucuucuucaacggcaucauccucggccccgacggccacguccucauccccgagaugcaguccucccuccuccagcagcacauggagcuccucgaguccuccgucaucccccucaugcacccccucgccgaccccuccaccgucuucaaggacgacgacgaggccgaggacuucgucgagguccaccuccccgacguccacaagcaggucuccggcgucgaccucggccuccccuccuggggcaaguacguccucauguccgccggcgcccucaccgcccucaugcucaugaucuuccucaugaccugcugccgcaaggccaaccgcgccgaguccgcccagcacucccucggcgagggcggccgcaaggucuccgucaccucccaguccggccgcgucaucuccuccugggaguccuacaaguccggcggcgagaccaagcucuga

SEQ ID NO: 126656 - RNA, 1575 nt, Artificial Sequence
  derived and/or modified CDS sequence (opt2) from glycoprotein__RABV__AB563870.1
augaucccccaggcccuccucuucgucccccuccucgucuucucccucugcuucggcaaguuccccaucuacaccauccccgacaagcucggccccuggucccccaucgacauccaccaccucuccugccccaacaaccucgucgucgaggacgagggcugcaccaaccucuccggcuucuccuacauggagcucaaggucggcuacaucuccgccaucaaggucaacggcuucaccugcaccggcgucgucaccgaggccgagaccuacaccaacuucgucggcuacgucaccaccaccuucaagcgcaagcacuuccgccccacccccgacgccugccgcgccgccuacaacuggaagauggccggcgacccccgcuacgaggagucccuccacaaccccuaccccgacuaccacuggcuccgcaccgucaagaccaccaaggagucccucgucaucaucucccccuccgucgccgaccucgaccccuacgacaagucccuccacucccgcgucuuccccuccggcaagugcuccggcaucaccgucuccuccaccuacugcuccaccaaccacgacuacaccaucuggaugcccgagaacccccgccucggcaccuccugcgacaucuucaccaacucccgcggcaagcgcgccuccaagggcuccaagaccugcggcuucgucgacgagcgcggccucuacaagucccucaagggcgccugcaagcucaagcucugcggcguccucggccuccgccucauggacggcaccugggccgccauccagaccuccgacgagaccaaguggugcccccccgaccagcucgucaaccuccacgacuuccgcuccgacgagaucgagcaccucgucgucgaggagcucgucaagaagcgcgaggagugccucgacgcccucgaguccaucaugaccaccaaguccgucuccuuccgccgccucucccaccuccgcaagcucguccccggcuucggcaaggccuacaccaucuucaacaagacccucauggaggccgacgcccacuacaaguccguccgcaccuggaacgagaucauccccuccaagggcugccuccgcgucggcggccgcugccacccccacgucaacggcgucuucuucaacggcaucauccucggccccgacggccacguccucauccccgagaugcaguccucccuccuccagcagcacauggagcuccucgaguccuccgucaucccccucaugcacccccucgccgaccccuccaccgucuucaaggacgacgacgaggccgaggacuucgucgagguccaccuccccgacguccacaagcaggucuccggcgucgaccucggccuccccuccuggggcaaguacguccucauguccgccggcguccucaccgcccucaugcucaccaucuuccucaucaccugcugccgccgcgccaaccgcgccgaguccgcccagcacucccucggcgagcgcggccgcaaggucuccgucaccucccaguccggccgcgucaucuccuccugggaguccuacaaguccggcggcgagaccaagcucuga

SEQ ID NO: 126657 - RNA, 1575 nt, Artificial Sequence; identical to SEQ ID NO: 126637
  derived and/or modified CDS sequence (opt2) from glycoprotein__RABV__AB563871.1

SEQ ID NO: 126658 - RNA, 1575 nt, Artificial Sequence; identical to SEQ ID NO: 126637
  derived and/or modified CDS sequence (opt2) from glycoprotein__RABV__AB563873.1

SEQ ID NO: 126659 - RNA, 1575 nt, Artificial Sequence
  derived and/or modified CDS sequence (opt2) from glycoprotein__RABV__AB563874.1
augaacccccaggcccucauguucgucccccuccucgucuucucccucugcuucggcaaguuccccaucuacaccauccccgacaagcucggccccuggucccccaucgacauccaccaccucuccugccccaacaaccucgucgucgaggacgagggcugcaccaaccucuccggcuucuccuacauggagcucaaggucggcuacaucuccgccaucaaggucaacggcuucaccugcaccggcgucgucaccgaggccgagaccuacaccaacuucgucggcuacgucaccaccaccuucaagcgcaagcacuuccgccccacccccgacgccugccgcgccgccuacaacuggaagauggccggcgacccccgcuacgaggagucccuccacaaccccuaccccgacuaccacuggcuccgcaccgucaagaccaccaaggagucccucgucaucaucucccccuccgucgccgaccucgaccccuacgacaagucccuccacucccgcgucuuccccuccggcaagugcuccggcaucaccgucuccuccaccuacugcuccaccaaccacgacuacaccaucuggaugcccgagaacccccgccucggcaccuccugcgacaucuucaccaacucccgcggcaagcgcgccuccaagggcuccaagaccugcggcuucgucgacgagcgcggccucuacaagucccucaagggcgccugcaagcucaagcucugcggcguccucggccuccgccucauggacggcaccugggccgccauccagaccuccgacgagaccaaguggugcccccccgaccagcucgucaaccuccacgacuuccgcuccgacgagaucgagcaccucgucgucgaggagcucgucaagaagcgcgaggagugccucgacgcccucgaguccaucaugaccaccaaguccgucuccuuccgccgccucucccaccuccgcaagcucguccccggcuucggcaaggccuacaccaucuucaacaagacccucauggaggccgacgcccacuacaaguccguccgcaccuggaacgagaucauccccuccaagggcugccuccgcgucggcggccgcugccacccccacgucaacggcgucuucuucaacggcaucauccucggccccgacggccacguccucauccccgagaugcaguccucccuccuccagcagcacauggagcuccucgaguccuccgucaucccccucaugcacccccucgccgaccccuccaccgucuucaaggacgacgacgaggccgaggacuucgucgagguccaccuccccgacguccacaagcaggucuccggcgucgaccucggccucuccuccuggggcaaguacguccucauguccgccggcguccucaccgcccucaugcucaugaucuuccucaugaccugcugccgccgcgccaaccgcgccgaguccgcccagcacucccucggcgagcgcggccgcaaggucuccgucaccucccaguccggccgcgucaucuccuccugggaguccuacaaguccggcggcgagaccaagcucuga

SEQ ID NO: 126660 - RNA, 1575 nt, Artificial Sequence
  derived and/or modified CDS sequence (opt2) from glycoprotein__RABV__AB563875.1
augaacccccaggcccucauguucgucccccuccucgucuucucccucugcuucggcaaguuccccaucuacaccauccccgacaagcucggccccuggucccccaucgacauccaccaccucuccugccccaacaaccucgucgucgaggacgagggcugcaccaaccucuccggcuucuccuacauggagcucaaggucggcuacaucuccgccaucaaggucaacggcuucaccugcaccggcgucgucaccgaggccgagaccuacaccaacuucgucggcuacgucaccaccaccuucaagcgcaagcacuuccgccccacccccgacgccugccgcgccgccuacaacuggaagauggccggcgacccccgcuacgaggagucccuccacaaccccuaccccgacuaccacuggcuccgcaccgucaagaccaccaaggagucccucgucaucaucucccccuccgucgccgaccucgaccccuacgacaagucccuccacucccgcgucuuccccuccggcaagugcuccggcaucaccgucuccuccaccuacugcuccaccaaccacgacuacaccaucuggaugcccgagaacccccgccucggcaccuccugcgacaucuucaccaacucccgcggcaagcgcgccuccaagggcuccaagaccugcggcuucgucgacgagcgcggccucuacaagucccucaagggcgccugcaagcucaagcucugcggcguccucggccuccgccucauggacggcaccugggccgccauccagaccuccgacgagaccaaguggugcccccccgaccagcucgucaaccuccacgacuuccgcuccgacgagaucgagcaccucgucgucgaggagcucgucaagaagcgcgaggagugccucgacgcccucgaguccaucaugaccaccaaguccgucuccuuccgccgccucucccaccuccgcaagcucguccccggcuucggcaaggccuacaccaucuucaacaagacccucauggaggccgacgcccacuacaaguccguccgcaccuggaacgagaucauccccuccaagggcugccuccgcgucggcggccgcugccacccccacgucaacggcgucuucuucaacggcaucauccucggccccgacggccacguccucauccccgagaugcaguccucccuccuccagcagcacauggagcuccucgaguccuccgucaucccccucaugcacccccucgccgaccccuccaccgucuucaaggacgacgacgaggccgaggacuucgucgagguccaccuccccgacguccacaagcaggucuccggcgucgaccucggccuccccuccuggggcaaguacguccucauguccgccggcguccucaccgcccucaugcucaugaucuuccucaugaccugcugccgccgcgccaaccgcgccgaguccgcccagcacucccucggcgagcgccgccgcaaggucuccgucaccucccaguccggccgcgucaucuccuccugggaguccuacaaguccggcggcgagaccaagcucuga

SEQ ID NO: 126661 - RNA, 1575 nt, Artificial Sequence
  derived and/or modified CDS sequence (opt2) from glycoprotein__RABV__AB563878.1
augaucccccaggcccuccucuucgucccccuccucgucuucucccucugcuucggcaaguuccccaucuacaccauccccgacaagcucggccccuggucccccaucgacauccaccaccucuccugccccaacaaccucgucgucgaggacgagggcugcaccaaccucuccggcuucuccuacauggagcucaaggucggcuacaucuccgccaucaaggucaacggcuucaccugcaccggcgucgucaccgaggccgagaccuacaccaacuucgucggcuacgucaccaccaccuucaagcgcaagcacuuccgccccacccccgacgccugccgcgccgccuacaacuggaagauggccggcgacccccgcuacgaggagucccuccacaaccccuaccccgacuaccacuggcuccgcaccgucaagaccaccaaggagucccucgucaucaucucccccuccgucgccgaccucgaccccuacgacaagucccuccacucccgcgucuuccccuccggcaagugcuccggcaucaccgucuccuccaccuacugcuccaccaaccacgacuacaccaucuggaugcccgagaacccccgccucggcaccuccugcgacaucuucaccaacucccgcggcaagcgcgccuccaagggcuccaagaccugcggcuucgucgacgagcgcggccucuacaagucccucaagggcgccugcaagcucaagcucugcggcguccucggccuccgccucauggacggcaccugggccgccauccagaccuccgacgagaccaaguggugcccccccgaccagcucgucaaccuccacgacuuccgcuccgacgagaucgagcaccucgucgucgaggagcucgucaagaagcgcgaggagugccucgacgcccucgaguccaucaugaccaccaaguccgucuccuuccgccgccucucccaccuccgcaagcucguccccggcuucggcaaggccuacaccaucuucaacaagacccucauggaggccgacgcccacuacaaguccguccgcaccuggaacgagaucauccccuccaagggcugccuccgcgucggcggccgcugccacccccacgucaacggcgucuucuucaacggcaucauccucggccccgacggccacguccucauccccgagaugcaguccucccuccuccagcagcacauggagcuccucgaguccuccgucaucccccucaugcacccccucgccgaccccuccaccgucuucaaggacgacgacgaggccgaggacuucgucgagguccaccuccccgacguccacaagcaggucuccggcgucgaccucggccuccccuccuggggcaaguacguccucauguccgccggcguccucaccgcccucaugcucaugaucuuccucaccaccugcugccgccgcgccaaccgcgccgaguccgcccagcacucccucggcgagaagggccgcaaggucuccgucaccucccaguccggccgcgucaucuccuccugggaguccuacaaguccggcggcgagaccaagcucuga

SEQ ID NO: 126662 - RNA, 1575 nt, Artificial Sequence; identical to SEQ ID NO: 126608
  derived and/or modified CDS sequence (opt2) from glycoprotein__RABV__AB563879.1

SEQ ID NO: 126663 - RNA, 1575 nt, Artificial Sequence
  derived and/or modified CDS sequence (opt2) from glycoprotein__RABV__AB563881.1
augaucccccaggcccuccucuucgucccccuccucgucuucucccucugcuucggcaaguuccccaucuacaccauccccgacaagcucggccccuggucccccaucgacauccaccaccucuccugccccaacaaccucgucgucgaggacgagggcugcaccaaccucuccggcuucuccuaccucgagcucaaggucggcuacaucuccgccaucaaggucaacggcuucaccugcaccggcgucgucaccgaggccgagaccuacaccaacuucgucggcuacgucaccaccaccuucaagcgcaagcacuuccgccccacccccgacgccugccgcgccgccuacaacuggaagauggccggcgacccccgcuacgaggagucccuccacaaccccuaccccgacuaccacuggcuccgcaccgucaagaccaccaaggagucccucgucaucaucucccccuccgucgccgaccucgaccccuacgacaagucccuccacucccgcgucuuccccuccggcaagugcuccggcaucaccgucuccuccaccuacugcuccaccaaccacgacuacaccaucuggaugcccgagaacccccgccucggcaccuccugcgacaucuucaccaacucccgcggcaagcgcgccuccaagggcuccaagaccugcggcuucgucgacgagcgcggccucuacaagucccucaagggcgccugcaagcucaagcucugcggcguccucggccuccgccucauggacggcaccugggccgccauccagaccuccgacgagaccaaguggugcccccccgaccagcucgucaaccuccacgacuuccgcuccgacgagaucgagcaccucgucgucgaggagcucgucaagaagcgcgaggagugccucgacgcccucgaguccaucaugaccaccaaguccgucuccuuccgccgccucucccaccuccgcaagcucguccccggcuucggcaaggccuacaccaucuucaacaagacccucauggaggccgacgcccacuacaaguccguccgcaccuggaacgagaucauccccuccaagggcugccuccgcgucggcggccgcugccacccccacgucaacggcgucuucuucaacggcaucauccucggccccgacggccacguccucauccccgagaugcaguccucccuccuccagcagcacauggagcuccucgaguccuccgucaucccccucaugcacccccucgccgaccccuccaccgucuucaaggacgacgacgaggccgaggacuucgucgagguccaccuccccgacguccacaagcaggucuccggcgucgaccucggccuccccuccuggggcaaguacguccucauguccgccggcguccucaccgcccucaugcucaugaucuuccucaugaccugcugccgccgcgccaaccgcgccgacuccgcccagcacucccucggcgagggcgagcgcaaggucuccgucaccucccaguccggccgcgucaucuccuccugggaguccuacaaguccggcggcgagaccaagcucuga

SEQ ID NO: 126664 - RNA, 1575 nt, Artificial Sequence
  derived and/or modified CDS sequence (opt2) from glycoprotein__RABV__AB563883.1
augaucccccaggcccuccucuucguccccuuccucgucuucucccucugcuucggcaaguuccccaucuacaccauccccgacaagcucggccccuggucccccaucgacauccaccaccucuccugccccaacaaccucgucgucgaggacgagggcugcaccaaccucuccggcuucuccuacauggagcucaaggucggcuacaucuccgccaucaaggucaacggcuucaccugcaccggcgucgucaccgaggccgagaccuacaccaacuucgucggcuacgucaccaccaccuucaagcgcaagcacuuccgccccacccccgacgccugccgcgccgccuacaacuggaagauggccggcgacccccgcuacgaggagucccuccacaaccccuaccccgacuaccacuggcuccgcaccgucaagaccaccaaggagucccucgucaucaucucccccuccgucgccgaccucgaccccuacgacaagucccuccacucccgcgucuuccccuccggcaagugcuccggcaucaccgucuccuccaccuacugcuccaccaaccacgacuacaccaucuggaugcccgagaacccccgccucggcaccuccugcgacaucuucaccaacucccgcggcaagcgcgccuccaagggcuccaagaccugcggcuucgucgacgagcgcggccucuacaagucccucaagggcgccugcaagcucaagcucugcggcguccucggccuccgccucauggacggcaccugggccgccauccagaccuccgacgagaccaaguggugcccccccgaccagcucgucaaccuccacgacuuccgcuccgacgagaucgagcaccucgucgucgaggagcucgucaagaagcgcgaggagugccucgacgcccucgaguccaucaugaccaccaaguccgucuccuuccgccgccucucccaccuccgcaagcucguccccggcuucggcaaggccuacaccaucuucaacaagacccucauggaggccgacgcccacuacaaguccguccgcaccuggaacgagaucauccccuccaagggcugccuccgcgucggcggccgcugccacccccacgucaacggcgucuucuucaacggcaucauccucggccccgacggccacguccucauccccgagaugcaguccucccuccuccagcagcacauggagcuccucgaguccuccgucaucccccucaugcacccccucgccgaccccuccaccgucuucaaggacgacgacgaggccgaggacuucgucgagguccaccuccccgacguccacaagcaggucuccggcgucgaccucggccuccccuccuggggcaaguacguccucauguccgccggcguccucaccgcccucaugcucaccaucuuccucaugaccugcugccgccgcgccaaccgcgccgaguccgcccagcacucccucggcgagcgcggccgcaaggucuccgucaccucccaguccggccgcgucaucuccuccugggaguccuacaaguccggcggcgagaccaagcucuga

SEQ ID NO: 126665 - RNA, 1575 nt, Artificial Sequence
  derived and/or modified CDS sequence (opt2) from glycoprotein__RABV__AB563884.1
augaucccccaggcccuccucuucgucccccuccucgucuucucccucugcuucggcaaguuccccaucuacaccauccccgacaagcucggccccuggucccccaucgacauccaccaccucuccugccccaacaaccucgucgucgaggacgagggcugcaccaaccucuccggcuucuccuacauggagcucaaggucggcuacaucuccgccaucaaggucaacggcuucaccugcaccggcgucgucaccgaggccgagaccuacaccaacuucgucggcuacgucaccaccaccuucaagcgcaagcacuuccgccccacccccgacgccugccgcgccgccuacaacuggaagauggccggcgacccccgcuacgaggagucccuccacaaccccuaccccgacuaccacuggcuccgcaccgucaagaccaccaaggagucccucgucaucaucucccccuccgucgccgaccucgaccccuacgacaagucccuccacucccgcgucuuccccuccggcaagugcuccggcaucaccgucuccuccaccuacugcuccaccaaccacgacuacaccaucuggaugcccgagaacccccgccucggcaccuccugcgacaucuucaccaacucccgcggcaagcgcgccuccaagggcuccaagaccugcggcuucgucgacgagcgcggccucuacaagucccucaagggcgccugcaagcuccgccucugcggcguccucggccuccgccucauggacggcaccugggccgccauccagaccuccgacgagaccaaguggugcccccccgaccagcucgucaaccuccacgacuuccgcuccgacgagaucgagcaccucgucgucgaggagcucgucaagaagcgcgaggagugccucgacgcccucgaguccaucaugaccaccaaguccgucuccuuccgccgccucucccaccuccgcaagcucguccccggcuucggcaaggccuacaccaucuucaacaagacccucauggaggccgacgcccacuacaaguccguccgcaccuggaacgagaucauccccuccaagggcugccuccgcgucggcggccgcugccacccccacgucaacggcgucuucuucaacggcaucauccucggccccgacggccacguccucauccccgagaugcaguccucccuccuccagcagcacauggagcuccucgaguccuccgucaucccccucaugcacccccucgccgaccccuccaccgucuucaaggacgacgacgaggccgaggacuucgucgagguccaccuccccgacguccacaagcaggucuccggcgucgaccucggccuccccuccuggggcaaguacguccucauguccgccggcguccucaccgcccucaugcucaugaucuuccucaugaccugcugccgccgcgccaaccgcgccgaguccgcccagcacucccucggcgagcgcggccgcaaggucuccgucaccucccaguccggccgcgucaucuccuccugggaguccuacaaguccggcggcgagaccaagcucuga

SEQ ID NO: 126666 - RNA, 1575 nt, Artificial Sequence
  derived and/or modified CDS sequence (opt2) from glycoprotein__RABV__AB563886.1
augaucccccaggcccuccucuucgucccccuccucgucuucucccucugcuucggcaaguuccccaucuacaccauccccgacaagcucggccccuggucccccaucgacauccaccaccucuccugccccaacaaccucgucgucgaggacgagggcugcaccaaccucuccggcuucuccuacauggagcucaaggucggcuacaucuccgccaucaaggucaacggcuucaccugcaccggcgucgucaccgaggccgagaccuacaccaacuucgucggcuacgucaccaccaccuucaagcgcaagcacuuccgccccacccccgacgccugccgcgccgccuacaacuggaagauggccggcgacccccgcuacgaggagucccuccacaaccccuaccccgacuaccacuggcuccgcaccgucaagaccaccaaggagucccucgucaucaucucccccuccgucgccgaccucgaccccuacgacaagucccuccacucccgcgucuuccccuccggcaagugcuccggcaucaccgucuccuccaccuacugcuccaccaaccacgacuacaccaucuggaugcccgagaacccccgccucggcaccuccugcgacaucuucaccaacucccgcggcaagcgcgccuccaagggcuccaagaccugcggcuucgucgacgagcgcggccucuacaagucccucaagggcgccugcaagcucaagcucugcggcguccucggccuccgccucauggacggcaccugggccgccauccagaccuccgacgagaccaaguggugcccccccgaccagcucgucaaccuccacgacuuccgcuccgacgagaucgagcaccucgucgucgaggagcucgucaagaagcgcgaggagugccucgacgcccucgaguccaucaucaccaccaaguccgucuccuuccgccgccucucccaccuccgcaagcucguccccggcuucggcaaggccuacaccaucuucaacaagacccucauggaggccgacgcccacuacaaguccguccgcaccuggaacgagaucauccccuccaagggcugccuccgcgucggcggccgcugccacccccacgucaacggcgucuucuucaacggcaucauccucggccccgacggccacguccucauccccgagaugcaguccucccuccuccagcagcacauggagcuccucgaguccuccgucaucccccucaugcacccccucgccgaccccuccaccgucuucaaggacgacgacgaggccgaggacuucgucgagguccaccuccccgacguccacaagcaggucuccggcgucgaccucggccuccccuccuggggcaaguacguccucauguccgccggcguccucaccgcccucaugcucaugaucuuccucaugaccugcugccgccgcgccaaccgcgucgaguccgcccagcacucccucggcgagcgcggccgcaaggucuccgucaccucccaguccggccgcgucaucuccuccugggaguccuacaaguccggcggcgagaccaagcucuga

SEQ ID NO: 126667 - RNA, 1575 nt, Artificial Sequence; identical to SEQ ID NO: 126608
  derived and/or modified CDS sequence (opt2) from glycoprotein__RABV__AB563887.1

SEQ ID NO: 126668 - RNA, 1575 nt, Artificial Sequence; identical to SEQ ID NO: 126608
  derived and/or modified CDS sequence (opt2) from glycoprotein__RABV__AB563888.1

SEQ ID NO: 126669 - RNA, 1575 nt, Artificial Sequence
  derived and/or modified CDS sequence (opt2) from glycoprotein__RABV__AB563889.1
augaucccccaggcccuccucuucguccccauccucgucuucucccucugcuucggcaaguuccccaucuacaccauccccgacaagcucggccccuggucccccaucgacauccaccaccucuccugccccaacaaccucgucgucgaggacgagggcugcaccaaccucuccggcuucuccuacauggagcucaaggucggcuacaucuccgccaucaaggucaacggcuucaccugcaccggcgucgucaccgaggccgagaccuacaccaacuucgucggcuacgucaccaccaccuucaagcgcaagcacuuccgccccacccccgacgccugccgcgccgccuacaacuggaagauggccggcgacccccgcuacgaggagucccuccacaaccccuaccccgacuaccacuggcuccgcaccgucaagaccaccaaggagucccucgucaucaucucccccuccgucgccgaccucgaccccuacgacaagucccuccacucccgcgucuuccccuccggcaagugcuccggcaucaccgucuccuccaccuacugcuccaccaaccacgacuacaccaucuggaugcccgagaacccccgccucggcaccuccugcgacaucuucaccaacucccgcggcaagcgcgccuccaagggcuccaagaccugcggcuucgucgacgagcgcggccucuacaagucccucaagggcgccugcaagcucaagcucugcggcguccucggccuccgccucauggacggcaccugggccgccauccagaccuccgacgagaccaaguggugcccccccgaccagcucgucaaccuccacgacuuccgcuccgacgagaucgagcaccucgucgucgaggagcucgucaagaagcgcgaggagugccucgacgcccucgaguccaucaugaccaccaaguccgucuccuuccgccgccucucccaccuccgcaagcucguccccggcuucggcaaggccuacaccaucuucaacaagacccucauggaggccgacgcccacuacaaguccguccgcaccuggaacgagaucauccccuccaagggcugccuccgcgucggcggccgcugccacccccacgucaacggcgucuucuucaacggcaucauccucggccccgacggccacguccucauccccgagaugcaguccucccuccuccagcagcacauggagcuccucgaguccuccgucaucccccucaugcacccccucgccgaccccuccaccgucuucaaggacgacgacgaggccgaggacuucgucgagguccaccuccccgacguccacaagcaggucuccggcgucgaccucggccuccccuccuggggcaaguacguccucauguccgccggcguccucaccgcccucaugcucaugaucuuccucaugaccugcugccgccgcgccaaccgcgucgaguccgcccagcacucccucggcgagcgcggccgcaaggucuccgucaccucccaguccggccgcgucaucuccuccugggaguccuacaaguccggcggcgagaccaagcucuga

SEQ ID NO: 126670 - RNA, 1575 nt, Artificial Sequence
  derived and/or modified CDS sequence (opt2) from glycoprotein__RABV__AB563890.1
augaucccccaggcccuccucuucgucccccuccucgucuucucccucugcuucggcaaguuccccaucuacaccauccccgacaagcucggccccuggucccccaucgacauccaccaccucuccugccccaacaaccucgucgucgaggacgagggcugcaccaaccucuccggcuucuccuacauggagcucaaggucggcuacaucuccgccaucaaggucaacggcuucaccugcaccggcgucgucaccgaggccgagaccuacaccaacuucgucggcuacgucaccaccaccuucaagcgcaagcacuuccgccccaugcccgacgccugccgcgccgccuacaacuggaagauggccggcgacccccgcuacgaggagucccuccacaaccccuaccccgacuaccacuggcuccgcaccgucaagaccaccaaggagucccucgucaucaucucccccuccgucgccgaccucgaccccuacgacaagucccuccacucccgcgucuuccccuccggcaagugcuccggcaucaccgucuccuccaccuacugcuccaccaaccacgacuacaccaucuggaugcccgagaacccccgccucggcaccuccugcgacaucuucaccaacucccgcggcaagcgcgccuccaagggcuccaagaccugcggcuucgucgacgagcgcggccucuacaagucccucaagggcgccugcaagcucaagcucugcggcguccucggccuccgccucauggacggcaccugggccgccauccagaccuccgacgagaccaaguggugcccccccgaccagcucgucaaccuccacgacuuccgcuccgacgagaucgagcaccucgucgucgaggagcucgucaagaagcgcgaggagugccucgacgcccucgaguccaucaugaccaccaaguccgucuccuuccgccgccucucccaccuccgcaagcucguccccggcuucggcaaggccuacaccaucuucaacaagacccucauggaggccgacgcccacuacaaguccguccgcaccuggaacgagaucauccccuccaagggcugccuccgcgucggcggccgcugccacccccacgucaacggcgucuucuucaacggcaucauccucggccccgacggccacguccucauccccgagaugcaguccucccuccuccagcagcacauggagcuccucgaguccuccgucaucccccucaugcacccccucgccgaccccuccaccgucuucaaggacgacgacgaggccgaggacuucgucgagguccaccuccccgacguccacaagcaggucuccggcgucgaccucggccuccccuccuggggcaaguacguccucauguccgccggcguccucaccguccucaugcucaugaucuucuucaugaccugcugccgccgcgccaaccgcgucgaguccgcccagcacucccucggcgagcgcggccgcaaggucuccgucaccucccaguccggccgcgucaucuccuccugggaguccuacaaguccggcggcgagaccaagcucuga

SEQ ID NO: 126671 - RNA, 1575 nt, Artificial Sequence
  derived and/or modified CDS sequence (opt2) from glycoprotein__RABV__AB563891.1
augaucccccaggcccuccucuucgucccccuccucgucuucucccucugcuucggcaaguuccccaucuacaccauccccgacaagcucggccccuggucccccaucgacauccaccaccucuccugccccaacaaccucgucgucgaggacgagggcugcaccaaccucuccggcuucuccuacauggagcucaaggucggcuacaucuccgccaucaaggucaacggcuucaccugcaccggcgucgucaccgaggccgagaccuacaccaacuucgucggcuacgucaccaccaccuucaagcgcaagcacuuccgccccaugcccgacgccugccgcgccgccuacaacuggaagauggccggcgacccccgcuacgaggagucccuccacaaccccuaccccgacuaccacuggcuccgcaccgucaagaccaccaaggagucccucgucaucaucucccccuccgucgccgaccucgaccccuacgacaagucccuccacucccgcgucuuccccuccggcaagugcuccggcaucaccgucuccuccaccuacugcuccaccaaccacgacuacaccaucuggaugcccgagaacccccgccucggcaccuccugcgacaucuucaccaacucccgcggcaagcgcgccuccaagggcuccaagaccugcggcuucgucgacgagcgcggccucuacaagucccucaagggcgccugcaagcucaagcucugcggcguccucggccuccgccucauggacggcaccugggccgccauccagaccuccgacgagaccaaguggugcccccccgaccagcucgucaaccuccacgacuuccgcuccgacgagaucgagcaccucgucgucgaggagcucgucaagaagcgcgaggagugccucgacgcccucgaguccaucaugaccaccaaguccgucuccuuccgccgccucucccaccuccgcaagcucguccccggcuucggcaaggccuacaccaucuucaacaagacccucauggaggccgacgcccacuacaaguccguccgcaccuggaacgagaucauccccuccaagggcugccuccgcgucggcggccgcugccacccccacgucaacggcgucuucuucaacggcaucauccucggccccgacggccgcguccucauccccgagaugcaguccucccuccuccagcagcacauggagcuccucgaguccuccgucaucccccucaugcacccccucgccgaccccuccaccgucuucaaggacgacgacgaggccgaggacuucgucgagguccaccuccccgacguccacaagcaggucuccggcgucgaccucggccuccccuccuggggcaaguacguccucauguccgccggcguccucaccguccucaugcucaugaucuucuucaugaccugcugccgccgcgccaaccgcgucgaguccgcccagcacucccucggcgagcgcggccgcaaggucuccgucaccucccaguccggccgcgucaucuccuccugggaguccuacaaguccggcggcgagaccaagcucuga

SEQ ID NO: 126672 - RNA, 1575 nt, Artificial Sequence
  derived and/or modified CDS sequence (opt2) from glycoprotein__RABV__AB563892.1
augaucccccaggcccuccucuucgucccccuccucgucuucucccucugcuucggcaaguuccccaucuacaccauccccgacaagcucggccccuggucccccaucgacauccaccaccucuccugccccaacaaccucgucgucgaggacgagggcugcaccaaccucuccggcuucuccuacauggagcucaaggucggcuacaucuccgccaucaaggucaacggcuucaccugcaccggcgucgucaccgaggccgagaccuacaccaacuucgucggcuacgucaccaccaccuucaagcgcaagcacuuccgccccacccccgacgccugccgcgccgccuacaacuggaagauggccggcgacccccgcuacgaggagucccuccacaaccccuaccccgacuaccacuggcuccgcaccgucaagaccaccaaggagucccucgucaucaucucccccuccgucgccgaccucgaccccuacgacaagucccuccacucccgcgucuuccccuccggcaagugcuccggcaucaccgucuccuccaccuacugcuccaccaaccacgacuacaccaucuggaugcccgagaacccccgccucggcaccuccugcgacaucuucaccaacucccgcggcaagcgcgccuccaagggcuccaagaccugcggcuucgucgacgagcgcggccucuacaagucccucaagggcgccugcaagcucaagcucugcggcguccucggccuccgccucauggacggcaccugggccgccauccagaccuccgacgagaccaaguggugcccccccgaccagcucgucaaccuccacgacuuccgcuccgacgagaucgagcaccucgucgucgaggagcucgucaagaagcgcgaggagugccucgacgcccucgaguccaucaugaccaccaaguccgucuccuuccgccgccucucccaccuccgcaagcucguccccggcuucggcaaggccuacaccaucuucaacaagacccucauggaggccgacgcccacuacaaguccguccgcaccuggaacgagaucauccccuccaagggcugccuccgcgucggcggccgcugccacccccacgucaacggcgucuucuucaacggcaucauccucggccccgacggccacguccucauccccgagaugcaguccucccuccuccagcagcacauggagcuccucgaguccuccgucaucccccucaugcacccccucgccgaccccuccaccgucuucaaggacgacgacgaggccgaggacuucgucgagguccaccuccccgacguccacaagcaggucuccggcgucgaccucggccuccccuccuggggcaaguacguccucauguccgccggcguccucaccguccucaugcucaugaucuucuucaugaccugcugccgccgcgccaaccgcgucgaguccgcccagcacucccucggcgagcgcggccgcaaggucuccgucaccucccaguccggccgcgucaucuccuccugggaguccuacaaguccggcggcgagaccaagcucuga

SEQ ID NO: 126673 - RNA, 1575 nt, Artificial Sequence; identical to SEQ ID NO: 126670
  derived and/or modified CDS sequence (opt2) from glycoprotein__RABV__AB563893.1

SEQ ID NO: 126674 - RNA, 1575 nt, Artificial Sequence; identical to SEQ ID NO: 126670
  derived and/or modified CDS sequence (opt2) from glycoprotein__RABV__AB563894.1

SEQ ID NO: 126675 - RNA, 1575 nt, Artificial Sequence
  derived and/or modified CDS sequence (opt2) from glycoprotein__RABV__AB563900.1
augaucccccaggcccucauguucgucccccuccucgucuucucccucugcuucggcaaguuccccaucuacaccauccccgacaagcucggccccuggucccccaucgacauccaccaccucuccugccccaacaaccucgucgucgaggacgagggcugcaccaaccucuccggcuucuccuacauggagcucaaggucggcuacaucuccgccaucaaggucaacggcuucaccugcaccggcgucgucaccgaggccgagaccuacaccaacuucgucggcuacgucaccaccaccuucaagcgcaagcacuuccgccccaugcccgacgccugccgcgccgccuacaacuggaagauggccggcgacccccgcuacgaggagucccuccacaaccccuaccccgacuaccacuggcuccgcaccgucaagaccaccaaggagucccucgucaucaucucccccuccgucgccgaccucgaccccuacgacaagucccuccacucccgcgucuuccccuccggcaagugcuccggcaugaccgucuccuccaccuacugcuccaccaaccacgacuacaccaucuggaugcccgagaacccccgccucggcaccuccugcgacaucuucaccaacucccgcggcaagcgcgccuccaagggcuccaagaccugcggcuucgucgacgagcgcggccucuacaagucccucaagggcgccugcaagcucaagcucugcggcguccucggccuccgccucauggacggcaccugggccgccauccagaccuccgacgagaccaaguggugcccccccgaccagcucgucaaccuccacgacuuccgcuccgacgagaucgagcaccucgucgucgaggagcucgucaagaagcgcgaggagugccucgacgcccucgaguccaucaugaccaccaaguccgucuccuuccgccgccucucccaccuccgcaagcucguccccggcuucggcaaggccuacaccaucuucaacaagacccucauggaggccgacgcccacuacaaguccguccgcaccuggaacgagaucauccccuccaagggcugccuccgcgucggcggccgcugccacccccacgucaacggcgucuucuucaacggcaucauccucggccccgacggccacguccucauccccgagaugcaguccucccuccuccagcagcacauggagcuccucgaguccuccgucaucccccucaugcacccccucgccgaccccuccaccgucuucaagggcgacgacgaggccgaggacuucgucgagguccaccuccccgacguccacaagcaggucuccggcgucgaccucggccuccccuccuggggcaaguacguccucauguccgccggcguccucaccgcccucaugcucaugaucuuccucaugaccugcugcaagcgcgccaaccgcgccgaguccgcccaccacucccucggcgagcgcggccgcaaggucuccgucaccucccaguccggccgcgucaucuccuccugggaguccuacaaguccggcggcgagaccaagcucuga

SEQ ID NO: 126676 - RNA, 1575 nt, Artificial Sequence
  derived and/or modified CDS sequence (opt2) from glycoprotein__RABV__AB563901.1
augaucccccaggcccuccucuucgucccccuccucgucuucucccucugcuucggcaaguuccccaucuacaccauccccgacaagcucggccccuggucccccaucgacauccaccaccucuccugccccaacaaccucgucgucgaggacgagggcugcaccaaccucuccggcuucuccuacauggagcucaaggucggcuacaucuccgccaucaaggucaacggcuucaccugcaccggcgucgucaccgaggccgagaccuacaccaacuucgucggcuacgucaccaccaccuucaagcgcaagcacuuccgccccacccccgacgccugccgcgccgccuacaacuggaagauggccggcgacccccgcuacgaggagucccuccacaaccccuaccccgacuaccacuggcuccgcaccgucaagaccaccaaggagucccucgucaucaucucccccuccgucgccgaccucgaccccuacgacaagucccuccacucccgcgucuuccccuccggcaagugcuccggcaucaccgucuccuccaccuacugcuccaccaaccacgacuacaccaucuggaugcccgagaacccccgccucggcaccuccugcgacaucuucaccaacucccgcggcaagcgcgccuccaagggcuccaagaccugcggcuucgucgacgagcgcggccucuacaagucccucaagggcgccugcaagcucaagcucugcggcguccucggccuccgccucauggacggcaccugggccgccauccagaccuccgacgagaccaaguggugcccccccgaccagcucgucaaccuccacgacuuccgcuccgacgagaucgagcaccucgucgucgaggagcucgucaagaagcgcgaggagugccucgacgcccucgaguccaucaugaccaccaaguccgucuccuuccgccgccucucccaccuccgcaagcucguccccggcuucggcaaggccuacaccaucuucaacaagacccucauggaggccgacgcccacuacaaguccguccgcaccuggaacgagaucauccccuccaagggcugccuccgcgucggcggccgcugccacccccacgucaacggcgucuucuucaacggcaucauccucggccccgacggccacguccucauccccgagaugcaguccucccuccuccagcagcacauggagcuccucgaguccuccgucaucccccucaugcacccccucgccgaccccuccaccgucuucaaggacgacgacgaggccgaggacuucgucgagguccaccuccccgacguccacaagcaggucuccggcgucgaccucggccuccccuccuggggcaaguacguccucauguccgccggcguccucaccgcccucaugcucaccaucuuccucaugaccugcugccgccgcgccaaccgcgccgaguccgcccagcacucccucggcgagcgcggccgcaaggucuccgucaccccccaguccggccgcgucaucuccuccugggaguccuacaaguccggcggcgagaccaagcucuga

SEQ ID NO: 126677 - RNA, 1575 nt, Artificial Sequence; identical to SEQ ID NO: 126608
  derived and/or modified CDS sequence (opt2) from glycoprotein__RABV__AB563904.1

SEQ ID NO: 126678 - RNA, 1575 nt, Artificial Sequence; identical to SEQ ID NO: 126652
  derived and/or modified CDS sequence (opt2) from glycoprotein__RABV__AB563907.1

SEQ ID NO: 126679 - RNA, 1575 nt, Artificial Sequence; identical to SEQ ID NO: 126670
  derived and/or modified CDS sequence (opt2) from glycoprotein__RABV__AB563911.1

SEQ ID NO: 126680 - RNA, 1575 nt, Artificial Sequence
  derived and/or modified CDS sequence (opt2) from glycoprotein__RABV__AB563912.1
augaucccccaggcccuccucuucgucccccuccucgucuucucccucugcuucggcaaguuccccaucuacaccauccccgacaagcucggccccuggucccccaucgacauccaccaccucuccugccccaacaaccucgucgucgaggacgagggcugcaccaaccucuccggcuucuccuacauggagcucaaggucggcuacaucuccgccaucaaggucaacggcuucaccugcaccggcgucgucaccgaggccgagaccuacaccaacuucgucggcuacgucaccaccaccuucaagcgcaagcacuuccgccccaugcccgacgccugccgcgccgccuacaacuggaagauggccggcgacccccgcuacgaggagucccuccacaaccccuaccccgacuaccacuggcuccgcaccgucaagaccaccaaggagucccucgucaucaucucccccuccgucgccgaccucgaccccuacgacaagucccuccacucccgcgucuuccccuccggcaagugcuccggcaucaccgucuccuccaccuacugcuccaccaaccacgacuacaccaucuggaugcccgagaacccccgccucggcaccuccugcgacaucuucaccaacucccgcggcaagcgcgccuccaagggcuccaagaccugcggcuucgucgacgagcgcggccucuacaagucccucaagggcgccugcaagcucaagcucugcggcguccucggccuccgccucauggacggcaccugggccgccauccagaccuccgacgagaccaaguggugcccccccgaccagcucgucaaccuccacgacuuccgcuccgacgagaucgagcaccucgucgucgaggagcucgucaagaagcgcgaggagugccucgacgcccucgaguccaucaugaccaccaaguccgucuccuuccgccgccucucccaccuccgcaagcucguccccggcuucggcaaggccuacaccaucuucaacaagacccucauggaggccgacgcccacuacaaguccguccgcaccuggaacgagaucauccccuccaagggcugccuccgcgucggcggccgcugccacccccacgucaacggcgucuucuucaacggcaucauccucggccccgacggccacguccucauccccgagaugcaguccucccuccuccagcagcacauggagcuccucgaguccuccgucaucccccucaugcacccccucgccgaccccuccaccgucuucaaggacgacgacgaggccgaggacuucgucgagguccaccuccccgacguccacaagcaggucuccggcgucgaccucggccuccccuccuggggcaaguacguccucauguccaccggcguccucaccguccucaugcucaugaucuucuucaugaugugcugccgccgcgccaaccgcgucgaguccgcccagcacucccucggcgagcgcggccgcaaggucuccgucaccucccaguccggccgcgucaucuccuccugggaguccuacaaguccggcggcgagaccaagcucuga

SEQ ID NO: 126681 - RNA, 1575 nt, Artificial Sequence; identical to SEQ ID NO: 126670
  derived and/or modified CDS sequence (opt2) from glycoprotein__RABV__AB563913.1

SEQ ID NO: 126682 - RNA, 1575 nt, Artificial Sequence
  derived and/or modified CDS sequence (opt2) from glycoprotein__RABV__AB563914.1
augaucccccaggcccuccucuucgucccccuccucgucuucucccucugcuucggcaaguuccccaucuacaccauccccgacaagcucggccccuggucccccaucgacauccaccaccucuccugccccaacaaccucgucgucgaggacgagggcugcaccaaccucuccggcuucuccuacauggagcucaaggucggcuacaucuccgccaucaaggucaacggcuucaccugcaccggcgucgucaccgaggccgagaccuacaccaacuucgucggcuacgucaccaccaccuucaagcgcaagcacuuccgccccaugcccgacgccugccgcgccgccuacaacuggaagauggccggcgacccccgcuacgaggagucccuccacaaccccuaccccgacuaccacuggcuccgcaccgucaagaccaccaaggagucccucgucaucaucucccccuccgucgccgaccucgaccccuacgacaagucccuccacucccgcgucuuccccuccggcaagugcuccggcaucaccgucuccuccaccuacugcuccaccaaccacgacuacaccaucuggaugcccgagaacccccgccucggcaccuccugcgacaucuucaccaacucccgcggcaagcgcgccuccaagggcuccaagaccugcggcuucgucgacgagcgcggccucuacaagucccucaagggcgccugcaagcucaagcucugcggcguccucggccuccgccucauggacggcaccugggccgccauccagaccuccgacgagaccaaguggugcccccccgaccagcucgucaaccuccacgacuuccgcuccgacgagaucgagcaccucgucgucgaggagcucgucaagaagcgcgaggagugccucgacgcccucgaguccaucaugaccaccaaguccgucuccuuccgccgccucucccaccuccgcaagcucguccccggcuucggcaaggccuacaccaucuucaacaagacccucauggaggccgacgcccacuacaaguccguccgcaccuggaacgagaucauccccuccaagggcugccuccgcgucggcggccgcugccacccccacgucaacggcgucuucuucaacggcaucauccucggccccgacggccacguccucauccccgagaugcaguccuaccuccuccagcagcacauggagcuccucgaguccuccgucaucccccucaugcacccccucgccgaccccuccaccgucuucaaggacgacgacgaggccgaggacuucgucgagguccaccuccccgacguccacaagcaggucuccggcgucgaccucggccuccccuccuggggcaaguacguccucauguccgccggcguccucaccguccucaugcucaugaucuucuucaugaccugcugccgccgcgccaaccgcgucgaguccgcccagcacucccucggcgagcgcggccgcaaggucuccgucaccucccaguccggccgcgucaucuccuccugggaguccuacaaguccggcggcgagacccgccucuga

SEQ ID NO: 126683 - RNA, 1575 nt, Artificial Sequence; identical to SEQ ID NO: 126670
  derived and/or modified CDS sequence (opt2) from glycoprotein__RABV__AB563915.1

SEQ ID NO: 126684 - RNA, 1575 nt, Artificial Sequence; identical to SEQ ID NO: 126637
  derived and/or modified CDS sequence (opt2) from glycoprotein__RABV__AB563921.1

SEQ ID NO: 126685 - RNA, 1575 nt, Artificial Sequence
  derived and/or modified CDS sequence (opt2) from glycoprotein__RABV__AB563922.1
augaacccccaggcccucauguucgucccccuccucgucuucucccucugcuucggcaaguuccccaucuacaccauccccgacaagcucggccccuggucccccaucgacauccaccaccucuccugccccaacaaccucgucgucgaggacgagggcugcaccaaccucuccggcuucuccuacauggagcucaaggucggcuacaucuccgccaucaaggucaacggcuucaccugcaccggcgucgucaccgaggccgagaccuacaccaacuucgucggcuacgucaccaccaccuucaagcgcaagcacuuccgccccacccccgacgccugccgcgccuccuacaacuggaagauggccggcgacccccgcuacgaggagucccuccacaaccccuaccccgacuaccacuggcuccgcaccgucaagaccaccaaggagucccucgucaucaucucccccuccgucgccgaccucgaccccuacgacaagucccuccacucccgcgucuuccccuccggcaagugcuccggcaucaccgucuccuccaccuacugcuccaccaaccacgacuacaccaucuggaugcccgagaacccccgccucggcaccuccugcgacaucuucaccaacucccgcggcaagcgcgccuccaagggcuccaagaccugcggcuucgucgacgagcgcggccucuacaagucccucaagggcgccugcaagcucaagcucugcggcguccucggccuccgccucauggacggcaccugggccgccauccagaccuccgacgagaccaaguggugcccccccgaccagcucgucaaccuccacgacuuccgcuccgacgagaucgagcaccucgucgucgaggagcucgucaagaagcgcgaggagugccucgacgcccucgaguccaucaugaccaccaaguccgucuccuuccgccgccucucccaccuccgcaagcucguccccggcuucggcaaggccuacaccaucuucaacaagacccucauggaggccgacgcccacuacaaguccguccgcaccuggaacgagaucauccccuccaagggcugccuccgcgucggcggccgcugccacccccacgucaacggcgucuucuucaacggcaucauccucggccccgacggccacguccucauccccgagaugcaguccucccuccuccagcagcacauggagcuccucgaguccuccgucaucccccucaugcacccccucgccgaccccuccaccgucuucaaggacgacgacgaggccgaggacuucgucgagguccaccuccccgacguccacaagcaggucuccggcgucgaccucggccuccccuccuggggcaaguacguccucauguccgccggcguccucaccgcccucaugcucaugaucuuccucaugaccugcugccgccgcgccaaccgcgccgaguccgcccagcacucccucggcgagcgcggccgcaaggucuccgucaccucccaguccggccgcgucaucuccuccugggaguccuacaaguccggcggcgagaccaagcucuga

SEQ ID NO: 126686 - RNA, 1575 nt, Artificial Sequence
  derived and/or modified CDS sequence (opt2) from glycoprotein__RABV__AB563923.1
augaucccccaggcccucauguucgucccccuccucgucuucucccucugcuucggcaaguuccccaucuacaccauccccgacaagcucggccccuggucccccaucgacauccaccaccucuccugccccaacaaccucgucgucgaggacgagggcugcaccaaccucuccggcuucuccuacauggagcucaaggucggcuacaucuccgccaucaaggucaacggcuucaccugcaccggcgucgucaccgaggccgagaccuacaccaacuucgucggcuacgucaccaccaccuucaagcgcaagcacuuccgccccacccccgacgccugccgcgccgccuacaacuggaagauggccggcgacccccgcuacgaggagucccuccacaaccccuaccccgacuaccacuggcuccgcaccgucaagaccaccaaggagucccucgucaucaucucccccuccgucgccgaccucgaccccuacgacaagucccuccacucccgcgucuuccccuccggcaagugcuccggcaucaccgucuccuccaccuacugcuccaccaaccacgacuacaccaucuggaugcccgagaacccccgccucggcaccuccugcgacaucuucaccaacucccgcggcaagcgcgccuccaagggcuccaagaccugcggcuucgucgacgagcgcggccucuacaagucccucaagggcgccugcaagcucaagcucugcggcguccucggccuccgccucauggacggcaccugggccgccauccagaccuccgacgagaccaaguggugcccccccgaccagcucgucaaccuccacgacuuccgcuccgacgagaucgagcaccucgucgucgaggagcucguccgcaagcgcgaggagugccucgacgcccucgaguccaucaugaccaccaaguccgucuccuuccgccgccucucccaccuccgcaagcucguccccggcuucggcaaggccuacaccaucuucaacaagacccucauggaggccgacgcccacuacaaguccguccgcaccuggaacgagaucauccccuccaagggcugccuccgcgucggcggccgcugccacccccacgucaacggcgucuucuucaacggcaucauccucggccccgacggccacguccucauccccgagaugcaguccucccuccuccagcagcacauggagcuccucgaguccuccgucaucccccucaugcacccccucgccgaccccuccaccgucuucaaggacgacgacgaggccgaggacuucgucgagguccaccuccccgacguccacaagcaggucuccggcgucgaccucggccuccccuccuggggcaaguacguccucauguccgccggcguccucaccgcccucaugcucaugaucuuccucaugaccugcugccgccgcgccaaccgcgccgaguccgcccagcacucccucggcgagcgcggccgcaaggucuccgucaccucccaguccggccgcgucaucuccuccugggaguccuacaaguccggcggcgagaccaagcucuga

SEQ ID NO: 126687 - RNA, 1575 nt, Artificial Sequence
  derived and/or modified CDS sequence (opt2) from glycoprotein__RABV__AB563926.1
augaucccccaggcccuccucuucgucccccuccucgucuucucccucugcuucggcaaguuccccaucuacaccauccccgacaagcucggccccuggucccccaucgacauccaccaccucuccugccccaacaaccucgucgucgaggacgagggcugcaccaaccucuccggcuucuccuacauggagcucaaggucggcuacaucuccgccaucaaggucaacggcuucaccugcaccggcgucgucaccgaggccgagaccuacaccaacuucgucggcuacgucaccaccaccuucaagcgcaagcacuuccgccccacccccgacgccugccgcgccgccuacaacuggaagauggccggcgacccccgcuacgaggagucccuccacaaccccuaccccgacuaccacuggcuccgcaccgucaagaccaccaaggagucccucgucaucaucucccccuccgucgccgaccucgaccccuacgacaagucccuccacucccgcgucuuccccuccggcaagugcuccggcaucaccgucuccuccaccuacugcuccaccaaccacgacuacaccaucuggaugcccgagaacccccgccucggcaccuccugcgacaucuucaccaacucccgcggcaagcgcgccuccaagggcuccaagaccugcggcuucgucgacgagcgcggccucuacaagucccucaagggcgccugcaagcucaagcucugcggcguccucggccuccgccucauggacggcaccugggccgccauccagaccuccgacgagaccaaguggugcccccccgaccagcucgucaaccuccacgacuuccgcuccgacgagaucgagcaccucgucgucgaggagcucgucaagaagcgcgaggagugccucgacgcccucgaguccaucaugaccaccaaguccgucuccuuccgccgccucucccaccuccgcaagcucguccccggcuucggcaaggccuacaccaucuucaacaagacccucauggaggccgacgcccacuacaaguccguccgcaccuggaacgagaucauccccuccaagggcugccuccgcgucggcggccgcugccacccccacgucaacggcgucuucuucaacggcaucauccucggccccgacggccacguccucauccccgagaugcaguccucccuccuccagcagcacauggagcuccucgaguccuccgucaucccccucaugcacccccucgccgaccccuccaccgucuucaaggacgacgacgaggccgaggacuucgucgagguccaccuccccgacguccacaagcaggucuccggcgucgaccucggccuccccuccuggggcaaguacguccucauguccgccggcguccucaccgcccucaugcucaugaucuuccucaugaccugcugccgccgcgccaaccgcgccgaguccgcccagcacucccucggcgagggcgagcgcaaggucuccgucaccucccaguccggccgcgucaucuccuccugggaguccuacaaguccggcggcgagaccaagcucuga

SEQ ID NO: 126688 - RNA, 1575 nt, Artificial Sequence; identical to SEQ ID NO: 126638
  derived and/or modified CDS sequence (opt2) from glycoprotein__RABV__AB563927.1

SEQ ID NO: 126689 - RNA, 1575 nt, Artificial Sequence; identical to SEQ ID NO: 126634
  derived and/or modified CDS sequence (opt2) from glycoprotein__RABV__AB563928.1

SEQ ID NO: 126690 - RNA, 1575 nt, Artificial Sequence
  derived and/or modified CDS sequence (opt2) from glycoprotein__RABV__AB563929.1
augaucccccaggcccuccucuucgucccccuccucgucuucucccucugcuucggcaaguuccccaucuacaccauccccgacaagcucggccccuggucccccaucgacauccaccaccucuccugccccaacaaccucgucgucgaggacgagggcugcaccaaccucuccggcuucuccuacauggagcucaaggucggcuacaucuccgccaucaaggucaacggcuucaccugcaccggcgucgucaccgaggccgagaccuacaccaacuucgucggcuacgucaccaccaccuucaagcgcaagcacuuccgccccacccccgacgccugccgcgccgccuacaacuggaagauggccggcgacccccgcuacgaggagucccuccacaaccccuaccccgacuaccacuggcuccgcaccgucaagaccaccaaggagucccucgucaucaucucccccuccgucgccgaccucgaccccuacgacaagucccuccacucccgcgucuuccccuccggcaagugcuccggcaucaccgucuccuccaccuacugcuccaccaaccacgacuacaccaucuggaugcccgagaacccccgccucggcaccuccugcgacaucuucaccaacucccgcggcaagcgcgccuccaagggcuccaagaccugcggcuucgucgacgagcgcggccucuacaagucccucaagggcgccugcaagcucaagcucugcggcguccucggccuccgccucaucgacggcaccugggccgccauccagaccuccgacgagaccaaguggugcccccccgaccagcucgucaaccuccacgacuuccgcuccgacgagaucgagcaccucgucgucgaggagcucgucaagaagcgcgaggagugccucgacgcccucgaguccaucaugaccaccaaguccgucuccuuccgccgccucucccaccuccgcaagcucguccccggcuucggcaaggccuacaccaucuucaacaagacccucauggaggccgacgcccacuacaaguccguccgcaccuggaacgagaucauccccuccaagggcugccuccgcgucggcggccgcugccacccccacgucaacggcgucuucuucaacggcaucauccucggccccgacggccacguccucauccccgagaugcaguccucccuccuccagcagcacauggagcuccucgaguccuccgucaucccccucaugcacccccucgccgaccccuccaccgucuucaaggacgacgacgaggccgaggacuucgucgagguccaccuccccgacguccacaagcaggucuccggcgucgaccucggccuccccuccuggggcaaguacguccucauguccgccggcguccucaccgcccucaugcucaugaucuuccucaccaccugcugccgccgcgccaaccgcgccgaguccgcccagcacucccucggcgagcgcggccgcaaggucuccgucaccucccaguccggccgcgucaucuccuccugggaguccuacaaguccggcggcgagaccaagcucuga

SEQ ID NO: 126691 - RNA, 1575 nt, Artificial Sequence; identical to SEQ ID NO: 126640
  derived and/or modified CDS sequence (opt2) from glycoprotein__RABV__AB563930.1

SEQ ID NO: 126692 - RNA, 1575 nt, Artificial Sequence; identical to SEQ ID NO: 126634
  derived and/or modified CDS sequence (opt2) from glycoprotein__RABV__AB563931.1

SEQ ID NO: 126693 - RNA, 1575 nt, Artificial Sequence; identical to SEQ ID NO: 126669
  derived and/or modified CDS sequence (opt2) from glycoprotein__RABV__AB563933.2

SEQ ID NO: 126694 - RNA, 1575 nt, Artificial Sequence; identical to SEQ ID NO: 126608
  derived and/or modified CDS sequence (opt2) from glycoprotein__RABV__AB563934.1

SEQ ID NO: 126695 - RNA, 1575 nt, Artificial Sequence; identical to SEQ ID NO: 126640
  derived and/or modified CDS sequence (opt2) from glycoprotein__RABV__AB563937.1

SEQ ID NO: 126696 - RNA, 1575 nt, Artificial Sequence
  derived and/or modified CDS sequence (opt2) from glycoprotein__RABV__AB563938.1
augaucccccaggcccuccucuucgucccccuccucgucuucucccucugcuucggcaaguuccccaucuacaccauccccgacaagcucggccccuggucccccaucgacauccaccaccucuccugccccaacaaccucgucgucgaggacgagggcugcaccaaccucuccggcuucuccuacauggagcucaaggucggcuacaucuccgccaucaaggucaacggcuucaccugcaccggcgucgucaccgaggccgagaccuacaccaacuucgucggcuacgucaccaccaccuucaagcgcaagcacuuccgccccacccccgacgccugccgcgccgccuacaacuggaagauggccggcgacccccgcuacgaggagucccuccacaaccccuaccccgacuaccacuggcuccgcaccgucaagaccaccaaggagucccucgucaucaucucccccuccgucgccgaccucgaccccuacgacaagucccuccacucccgcgucuuccccuccggcaagugcuccggcaucaccgucuccuccaccuacugcuccaccaaccacgacuacaccaucuggaugcccgagaacccccgccucggcaccuccugcgacaucuucaccaacucccgcggcaagcgcgccuccaagggcuccaagaccugcggcuucgucgacgagcgcggccucuacaagucccucaagggcgccugcaagcucaagcucugcggcguccucggccuccgccucauggacggcaccugggccgccauccagaccuccgacgagaccaaguggugcccccccgaccagcucgucaaccuccacgacuuccgcuccgacgagaucgagcaccucgucgucgaggagcucgucaagaagcgcgaggagugccucgacgcccucgaguccaucaugaccaccaaguccgucuccuuccgccgccucucccaccuccgcaagcucguccccggcuucggcaaggccuacaccaucuucaacaagacccucauggaggccgacgcccacuacaaguccguccgcaccuggaacgagaucauccccuccaagggcugccuccgcgucggcggccgcugccacccccacgucaacggcgucuucuucaacggcaucauccucggccccgacggccacguccucauccccgagaugcaguccucccuccuccagcagcacauggagcuccucgaguccuccgucaucccccucaugcacccccucgccgaccccuccaccgucuucaaggacgacgacgaggccgaggacuucgucgagguccaccuccccgacguccacaagcaggucuccggcgucgaccucggccuccccuccuggggcaaguacguccucauguccgccggcguccucaccgcccucaugcucaugaucuuccucaugaccugcugcauccgcgccaaccgcgccgaguccgcccagcacucccucggcgagcgcggccgcaaggucuccgucaccucccaguccggccgcgucaucuccuccugggaguccuacaaguccggcggcgagaccaagcucuga

SEQ ID NO: 126697 - RNA, 1575 nt, Artificial Sequence; identical to SEQ ID NO: 126640
  derived and/or modified CDS sequence (opt2) from glycoprotein__RABV__AB563939.1

SEQ ID NO: 126698 - RNA, 1575 nt, Artificial Sequence
  derived and/or modified CDS sequence (opt2) from glycoprotein__RABV__AB563942.1
augaucccccaggcccuccucuucgucccccuccucgucuucucccucugcuucggcaaguuccccaucuacaccauccccgacaagcucggccccuggucccccaucgacauccaccaccucuccugccccaacaaccucgucgucgaggacgagggcugcaccaaccucuccggcuucuccuacauggagcucaaggucggcuacaucuccgccaucaaggucaacggcuucaccugcaccggcgucgucaccgaggccgagaccuacaccaacuucgucggcuacgucaccaccaccuucaagcgcaagcacuuccgccccacccccgacgccugccgcgccgccuacaacuggaagauggccggcgacccccgcuacgaggagucccuccacaaccccuaccccgacuaccacuggcuccgcaccgucaagaccaccaaggagucccucgucaucaucucccccuccgucgccgaccucgaccccuacgacaagucccuccacucccgcgucuuccccuccggcaagugcuccggcaucaccgucuccuccaccuacugcuccaccaaccacgacuacaccaucuggaugcccgagaacccccgccucggcaccuccugcgacaucuucaccaacucccgcggcaagcgcgccuccaagggcuccaagaccugcggcuucgucgacgagcgcggccucuacaagucccucaagggcgccugcaagcucaagcucugcggcguccucggccuccgccucauggacggcaccugggccgccauccagaccuccgacgagaccaaguggugcccccccgaccagcucgucaaccuccacgacuuccgcuccgacgagaucgagcaccucgucgucgaggagcucgucaagaagcgcgaggagugccucgacgcccucgaguccaucaugaccaccaaguccgucuccuuccgccgccucucccaccuccgcaagcucguccccggcuucggcaaggccuacaccaucuucaacaagacccucauggaggccgacgcccacuacaaguccguccgcaccuggaacgagaucauccccuccaagggcugccuccgcgucggcggccgcugccacccccacgucaacggcgucuucuucaacggcaucauccucggccccgacggccacguccucauccccgagaugcaguccucccuccuccagcagcacauggagcuccucgaguccuccaucaucccccucaugcacccccucgccgaccccuccaccgucuucaaggacgacgacgaggccgaggacuucgucgagguccaccuccccgacguccacaagcaggucuccggcgucgaccucggccuccccuccuggggcaaguacguccucauguccgccggcguccucaccgcccucaugcucaugaucuuccucaugaccugcugccgccgcaccaaccgcgccgaguccgcccagcacucccucggcgagcgcggccgcaaggucuccgucaccucccaguccggccgcgucaucuccuccugggaguccuacaaguccggcggcgagaccaagcucuga

SEQ ID NO: 126699 - RNA, 1575 nt, Artificial Sequence
  derived and/or modified CDS sequence (opt2) from glycoprotein__RABV__AB563945.1
augaucccccaggcccuccucuucgucccccuccucgucuucucccucugcuucggcaaguuccccaucuacaccauccccgacaagcucggccccuggucccccaucgacauccaccaccucuccugccccaacaaccucgucgucgaggacgagggcugcaccaaccucuccggcuucuccuacauggagcucaaggucggcuacaucuccgccaucaaggucaacggcuucaccugcaccggcgucgucaccgaggccgagaccuacaccaacuucgucggcuacgucaccaccaccuucaagcgcaagcacuuccgccccacccccgacgccugccgcgccgccuacaacuggaagauggccggcgacccccgcuacgaggagucccuccacaaccccuaccccgacuaccacuggcuccgcaccgucaagaccaccaaggagucccucgucaucaucucccccuccgucgccgaccucgaccccuacgacaagucccuccacucccgcgucuuccccuccggcaagugcuccggcaucaccgucuccuccaccuacugcuccaccaaccacgacuacaccaucuggaugcccgagaacccccgccucggcaccuccugcgacaucuucaccaacucccgcggcaagcgcgccuccaagggcuccaagaccugcggcuucgucgacgagcgcggccucuacaagucccucaagggcgccugcaagcucaagcucugcggcguccucggccuccgccucauggacggcaccugggccgccauccagaccuccgacgagaccaaguggugcccccccgaccagcucgucaaccuccacgacuuccgcuccgacgagaucgagcaccucgucgucgaggagcucgucaagaagcgcgaggagugccucgacgcccucgaguccaucaugaccaccaaguccgucuccuuccgccgccucucccaccuccgcaagcucguccccggcuucggcaaggccuacaccaucuucaacaagacccucauggaggccgacgcccacuacaaguccguccgcaccuggaacgagaucauccccuccaagggcugccuccgcgucggcggccgcugccacccccacgucaacggcgucuucuucaacggcaucauccucggccccgacggccacguccucauccccgagaugcaguccucccuccuccagcagcacauggagcuccucgaguccuccgucaucccccucaugcacccccucgccgaccccuccaccgucuucaaggacgacgacgaggccgaggacuucgucgagguccaccuccccgacguccacaagcaggucuccggcgucgaccucggccuccccuccuggggcaaguacguccucauguccgccggcguccucaccgcccucaugcucaugaucuuccucaugaccugcugccgcggcaccaaccgcgccgaguccgcccagcacucccucggcgagcgcggccgcaaggucuccgucaccucccagaacggccgcgucaucuccuccugggaguccuacaaguccggcggcgagaccaagcucuga

SEQ ID NO: 126700 - RNA, 1575 nt, Artificial Sequence
  derived and/or modified CDS sequence (opt2) from glycoprotein__RABV__AB563946.2
augaucccccaggcccuccucuucgucccccuccucaucuccucccucugcuucggcaaguuccccaucuacaccauccccgacaagcucggccccuggucccccaucgacauccaccaccucuccugccccaacaaccucgucgucgaggacgagggcugcaccaaccucuccggcuucuccuacauggagcucaaggucggcuacaucuccgccaucaaggucaacggcuucaccugcaccggcgucgucaccgaggccgagaccuacaccaacuucgucggcuacgucaccaccaccuucaagcgcaagcacuuccgccccacccccgacgccugccgcgccgccuacaacuggaagauggccggcgacccccgcuacgaggagucccuccacaaccccuaccccgacuaccacuggcuccgcaccgucaagaccaccaaggagucccucgucaucaucucccccuccgucgccgaccucgaccccuacgacaagucccuccacucccgcgucuuccccuccggcaagugcuccggcaucaccgucuccuccaccuacugcuccaccaaccacgacuacaccaucuggaugcccgagaacccccgccucggcaccuccugcgacaucuucaccaacucccgcggcaagcgcgccuccaagggcuccaagaccugcggcuucgucgacgagcgcggccucuacaagucccucaagggcgccugcaagcucaagcucugcggcguccucggccuccgccucauggacggcaccugggccgccauccagaccuccgacgagaccaaguggugcccccccgaccagcucgucaaccuccacgacuuccgcuccgacgagaucgagcaccucgucgucgaggagcucgucaagaagcgcgaggagugccucgacgcccucgaguccaucaugaccaccaaguccgucuccuuccgccgccucucccaccuccgcaagcucguccccggcuucggcaaggccuacaccaucuucaacaagacccucauggaggccgacgcccacuacaaguccguccgcaccuggaacgagaucauccccuccaagggcugccuccgcgucggcggccgcugccacccccacgucaacggcgucuucuucaacggcaucauccucggccccgacggccacguccucauccccgagaugcaguccucccuccuccagcagcacauggagcuccucgaguccuccgucaucccccucaugcacccccucgccgaccccuccaccgucuucaaggacgacgacgaggccgaggacuucgucgagguccaccuccccgacguccacaagcaggucuccggcgucgaccucggccuccccuccuggggcaaguacguccucauguccgccggcguccucaccgcccucaugcucaugaucuuccucaugaccugcugccgccgcgccaaccgcgccgaguccgcccagcacucccucggcgagcgcggccgcaaggucuccgucaccucccaguccggccgcgucaucuccuccugggaguccuacaaguccggcggcgagaccaagcucuga

SEQ ID NO: 126701 - RNA, 1575 nt, Artificial Sequence; identical to SEQ ID NO: 126675
  derived and/or modified CDS sequence (opt2) from glycoprotein__RABV__AB563947.1

SEQ ID NO: 126702 - RNA, 1575 nt, Artificial Sequence
  derived and/or modified CDS sequence (opt2) from glycoprotein__RABV__AB563948.1
augaucccccaggcccucauguucgucccccuccucgucuucucccucugcuucggcaaguuccccaucuacaccauccccgacaagcucggccccuggucccccaucgacauccaccaccucuccugccccaacaaccucgucgucgaggacgagggcugcaccaaccucuccggcuucuccuacauggagcucaaggucggcuacaucuccgccaucaaggucaacggcuucaccugcaccggcgucgucaccgaggccgagaccuacaccaacuucgucggcuacgucaccaccaccuucaagcgcaagcacuuccgccccaugcccgacgccugccgcgccgccuacaacuggaagauggccggcgacccccgcuacgaggagucccuccacaaccccuaccccgacuaccacuggcuccgcaccgucaagaccaccaaggagucccucgucaucaucucccccuccgucgccgaccucgaccccuacgacaagucccuccacucccgcgucuuccccggcggcaagugcuccggcaugaccgucuccuccaccuacugcuccaccaaccacgacuacaccaucuggaugcccgagaacccccgccucggcaccuccugcgacaucuucaccaacucccgcggcaagcgcgccuccaagggcuccaagaccugcggcuucgucgacgagcgcggccucuacaagucccucaagggcgccugcaagcucaagcucugcggcguccucggccuccgccucauggacggcaccugggccgccauccagaccuccgacgagaccaaguggugcccccccgaccagcucgucaaccuccacgacuuccgcuccgacgagaucgagcaccucgucgucgaggagcucgucaagaagcgcgaggagugccucgacgcccucgaguccaucaugaccaccaaguccgucuccuuccgccgccucucccaccuccgcaagcucguccccggcuucggcaaggccuacaccaucuucaacaagacccucauggaggccgacgcccacuacaaguccguccgcaccuggaacgagaucauccccuccaagggcugccuccgcgucggcggccgcugccacccccacgucaacggcgucuucuucaacggcaucauccucggccccgacggccacguccucauccccgagaugcaguccucccuccuccagcagcacauggagcuccucgaguccuccgucaucccccucaugcacccccucgccgaccccuccaccgucuucaagggcgacgacgaggccgaggacuucgucgagguccaccuccccgacguccacaagcaggucuccggcgucgaccucggccuccccuccuggggcaaguacguccucauguccgccggcguccucaccgcccucaugcucaugaucuuccucaugaccugcugcaagcgcgccaaccgcgccgaguccgcccaccacucccucggcgagcgcggccgcaaggucuccgucaccucccaguccggccgcgucaucuccuccugggaguccuacaaguccggcggcgagaccaagcucuga

SEQ ID NO: 126703 - RNA, 1575 nt, Artificial Sequence
  derived and/or modified CDS sequence (opt2) from glycoprotein__RABV__AB563949.1
augaucccccaggcccucauguucgucccccuccucgucuucucccucugcuucggcaaguuccccaucuacaccauccccgacaagcucggccccuggucccccaucgacauccaccaccucuccugccccaacaaccucgucgucgaggacgagggcugcaccaaccucuccggcuucuccuacauggagcucaaggucggcuacaucuccgccaucaaggucaacggcuucaccugcaccggcgucgucaccgaggccgagaccuacaccaacuucgucggcuacgucaccaccaccuucaagcgcaagcacuuccgccccaugcccgacgccugccgcgccgccuacaacuggaagauggccggcgacccccgcuacgaggagucccuccacaaccccuaccccgacuaccacuggcuccgcaccgucaagaccaccaaggagucccucgucaucaucucccccuccgucgccgaccucgaccccuacgacaagucccuccacucccgcgucuuccccuccggcaagugcuccggcaugaccgucuccuccaccuacugcuccaccaaccacgacuacaccaucuggaugcccgagaacccccgccucggcaccuccugcgacaucuucaccaacucccgcggcaagcgcgccuccaagggcuccaagaccugcggcuucgucgacgagcgcggccucuacaagucccucaagggcgccugcaagcucaagcucugcggcguccucggccuccgccucauggacggcaccugggccgccauccagaccuccgacgagaccaaguggugcccccccgaccagcucgucaaccuccacgacuuccgcuccgacgagaucgagcaccucgucgucgaggagcucgucaagaagcgcgaggagugccucgacgcccucgaguccaucaugaccaccaaguccgucuccuuccgccgccucucccaccuccgcaagcucguccccggcuucggcaaggccuacaccaucuucaacaagacccucauggaggccgacgcccacuacaaguccguccgcaccuggaacgagaucauccccuccaagggcugccuccgcgucggcggccgcugccacccccacgucaacggcgucuucuucaacggcaucauccucggccccgacggccacguccucauccccgagaugcaguccucccuccuccagcagcacauggagcuccucgaguccuccgucaucccccucaugcacccccucgccgaccccuccaccgucuucaagggcgacgacgaggccgaggacuucgucgagguccaccuccccgacguccacaagcaggucuccggcgucgaccucggccuccccuccuggggcaaguacguccucauguccgccggcguccucaccgcccucaugcucaugaucuuccucaugaccugcugcaagcgcgccaaccgcgccgaguccgcccaccacaaccucggcgagcgcggccgcaaggucuccgucaccucccaguccggccgcgucaucuccuccugggaguccuacaaguccggcggcgagaccaagcucuga

SEQ ID NO: 126704 - RNA, 1575 nt, Artificial Sequence
  derived and/or modified CDS sequence (opt2) from glycoprotein__RABV__AB563950.1
augaucccccaggcccucauguucgucccccuccucgucuucucccucugcuucggcaaguuccccaucuacaccauccccgacaagcucggccccuggucccccaucgacauccaccaccucuccugccccaacaaccucgucgucgaggacgagggcugcaccaaccucuccggcuucuccuacauggagcucaaggucggcuacaucuccgccaucaaggucaacggcuucaccugcaccggcgucgucaccgaggccgagaccuacaccaacuucgucggcuacgucaccaccaccuucaagcgcaagcacuuccgccccaugcccgacgccugccgcgccgccuacaacuggaagauggccggcgacccccgcuacgaggagucccuccacaaccccuaccccgacuaccacuggcuccgcaccgucaagaccaccaaggagucccucgucaucaucucccccuccgucgccgaccucgaccccuacgacaagucccuccacucccgcgucuuccccuccggcaagugcuccggcaucaccgucuccuccaccuacugcuccaccaaccacgacuacaccaucuggaugcccgagaacccccgccucggcaccuccugcgacaucuucaccaacucccgcggcaagcgcgccuccaagggcuccaagaccugcggcuucgucgacgagcgcggccucuacaagucccucaagggcgccugcaagcucaagcucugcggcguccucggccuccgccucauggacggcaccugggccgccauccagaccuccgacgagaccaaguggugcccccccgaccagcucgucaaccuccacgacuuccgcuccgacgagaucgagcaccucgucgucgaggagcucgucaagaagcgcgaggagugccucgacgcccucgaguccaucaugaccaccaaguccgucuccuuccgccgccucucccaccuccgcaagcucguccccggcuucggcaaggccuacaccaucuucaacaagacccucauggaggccgacgcccacuacaaguccguccgcaccuggaacgagaucauccccuccaagggcugccuccgcgucggcggccgcugccacccccacgucaacggcgucuucuucaacggcaucauccucggccccgacggccacguccucauccccgagaugcaguccucccuccuccagcagcacauggagcuccucgaguccuccgucaucccccucaugcacccccucgccgaccccuccaccgucuucaagggcgacgacgaggccgaggacuucgucgagguccaccuccccgacguccacaagcaggucuccggcgucgaccucggccuccccuccuggggcaaguacguccucauguccgccggcguccucaccgcccucaugcucaugaucuuccucaugaccugcugcaagcgcgccaaccgcgccgaguccgcccaccacucccucggcgagcgcggccgcaaggucuccgucaccucccaguccggccgcgucaucuccuccugggaguccuacaaguccggcggcgagaccaagcucuga

SEQ ID NO: 126705 - RNA, 1575 nt, Artificial Sequence
  derived and/or modified CDS sequence (opt2) from glycoprotein__RABV__AB563951.1
augaucccccaggcccuccucuucgucccccuccucgucuucucccucugcuucggcaaguuccccaucuacaccauccccgacaagcucggccccuggucccccaucgacauccaccaccucuccugccccaacaaccucgucgucgaggacgagggcugcaccaaccucuccggcuucuccuacauggagcucaaggucggcuacaucuccgccaucaaggucaacggcuucaccugcaccggcgucgucaccgaggccgagaccuacaccaacuucgucggcuacgucaccaccaccuucaagcgcaagcacuuccgccccacccccgacgccugccgcgccgccuacaacuggaagauggccggcgacccccgcuacgaggagucccuccacaaccccuaccccgacuaccacuggcuccgcaccgucaagaccaccaaggagucccucgucaucaucucccccuccgucgccgaccucgaccccuacgacaagucccuccacucccgcgucuuccccuccggcaagugcuccggcaucaccgucuccuccaccuacugcuccaccaaccacgacuacaccaucuggaugcccgagaacccccgccucggcaccuccugcgacaucuucaccaacucccgcggcaagcgcgccuccaagggcuccaagaccugcggcuucgucgacgagcgcggccucuacaagucccucaagggcgccugcaagcucaagcucugcggcguccucggccuccgccucauggacggcaccugggccgccauccagaccuccgacgagaccaaguggugcccccccgaccagcucgucaaccuccacgacuuccgcuccgacgagaucgagcaccucgucgucgaggagcucgucaagaagcgcgaggagugccucgacgcccucgaguccaucaugaccaccaaguccgucuccuuccgccgccucucccaccuccgcaagcucguccccggcuucggcaaggccuacaccaucuucaacaagacccucauggaggccgacgcccacuacaaguccguccgcaccuggaacgagaucauccccaccaagggcugccuccgcgucggcggccgcugccacccccacgucaacggcgucuucuucaacggcaucauccucggccccgacggccacguccucauccccgagaugcaguccucccuccuccagcagcacauggagcuccucgaguccuccgucaucccccucaugcacccccucgccgaccccuccaccgucuucaaggacgacgacgaggccgaggacuucgucgagguccaccuccccgacguccacaagcaggucuccggcgucgaccucggccuccccuccuggggcaaguacguccucauguccgccggcguccucaccgcccucaugcucaugaucuuccucaccaccugcugccgccgcgccgaccgcgccgaguccgcccagcacucccucggcgagcgcggccgcaaggucuccgucaccucccaguccggccgcgucaucuccuccugggaguccuacaaguccggcggcgagaccaagcucuga

SEQ ID NO: 126706 - RNA, 1575 nt, Artificial Sequence; identical to SEQ ID NO: 126631
  derived and/or modified CDS sequence (opt2) from glycoprotein__RABV__AB563952.2

SEQ ID NO: 126707 - RNA, 1575 nt, Artificial Sequence; identical to SEQ ID NO: 126631
  derived and/or modified CDS sequence (opt2) from glycoprotein__RABV__AB563953.2

SEQ ID NO: 126708 - RNA, 1575 nt, Artificial Sequence; identical to SEQ ID NO: 126608
  derived and/or modified CDS sequence (opt2) from glycoprotein__RABV__AB563954.1

SEQ ID NO: 126709 - RNA, 1575 nt, Artificial Sequence
  derived and/or modified CDS sequence (opt2) from glycoprotein__RABV__AB563955.1
augaucccccaggcccuccucuucgucccccuccucgucuucucccucugcuucggcaaguuccccaucuacaccauccccgacaagcucggccccuggucccccaucgacauccaccaccucuccugccccaacaaccucgucgucgaggacgagggcugcaccaaccucuccggcuucuccuacauggagcucaaggucggcuacaucuccgccaucaaggucaacggcuucaccugcaccggcgucgucaccgaggccgagaccuacaccaacuucgucggcuacgucaccaccaccuucaagcgcaagcacuuccgccccacccccgacgccugccgcgccgccuacaacuggaagauggccggcgacccccgcuacgaggagucccuccacaaccccuaccccgacuaccacuggcuccgcaccgucaagaccaccaaggagucccucgucaucaucucccccuccgucgccgaccucgaccccuacgacaaguccccccacucccgcgucccccccuccggcaagugcuccggcaucaccgucuccuccaccuacugcuccaccaaccacgacuacaccaucuggaugcccgagaacccccgccucggcaccuccugcgacaucuucaccaacucccgcggcaagcgcgccuccaagggcuccaagaccugcggcuucgucgacgagcgcggccucuacaagucccucaagggcgccugcaagcucaagcucugcggcguccucggccuccgccucauggacggcaccugggccgccauccagaccuccgacgagaccaaguggugcccccccgaccagcucgucaaccuccacgacuuccgcuccgacgagaucgagcaccucgucgucgaggagcucgucaagaagcgcgaggagugccucgacgcccucgaguccaucaugaccaccaaguccgucuccuuccgccgccucucccaccuccgcaagcucguccccggcuucggcaaggccuacaccaucuucaacaagacccucauggaggccgacgcccacuacaaguccguccgcaccuggaacgagaucauccccuccaagggcugccuccgcgucggcggccgcugccacccccacgucaacggcgucuucuucaacggcaucauccucggccccgacggccacguccucauccccgagaugcaguccucccuccuccagcagcacauggagcuccucgaguccuccgucaucccccucaugcacccccucgccgaccccuccaccgucuucaaggacgacgacgaggccgaggacuucgucgagguccaccuccccgacguccacaagcaggucuccggcgucgaccucggccuccccuccuggggcaaguacguccucauguccgccggcguccucaccgcccucaugcucaugaucuuccucaccaccugcugccgccgcgccaaccgcgccgaguccgcccagcacucccucggcgagcgcggccgcaaggucuccgucaccucccaguccggccgcgucaucuccuccugggaguccuacaaguccggcggcgagaccaagcucuga

SEQ ID NO: 126710 - RNA, 1575 nt, Artificial Sequence
  derived and/or modified CDS sequence (opt2) from glycoprotein__RABV__AB563956.1
augaucccccaggcccuccucuucgucccccuccucgucuucucccucugcuucggcaaguuccccaucuacaccauccccgacaagcucggccccuggucccccaucgacauccaccaccucuccugccccaacaaccucgucgucgaggacgagggcugcaccaaccucuccggcuucuccuacauggagcucaaggucggcuacaucuccgccaucaaggucaacggcuucaccugcaccggcgucgucaccgaggccgagaccuacaccaacuucgucggcuacgucaccaccaccuucaagcgcaagcacuuccgccccacccccgacgccugccgcgccgccuacgacuggaagauggccggcgacccccgcuacgaggagucccuccacaaccccuaccccgacuaccacuggcuccgcaccgucaagaccaccaaggagucccccgucaucaucucccccuccgucgccgaccucgaccccuacgacaagucccuccacucccgcgucccccccuccggcaagugcuccggcaucaccgucuccuccaccuacugcuccaccaaccacgacuacaccaucuggaugcccgagaacccccgccucggcaccuccugcgacaucuucaccaacucccgcggcaagcgcgccuccaagggcuccaagaccugcggcuucgucgacgagcgcggccucuacaagucccucaagggcgccugcaagcucaagcucugcggcguccucggccuccgccucauggacggcaccugggccgccauccagaccuccgacgagaccaaguggugcccccccgaccagcucgucaaccuccacgacuuccgcuccgacgagaucgagcaccucgucgucgaggagcucgucaagaagcgcgaggagugccucgacgcccucgaguccaucaugaccaccaaguccgucuccuuccgccgccucucccaccuccgcaagcucguccccggcuucggcaaggccuacaccaucuucaacaagacccucauggaggccgacgcccacuacaaguccguccgcaccuggaacgagaucauccccuccaagggcugccuccgcgucggcggccgcugccacccccacgucaacggcgucuucuucaacggcaucauccucggccccgacggccacguccucauccccgagaugcaguccucccuccuccagcagcacauggagcuccucgaguccuccgucaucccccucaugcacccccucgccgaccccuccaccgucuucaaggacgacgacgaggccgaggacuucgucgagguccaccuccccgacguccacaagcaggucuccggcgucgaccucggccuccccuccuggggcaaguacguccucauguccgccggcauccucaccgcccucaugcucaugaucuuccucaccaccugcugccgccgcgccgaccgcgccgaguccgcccagcacucccucggcgagcgcggccgcaaggucuccgucaccucccaguccggccgcgucaucuccuccugggaguccuacaaguccggcggcgagaccaagcucuga

SEQ ID NO: 126711 - RNA, 1575 nt, Artificial Sequence
  derived and/or modified CDS sequence (opt2) from glycoprotein__RABV__AB563957.1
augaucccccaggcccuccucuucgucccccucauggucuucucccucugcuucggcaaguuccccaucuacaccauccccgacaagcucggccccuggucccccaucgacauccaccaccucuccugccccaacaaccucgucgucgaggacgagggcugcaccaaccucuccggcuucuccuacauggagcucaaggucggcuacaucuccgccaucaaggucaacggcuucaccugcaccggcgucgucaccgaggccgagaccuacaccaacuucgucggcuacgucaccaccaccuucaagcgcaagcacuuccgccccacccccgacgccugccgcgccgccuacaacuggaagauggccggcgacccccgcuacgaggagucccuccacaaccccuaccccgacuaccacuggcuccgcaccgucaagaccaccaaggagucccucgucaucaucucccccuccgucgccgaccucgaccccuacgacaagucccuccacucccgcgccuuccccuccggcaagugcuccggcaucaccgucuccuccaccuacugcuccaccaaccacgacuacaccaucuggaugcccgagaacccccgccucggcaccuccugcgacaucuucaccaacucccgcggcaagcgcgccuccaagggcuccaagaccugcggcuucgucgacgagcgcggccucuacaagucccucaagggcgccugcaagcucaagcucugcggcguccucggccuccgccucauggacggcaccugggccgccauccagaccuccgacgagaccaaguggugcccccccgaccagcucgucaaccuccacgacuuccgcuccgacgagaucgagcaccucgucgucgaggagcucgucaagaagcgcgaggagugccucgacgcccucgaguccaucaugaccaccaaguccgucuccuuccgccgccucucccaccuccgcaagcucguccccggcuucggcaaggccuacaccaucuucaacaagacccucauggaggccgacgcccacuacaaguccguccgcaccuggaacgagaucauccccuccaagggcugccuccgcgucggcggccgcugccacccccacgucaacggcgucuucuucaacggcaucauccucggccccgacggccacguccucauccccgagaugcaguccucccuccuccagcagcacauggagcuccucgaguccuccgucaucccccucaugcacccccucgccgaccccuccaccgucuucaaggacgacgacgaggccgaggacuucgucgagguccaccuccccgacguccacaagcaggucuccggcgucgaccucggccuccccuccuggggcaaguacguccucauguccgccggcguccucaccgcccucaugcucaugaucuuccucaugaccugcugccgccgcaccaaccgcgccgaguccgcccagcacucccucggcgagcgcggccgcaaggucuccgucaccucccaguccggccgcgucaucuccuccugggaguccuacaaguccggcggcgagaccaagcucuga

SEQ ID NO: 126712 - RNA, 1575 nt, Artificial Sequence; identical to SEQ ID NO: 126675
  derived and/or modified CDS sequence (opt2) from glycoprotein__RABV__AB563958.1

SEQ ID NO: 126713 - RNA, 1575 nt, Artificial Sequence
  derived and/or modified CDS sequence (opt2) from glycoprotein__RABV__AB563959.1
augaucccccaggcccucauguucgucccccuccucgucuucucccucugcuucggcaaguuccccaucuacaccauccccgacaagcucggccccuggucccccaucgacauccaccaccucuccugccccaacaaccucgucgucgaggacgagggcugcaccaaccucuccggcuucuccuacauggagcucaaggucggcuacaucuccgccaucaaggucaacggcuucaccugcaccggcgucgucaccgaggccgagaccuacaccaacuucgucggcuacgucaccaccaccuucaagcgcaagcacuuccgccccaugcccgacgccugccgcgccgccuacaacuggaagauggccggcgacccccgcuacgaggagucccuccacaaccccuaccccgacuaccacuggcuccgcaccgucaagaccaccaaggagucccucgucaucaucucccccuccgucgccgaccucgaccccuacgacaagucccuccacucccgcgucuuccccuccggcaagugcuccggcaccaccgucuccuccaccuacugcuccaccaaccacgacuacaccaucuggaugcccgagaacccccgccucggcaccuccugcgacaucuucaccaacucccgcggcaagcgcgccuccaagggcuccaagaccugcggcuucgucgacgagcgcggccucuacaagucccucaagggcgccugcaagcucaagcucugcggcguccucggccuccgccucauggacggcaccugggccgccauccagaccuccgacgagaccaaguggugcccccccgaccagcucgucaaccuccacgacuuccgcuccgacgagaucgagcaccucgucgucgaggagcucgucaagaagcgcgaggagugccucgacgcccucgaguccaucaugaccaccaaguccgucuccuuccgccgccucucccaccuccgcaagcucguccccggcuucggcaaggccuacaccaucuucaacaagacccucauggaggccgacgcccacuacaaguccguccgcaccuggaacgagaucauccccuccaagggcugccuccgcgucggcggccgcugccacccccacgucaacggcgucuucuucaacggcaucauccucggccccgacggccacguccucauccccgagaugcaguccucccuccuccagcagcacauggagcuccucgaguccuccgucaucccccucaugcacccccucgccgaccccuccaccgucuucaagggcgacgacgaggccgaggacuucgucgagguccaccuccccgacguccacaagcaggucuccggcgucgaccucggccuccccuccuggggcaaguacguccucauguccgccggcguccucaccgcccucaugcucaugaucuuccucaugaccugcugcaagcgcgccaaccgcgccgaguccgcccaccacucccucggcgagcgcggccgcaaggucuccgucaccucccaguccggccgcgucaucuccuccugggaguccuacaaguccggcggcgagaccaagcucuga

SEQ ID NO: 126714 - RNA, 1575 nt, Artificial Sequence
  derived and/or modified CDS sequence (opt2) from glycoprotein__RABV__AB563960.1
augaucccccaggcccuccucuucguccccuuccucgucuucucccucugcuucggcaaguuccccaucuacaccauccccgacaagcucggccccuggucccccaucgacauccaccaccucuccugccccaacaaccucgucgucgaggacgagggcugcaccaaccucuccggcuucuccuacauggagcucaaggucggcuacaucuccgccaucaaggucaacggcuucaccugcaccggcgucgucaccgaggccgagaccuacaccaacuucgucggcuacgucaccaccaccuucaagcgcaagcacuuccgccccaugcccgacgccugccgcgccgccuacaacuggaagauggccggcgacccccgcuacgaggagucccuccacaaccccuaccccgacuaccacuggcuccgcaccgucaagaccaccaaggagucccucgucaucaucucccccuccgucgccgaccucgaccccuacgacaagucccuccacucccgcgucuuccccuccggcaagugcuccggcaucaccgucuccuccaccuacugcuccaccaaccacgacuacaccaucuggaugcccgagaacccccgccucggcaccuccugcgacaucuucaccaacucccgcggcaagcgcgccuccaagggcuccaagaccugcggcuucgucgacgagcgcggccucuacaagucccucaagggcgccugcaagcucaagcucugcggcguccucggccuccgccucauggacggcaccugggccgccauccagaccuccgacgagaccaaguggugcccccccgaccagcucgucaaccuccacgacuuccgcuccgacgagaucgagcaccucgucgucgaggagcucgucaagaagcgcgaggagugccucgacgcccucgaguccaucaugaccaccaaguccgucuccuuccgccgccucucccaccuccgcaagcucguccccggcuucggcaaggccuacaccaucuucaacaagacccucauggaggccgacgcccacuacaaguccguccgcaccuggaacgagaucauccccuccaagggcugccuccgcgucggcggccgcugccacccccacgucaacggcgucuucuucaacggcaucauccucggccccgacggccacguccucauccccgagaugcaguccucccuccuccagcagcacauggagcuccucgaguccuccgucaucccccucaugcacccccucgccgaccccuccaccgucuucaaggacgacgacgaggccgaggacuucgucgagguccaccuccccgacguccacaagcaggucuccggcgucgaccucggccuccccuccuggggcaaguacguccucauguccgccggcguccucaccguccucaugcucaugaucuucuucaugaccugcugccgccgcgccaaccgcgucgaguccgcccagcacucccucggcgagcgcggccgcaaggucuccgucaccucccaguccggccgcgucaucuccuccugggaguccuacaaguccggcggcgagaccaagcucuga

SEQ ID NO: 126715 - RNA, 1575 nt, Artificial Sequence; identical to SEQ ID NO: 126670
  derived and/or modified CDS sequence (opt2) from glycoprotein__RABV__AB563961.1

SEQ ID NO: 126716 - RNA, 1575 nt, Artificial Sequence; identical to SEQ ID NO: 126670
  derived and/or modified CDS sequence (opt2) from glycoprotein__RABV__AB563962.1

SEQ ID NO: 126717 - RNA, 1575 nt, Artificial Sequence
  derived and/or modified CDS sequence (opt2) from glycoprotein__RABV__AB563963.1
augaucccccaggcccuccucuucgucccccuccucgucuucucccucugcuucggcaaguuccccaucuacaccauccccgacaagcucggccccuggucccccaucgacauccaccaccucuccugccccaacaaccucgucgucgaggacgagggcugcaccaaccucuccggcuucuccuacauggagcucaaggucggcuacaucuccgccaucaaggucaacggcuucaccugcaccggcgucgucaccgaggccgagaccuacaccaacuucgucggcuacgucaccaccaccuucaagcgcaagcacuuccgccccacccccgacgccugccgcgccgccuacaacuggaagauggccggcgacccccgcuacgaggagucccuccacaaccccuaccccgacuaccacuggcuccgcaccgucaagaccaccaaggagucccucgucaucaucucccccuccgucgccgaccucgaccccuacgacaagucccuccacucccgcgucuuccccuccggcaagugcuccggcaucaccgucuccuccaccuacugcuccaccaaccacgacuacaccaucuggaugcccgagaacccccgccucggcaccuccugcgacaucuucaccaacucccgcggcaagcgcgccuccaagggcuccaagaccugcggcuucgucgacgagcgcggccucuacaagucccucaagggcgccugcaagcucaagcucugcggcguccucggccuccgccucauggacggcaccugggccgccauccagaccuccgacgagaccaaguggugcccccccgaccagcucgucaaccuccacgacuuccgcuccgacgagaucgagcaccucgucgucgaggagcucgucaagaagcgcgaggagugccucgacgcccucgaguccaucaugaccaccaaguccgucuccuuccgccgccucucccaccuccgcaagcucguccccggcuucggcaaggccuacaccaucuucaacaagacccucauggaggccgacgcccacuacaaguccguccgcaccuggaacgagaucauccccuccaagggcugccuccgcgucggcggccgcugccacccccacgucaacggcgucuucuucaacggcaucauccucggccccgacggccacguccucauccccgagaugcaguccucccuccuccagcagcacauggagcuccucgaguccuccgucaucccccucaugcacccccucgccgaccccuccaccaucuucaaggacgacgacgaggccgaggacuucgucgagguccaccuccccgacguccacaagcaggucuccggcgucgaccucggccuccccuccuggggcaaguacguccucauguccgccggcguccucaccguccucaugcucaugaucuucuucaugaccugcugccgccgcgccaaccgcgucgaguccgcccagcacucccucggcgagcgcggccgcaaggucuccgucaccucccaguccggccgcgucaucuccuccugggaguccuacaaguccggcggcgagaccaagcucuga

SEQ ID NO: 126718 - RNA, 1575 nt, Artificial Sequence; identical to SEQ ID NO: 126670
  derived and/or modified CDS sequence (opt2) from glycoprotein__RABV__AB563964.1

SEQ ID NO: 126719 - RNA, 1575 nt, Artificial Sequence; identical to SEQ ID NO: 126670
  derived and/or modified CDS sequence (opt2) from glycoprotein__RABV__AB563966.1

SEQ ID NO: 126720 - RNA, 1575 nt, Artificial Sequence; identical to SEQ ID NO: 126607
  derived and/or modified CDS sequence (opt2) from glycoprotein__RABV__AB563969.1

SEQ ID NO: 126721 - RNA, 1575 nt, Artificial Sequence
  derived and/or modified CDS sequence (opt2) from glycoprotein__RABV__AB563970.2
augaacccccaggcccucauguucgucccccuccucgucuucucccucugcuucggcaaguuccccaucuacaccauccccgacaagcucggccccuggucccccaucgacauccaccaccucuccugccccaacaaccucgucgucgaggacgagggcugcaccaaccucuccggcuucuccuacauggagcucaaggucggcuacaucuccgccaucaaggucaacggcuucaccugcaccggcgucgucaccgaggccgagaccuacaccaacuucgucggcuacgucaccaccaccuucaagcgcaagcacuuccgccccacccccgacgccugccgcgccgccuacaacuggaagauggccggcgacccccgcuacgaggagucccuccacaaccccuaccccgacuaccacuggcuccgcaccgucaagaccaccaaggagucccucgucaucaucucccccuccgucgccgaccucgaccccuacgacaagucccuccacucccgcgucuuccccuccggcaagugcuccggcaucaccgucuccuccaccuacugcuccaccaaccacgacuacaccaucuggaugcccgagaacccccgccucggcaccuccugcgacaucuucaccaacucccgcggcaagcgcgccuccaagggcuccaugaccugcggcuucgucgacgagcgcggccucuacaagucccucaagggcgccugcaagcucaagcucugcggcguccucggccuccgccucauggacggcaccugggccgccauccagaccuccgacgagaccaaguggugcccccccgaccagcucgucaaccuccacgacuuccacuccgacgagaucgagcaccucgucgucgaggagcucgucaagaagcgcgaggagugccucgacgcccucgaguccaucaugaccaccaaguccgucuccuuccgccgccucucccaccuccgcaagcucguccccggcuucggcaaggccuacaccaucuucaacaagacccucauggaggccgacgcccacuacaaguccguccgcaccuggaacgagaucauccccuccaagggcugccuccgcgucggcggccgcugccacccccacgucaacggcgucuucuucaacggcaucauccucggccccgacggccacguccucauccccgagaugcaguccucccuccuccagcagcacauggagcuccucgaguccuccgucaucccccucaugcacccccucgccgaccccuccaccgucuucaaggacgacgacgaggccgaggacuucgucgagguccaccuccccgacguccacaagcaggucuccggcgucgaccucggccuccccuccuggggcaaguacguccucauguccgccggcguccucaccgcccucaugcucaugaucuuccucaugaccugcugccgccgcgccaaccgcgccgaguccgcccagcacucccucggcgagcgcggccgcaaggucuccgucaccucccaguccggccgcgucaucuccuccugggaguccuacaaguccggcggcgagaccaagcucuga

SEQ ID NO: 126722 - RNA, 1575 nt, Artificial Sequence
  derived and/or modified CDS sequence (opt2) from glycoprotein__RABV__AB563971.1
augaacccccaggcccucauguucgucccccuccucgucuucucccucugcuucggcaaguuccccaucuacaccauccccgacaagcucggccccuggucccccaucgacauccaccaccucuccugccccaacaaccucgucgucgaggacgagggcugcaccaaccucuccggcuucuccuacauggagcucaaggucggcuacaucuccgccaucaaggucaacggcuucaccugcaccggcgucgucaccgaggccgagaccuacaccaacuucgucggcuacgucaccaccaccuucaagcgcaagcacuuccgccccacccccgacgccugccgcgccgccuacaacuggaagauggccggcgacccccgcuacgaggagucccuccacaaccccuaccccgacuaccacuggcuccgcaccgucaagaccaccaaggagucccucgucaucaucucccccuccgucgccgaccucgaccccuacgacaagucccuccacucccgcgucuuccccuccggcaagugcuccggcaucaccgucuucuccaccuacugcuccaccaaccacgacuacaccaucuggaugcccgagaacccccgccucggcaccuccugcgacaucuucaccaacucccgcggcaagcgcgccuccaagggcuccaagaccugcggcuucgucgacgagcgcggccucuacaagucccucaagggcgccugcaagcucaagcucugcggcguccucggccuccgccucauggacggcaccugggccgccauccagaccuccgacgagaccaaguggugcccccccgaccagcucgucaaccuccacgacuuccgcuccgacgagaucgagcaccucgucgucgaggagcucgucaagaagcgcgaggagugccucgacgcccucgaguccaucaugaccaccaaguccgucuccuuccgccgccucucccaccuccgcaagcucguccccggcuucggcaaggccuacaccaucuucaacaagacccucauggaggccgacgcccacuacaaguccguccgcaccuggaacgagaucauccccuccaagggcugccuccgcgucggcggccgcugccacccccacgucaacggcgucuucuucaacggcaucauccucggccccgacggccacguccucauccccgagaugcaguccucccuccuccagcagcacauggagcuccucgaguccuccgucaucccccucaugcacccccucgccgaccccuccaccgucuucaaggacgacgacgaggccgaggacuucgucgagguccaccuccccgacguccacaagcaggucuccggcgucgaccucggccuccccuccuggggcaaguacguccucauguccgccggcguccucaccgcccucaugcucaugaucuuccucaugaccugcugccgccgcgccaaccgcgccgaguccgcccagcacucccucggcgagcgcggccgcaaggucuccgucaccucccaguccggccgcgucaucuccuccugggaguccuacaaguccggcggcgagaccaagcucuga

SEQ ID NO: 126723 - RNA, 1575 nt, Artificial Sequence
  derived and/or modified CDS sequence (opt2) from glycoprotein__RABV__AB563973.2
augaucccccaggcccuccucuucgucccccuccucgucuccucccucugcuucggcaaguuccccaucuacaccauccccgacaagcucggccccuggucccccaucgacauccaccaccucuccugccccaacaaccucgucgucgaggacgagggcugcaccaaccucuccggcuucuccuacauggagcucaaggucggcuacaucuccgccaucaaggucaacggcuucaccugcaccggcgucgucaccgaggccgagaccuacaccaacuucgucggcuacgucaccaccaccuucaagcgcaagcacuuccgccccacccccgacgccugccgcgccgccuacaacuggaagauggccggcgacccccgcuacgaggagucccuccacaaccccuaccccgacuaccacuggcuccgcaccgucaagaccaccaaggagucccucgucaucaucucccccuccgucgccgaccucgaccccuacgacaagucccuccacucccgcgucuuccccuccggcaagugcuccggcaucaccgucuccuccaccuacugcuccaccaaccacgacuacaccaucuggaugcccgagaacccccgccucggcaccuccugcgacaucuucaccaacucccgcggcaagcgcgccuccaagggcuccaagaccugcggcuucgucgacgagcgcggccucuacaagucccucaagggcgccugcaagcucaagcucugcggcguccucggccuccgccucauggacggcaccugggccgccauccagaccuccgacgagaccaaguggugcccccccgaccagcucgucaaccuccacgacuuccgcuccgacgagaucgagcaccucgucgucgaggagcucgucaagaagcgcgaggagugccucgacgcccucgaguccaucaugaccaccaaguccgucuccuuccgccgccucucccaccuccgcaagcucguccccggcuucggcaaggccuacaccaucuucaacaagacccucauggaggccgacgcccacuacaaguccguccgcaccuggaacgagaucauccccuccaagggcugccuccgcgucggcggccgcugccacccccacgucaacggcgucuucuucaacggcaucauccucggccccgacggccacguccucauccccgagaugcaguccucccuccuccagcagcacauggagcuccucgaguccuccgucaucccccucaugcacccccucgccgaccccuccaccgucuucaaggacgacgacgaggccgaggacuucgucgagguccaccuccccgacguccacaagcaggucuccggcgucgaccucggccuccccuccuggggcaaguacguccucaccuccgccuccguccucaccgcccucaugcucaugaucuuccucaugaccugcugccgccgcgccaaccgcgccgaguccgcccagcacucccucggcgagcgcggccgcaaggucuccgucaccucccaguccggccgcgucaucuccuccugggaguccuacaaguccggcggcgagaccaagcucuga

SEQ ID NO: 126724 - RNA, 1575 nt, Artificial Sequence
  derived and/or modified CDS sequence (opt2) from glycoprotein__RABV__AB563974.1
augaucccccaggcccuccucuucgucccccuccucgucuccucccucugcuucggcaaguuccccaucuacaccauccccgacaagcucggccccuggucccccaucgacauccaccaccucuccugccccaacaaccucgucgucgaggacgagggcugcaccaaccucuccggcuucuccuacauggagcucaaggucggcuacaucuccgccaucaaggucaacggcuucaccugcaccggcgucgucaccgaggccgagaccuacaccaacuucgucggcuacgucaccaccaccuucaagcgcaagcacuuccgccccacccccgacgccugccgcgccgccuacaacuggaagauggccggcgacccccgcuacgaggagucccuccacaaccccuaccccgacuaccacuggcuccgcaccgucaagaccaccaaggagucccucgucaucaucucccccuccgucgccgaccucgaccccuacgacaagucccuccacucccgcgucuuccccuccggcaagugcuccggcaucaccgucuccuccaccuacugcuccaccaaccacgacuacaccaucuggaugcccgagaacccccgccucggcaccuccugcgacaucuucaccaacucccgcggcaagcgcgccuccaagggcuccaagaccugcggcuucgucgacgagcgcggccucuacaagucccucaagggcgccugcaagcucaagcucugcggcguccucggccuccgccucauggacggcaccugggccgccauccagaccuccgacgagaccaaguggugcccccccgaccagcucgucaaccuccacgacuuccgcuccgacgagaucgagcaccucgucgucgaggagcucgucaagaagcgcgaggagugccucgacgcccucgaguccaucaugaccaccaaguccgucuccuuccgccgccucucccaccuccgcaagcucguccccggcuucggcaaggccuacaccaucuucaacaagacccucauggaggccgacgcccacuacaaguccguccgcaccuggaacgagaucauccccuccaagggcugccuccgcgucggcggccgcugccacccccacgucaacggcgucuucuucaacggcaucauccucggccccgacggccacguccucauccccgagaugcaguccucccuccuccagcagcacauggagcuccucgaguccuccgucaucccccucaugcacccccucgccgaccccuccaccgucuucaaggacgacgacgaggccgaggacuucgucgagguccaccuccccgacguccacaagcaggucuccggcgucgaccucggccuccccuccuggggcaaguacguccucaccuccgccggcguccucaccgcccucaugcucaugaucuuccucaugaccugcugccgccgcgccaaccgcgccgaguccgcccagcacucccucggcgagcgcggccgcaaggucuccgucaccucccaguccggccgcgucaucuccuccugggaguccuacaaguccggcggcgagaccaagcucuga

SEQ ID NO: 126725 - RNA, 1575 nt, Artificial Sequence; identical to SEQ ID NO: 126724
  derived and/or modified CDS sequence (opt2) from glycoprotein__RABV__AB563975.2

SEQ ID NO: 126726 - RNA, 1575 nt, Artificial Sequence
  derived and/or modified CDS sequence (opt2) from glycoprotein__RABV__AB563976.1
augaucccccaggcccuccucuucgucccccuccucgucuucucccucugcuucggcaaguuccccaucuacaccauccccgacaagcucggccccuggucccccaucgacauccaccaccucuccugccccaacaaccucgucgucgaggacgagggcugcaccaaccucuccggcuucuccuacauggagcucaaggucggcuacaucuccgccaucaaggucaacggcuucaccugcaccggcgucgucaccgaggccgagaccuacaccaacuucgucggcuacgucaccaccaccuucaagcgcaagcacuuccgccccacccccgacgccugccgcgccgccuacaacuggaagauggccggcgacccccgcuacgaggagucccuccacaaccccuaccccgacuaccacuggcuccgcaccgucaagaccaccaaggagucccucgucaucaucucccccuccgucgccgaccucgaccccuacgacaagucccuccacucccgcgucuuccccuccggcaagugcuccggcaucaccgucuccuccaccuacugcuccaccaaccacgacuacaccaucuggaugcccgagaacccccgccucggcaccuccugcgacaucuucaccaacucccgcggcaagcgcgccuccaagggcuccaagaccugcggcuucgucgacgagcgcggccucuacaagucccucaagggcgccugcaagcucaagcucugcggcguccucggccuccgccucauggacggcaccugggccgccauccagaccuccgacgagaccaaguggugcccccccgaccagcucgucaaccuccacgacuuccgcuccgacgagaucgagcaccucgucgucgaggagcucgucaagaagcgcgaggagugccucgacgcccucgaguccaucaugaccaccaaguccgucuccuuccgccgccucucccaccuccgcaagcucguccccggcuucggcaaggccuacaccaucuucaacaagacccucauggaggccgacgcccacuacaaguccguccgcaccuggaacgagaucauccccuccaagggcugccuccgcgucggcggccgcugccacccccacgucaacggcgucuucuucaacggcaucauccucggccccgacggccacguccucauccccgagaugcaguccucccuccuccagcagcacauggagcuccucgaguccuccgucaucccccucaugcacccccucgccgaccccuccaccgucuucaaggacgacgacgaggccgaggacuucgucgagguccaccuccccgacguccacaagcaggucuccggcgucgaccucggccuccccuccuggggcaaguacguccucauguccgccggcguccucaccgcccucaugcucaugaucuuccucaugaccugcugccgcggcaccaaccgcgccgaguccgcccagcacucccucggcgagcgcggccgcaaggucuccgucaccucccaguccggccgcgucaucuccuccugggaguccuacaaguccggcggcgagaccaagcucuga

SEQ ID NO: 126727 - RNA, 1575 nt, Artificial Sequence
  derived and/or modified CDS sequence (opt2) from glycoprotein__RABV__AB563977.1
augaucccccaggcccuccucuucgucccccuccucgucuucucccucugcuucggcaaguuccccaucuacaccauccccgacaagcucggccccuggucccccaucgacauccaccaccucuccugccccaacaaccucgucgucgaggacgagggcugcaccaaccucuccggcuucuccuacauggagcucaaggucggcuacaucuccgccaucaaggucaacggcuucaccugcaccggcgucgucaccgaggccgagaccuacaccaacuucgucggcuacgucaccaccaccuucaagcgcaagcacuuccgccccacccccgacgccugccgcgccgccuacaacuggaagauggccggcgacccccgcuacgaggagucccuccacaaccccuaccccgacuaccacuggcuccgcaccgucaagaccaccaaggagucccucgucaucaucucccccuccgucgccgaccucgaccccuacgacaagucccuccacucccgcgucuuccccuccggcaagugcuccggcaucaccgucuccuccaccuacugcuccaccaaccacgacuacaccaucuggaugcccgagaacccccgccucggcaccuccugcgacaucuucaccaacucccgcggcaagcgcgccuccaagggcuccaagaccugcggcuucgucgacgagcgcggccucuacaagucccucaagggcgccugcaagcucaagcucugcggcguccucggccuccgccucauggacggcaccugggccgccauccagaccuccgacgagaccaaguggugcccccccgaccagcucgucaaccuccacgacuuccgcuccgacgagaucgagcaccucgucgucgaggagcucgucaagaagcgcgaggagugccucgacgcccucgaguccaucaugaccaccaaguccgucuccuuccgccgccucucccaccuccgcaagcucguccccggcuucggcaaggccuacaccaucuucaacaagacccucauggaggccgacgcccacuacaaguccguccgcaccuggaacgagaucauccccuccaagggcugccuccgcgucggcggccgcugccacccccacgucaacggcgucuucuucaacggcaucauccucggccccgacggccacguccucauccccgagaugcaguccucccuccuccagcagcacauggagcuccucgaguccuccgucaucccccucaugcacccccucgccgaccccuccaccgucuucaaggacgacgacgaggccgaggacuucgucgagguccaccuccccgacguccacaagcaggucuccggcgucgaccucggccuccccuccuggggccgcuacguccucauguccgccggcguccucaccgcccucaugcucaugaucuuccucaccaccugcugccgccgcgccaaccgcgccgaguccgcccagcacucccucggcgagcgcggccgcaaggucuccgucaccucccaguccggccgcgucaucuccuccugggaguccuacaaguccggcggcgagaccaagcucuga

SEQ ID NO: 126728 - RNA, 1575 nt, Artificial Sequence; identical to SEQ ID NO: 126687
  derived and/or modified CDS sequence (opt2) from glycoprotein__RABV__AB563979.1

SEQ ID NO: 126729 - RNA, 1575 nt, Artificial Sequence
  derived and/or modified CDS sequence (opt2) from glycoprotein__RABV__AB563981.1
augaucccccaggcccuccucuucgucccccucauggucuucucccucugcuucggcaaguuccccaucuacaccauccccgacaagcucggccccuggucccccaucgacauccaccaccucuccugccccaacaaccucgucgucgaggacgagggcugcaccaaccucuccggcuucuccuacauggagcucaaggucggcuacaucuccgccaucaaggucaacggcuucaccugcaccggcgucgucaccgaggccgagaccuacaccaacuucgucggcuacgucaccaccaccuucaagcgcaagcacuuccgccccacccccgacgccugccgcgccgccuacaacuggaagauggccggcgacccccgcuacgaggagucccuccacaaccccuaccccgacuaccacuggcuccgcaccgucaagaccaccaaggagucccucgucaucaucucccccuccgucgccgaccucgaccccuacgacaagucccuccacucccgcgucuuccccuccggcaagugcuccggcaucaccgucuccuccaccuacugcuccaccaaccacgacuacaccaucuggaugcccgagaacccccgccucggcaccuccugcgacaucuucaccaacucccgcggcaagcgcgccuccaagggcuccaagaccugcggcuucgucgacgagcgcggccucuacaagucccucaagggcgccugcaagcucaagcucugcggcguccucggccuccgccucauggacggcaccugggccgccauccagaccuccgacgagaccaaguggugcccccccgaccagcucgucaaccuccacgacuuccgcuccgacgagaucgagcaccucgucgucgaggagcucgucaagaagcgcgaggagugccucgacgcccucgaguccaucaugaccaccaaguccgucuccuuccgccgccucucccaccuccgcaagcucguccccggcuucggcaaggccuacaccaucuucaacaagacccucauggaggccgacgcccacuacaaguccguccgcaccuggaacgagaucauccccuccaagggcugccuccgcgucggcggccgcugccacccccacgucaacggcgucuucuucaacggcaucauccucggccccgacggccacguccucauccccgagaugcaguccucccuccuccagcagcacauggagcuccucgaguccuccgucaucccccucaugcacccccucgccgaccccuccaccgucuucaaggacgacgacgaggccgaggacuucgucgagguccaccuccccgacguccacaagcaggucuccggcgucgaccucggccuccccuccuggggcaaguacguccucauguccgccggcguccucaccgcccucaugcucaugaucuuccucaugaccugcugccgccgcaccaaccgcgccgaguccgcccagcacucccucggcgagcgcggccgcaaggucuccgucaccucccaguccggccgcaucaucuccuccugggaguccuacaaguccggcggcgagaccaagcucuga

SEQ ID NO: 126730 - RNA, 1575 nt, Artificial Sequence
  derived and/or modified CDS sequence (opt2) from glycoprotein__RABV__AB563983.1
augaucccccaggcccuccucuucgucccccuccucgucuucucccucugcuucggcaaguuccccaucuacaccauccccgacaagcucggccccuggucccccaucgacauccaccaccucuccugccccaacaaccucgucgucgaggacgagggcugcaccaaccucuccggcuucuccuacauggagcucaaggucggcuacaucuccgccaucaaggucaacggcuucaccugcaccggcgucgucaccgaggccgagaccuacaccaacuucgucggcuacgucaccaccaccuucaagcgcaagcacuuccgccccacccccgacgccugccgcgccgccuacaacuggaagauggccggcgacccccgcuacgaggagucccuccacaaccccuaccccgacuaccacuggcuccgcaccgucaagaccaccaaggagucccucgucaucaucucccccuccgucgccgaccucgaccccuacgacaagucccuccacucccgcgucuuccccuccggcaagugcuccggcaucaccgucuccuccaccuacugcuccaccaaccacgacuacaccaucuggaugcccgagaacccccgccucggcaccuccugcgacaucuucaccaacucccgcggcaagcgcgccuccaagggcuccaagaccugcggcuucgucgacgagcgcggccucuacaagucccucaagggcgccugcaagcucaagcucugcggcguccucggccuccgccucauggacggcaccugggccgccauccagaccuccgacgagaccaaguggugcccccccgaccagcucgucaaccuccacgacuuccgcuccgacgagauggagcaccucgucgucgaggagcucgucaagaagcgcgaggagugccucgacgcccucgaguccaucaugaccaccaaguccgucuccuuccgccgccucucccaccuccgcaagcucguccccggcuucggcaaggccuacaccaucuucaacaagacccucauggaggccgacgcccacuacaaguccguccgcaccuggaacgagaucauccccaccaagggcugccuccgcgucggcggccgcugccacccccacgucaacggcgucuucuucaacggcaucauccucggccccgacggccacguccucauccccgagaugcaguccucccuccuccagcagcacauggagcuccucgaguccuccgucaucccccucaugcacccccucgccgaccccuccaccgucuucaaggacgacgacgaggccgaggacuucgucgagguccaccuccccgacguccacaagcaggucuccggcgucgaccucggccuccccuccuggggcaaguacguccucauguccgccggcguccucaccgcccucaugcucaugaucuuccucaccaccugcugccgccgcgccgaccgcgccgaguccgcccagcacucccucggcgagcgcggccgcaaggucuccgucaccucccaguccggccgcgucaucuccuccugggaguccuacaaguccggcggcgagaccaagcucuga

SEQ ID NO: 126731 - RNA, 1575 nt, Artificial Sequence; identical to SEQ ID NO: 126638
  derived and/or modified CDS sequence (opt2) from glycoprotein__RABV__AB563985.1

SEQ ID NO: 126732 - RNA, 1575 nt, Artificial Sequence
  derived and/or modified CDS sequence (opt2) from glycoprotein__RABV__AB563986.1
augaucccccaggcccuccucuucgucccccuccucgucuucucccucugcuucggcaaguuccccaucuacaccauccccgacaagcucggccccuggucccccaucgacauccaccaccucuccugccccaacaaccucgucgucgaggacgagggcugcaccaaccucuccggcuucuccuacauggagcucaaggucggcuacaucuccgccaucaaggucaacggcuucaccugcaccggcgucgucaccgaggccgagaccuacaccaacuucgucggcuacgucaccaccaccuucaagcgcaagcacuuccgccccacccccgacgccugccgcgccgccuacaacuggaagauggccggcgacccccgcuacgaggagucccuccacaaccccuaccccgacuaccacuggcuccgcaccgucaagaccaccaaggagucccucgucaucaucucccccuccguccccgaccucgaccccuacgacaagucccuccacucccgcgucuuccccuccggcaagugcuccggcaucaccgucuccuccaccuacugcuccaccaaccacgacuacaccaucuggaugcccgagaacccccgccucggcaccuccugcgacaucuucaccaacucccgcggcaagcgcgccuccaagggcuccaagaccugcggcuucgucgacgagcgcggccucuacaagucccucaagggcgccugcaagcucaagcucugcggcguccucggccuccgccucauggacggcaccugggccgccauccagaccuccgacgagaccaaguggugcccccccgaccagcucgucaaccuccacgacuuccgcuccgacgagaucgagcaccucgucgucgaggagcucgucaagaagcgcgaggagugccucgacgcccucgaguccaucaugaccaccaaguccgucuccuuccgccgccucucccaccuccgcaagcucguccccggcuucggcaaggccuacaccaucuucaacaagacccucauggaggccgacgcccacuacaaguccguccgcaccuggaacgagaucauccccuccaagggcugccuccgcgucggcggccgcugccacccccacgucaacggcgucuucuucaacggcaucauccucggccccgacggccacguccucauccccgagaugcaguccucccuccuccagcagcacauggagcuccucgaguccuccgucaucccccucaugcacccccucgccgaccccuccaccgucuucaaggacgacgacgaggccgaggacuucgucgagguccaccuccccgacguccacaagcaggucuccggcgucgaccucggccuccccuccuggggcaaguacguccucauguccgccggcguccucaccgcccucaugcucaugaucuuccucaugaccugcugccgccgcaccaaccgcgccgaguccgcccagcacucccucggcgagcgcggccgcaaggucuccgucaccucccaguccggccgcgucaucuccuccugggaguccuacaaguccggcggcgagaccaagcucuga

SEQ ID NO: 126733 - RNA, 1575 nt, Artificial Sequence
  derived and/or modified CDS sequence (opt2) from glycoprotein__RABV__AB563987.1
augaucccccaggcccuccucuucgucccccuccucgucuucucccucugcuucggcaaguuccccaucuacaccauccccgacaagcucggccccuggucccccaucgacauccaccaccucuccugccccaacaaccucgucgucgaggacgagggcugcaccaaccucuccggcuucuccuacauggagcucaaggucggcuacaucuccgccaucaaggucaacggcuucaccugcaccggcgucgucaccgaggccgagaccuacaccaacuucgucggcuacgucaccaccaccuucaagcgcaagcacuuccgccccacccccgacgccugccgcgccgccuacaacuggaagauggccggcgacccccgcuacgaggagucccuccacaaccccuaccccgacuaccacuggcuccgcaccgucaagaccaccaaggagucccucgucaucaucucccccuccgucgccgaccucgaccccuacgacaagucccuccacucccgcgucuuccccuccggcaagugcuccggcaucaccgucuccuccaccuacugcuccaccaaccacgacuacaccaucuggaugcccgagaacccccgccucggcaccuccugcgacaucuucaccaacucccgcggcaagcgcgccuccaagggcuccaagaccugcggcuucgucgacgagcgcggccucuacaagucccucaagggcgccugcaagcucaagcucugcggcguccucggccuccgccucauggacggcaccugggccgccauccagaccuccgacgagaccaaguggugcccccccgaccagcucgucaaccuccacgacuuccgcuccgacgagaucgagcaccucgucgucgaggagcucgucaagaagcgcgaggagugccucgacgcccucgaguccaucaugaccaccaaguccgucuccuuccgccgccucucccaccuccgcaagcucguccccggcuucggcaaggccuacaccaucuucaacaagacccucauggaggccgacgcccacuacaaguccguccgcaccuggaacgagaucauccccuccaagggcugccuccgcgucggcggccgcugccacccccacgucaacggcgucuucuucaacggcaucauccucggccccgacggccacguccucauccccgagaugcaguccucccuccuccagcagcacauggagcuccucgaguccuccgucaucccccucaugcacccccucgccgaccccuccaccgucuucaaggacgacgacgaggccgaggacuucgucgagguccaccuccccgacguccacaagcaggucuccggcgucgaccucggccuccccuccuggggcaaguacguccucauguccgccggcguccucaccgcccucaugcucaugaucuuccucaccaccugcugccgccgcgccaacaaggccgaguccgcccagcacucccucggcgagcgcggccgcaaggucuccgucaccucccaguccggccgcgucaucuccuccugggaguccuacaaguccggcggcgagaccaagcucuga

SEQ ID NO: 126734 - RNA, 1575 nt, Artificial Sequence; identical to SEQ ID NO: 126724
  derived and/or modified CDS sequence (opt2) from glycoprotein__RABV__AB563988.1

SEQ ID NO: 126735 - RNA, 1575 nt, Artificial Sequence
  derived and/or modified CDS sequence (opt2) from glycoprotein__RABV__AB563989.1
augaucccccaggcccuccucuucgucccccuccucgucuucucccucugcuucggcaaguuccccaucuacaccauccccgacaagcucggccccuggucccccaucgacauccaccaccucuccugccccaacaaccucgucgucgaggacgagggcugcaccaaccucuccggcuucuccuacauggagcucaaggucggcuacaucuccgccaucaaggucaacggcuucaccugcaccggcgucgucaccgaggccgagaccuacaccaacuucgucggcuacgucaccaccaccuucaagcgcaagcacuuccgccccacccccgacgccugccgcgccgccuacaacuggaagauggccggcgacccccgcuacgaggagucccuccacaaccccuaccccgacuaccacuggcuccgcaccgucaagaccaccaaggagucccucgucaucaucucccccuccgucgccgaccucgaccccuacgacaagucccuccacucccgcgucuuccccuccggcaagugcuccggcaucaccgucuccuccaccuacugcuccaccaaccacgacuacaccaucuggaugcccgagaacccccgccucggcaccuccugcgacaucuucaccaacucccgcggcaagcgcgccuccaagggcuccaagaccugcggcuucgucgacgagcgcggccucuacaagucccucaagggcgccugcaagcucaagcucugcggcguccucggccuccgccucauggacggcaccugggccgccauccagaccuccgacgagaccaaguggugcccccccgaccagcucgucaaccuccacgacuuccgcuccgacgagaucgagcaccucgucgucgaggagcucgucaagaagcgcgaggagugcaucgacgcccucgaguccaucaugaccaccaaguccgucuccuuccgccgccucucccaccuccgcaagcucguccccggcuucggcaaggccuacaccaucuucaacaagacccucauggaggccgacgcccacuacaaguccguccgcaccuggaacgagaucauccccuccaagggcugccuccgcgucggcggccgcugccacccccacgucaacggcgucuucuucaacggcaucauccucggccccgacggccacguccucauccccgagaugcaguccucccuccuccagcagcacauggagcuccucgaguccuccgucaucccccucaugcacccccucgccgaccccuccaccgucuucaaggacgacgacgaggccgaggacuucgucgagguccaccuccccgacguccacaagcaggucuccggcgucgaccucggccuccccuccuggggcaaguacguccucauguccgccggcguccucaccgcccucaugcucaugaucuuccucaugaccugcugccgccgcaccaaccgcgccgaguccgcccagcacucccucggcgagcgcggccgcaaggucuccgucaccucccaguccggccgcgucaucuccuccugggaguccuacaaguccggcggcgagaccaagcucuga

SEQ ID NO: 126736 - RNA, 1575 nt, Artificial Sequence
  derived and/or modified CDS sequence (opt2) from glycoprotein__RABV__AB563990.1
augaucccccaggcccuccucuucgucccccuccucgucuucucccucugcuucggcaaguuccccaucuacaccauccccgacaagcucggccccuggucccccaucgacauccaccaccucuccugccccaacaaccucgucgucgaggacgagggcugcaccaaccucuccggcuucuccuacauggagcucaaggucggcuacaucuccgccaucaaggucaacggcuucaccugcaccggcgucgucaccgaggccgagaccuacaccaacuucgucggcuacgucaccaccaccuucaagcgcaagcacuuccgccccacccccgacgccugccgcgccgccuacaacuggaagauggccggcgacccccgcuacgaggagucccuccacaaccccuaccccgacuaccacuggcuccgcaccgucaagaccaccaaggagucccucgucaucaucucccccuccgucgccgaccucgaccccuacgacaagucccuccacucccgcgucuuccccuccggcaagugcuccggcaucaccgucuccuccaccuacugcuccaccaaccacgacuacaccaucuggaugcccgagaacccccgccucggcaccuccugcgacaucuucaccaacucccgcggcaagcgcgccuccaagggcuccaagaccugcggcuucgucgacgagcgcggccucuacaagucccucaagggcgccugcaagcucaagcucugcggcauccucggccuccgccucauggacggcaccugggccgccauccagaccuccgacgagaccaaguggugcccccccgaccagcucgucaaccuccacgacuuccgcuccgacgagaucgagcaccucgucgucgaggagcucgucaagaagcgcgaggagugccucgacgcccucgaguccaucaugaccaccaaguccgucuccuuccgccgccucucccaccuccgcaagcucguccccggcuucggcaaggccuacaccaucuucaacaagacccucauggaggccgacgcccacuacaaguccguccgcaccuggaacgagaucauccccuccaagggcugccuccgcgucggcggccgcugccacccccacgucaacggcgucuucuucaacggcaucauccucggccccgacggccacguccucauccccgagaugcaguccucccuccuccagcagcacauggagcuccucgaguccuccgucaucccccucaugcacccccucgccgaccccuccaccgucuucaaggacgacgacgaggccgaggacuucgucgagguccaccuccccgacguccacaagcaggucuccggcgucgaccucggccuccccuccuggggcaaguacguccucauguccgccggcguccucaccgcccucaugcucaugaucuuccucaugaccugcugccgccgcgccaaccgcgccgaguccgcccagcacucccucggcgagcgcggccgcaaggucuccgucaccucccaguccggccgcgucaucuccuccugggaguccuacaaguccggcggcgagaccaagcucuga

SEQ ID NO: 126737 - RNA, 1575 nt, Artificial Sequence
  derived and/or modified CDS sequence (opt2) from glycoprotein__RABV__AB563991.1
augaucccccaggcccuccucuucgucccccuccucgucuucucccucugcuucggcaaguuccccaucuacaccauccccgacaagcucggccccuggucccccaucgacauccaccaccucuccugccccaacaaccucgucgucgaggacgagggcugcaccaaccucuccggcuucuccuacauggagcucaaggucggcuacaucuccgccaucaaggucaacggcuucaccugcaccggcgucgucaccgaggccgagaccuacaccaacuucgucggcuacgucaccaccaccuucaagcgcaagcacuuccgccccacccccgacgccugccgcgccgccuacaacuggaagauggccggcgacccccgcuacgaggagucccuccacaaccccuaccccgacuaccacuggcuccgcaccgucaagaccaccaaggagucccucgucaucaucucccccuccgucgccgaccucgaccccuacgacaagucccuccacucccgcgucuuccccuccggcaagugcuccggcaucaccgucuccuccaccuacugcuccaccaaccacgacuacaccaucuggaugcccgagaacccccgccucggcaccuccugcgacaucuucaccaacucccgcggcaagcgcgccuccaagggcuccaagaccugcggcuucgucgacgagcgcggccucuacaagucccucaagggcgccugcaagcucaagcucugcggcguccucggccuccgccucauggacggcaccugggccgccauccagaccuccgacgagaccaaguggugcccccccgaccagcucgucaaccuccacgacuuccgcuccgacgagaucgagcaccucgucgucgaggagcucguccgcaagcgcgaggagugccucgacgcccucgaguccaucaugaccaccaaguccgucuccuuccgccgccucucccaccuccgcaagcucguccccggcuucggcaaggccuacaccaucuucaacaagacccucauggaggccgacgcccacuacaaguccguccgcaccuggaacgagaucauccccuccaagggcugccuccgcgucggcggccgcugccacccccacgucaacggcgucuucuucaacggcaucauccucggccccgacggccacguccucauccccgagaugcaguccucccuccuccagcagcacauggagcuccucgaguccuccgucaucccccucaugcacccccucgccgaccccuccaccgucuucaaggacgacgacgaggccgaggacuucgucgagguccaccuccccgacguccacaagcaggucuccggcgucgaccucggccuccccuccuggggcaaguacguccucauguccgccggcguccucaccgcccucaugcucaugaucuuccucaugaccugcugccgccgcaccaaccgcgccgaguccgcccagcacucccucggcgagcgcggccgcaaggucuccgucaccucccaguccggccgcgucaucuccuccugggaguccuacaaguccggcggcgagaccaagcucuga

SEQ ID NO: 126738 - RNA, 1575 nt, Artificial Sequence; identical to SEQ ID NO: 126724
  derived and/or modified CDS sequence (opt2) from glycoprotein__RABV__AB563992.1

SEQ ID NO: 126739 - RNA, 1575 nt, Artificial Sequence; identical to SEQ ID NO: 126724
  derived and/or modified CDS sequence (opt2) from glycoprotein__RABV__AB563993.1

SEQ ID NO: 126740 - RNA, 1575 nt, Artificial Sequence; identical to SEQ ID NO: 126607
  derived and/or modified CDS sequence (opt2) from glycoprotein__RABV__AB563994.1

SEQ ID NO: 126741 - RNA, 1575 nt, Artificial Sequence; identical to SEQ ID NO: 126608
  derived and/or modified CDS sequence (opt2) from glycoprotein__RABV__AB563996.1

SEQ ID NO: 126742 - RNA, 1575 nt, Artificial Sequence
  derived and/or modified CDS sequence (opt2) from glycoprotein__RABV__AB563997.1
augaucccccaggcccuccucuucguccccauccucgucuucucccucugcuucggcaaguuccccaucuacaccauccccgacaagcucggccccuggucccccaucgacauccaccaccucuccugccccaacaaccucgucgucgaggacgagggcugcaccaaccucuccggcuucuccuacauggagcucaaggucggcuacaucuccgccaucaaggucaacggcuucaccugcaccggcgucgucaccgaggccgagaccuacaccaacuucgucggcuacgucaccaccaccuucaagcgcaagcacuuccgccccacccccgacgccugccgcgccgccuacaacuggaagauggccggcgacccccgcuacgaggagucccuccacaaccccuaccccgacuaccacuggcuccgcaccgucaagaccaccaaggagucccucgucaucaucucccccuccgucgccgaccucgaccccuacgacaagucccuccacucccgcgucuuccccuccggcaagugcuccggcaucaccgucuccuccaccuacugcuccaccaaccacgacuacaccaucuggaugcccgagaacccccgccucggcaccuccugcgacaucuucaccaacucccgcggcaagcgcgccuccaagggcuccaagaccugcggcuucgucgacgagcgcggccucuacaagucccucaagggcgccugcaagcucaagcucugcggcguccucggccuccgccucauggacggcaccugggccgccauccagaccuccgacgagaccaaguggugcccccccgaccagcucgucaaccuccacgacuuccgcuccgacgagaucgagcaccucgucgucgaggagcucgucaagaagcgcgaggagugccucgacgcccucgaguccaucaugaccaccaaguccgucuccuuccgccgccucucccaccuccgcaagcucguccccggcuucggcaaggccuacaccaucuucaacaagacccucauggaggccgacgcccacuacaaguccguccgcaccuggaacgagaucauccccuccaagggcugccuccgcgucggcggccgcugccacccccacgucaacggcgucuucuucaacggcaucauccucggccccgacggccacguccucauccccgagaugcaguccucccuccuccagcagcacauggagcuccucgaguccuccgucaucccccucaugcacccccucgccgaccccuccaccgucuucaaggacgacgacgaggccgaggacuucgucgagguccaccuccccgacguccacaagcaggucuccggcgucgaccucggccuccccuccuggggcaaguacguccucauguccgccggcguccucaccgcccucaugcucaugaucuuccucaugaccugcugccgccgcgccucccgcgucgaguccgcccagcacucccucggcgagcgcggccgcaaggucuccgucaccucccaguccggccgcgucaucuccuccugggaguccuacaaguccggcggcgagaccaagcucuga

SEQ ID NO: 126743 - RNA, 1575 nt, Artificial Sequence
  derived and/or modified CDS sequence (opt2) from glycoprotein__RABV__AB563998.1
augaucccccaggcccuccucuucgucccccuccucgucuucucccucugcuucggcaaguuccccaucuacaccauccccgacaagcucggccccuggucccccaucgacauccaccaccucuccugccccaacaaccucgucgucgaggacgagggcugcaccaaccucuccggcuucuccuacauggagcucaaggucggcuacaucuccgccaucaaggucaacggcuucaccugcaccggcgucgucaccgaggccgagaccuacaccaacuucgucggcuacgucaccaccaccuucaagcgcaagcacuuccgccccacccccgacgccugccgcgccgccuacaacuggaagauggccggcgacccccgcuacgaggagucccuccacaagcccuaccccgacuaccacuggcuccgcaccgucaagaccaccaaggagucccucgucaucaucucccccuccgucgccgaccucgaccccuacgacaagucccuccacucccgcgucuuccccaacggcaagugcuccggcaucaccgucuccuccaccuacugcuccaccaaccacgacuacaccaucuggaugcccgagaacccccgccucggcaccuccugcgacaucuucaccaacucccgcggcaagcgcgccuccaagggcuccaagaccugcggcuucgucgacgagcgcggccucuacaagucccucaagggcgccugcaagcucaagcucugcggcguccucggccuccgccucauggacggcaccugggccgccauccagaccuccgacgagaccaaguggugcccccccgaccagcucgucaaccuccacgacuuccgcuccgacgagaucgagcaccucgucgucgaggagcucgucaagaagcgcgaggagugccucgacgcccucgaguccaucaugaccaccaaguccgucuccuuccgccgccucucccaccuccgcaagcucguccccggcuucggcaaggccuacaccaucuucaacaagacccucauggaggccgacgcccacuacaaguccguccgcaccuggaacgagaucauccccuccaagggcugccuccgcgucggcggccgcugccacccccacgucaacggcgucuucuucaacggcaucauccucggccccgacggccacguccucauccccgagaugcaguccucccuccuccagcagcacauggagcuccucgaguccuccgucaucccccucaugcacccccucgccgaccccuccaccgucuucaaggacgacgacgaggccgaggacuucgucgagguccaccuccccgacguccacaagcaggucuccggcgucgaccucggccuccccuccuggggcaaguacguccucauguccgccggcguccucaccgcccucaugcucaugaucuuccucaugaccugcugccgccgcgccaaccgcgccgaguccgcccagcacucccucggcgagcgcggccgcaaggucuccgucaccucccaguccggccgcgucaucuccuccugggaguccuacaaguccggcggcgagaccaagcucuga

SEQ ID NO: 126744 - RNA, 1575 nt, Artificial Sequence
  derived and/or modified CDS sequence (opt2) from glycoprotein__RABV__AB563999.1
augaucccccaggcccuccucuucgucccccuccucgucuccucccucugcuucggcaaguuccccaucuacaccauccccgacaagcucggccccuggucccccaucgacauccaccaccucuccugccccaacaaccucgucgucgaggacgagggcugcaccaaccucuccggcuucuccuacauggagcucaaggucggcuacaucuccgccaucaaggucaacggcuucaccugcaccggcgucgucaccgaggccgagaccuacaccaacuucgucggcuacgucaccaccaccuucaagcgcaagcacuuccgccccacccccgacgccugccgcgccgccuacaacuggaagauggccggcgacccccgcuacgaggagucccuccacaaccccuaccccgacuaccacuggcuccgcaccgucaagaccaccaaggagucccucgucaucaucucccccuccgucgccgaccucgaccccuacgacaagucccuccacucccgcgucuuccccuccggcaagugcuccggcaucaccgucuccuccaccuacugcuccaccaaccacgacuacaccaucuggaugcccgagaacccccgccucggcaccuccugcgacaucuucaccaacucccgcggcaagcgcgccuccaagggcuccaagaccugcggcuucgucgacgagcgcggccucuacaagucccucaagggcgccugcaagcucaagcucugcggcguccucggccuccgccucauggacggcaccugggccgccauccagaccuccgacgagaccaaguggugcccccccgaccagcucgucaaccuccacgacuuccgcuccgacgagaucgagcaccucgucgucgaggagcucgucaagaagcgcgaggagugccucgacgcccucgaguccaucaugaccaccaaguccgucuccuuccgccgccucucccaccuccgcaagcucguccccggcuucggcaaggccuacaccaucuucaacaagacccucauggaggccgacgcccacuacaaguccguccgcaccuggaacgagaucauccccuccaagggcugccuccgcgucggcggccgcugccacccccacgucaacggcgucuucuucaacggcaucauccucggccccgacggccacguccucauccccgagaugcaguccucccuccuccagcagcacauggagcuccucgaguccuccgucaucccccucaugcacccccucgccgaccccuccaccgucuucaaggacgacgacgaggccgaggacuucgucgagguccaccuccccgacguccacaagcaggucuccggcgucgaccucggccuccccuccuggggcaaguacguccucaccuccgccggcguccucaccgcccucaugcucaugaucuuccucaugaccugcugccgccgcgccaaccgcgccgaguccgcccagcacucccucggcgagcgcggccgcaaggucuccgucaccucccagucccgccgcgucaucuccuccugggaguccuacaaguccggcggcgagaccaagcucuga

SEQ ID NO: 126745 - RNA, 1575 nt, Artificial Sequence
  derived and/or modified CDS sequence (opt2) from glycoprotein__RABV__AB564001.1
augaucccccaggcccucauguucgucccccuccucgucuucucccucugcuucggcaaguuccccaucuacaccauccccgacaagcucggccccuggucccccaucgacauccaccaccucuccugccccaacaaccucgucgucgaggacgagggcugcaccaaccucuccggcuucuccuacauggagcucaaggucggcuacaucuccgccaucaaggucaacggcuucaccugcaccggcgucgucaccgaggccgagaccuacaccaacuucgucggcuacgucaccaccaccuucaagcgcaagcacuuccgccccaugcccgacgccugccgcgccgccuacaacuggaagauggccggcgacccccgcuacgaggagucccuccacaaccccuaccccgacuaccacuggcuccgcaccgucaagaccaccaaggagucccucgucaucaucucccccuccgucgccgaccucgaccccuacgacaagucccuccacucccgcgucuuccccuccggcaagugcuccggcaugaccgucuccuccaccuacugcuccaccaaccacgacuacaccaucuggaugcccgagaacccccgccucggcaccuccugcgacaucuucaccaacucccgcggcaagcgcgccuccaagggcuccaagaccugcggcuucgucgacgagcgcggccucuacaagucccucaagggcgccugcaagcucaagcucugcggcguccucggccuccgccucauggacggcaccugggccgccauccagaccuccgacgagaccaaguggugcccccccgaccagcucgucaaccuccacgacuuccgccucgacgagaucgagcaccucgucgucgaggagcucgucaagaagcgcgaggagugccucgacgcccucgaguccaucaugaccaccaaguccgucuccuuccgccgccucucccaccuccgcaagcucguccccggcuucggcaaggccuacaccaucuucaacaagacccucauggaggccgacgcccacuacaaguccguccgcaccuggaacgagaucauccccuccaagggcugccuccgcgucggcggccgcugccacccccacgucaacggcgucuucuucaacggcaucauccucggccccgacggccacguccucauccccgagaugcaguccucccuccuccagcagcacauggagcuccucgaguccuccgucaucccccucaugcacccccucgccgaccccuccaccgucuucaagggcgacgacgaggccgaggacuucgucgagguccaccuccccgacguccacaagcaggucuccggcgucgaccucggccuccccuccuggggcaaguacguccucauguccgccggcguccucaccgcccucaugcucaugaucuuccucaugaccugcugcaagcgcgccaaccgcgccgaguccgcccaccacucccucggcgagcgcggccgcaaggucuccgucaccucccaguccggccgcgucaucuccuccugggaguccuacaaguccggcggcgagaccaagcucuga

SEQ ID NO: 126746 - RNA, 1575 nt, Artificial Sequence
  derived and/or modified CDS sequence (opt2) from glycoprotein__RABV__AB564002.1
augaucccccgcgcccucauguucgucccccuccucgucuucucccucugcuucggcaaguuccccaucuacaccauccccgacaagcucggccccuggucccccaucgacauccaccaccucuccugccccaacaaccucgucgucgaggacgagggcugcaccaaccucuccggcuucuccuacauggagcucaaggucggcuacaucuccgccaucaaggucaacggcuucaccugcaccggcgucgucaccgaggccgagaccuacaccaacuucgucggcuacgucaccaccaccuucaagcgcaagcacuuccgccccaugcccgacgccugccgcgccgccuacaacuggaagauggccggcgacccccgcuacgaggagucccuccacaaccccuaccccgacuaccacuggcuccgcaccgucaagaccaccaaggagucccucgucaucaucucccccuccgucgccgaccucgaccccuacgacaagucccuccacucccgcgucuuccccuccggcaagugcuccggcaugaccgucuccuccaccuacugcuccaccaaccacgacuacaccaucuggaugcccgagaacccccgccucggcaccuccugcgacaucuucaccaacucccgcggcaagcgcgccuccaagggcuccaagaccugcggcuucgucgacgagcgcggccucuacaagucccucaagggcgccugcaagcucaagcucugcggcguccucggccuccgccucauggacggcaccugggccgccauccagaccuccgacgagaccaaguggugcccccccgaccagcucgucaaccuccacgacuuccgcuccgacgagaucgagcaccucgucgucgaggagcucgucaagaagcgcgaggagugccucgacgcccucgaguccaucaugaccaccaaguccgucuccuuccgccgccucucccaccuccgcaagcucguccccggcuucggcaaggccuacaccaucuucaacaagacccucauggaggccgacgcccacuacaaguccguccgcaccuggaacgagaucauccccuccaagggcugccuccgcgucggcggccgcugccacccccacgucaacggcgucuucuucaacggcaucauccucggccccgacggccacguccucauccccgagaugcaguccucccuccuccagcagcacauggagcuccucgaguccuccgucaucccccucaugcacccccucgccgaccccuccaccgucuucaagggcgacgacgaggccgaggacuucgucgagguccaccuccccgacguccacaagcaggucuccggcgucgaccucggccuccccuccuggggcaaguacguccucauguccgccggcguccucaccgcccucaugcucaugaucuuccucaugaccugcugcaagcgcgccaaccgcgccgaguccgcccaccacaaccucggcgagcgcggccgcaaggucuccgucaccucccaguccggccgcgucaucuccuccugggaguccuacaaguccggcggcgagaccaagcucuga

SEQ ID NO: 126747 - RNA, 1575 nt, Artificial Sequence
  derived and/or modified CDS sequence (opt2) from glycoprotein__RABV__AB564004.1
augaucccccaggcccucauguucgucccccuccucgucuucucccucugccucggcaaguuccccaucuacaccauccccgacaagcucggccccuggucccccaucgacauccaccaccucuccugccccaacaaccucgucgucgaggacgagggcugcaccaaccucuccggcuucuccuacauggagcucaaggucggcuacaucuccgccaucaaggucaacggcuucaccugcaccggcgucgucaccgaggccgagaccuacaccaacuucgucggcuacgucaccaccaccuucaagcgcaagcacuuccgccccaugcccgacgccugccgcgccgccuacaacuggaagauggccggcgacccccgcuacgaggagucccuccacaaccccuaccccgacuaccacuggcuccgcaccgucaagaccaccaaggagucccucgucaucaucucccccuccgucgccgaccucgaccccuacgacaagucccuccacucccgcgucuuccccggcggcaagugcuccggcaugaccgucuccuccaccuacugcuccaccaaccacgacuacaccaucuggaugcccgagaacccccgccucggcaccuccugcgacaucuucaccaacucccgcggcaagcgcgccuccaagggcuccaagaccugcggcuucgucgacgagcgcggccucuacaagucccucaagggcgccugcaagcucaagcucugcggcguccucggccuccgccucauggacggcaccugggccgccauccagaccuccgacgagaccaaguggugcccccccgaccagcucgucaaccuccacgacuuccgcuccgacgagaucgagcaccucgucgucgaggagcucgucaagaagcgcgaggagugccucgacgcccucgaguccaucaugaccaccaaguccgucuccuuccgccgccucucccaccuccgcaagcucguccccggcuucggcaaggccuacaccaucuucaacaagacccucauggaggccgacgcccacuacaaguccguccgcaccuggaacgagaucauccccuccaagggcugccuccgcgucggcggccgcugccacccccacgucaacggcgucuucuucaacggcaucauccucggccccgacggccacguccucauccccgagaugcaguccucccuccuccagcagcacauggagcuccucgaguccuccgucaucccccucaugcacccccucgccgaccccuccaccgucuucaagggcgacgacgaggccgaggacuucgucgagguccaccuccccgacguccacaagcaggucuccggcgucgaccucggccuccccuccuggggcaaguacguccucauguccgccggcguccucaccgcccucaugcucaugaucuuccucaugaccugcugcaagcgcgccaaccgcgccgaguccgcccaccacucccucggcgagcgcggccgcaaggucuccgucaccucccaguccggccgcgucaucuccuccugggaguccuacaaguccggcggcgagaccaagcucuga

SEQ ID NO: 126748 - RNA, 1575 nt, Artificial Sequence; identical to SEQ ID NO: 126675
  derived and/or modified CDS sequence (opt2) from glycoprotein__RABV__AB564005.1

SEQ ID NO: 126749 - RNA, 1575 nt, Artificial Sequence; identical to SEQ ID NO: 126675
  derived and/or modified CDS sequence (opt2) from glycoprotein__RABV__AB564006.1

SEQ ID NO: 126750 - RNA, 1575 nt, Artificial Sequence
  derived and/or modified CDS sequence (opt2) from glycoprotein__RABV__AB564007.1
augaucccccaggcccucauguucgucccccuccucgucuucucccucugcuucggcaaguuccccaucuacaccauccccgacaagcucggccccuggucccccaucgacauccaccaccucuccugccccaacaaccucgucgucgaggacgagggcugcaccaaccucuccggcuucuccuacauggagcucaaggucggcuacaucuccgccaucaaggucaacggcuucaccugcaccggcgucgucaccgaggccgagaccuacaccaacuucgucggcuacgucaccaccaccuucaagcgcaagcacuuccgccccaugcccgacgccugccgcgccgccuacaacuggaagauggccggcgacccccgcuacgaggagucccuccacaaccccuaccccgacuaccacuggcuccgcaccgucaagaccaccaaggagucccucgucaucaucucccccuccgucgccgaccucgaccccuacgacaagucccuccacucccgcgucuuccccggcggcaagugcuccggcaugaccgucuccuccaccuacugcuccaccaaccacgacuacaccaucuggaugcccgagaacccccgccucggcaccuccugcgacaucuucaccaacucccgcggcaagcgcgccuccaagggcuccaagaccugcggcuucgucgacgagcgcggccucuacaagucccucaagggcgccugcaagcucaagcucugcggcguccucggccuccgccucauggacggcaccugggccgccauccagaccuccgacgagaccaaguggugcccccccgaccagcucgucaaccuccacgacuuccgcuccgacgagaucgagcaccucgucgucgaggagcucgucaagaagcgcgaggagugccucgacgcccucgaguccaucaugaccaccaaguccgucuccuuccgccgccucucccaccuccgcaagcucguccccggcuucggcaaggccuacaccaucuucaacaagacccucauggaggccgacgcccacuacaaguccguccgcaccuggaacgagaucauccccuccaagggcugccuccgcgucggcggccgcugccacccccacgucaacggcgucuucuucaacggcaucauccucggccccgacggccacguccucauccccgagaugcaguccucccuccuccagcagcacauggagcuccucgaguccuccgucaucccccucaugcacccccucgccgaccccuccaccgucuucaagggcgacgacgaggccgaggacuucgucgagguccaccuccccgacguccacaagcaggucuccggcgucgaccucggccuccccuccuggggcaaguacguccucauguccgccggcguccucaccgcccucaugcucaugaucuuccucaugaccugcugcaagcgcgccaaccgcgccaaguccgcccaccacucccucggcgagcgcggccgcaaggucuccgucaccucccaguccggccgcgucaucuccuccugggaguccuacaaguccggcggcgagaccaagcucuga

SEQ ID NO: 126751 - RNA, 1575 nt, Artificial Sequence; identical to SEQ ID NO: 126637
  derived and/or modified CDS sequence (opt2) from glycoprotein__RABV__AB564008.1

SEQ ID NO: 126752 - RNA, 1575 nt, Artificial Sequence
  derived and/or modified CDS sequence (opt2) from glycoprotein__RABV__AB564009.1
augaacccccaggcccucauguucgucccccuccucgucuucucccucugcuucggcaaguuccccaucuacaccauccccgacaagcucggccccuggucccccaucgacauccaccaccucuccugccccaacaaccucgucgucgaggacgagggcugcaccaaccucuccggcuucuccuacauggagcucaaggucggcuacaucuccgccaucaaggucaacggcuucaccugcaccggcgucgucaccgaggccgagaccuacaccaacuucgucggcuacgucaccaccaccuucaagcgcaagcacuuccgccccacccccgacgccugccgcgccgccuacaacuggaagauggccggcgacccccgcuacgaggagucccuccacaaccccuaccccgacuaccacuggcuccgcaccgucaagaccaccaaggagucccucgucaucaucucccccuccgucgccgaccucgaccccuacgacaagucccuccacucccgcgucuuccccuccggcaagugcuccggcaucaccgucuccuccaccuacugcuccaccaaccacgacuacaccaucuggaugcccgagaacccccgccucggcaccuccugcgacaucuucaccaacucccgcggcaagcgcgccuccaagggcuccaagaccugcggcuucgucgacgagcgcggccucuacaagucccucaagggcgccugcaagcucaagcucugcggcguccucggccuccgccucauggacggcaccugggccgccauccagaccuccgacgagaccaaguggugcccccccgaccagcucgucaaccuccacgacuuccgcuccgacgagaucgagcaccucgucgucgaggagcucgucaagaagcgcgaggagugccucgacgcccucgaguccaucaugaccaccaaguccgucuccuuccgccgccucucccaccuccgcaagcucguccccggcuucggcaaggccuacaccaucuucaacaagacccucauggaggccgacgcccacuacaaguccguccgcaccuggaacgagaucauccccuccaagggcugccuccgcgucggcggccgcugccacccccacgucaacggcgucuucuucaacggcaucauccucggccccgacggccacguccucauccccgagaugcaguccucccuccuccagcagcacgucgagcuccucgaguccuccgucaucccccucaugcacccccucgccgaccccuccaccgucuucaaggacgacgacgaggccgaggacuucgucgagguccaccuccccgacguccacaagcaggucuccggcgucgaccucggccuccccuccuggggcaaguacguccucauguccgccggcguccucaccgcccucaugcucaugaucuuccucaugaccugcugccgccgcgccaaccgcgccgaguccgcccagcacucccucggcgagcgcggccgcaaggucuccaucaccucccaguccggccgcgucaucuccuccugggaguccuacaaguccggcggcgagaccaagcucuga

SEQ ID NO: 126753 - RNA, 1575 nt, Artificial Sequence; identical to SEQ ID NO: 126637
  derived and/or modified CDS sequence (opt2) from glycoprotein__RABV__AB564010.1

SEQ ID NO: 126754 - RNA, 1575 nt, Artificial Sequence; identical to SEQ ID NO: 126637
  derived and/or modified CDS sequence (opt2) from glycoprotein__RABV__AB564011.1

SEQ ID NO: 126755 - RNA, 1575 nt, Artificial Sequence
  derived and/or modified CDS sequence (opt2) from glycoprotein__RABV__AB564012.1
augaacccccaggcccucauguucgucccccuccucgucuucucccucugcuucggcaaguuccccaucuacaccauccccgacaagcucggccccuggucccccaucgacauccaccaccucuccugccccaacaaccucgucgucgaggacgagggcugcaccaaccucuccggcuucuccuacauggagcucaaggucggcuacaucuccgccaucaaggucaacggcuucaccugcaccggcgucgucaccgaggccgagaccuacaccaacuucgucggcuacgucaccaccaccuucaagcgcaagcacuuccgccccacccccgacgccugccgcgccgccuacaacuggaagauggccggcgacccccgcuacgaggagucccuccacaaccccuaccccgacuaccacuggcuccgcaccgucaagaccaccaaggagucccucgucaucaucucccccuccgucgccgaccucgaccccuacgacaagucccuccacucccgcgucuuccccuccggcaagugcuccggcaucaccgucuccuccaccuacugcuccaccaaccacgacuacaccaucuggaugcccgagaacccccgccucggcaccuccugcgacaucuucaccaacucccgcggcaagcgcgccuccaagggcuccaagaccugcggcuucgucgacgagcgcggccucuacaagucccucaagggcgccugcaagcucaagcucugcggcguccucggccuccgccucauggacggcaccugggccgccauccagaccuccgacgagaccaaguggugcccccccgaccagcucgucaaccuccacgacuuccacuccgacgagaucgagcaccucgucgucgaggagcucgucaagaagcgcgaggagugccucgacgcccucgaguccaucaugaccaccaaguccgucuccuuccgccgccucucccaccuccgcaagcucguccccggcuucggcaaggccuacaccaucuucaacaagacccucauggaggccgacgcccacuacaaguccguccgcaccuggaacgagaucauccccuccaagggcugccuccgcgucggcggccgcugccacccccacgucaacggcgucuucuucaacggcaucauccucggccccgacggccacguccucauccccgagaugcaguccucccuccuccagcagcacauggagcuccucgaguccuccgucaucccccucaugcacccccucgccgaccccuccaccgucuucaaggacgacgacgaggccgaggacuucgucgagguccaccuccccgacguccacaagcaggucuccggcgucgaccucggccuccccuccuggggcaaguacguccucauguccgccggcguccucaccgcccucaugcucaugaucuuccucaugaccugcugccgccgcgccaaccgcgccgaguccgcccagcacucccucggcgagcgcggccgcaaggucuccgucaccucccaguccggccgcgucaucuccuccugggaguccuacaaguccggcggcgagaccaagcucuga

SEQ ID NO: 126756 - RNA, 1575 nt, Artificial Sequence
  derived and/or modified CDS sequence (opt2) from glycoprotein__RABV__AB564015.1
augaacccccaggcccucauguucgucccccuccucgucuucucccucugcuucggcaaguuccccaucuacaccauccccgacaagcucggccccuggucccccaucgacauccaccaccucuccugccccaacaaccucgucgucgaggacgagggcugcaccaaccucuccggcuucuccuacauggagcucaaggucggcuacaucuccgccaucaaggucaacggcuucaccugcaccggcgucgucaccgaggccgagaccuacaccaacuucgucggcuacgucaccaccaccuucaagcgcaagcacuuccgccccacccccgacgccugccgcgccgccuacaacuggaagauggccggcgacccccgcuacgaggagucccuccacaaccccuaccccgacuaccacuggcuccgcaccgucaagaccaccaaggagucccucgucaucaucucccccuccgucgccgaccucgaccccuacgacaagucccuccacucccgcgucuuccccuccggcaagugcuccggcaucaccgucuccuccaccuacugcuccaccaaccacgacuacaccaucuggaugcccgagaacccccgccucggcaccuccugcgacaucuucaccaacucccgcggcaagcgcgccuccaagggcuccaagaccugcggcuucgucgacgagcgcggccucuacaagucccucaagggcgccugcaagcucaagcucugcggcguccucggccuccgccucauggacggcaccugggccgccauccagaccuccgacgagaccaaguggugcccccccgaccagcucgucaaccuccacgacuuccgcuccgacgagaucgagcaccucgucgucgaggagcucgucaagaagcgcgaggagugccucgacgcccucgaguccaucaugaccaccaaguccgucuccuuccgccgccucucccaccuccgcaagcucguccccggcuucggcaaggccuacaccaucuucaacaagacccucauggaggccgacgcccacuacaaguccguccgcaccuggaacgagaucauccccuccaagggcugccuccgcgucggcggccgcugccacccccacgucaacggcgucuucuucaacggcaucauccucggccccgacggccacguccucauccccgagcgccaguccucccuccuccagcagcacauggagcuccucgaguccuccgucaucccccucaugcacccccucgccgaccccuccaccgucuucaaggacgacgacgaggccgaggacuucgucgagguccaccuccccgacguccacaagcaggucuccggcgucgaccucggccuccccuccuggggcaaguacguccucauguccgccggcguccucaccgcccucaugcucaugaucuuccucaugaccugcugccgccgcgccaaccgcgccgaguccgcccagcacucccucggcgagcgcggccgcaaggucuccgucaccucccaguccggccgcgucaucuccuccugggaguccuacaaguccggcggcgagaccaagcucuga

SEQ ID NO: 126757 - RNA, 1575 nt, Artificial Sequence
  derived and/or modified CDS sequence (opt2) from glycoprotein__RABV__AB564016.1
augaacccccaggcccucauguucgucccccuccucggcuucucccucugcuucggcaaguuccccaucuacaccauccccgacaagcucggccccuggucccccaucgacauccaccaccucuccugccccaacaaccucgucgucgaggacgagggcugcaccaaccucuccggcuucuccuacauggagcucaaggucggcuacaucuccgccaucaaggucaacggcuucaccugcaccggcgucgucaccgaggccgagaccuacaccaacuucgucggcuacgucaccaccaccuucaagcgcaagcacuuccgccccacccccgacgccugccgcgccgccuacaacuggaagauggccggcgacccccgcuacgaggagucccuccacaaccccuaccccgacuaccacuggcuccgcaccgucaagaccaccaaggagucccucgucaucaucucccccuccgucgccgaccucgaccccuacgacaagucccuccacucccgcgucuuccccuccggcaagugcuccggcaucaccgucuccuccaccuacugcuccaccaaccacgacuacaccaucuggaugcccgagaacccccgccucggcaccuccugcgacaucuucaccaacucccgcggcaagcgcgccuccaagggcuccaagaccugcggcuucgucgacgagcgcggccucuacaagucccucaagggcgccugcaagcucaagcucugcggcguccucggccuccgccucauggacggcaccugggccgccauccagaccuccgacgagaccaaguggugcccccccgaccagcucgucaaccuccacgacuuccgcuccgacgagaucgagcaccucgucgucgaggagcucgucaagaagcgcgaggagugccucgacgcccucgaguccaucaugaccaccaaguccgucuccuuccgccgccucucccaccuccgcaagcucguccccggcuucggcaaggccuacaccaucuucaacaagacccucauggaggccgacgcccacuacaaguccguccgcaccuggaacgagaucauccccuccaagggcugccuccgcgucggcggccgcugccacccccacgucaacggcgucuucuucaacggcaucauccucggccccgacggccacguccucauccccgagaugcaguccucccuccuccagcagcacauggagcuccucgaguccuccgucaucccccucaugcacccccucgccgaccccuccaccgucuucaaggacgacgacgaggccgaggacuucgucgagguccaccuccccgacguccacaagcaggucuccggcgucgaccucggccuccccuccuggggcaaguacguccucauguccgccggcguccucaccgcccucaugcucaugaucuuccucaugaccugcugccgccgcgccaaccgcgccgaguccgcccagcacucccucggcgagcgcggccgcaaggucuccgucaccucccaguccggccgcgucaucuccuccugggaguccuacaaguccggcggcgagaccaagcucuga

SEQ ID NO: 126758 - RNA, 1575 nt, Artificial Sequence
  derived and/or modified CDS sequence (opt2) from glycoprotein__RABV__AB564017.1
augaacccccaggcccucauguucgucccccuccucgucuucucccucugcuucggcaaguuccccaucuacaccauccccgacaagcucggccccuggucccccaucgacauccaccaccucuccugccccaacaaccucgucgucgaggacgagggcugcaccaaccucuccggcuucuccuacauggagcucaaggucggcuacaucuccgccaucaaggucaacggcuucaccugcaccggcgucgucaccgaggccgagaccuacaccaacuucgucggcuacgucaccaccaccuucaagcgcaagcacuuccgccccacccccgacgccugccgcgccgccuacaacuggaagauggccggcgacccccgcuacgaggagucccuccacaaccccuaccccgacuaccacuggcuccgcaccgucaagaccaccaaggagucccucgucaucaucucccccuccgucgccgaccucgaccccuacgacaagucccuccacucccgcgucuuccccuccggcaagugcuccggcaucaccgucuccuccaccuacugcuccaccaaccacgacuacaccaucuggaugcccgagaacccccgccucggcaccuccugcgacaucuucaccaacucccgcggcaagcgcgccuccgagggcuccaagaccugcggcuucgucgacgagcgcggccucuacaagucccucaagggcgccugcaagcucaagcucugcggcguccucggccuccgccucauggacggcaccugggccgccauccagaccuccgacgagaccaaguggugcccccccgaccagcucgucaaccuccacgacuuccgcuccgacgagaucgagcaccucgucgucgaggagcucgucaagaagcgcgaggagugccucgacgcccucgaguccaucaugaccaccaaguccgucuccuuccgccgccucucccaccuccgcaagcucguccccggcuucggcaaggccuacaccaucuucaacaagacccucauggaggccgacgcccacuacaaguccguccgcaccuggaacgagaucauccccuccaagggcugccuccgcgucggcggccgcugccacccccacgucaacggcgucuucuucaacggcaucauccucggccccgacggccacguccucauccccgagaugcaguccucccuccuccagcagcacauggagcuccucgaguccuccgucaucccccucaugcacccccucgccgaccccuccaccgucuucaaggacgacgacgaggccgaggacuucgucgagguccaccuccccgacguccacaagcaggucuccggcgucgaccucggccuccccuccuggggcaaguacguccucauguccgccggcguccucaccgcccucaugcucaugaucuuccucaugaccugcugccgccgcgccaaccgcgccgaguccgcccagcacucccucggcgagcgcggccgcaaggucuccgucaccucccaguccggccgcgucaucuccuccugggaguccuacaaguccggcggcgagaccaagcucuga

SEQ ID NO: 126759 - RNA, 1575 nt, Artificial Sequence
  derived and/or modified CDS sequence (opt2) from glycoprotein__RABV__AB569299.1
auggucccccaggcccuccucuucgucccccuccucgucuucucccucugcuucggcaaguuccccaucuacaccauccccgacaagcucggccccuggucccccaucgacauccaccaccucuccugccccaacaaccucgucgucgaggacgagggcugcaccaaccucuccggcuucuccuacauggagcucaaggucggcuacaucuccgccaucaaggucaacggcuucaccugcaccggcgucgucaccgaggccgagaccuacaccaacuucgucggcuacgucaccaccaccuuccgccgcaagcacuuccgccccacccccgacgccugccgcgccgccuacaacuggaagauggccggcgacccccgcuacgaggagucccuccacaaccccuaccccgacuaccacuggcuccgcaccgucaagaccaccaaggagucccucgucaucaucucccccuccgucgccgaccucgaccccuacgacaagucccuccacucccgcgucuuccccggcggcaagugcuccggcaucaccgucuccuccaccuacugcuccaccaaccacgacuacaccaucuggaugcccgagaacccccgccucggcaccuccugcgacaucuucgucaacucccgcggcaagcgcgccuccaagggcggcaagaccugcggcuucgucgacgagcgcggccucuacaagucccucaagggcgccugcaagcucaagcucugcggcguccccggccuccgccucauggacggcaccugggucgccauccagaccuccgacgagaccaaguggugcccccccgaccagcucgucaaccuccacgacuuccgcuccgacgagaucgagcaccucgucgucgaggagcucgucaagaagcgcgaggagugccucgacgcccucgaguccaucaugaccaccaaguccgucuccuuccgccgccucucccaccuccgcaagcucguccccggcuucggcaaggccuacaccaucuucaacaagacccucauggaggccgacgcccacuacaaguccguccgcaccuggaacgagaucauccccuccaagggcugccuccgcgucggcggccgcugccacccccacgucaacggcgucuucuucaacggcaucauccucggccccgacggccacguccucauccccgagaugcaguccucccuccuccagcagcacauggagcuccucgaguccuccgucaucccccucaugcacccccucgccgaccccuccaccgucuucaaggacggcgacgaggccgaggacuucgucgagguccaccuccccgacguccacaagcucaucuccggcgucgaccucggccuccccuccuggggcaaguacguccucauguccgccggcauccucaucacccucaugcucaugaucuuccucaugaccugcugccgccgcgucaaccaggccggcuccaagcagcacggccucgagggcgccggccgcaaggucuccgucaccucccagaacggccgcgucaucuccuccugggaguccuacaagaacggcggcgagacccgccucuga

SEQ ID NO: 126760 - RNA, 1575 nt, Artificial Sequence
  derived and/or modified CDS sequence (opt2) from glycoprotein__RABV__AB608731.1
augaucccccaggcccuccucuucgucccccuccucauccccucccucugcaucggcgaguuccccaucuacaccauccccgacaagcucggccccuggacccccaucgacauccaccaccucuccugccccaacaaccucgucgccgagaacgacggcugcaccucccucuccggcuucuccuacauggagcucaaggucggcuacaucuccgccaucaaggucaacggcuucaccugcaccggcgucgucaccgaggccgagaccuacaccaacuucgucggcuacgucaccaccaccuucaagcgcaagcacuuccgccccaugcccgacgccugccgcgccgcccacgacuggaagauggccggcgacccccgcuacgaggacucccuccagaaccccuaccccgacuaccacuggcuccgcaccgucaagaccaccaaggagucccucgucaucaucucccccuccgucgccgaccucgaccccuacgacaagucccuccacucccgcgucuuccccuccggcaagugccucggcaucaccgucuccuccaccuacugcuccaccaaccacgacuacaccaucuggaugcccgucgagccccgccucggcaccuccugcgacaucuucaccaacucccgcggcaagaaggccuccaagggcggccgcgucugcggcuucgucgacgagcgcggccucuacaagucccucaagggcgccugcaagcucaagcucugcggcguccccggcauccgccucauggacggcaccugggucuccauccagaccuccgaggacaucaaguggugcccccccgaccgccucgucaaccuccacgacuuccacuccgacgagcucgagcaccucgucgucgaggagcucaucaagcgccgcgagaacugccucgacgcccucgaguccaucgucaccaccaaguccgucuccuuccgccgccucucccaccuccgcaagcucguccccggcuucggcaaggccuacaccaucuucaacaagacccucauggaggccgacgcccacuacaaguccgucaagaccuggaacgaggucauccccuccaagggcugccucgaggucggcggcaagugccacccccccgucaacggcgucuucuucaacggcaucauccucggccccgacggcaacguccucauccccgagaugcaguccucccuccuccagcagcacauggagcuccucgaguccuccgucaucccccucaugcacccccucgccgaccccuccaccgucuucaaggagggcgacgaggccgaggacuucgucgagguccaccuccccgacguccacaagcaggucuccgacgucgaccucggccuccccuccuggggcaaguaccuccucauguccgccggcgcccucgccauccucauccucgccaucguccucaucaucugcugccgccgcgucaacaagaccggcuccacccagcgcggccaccgcgagucccgcggcaagauguccgucgccccccagaacggcaagaucaucuccuccugggagcucuacaaguccgaguccgagaccggccucuga

SEQ ID NO: 126761 - RNA, 1575 nt, Artificial Sequence
  derived and/or modified CDS sequence (opt2) from glycoprotein__RABV__AB635373.1
auggucccccaggcccuccucuucgucccccuccucgucuucucccucugcuucggcaaguuccccaucuacaccauccccgacaagcucggccccuggucccccaucgacauccaccaccucuccugccccaacaaccucgucgucgaggacgagggcugcaccaaccucuccggcuucuccuacauggagcucaaggucggcuacaucuccgccaucaaggucaacggcuucaccugcaccggcgucgucaccgaggccgagaccuacaccaacuucgucggcuacgucaccaccaccuuccgccgcaagcacuuccgccccacccccgacgccugccgcgccgccuacaacuggaagauggccggcgacccccgcuacgaggagucccuccacaaccccuaccccgacuaccacuggcuccgcaccgucaagaccaccaaggagucccucgucaucaucucccccuccgucgccgaccucgaccccuacgacaagucccuccacucccgcgucuuccccggcggcaagugcuccggcaucaccgucuccuccaccuacugcuccaccaaccacgacuacaccaucuggaugcccgagaacccccgccucggcaccuccugcgacaucuucaucaacucccgcggcaagcgcgccuccaagggcggcaagaccugcggcuucgucgacgagcgcggccucuacaagucccucaagggcgccugcaagcucaagcucugcggcguccccggccuccgccucauggacggcaccugggucgccauccagaccuccgacgagaccaaguggugcccccccgaccagcucgucaaccuccacgacuuccacuccgacgagaucgagcaccucgucgucgaggagcucgucaagaagcgcgaggagugccucgacgcccucgaguccaucaugaccaccaaguccgucuccuuccgccgccucucccaccuccgcaagcucguccccggcuucggcaaggccuacaccaucuucaacaagacccucauggaggccgacgcccacuacaaguccguccgcaccuggaacgagaucauccccuccaagggcugccuccgcgucggcggccgcugccacccccacgucaacggcgucuucuucaacggcaucauccucggccccgacggccacguccucauccccgagaugcaguccucccuccuccagcagcacauggagcuccucgaguccuccgucaucccccucaugcacccccucgccgaccccuccaccgucuucaaggacggcgacgaggccgaggacuucgucgagguccaccuccccgacguccacaagcucaucuccggcgucgaccucggccuccccuccuggggcaaguacguccucauguccgccggcauccucaccacccucaugcucaugaucuuccucaugaucugcugccgccgcgucaaccagaccggcuccaagcagcacggccucggcggcgccggccgcaaggucuccgucaccucccagaacggccgcgucaucuccuccugggaguccuacaaguccggcggcgagacccgccucuga

SEQ ID NO: 126762 - RNA, 1575 nt, Artificial Sequence
  derived and/or modified CDS sequence (opt2) from glycoprotein__RABV__AB645847.1
auggucccccaggcccuccucgucgucccccuccucggcuucucccucugcuucggcaaguuccccaucuacaccauccccgacaagcucggccccuggucccccaucgacauccaccaccucuccugccccaacaaccucgucgucgaggacgagggcugcaccaaccucuccggcuucuccuacauggagcucaaggucggcuacaucuccgccaucaaggucaacggcuucaccugcaccggcgucgucaccgaggccgagaccuacaccaacuucgucggcuacgucaccaccaccuucaagcgcaagcacuuccgccccacccccgacgagugccgcgccgccuacaacuggaagauggccggcgacccccgcuacgaggagucccuccacaaccccuaccccgacuaccacuggcuccgcaccgucaagaccaccaaggagucccucgucaucaucucccccuccgucgccgaccucgaccccuacgacaagucccuccacucccgcgucuuccccuccggcaagugcuccggcaucaccgucuccuccaccuacugcuccaccaaccacgacuacaccaucuggaugcccgagaacccccgccucggcaccuccugcgacaucuucaccaacucccgcggcaagcgcgccuccaagggcuccaagaccugcggcuucgucgacgagcgcggccucuacaagucccucaagggcgccugcaagcucaagcucugcggcguccucggccucaagcucauggacggcaccugggucgccaugcagaccuccgacgagaccaaguggugcccccccgaccagcucgucaaccuccacgacuuccgcuccgacgagaucgagcaccucgucgucgaggaccucgucaagaagcgcgaggagugccucgacgcccucgaguccaucaugaccaccaaguccgucuccuuccgccgccucucccaccuccgcaagcucguccccggcuucggcaaggccuacaccaucuucaacaagacccucauggaggccgacgcccacuacaaguccguccgcaccuggaacgaggucauccccuccaagggcugccucaaggucggcggccgcugccacccccacgucaacggcgucuucuucaacggcgucauccucggccccgacggccacguccucauccccgagaugcaguccucccuccuccgccagcacauggagcuccucgaguccuccgucaucccccucaugcacccccucgccgaccccuccaccgucuucaaggacggcgacgaggccgaggacuucgucgagguccaccuccccgacguccacaagcaggucuccggcgucgaccucggccuccccaacuggggcaaguacgucucccucuccgccggcgcccucaucgcccucaugcucaugaucuuccucaugaccugcugccgcaaggucaaccgccccgagcccacccagcgcucccucgagggcaagggccgcaaggucuccgucaccucccaguccggcaaggucaucuccuccugggaguccuacaaguccggcggcgagaccucccucuga

SEQ ID NO: 126763 - RNA, 1575 nt, Artificial Sequence
  derived and/or modified CDS sequence (opt2) from glycoprotein__RABV__AB683584.1
augaucccccaggcccuccucuucgucccccuccucgucuucucccucugcuucggcaaguuccccaucuacaccauccccgacaagcucggccccuggucccccaucgacauccaccaccucuccugccccaacaaccucgucgucgaggacgagggcugcaccaaccucuccggcuucuccuacauggagcucaaggucggcuacaucuccgccaucaaggucaacggcuucaccugcaccggcgucgucaccgaggccgagaccuacaccaacuucgucggcuacgucaccaccaccuucaagcgcaagcacuuccgccccacccccgacgccugccgcgccgccuacaacuggaagauggccggcgacccccgcuacgaggagucccuccacaaccccuaccccgacuaccacuggcuccgcaccgucaagaccaccaaggagucccucgucaucaucucccccuccgucgccgaccucgaccccuacgacaagucccuccacucccgcgucuuccccuccggcaagugcuccggcaucaccgucuccuccaccuacugcuccaccaaccacgacuacaccaucuggaugcccgagaacccccgccucggcaccuccugcgacaucuucaccaacucccgcggcaagcgcgccuccaagggcuccaagaccugcggcuucgucgacgagcgcggccucuacaagucccucaagggcgccugcaagcucaagcucugcggcguccucggccuccgccucauggacggcaccugggccgccauccagaccuccgacgagaccaaguggugcccccccgaccagcucgucaaccuccacgacuuccgcuccgacgagaucgagcaccucgucgucgaggagcucgucaagaagcgcgaggagugccucgacgcccucgaguccaucaugaccaccaaguccgucuccuuccgccgccucucccaccuccgcaagcucguccccggcuucggcaaggccuacaccaucuucaacaagacccucauggaggccgacgcccacuacaaguccguccgcaccuggaacgagaucauccccuccaagggcugccuccgcgucggcggccgcugccacccccacgucaacggcgucuucuucaacggcaucauccucggccccgacggccacguccucauccccgagaugcaguccucccuccuccagcagcacauggagcuccucgaguccuccgucaucccccucaugcacccccucgccgaccccuccaccgucuucaaggacgacgacgaggccgaggaguucgucgagguccaccuccccgacguccacaagcaggucuccggcgucgaccucggccuccccuccuggggcaaguacguccucauguccgccggcguccucaccgcccucaugcucaugaucuuccucaugaccugcugccgccgcgccaaccgcgucgaguccgcccagcacucccucggcgagcgcggccgcaaggucuccgucaccucccaguccggccgcgucaucuccuccugggaguccuacaaguccggcggcgagaccaagcucuga

SEQ ID NO: 126764 - RNA, 1575 nt, Artificial Sequence; identical to SEQ ID NO: 126661
  derived and/or modified CDS sequence (opt2) from glycoprotein__RABV__AB683585.1

SEQ ID NO: 126765 - RNA, 1575 nt, Artificial Sequence
  derived and/or modified CDS sequence (opt2) from glycoprotein__RABV__AB683586.1
augaucccccaggcccuccucuucgucccccuccucgucuucucccucugcuucggcaaguuccccaucuacaccauccccgacaagcucggccccuggucccccaucgacauccaccaccucuccugccccaacaaccucgucgucgaggacgagggcugcaccaaccucuccggcuucuccuacauggagcucaaggucggcuacaucuccgccaucaaggucaacggcuucaccugcaccggcgucgucaccgaggccgagaccuacaccaacuucgucggcuacgucaccaccaccuucaagcgcaagcacuuccgccccacccccgacgccugccgcgccgccuacaacuggaagauggccggcgacccccgcuacgaggagucccuccacaaccccuaccccgacuaccacuggcuccgcaccgucaagaccaccaaggagucccucgucaucaucucccccuccgucgccgaccucgaccccuacgacaagucccuccacucccgcgucuuccccuccggcaagugcuccggcaucaccgucuccuccaccuacugcuccaccaaccacgacuacaccaucuggaugcccgagaacccccgccucggcaccuccugcgacaucuucaccaacucccgcggcaagcgcgccuccaagggcuccaagaccugcggcuucgucgacgagcgcggccucuacaagucccucaagggcgccugcaagcucaagcucugcggcguccucggccuccgccucauggacggcaccugggccgccauccagaccuccgacgagaccaaguggugcccccccgaccagcucgucaaccuccacgacuuccgcuccgacgagaucgagcaccucgucgucgaggagcucgucaagaagcgcgaggagugccucgacgcccucgaguccaucaugaccaccaaguccgucuccuuccgccgccucucccaccuccgcaagcucguccccggcuucggcaaggccuacaccauccucaacaagacccucauggaggccgacgcccacuacaaguccguccgcaccuggaacgagaucauccccuccaagggcugccuccgcgucggcggccgcugccacccccacgucaacggcgucuucuucaacggcaucauccucggccccgacggccacguccucauccccgagaugcaguccucccuccuccagcagcacauggagcuccucgaguccuccgucaucccccucaugcacccccucgccgaccccuccaccgucuucaaggacgacgacgaggccgaggacuucgucgagguccaccuccccgacguccacaagcaggucuccggcgucgaccucggccuccccuccuggggcaaguacguccucauguccgccggcguccucaccgcccucaugcucaugaucuuccucaugaccugcugccgccgcgccaaccgcgccgaguccgcccagcacucccucggcgagggcgagcgcaaggucuccgucaccucccaguccggccgcgucaucuccuccugggaguccuacaaguccggcggcgagaccaagcucuga

SEQ ID NO: 126766 - RNA, 1575 nt, Artificial Sequence
  derived and/or modified CDS sequence (opt2) from glycoprotein__RABV__AB683587.1
augaucccccaggcccuccucuucgucccccuccucgucuucucccucugcuucggcaaguuccccaucuacaccauccccgacaagcucggccccuggucccccaucgacauccaccaccucuccugccccaacaaccucgucgucgaggacgagggcugcaccaaccucuccggcuucuccuacauggagcucaaggucggcuacaucuccgccaucaaggucaacggcuucaccugcaccggcgucgucaccgaggccgagaccuacaccaacuucgucggcuacgucaccaccaccuucaagcgcaagcacuuccgccccacccccgacgccugccgcgccgccuacaacuggaagauggccggcgacccccgcuacgaggagucccuccacaaccccuaccccgacuaccacuggcuccgcaccgucaagaccaccaaggagucccucgucaucaucucccccuccgucgccgaccucgaccccuacgacaagucccuccacucccgcgucuuccccuccggcaagugcuccggcaucaccgucuccuccaccuacugcuccaccaaccacgacuacaccaucuggaugcccgagaacccccgccucggcaccuccugcgacaucuucaccaacucccgcggcaagcgcgccuccaagggcuccaagaccugcggcuucgucgacgagcgcggccucuacaagucccucaagggcgccugcaagcucaagcucugcggcguccucggccuccgccucauggacggcaccugggccgccauccagaccuccgacgagaccaaguggugccccuccgaccagcucgucaaccuccacgacuuccgcuccgacgagaucgagcaccucgucgucgaggagcucgucaagaagcgcgaggagugccucgacgcccucgaguccaucaugaccaccaaguccgucuccuuccgccgccucucccaccuccgcaagcucguccccggcuucggcaaggccuacaccaucuucaacaagacccucauggaggccgacgcccacuacaaguccguccgcaccuggaacgagaucauccccuccaagggcugccuccgcgucggcggccgcugccacccccacgucaacggcgucuucuucaacggcaucauccucggccccgacggccacguccucauccccgagaugcaguccucccuccuccagcagcacauggagcuccucgaguccuccgucaucccccucaugcacccccucgccgaccccuccaccgucuucaaggacgacgacgaggccgaggacuucgucgagguccaccuccccgacguccacaagcaggucuccggcgucgaccucggccuccccuccuggggcaaguacguccucauguccgccggcguccucaccgcccucaugcucaugaucuuccucaugaccugcugccgccgcgccaaccgcgccgaguccgcccagcacucccucggcgagcgcggccgcaaggucuccgucaccucccaguccggccgcgucaucuccuccugggaguccuacaaguccggcggcgagaccaagcucuga

SEQ ID NO: 126767 - RNA, 1575 nt, Artificial Sequence
  derived and/or modified CDS sequence (opt2) from glycoprotein__RABV__AB683589.1
augaacccccaggcccucauguucgucccccuccucgucuucucccucugcuucggcaaguuccccaucuacaccauccccgacaagcucggccccuggucccccaucgacauccaccaccucuccugccccaacaaccucgucgucgaggacgagggcugcaccaaccucuccggcuucuccuacauggagcucaaggucggcuacaucuccgccaucaaggucaacggcuucaccugcaccggcgucgucaccgaggccgagaccuacaccaacuucgucggcuacgucaccaccaccuucaagcgcaagcacuuccgccccaugcccgacgccugccgcgccgccuacaacuggaagauggccggcgacccccgcuacgaggagucccuccacaaccccuaccccgacuaccacuggcuccgcaccgucaagaccaccaaggagucccucgucaucaucucccccuccgucgccgaccucgaccccuacgacaagucccuccacucccgcgucuuccccuccggcaagugcuccggcaucaccgucuccuccaccuacugcuccaccaaccacgacuacaccaucuggaugcccgagaacccccgccucggcaccuccugcgacaucuucaccaacucccgcggcaagcgcgccuccaagggcuccaagaccugcggcuucgucgacgagcgcggccucuacaagucccucaagggcgccugcaagcucaagcucugcggcguccucggccuccgccucauggacggcaccugggccgccauccagaccuccgacgagaccaaguggugcccccccgaccagcucgucaaccuccacgacuuccgcuccgacgagaucgagcaccucgucgucgaggagcucgucaagaagcgcgaggagugccucgacgcccucgaguccaucaugaccaccaaguccgucuccuuccgccgccucucccaccuccgcaagcucguccccggcuucggcaaggccuacaccaucuucaacaagacccucauggaggccgacgcccacuacaaguccguccgcaccuggaacgagaucauccccuccaagggcugccuccgcgucggcggccgcugccacccccacgucaacggcgucuucuucaacggcaucauccucggccccgacggccacguccucauccccgagaugcaguccucccuccuccagcagcacauggagcuccucgaguccuccgucaucccccucaugcacccccucgccgaccccuccaccgucuucaaggacgacgacgaggccgaggacuucgucgagguccaccuccccgacguccacaagcaggucuccggcgucgaccucggccuccccuccuggggcaaguacguccucauguccgccggcguccucaccgcccucaugcucaugaucuuccucaugaccugcugccgccgcgccaaccgcgccgaguccgcccagcacucccucggcgagcgcggccgcaaggucuccgucaccucccaguccggccgcgucaucuccuccugggaguccuacaaguccggcggcgagaccaagcucuga

SEQ ID NO: 126768 - RNA, 1575 nt, Artificial Sequence; identical to SEQ ID NO: 126637
  derived and/or modified CDS sequence (opt2) from glycoprotein__RABV__AB683591.1

SEQ ID NO: 126769 - RNA, 1575 nt, Artificial Sequence
  derived and/or modified CDS sequence (opt2) from glycoprotein__RABV__AB699208.1
auggucccccagguccuccucuucgucccccuccucgucuucuccaugugcuucggcaaguuccccaucuacaccauccccgacaagcucggccccuggucccccaucgacauccaccaccucuccugccccaacaaccucgucgucgaggacgagggcugcaccaaccucuccggcuucuccuacauggagcucaaggucggcuacaucuccgccaucaaggucaacggcuucaccugcaccggcgucgucaccgaggccgagaccuacaccaacuucgucggcuacgucaccaccaccuucaagcgcaagcacuuccgccccacccccgacgccugccgcgccgccuacaacuggaagauggccggcgacccccgcuacgaggagucccuccacaaccccuaccccgacuaccacuggcuccgcaccgucaagaccaccaaggagucccucgucaucaucucccccuccgucgccgaccucgaccccuacaacaagucccuccacucccgcgucuuccccuccggcaagugcuccggcaucaccaucuccuccaccuacugcgccaccaaccacgacuacaccaucuggaugcccgagaacccccgccucggcaccuccugcgacaucuucaccaacucccgcggcaagcgcgccuccaagggcggcaagaccugcggcuucgucgacgagcgcggccucuacaagucccucaagggcgccugcaagcucaagcucugcggcguccucggccuccgccucauggacggcaccugggucgccaugcagaccuccgacgagaccaaguggugcccccccgaccagcucgucaaccuccacgacuuccgcuccgacgagaucgagcaccucgucgucgaggagcucgucaagaagcgcgaggagugccucgacgcccucgaguccaucaugaccaccaaguccgucuccuuccgccgccucucccaccuccgcaagcucguccccggcuucggcaaggccuacaccaucuucaacaagacccucauggaggccgacgcccacuacaaguccauccgcaccuggaacgagaucauccccuccaagggcugccuccgcgucggcggccgcugccacccccacgucaacggcgucuucuucaacggcaucauccucggccccgacggccacguccucauccccgagaugcaguccucccuccuccagcagcacauggagcuccucgaguccuccgucaucccccucaugcacccccucgccgaccccuccaccgucuucaaggacggcgacgaggccgaggacuucgucgagguccaccuccccgacguccacaagcagaucuccggcgucgaccucggccuccccuccuggggcaaguacguccucgucuccgccggcguccucgucguccucaugcucaccaucuucaucaugaccugcugcggccgcguccgccgccccaaguccacccagcacucccucggcggcgccggccgcaaggucuccgucaccucccaguccggcaaggucaucuccuccugggaguccuacaagaacggcggcgagacccgccucuga

SEQ ID NO: 126770 - RNA, 1575 nt, Artificial Sequence
  derived and/or modified CDS sequence (opt2) from glycoprotein__RABV__AB699209.1
auggucccccagguccucuccuucgucccccuccucgucuucuccaccugcuucggcaaguuccccaucuacaccauccccgacaagcucggccccuggucccccaucgacauccaccaccucuccugccccaacaaccucgucgucgaggacgagggcugcaccaaccucuccggcuucuccuacauggagcucaaggucggcuacaucuccgccaucaaggucaacggcuucaccugcaccggcgucgucaccgaggccgagaccuacaccaacuucgucggcuacgucaccaccaccuucaagcgcaagcacuuccgccccacccccgacgccugccgcgccgccuacaacuggaagauggccggcgacccccgcuacgaggagucccuccacaaccccuaccccgacuaccacuggcuccgcaccgucaagaccaccaaggagucccucgucaucaucucccccaacgucgccgaccucgaccccuacaacaagucccuccacucccgcgucuuccccuccggcaagugcuccggcaucaccaucuccuccaccuacugcuccaccaaccacgacuacaccaucuggaugcccgagaacccccgccucggcaccuccugcgacaucuucaccaacucccgcggcaagcgcgccuccaagggcggcaagaccugcggcuucgucgacgagcgcggccucuacaagucccucaagggcgccugcaagcucaagcucugcggcguccucggccuccgccucauggacggcaccugggucgccaugcagaccuccgacgagaccaaguggugcccccccgaccagcucgucaaccuccacgacuuccgcuccgacgagaucgagcaccucgucgucgaggagcucgucaagaagcgcgaggagugccucgacgcccucgaguccaucaugaccaccaaguccgucuccuuccgccgccucucccaccuccgcaagcucguccccggcuucggcaaggccuacaccaucuucaacaagacccucauggaggccgacgcccacuacaaguccguccgcaccuggaacgagaucauccccuccaagggcugccuccgcgucggcggccgcugccacccccacgucaacggcgucuucuucaacggcaucauccucggccccgacggccacguccucauccccgagaugcaguccucccuccuccagcagcacauggagcuccucgaguccuccgucaucccccucaugcacccccucgccgaccccuccaccgucuucaaggacggcgacgaggccgaggacuucgucgagguccaccuccccgacguccacaagcagaucuccggcgucgaccucggccuccccuccuggggcaaguacguccucgucuccgccggcguccucgucguccucaugcucaccaucuucaucaugaccugcugcggcaagguccgccgccccaaguccacccagcacucccucggcggcaccggccgcaaggucuccgucaccucccaguccggcaaggucaucuccuccugggaguccuacaaguccggcggcgagacccgccucuga

SEQ ID NO: 126771 - RNA, 1575 nt, Artificial Sequence
  derived and/or modified CDS sequence (opt2) from glycoprotein__RABV__AB699210.1
auggucccccagguccucuccuucgucccccuccucgucuucuccaccugcuucggcaaguuccccaucuacaccauccccgacaagcucggccccuggucccccaucgacauccaccaccucuccugccccaacaaccucgucgucgaggacgagggcugcaccaaccucuccggcuucuccuacauggagcucaaggucggcuacaucuccgccaucaaggucaacggcuucaccugcaccggcgucgucaccgaggccgagaccuacaccaacuucgucggcuacgucaccaccaccuucaagcgcaagcacuuccgccccacccccgacgccugccgcgccgccuacaacuggaagauggccggcgacccccgcuacgaggagucccuccacaaccccuaccccgacuaccacuggcuccgcaccgucaagaccaccaaggagucccucgucaucaucucccccuccgucgccgaccucgaccccuacaacaagucccuccacucccgcgucuuccccuccggcaagugcuccggcaucaccaucuccuccaccuacugcuccaccaaccacgacuacaccaucuggaugcccgagaacccccgccucggcaccuccugcgacaucuucaccaacucccgcggcaagcgcgccuccaagggcggcaagaccugcggcuucgucgacgagcgcggccucuacaagucccucaagggcgccugcaagcucaagcucugcggcguccucggccuccgccucauggacggcaccugggucgccaugcagaccuccgacgagaccaaguggugcccccccgaccagcucgucaaccuccacgacuuccgcuccgacgagaucgagcaccucgucgucgaggagcucgucaagaagcgcgaggagugccucgacgcccucgaguccaucaugaccaccaaguccgucuccuuccgccgccucucccaccuccgcaagcucguccccggcuucggcaaggccuacaccaucuucaacaagacccucauggaggccgacgcccacuacaaguccguccgcaccuggaacgagaucauccccuccaagggcugccuccgcgucggcggccgcugccacccccacgucaacggcgucuucuucaacggcaucauccucggccccgacggccacguccucauccccgagaugcaguccucccuccuccagcagcacauggagcuccucgaguccuccgucaucccccucaugcacccccucgccgaccccuccaccgucuucaaggacggcgacgaggccgaggacuucgucgagguccaccuccccgacguccacaagcagaucuccggcgucgaccucggccuccccuccuggggcaaguacguccucgucuccgccggcguccucgucguccucaugcucaccaucuucaucaugaccugcugcggccgcguccgccgccccaaguccacccagcacucccucggcggcaccggccgcaaggucuccgucaccucccaguccggcaaggucaucuccuccugggaguccuacaaguccggcggcgagacccgccucuga

SEQ ID NO: 126772 - RNA, 1575 nt, Artificial Sequence
  derived and/or modified CDS sequence (opt2) from glycoprotein__RABV__AB699212.1
auggucccccagguccucuccuucgucccccuccucgucuucuccaccugcuucggcaaguuccccaucuacaccauccccgacaagcucggccccuggucccccaucgacauccaccaccucuccugccccaacaaccucgucgucgaggacgagggcugcaccaaccucuccggcuucuccuacauggagcucaaggucggcuacaucuccgccaucaaggucaacggcuucaccugcaccggcgucgucaccgaggccgagaccuacaccaacuucgucggcuacgucaccaccaccuucaagcgcaagcacuuccgccccacccccgacgccugccgcgccgccuacaacuggaagauggccggcgacccccgcuacgaggagucccuccacaaccccuaccccgacuaccacuggcuccgcaccgucaagaccaccaaggagucccucgucaucaucucccccuccgucgccgaccucgaccccuacgacaagucccuccacucccgcgucuuccccuccggcaagugcuccggcaucaccaucuccuccaccugcugcuccaccaaccacgacuacaccaucuggaugcccgagaacccccgccucggcaccuccugcgacaucuucaccaacucccgcggcaagcgcgccuccaagggcggcaagaccugcggcuucgucgacgagcgcggccucuacaagucccucaagggcgccugcaagcucaagcucugcggcguccucggccuccgccucauggacggcaccugggucgccaugcagaccuccgacgagaccaaguggugcccccccgaccagcucgucaaccuccacgacuuccgcuccgacgagaucgagcaccucgucgucgaggagcucgucaagaagcgcgaggagugccucgacgcccucgaguccaucaugaccaccaaguccgucuccuuccgccgccucucccaccuccgcaagcucguccccggcuucggcaaggccuacaccaucuucaacaagacccucauggaggccgacgcccacuacaaguccguccgcaccuggaacgagaucauccccuccaagggcugccuccgcgucggcggccgcugccacccccacgucaacggcgucuucuucaacggcaucauccucggccccgacggccacguccucauccccgagaugcaguccucccuccuccagcagcacauggagcuccucgaguccuccgucaucccccucaugcacccccucgccgaccccuccaccgucuucaaggacggcgacgaggccgaggacuucgucgagguccaccuccccgacguccacaagcagaucuccggcgucgaccucggccuccccuccuggggcaaguacguccucgucuccgccggcguccucgucguccucaugcucaccaucuucaucaugaccugcugcggccgcguccgccgccccaaguccacccagcacucccucggcggcaccggccgcaaggucuccgucaccucccaguccggcaaggucaucuccuccugggaguccuacaaguccggcggcgagacccgccucuga

SEQ ID NO: 126773 - RNA, 1575 nt, Artificial Sequence; identical to SEQ ID NO: 126771
  derived and/or modified CDS sequence (opt2) from glycoprotein__RABV__AB699213.1

SEQ ID NO: 126774 - RNA, 1575 nt, Artificial Sequence
  derived and/or modified CDS sequence (opt2) from glycoprotein__RABV__AB733961.1
augaucccccaggcccuccucuucgucccccuccucgucuccucccucugcuucggcaaguuccccaucuacaccauccccgacaagcucggccccuggucccccaucgacauccaccaccucuccugccccaacaaccucgucgucgaggacgagggcugcaccaaccucuccggcuucuccuacauggagcucaaggucggcuacaucuccgccaucaaggucaacggcuucaccugcaccggcgucgucaccgaggccgagaccuacaccaacuucgucggcuacgucaccaccaccuucaagcgcaagcacuuccgccccacccucgacgccugccgcgccgccuacaacuggaagauggccggcgacccccgcuacgaggagucccuccacaaccccuaccccgacuaccacuggcuccgcaccgucaagaccaccaaggagucccucgucaucaucucccccuccgucgccgaccucgaccccuacgacaagucccuccacucccgcgucuuccccuccggcaagugcuccggcaucaccgucuccuccaccuacugcuccaccaaccacgacuacaccaucuggaugcccgagaacccccgccucggcaccuccugcgacaucuucaccaacucccgcggcaagcgcgccuccaagggcuccaagaccugcggcuucgucgacgagcgcggccucuacaagucccucaagggcgccugcaagcucaagcucugcggcguccucggccuccgccucauggacggcaccugggccgccauccagaccuccgacgagaccaaguggugcccccccgaccagcucgucaaccuccacgacuuccgcuccgacgagaucgagcaccucgucgucgaggagcucgucaagaagcgcgaggagugccucgacgcccucgaguccaucaugaccaccaaguccgucuccuuccgccgccucucccaccuccgcaagcucguccccggcuucggcaaggccuacaccaucuucaacaagacccucauggaggccgacgcccacuacaaguccguccgcaccuggaacgagaucauccccuccaagggcugccuccgcgucggcggccgcugccacccccacgucaacggcgucuucuucaacggcaucauccucggccccgacggccacguccucauccccgagaugcaguccucccuccuccagcagcacauggagcuccucgaguccuccgucaucccccucaugcacccccucgccgaccccuccaccgucuucaaggacgacgacgaggccgaggacuucgucgagguccaccuccccgacguccacaagcaggucuccggcgucgaccucggccuccccuccuggggcaaguacguccucaccuccgccggcguccucaccgcccucaugcucaugaucuuccucaugaccugcugccgccgcgccaaccgcgccgaguccgcccagcacucccucggcgagcgcggccgcaaggucuccgucaccucccaguccggccgcgucaucuccuccugggaguccuacaaguccggcggcgagaccaagcucuga

SEQ ID NO: 126775 - RNA, 1575 nt, Artificial Sequence
  derived and/or modified CDS sequence (opt2) from glycoprotein__RABV__AB733962.1
augaucccccaggcccuccucuucgucccccuccucgucuucucccucugccucggcaaguuccccaucuacaccauccccgacaagcucggccccuggucccccaucgacauccaccaccucuccugccccaacaaccucgucgucgaggacgagggcugcaccaaccucuccggcuucuccuacauggagcucaaggucggcuacaucuccgccaucaaggucaacggcuucaccugcaccggcgucgucaccgaggccgagaccuacaccaacuucgucggcuacgucaccaccaccuucaagcgcaagcacuuccgccccacccccgacgccugccgcgccgccuacaacuggaagauggccggcgacccccgcuacgaggagucccuccacaaccccuaccccgacuaccacuggcuccgcaccgucaagaccaccaaggagucccucgucaucaucucccccuccgucgccgaccucgaccccuacgacaagucccuccacucccgcgucuuccccuccggcaagugcuccggcaucaccgucuccuccaccuacugcuccaccaaccacgacuacaccaucuggaugcccgagaacccccgccucggcaccuccugcgacaucuucaccaacucccgcggcaagcgcgccuccaagggcuccaagaccugcggcuucgucgacgagcgcggccucuacaagucccucaagggcgccugcaagcucaagcucugcggcguccucggccuccgccucauggacggcaccugggccgccauccagaccuccgacgagaucaaguggugcccccccgaccagcucgucaaccuccacgacuuccgcuccgacgagaucgagcaccucgucgucgaggagcucgucaagaagcgcgaggagugccucgacgcccucgaguccaucaugaccaccaaguccgucuccuuccgccgccucucccaccuccgcaagcucguccccggcuucggcaaggccuacaccaucuucaacaagacccucauggaggccgacgcccacuacaaguccguccgcaccuggaacgagaucauccccuccaagggcugccuccgcgucggcggccgcugccacccccacgucaacggcgucuucuucaacggcaucauccucggccccgacggccacguccucauccccgagaugcaguccucccuccuccagcagcacauggagcuccucgaguccuccgucaucccccucaugcacccccucgccgaccccuccaccgucuucaaggacgacgacgaggccgaggacuucgucgagguccaccuccccgacguccacaagcaggucuccggcgucgaccucggccuccccuccuggggcaaguacguccucauguccgccggcguccucaccgcccucaugcucaugaucuuccucaccaccugcugccgccgcgccaaccgcgccgaguccgcccagcacucccucggcgagcgcggccgcaaggucuccgucaccucccaguccggccgcgucaucuccuccugggaguccuacaaguccggcggcgagaccaagcucuga

SEQ ID NO: 126776 - RNA, 1575 nt, Artificial Sequence; identical to SEQ ID NO: 126607
  derived and/or modified CDS sequence (opt2) from glycoprotein__RABV__AB733963.1

SEQ ID NO: 126777 - RNA, 1575 nt, Artificial Sequence
  derived and/or modified CDS sequence (opt2) from glycoprotein__RABV__AB733964.1
augaucccccaggcccuccucuucgucccccuccucgucuucucccucugccucggcaaguuccccaucuacaccauccccgacaagcucggccccuggucccccaucgacauccaccaccucuccugccccaacaaccucgucgucgaggacgagggcugcaccaaccucuccggcuucuccuacauggagcucaaggucggcuacaucuccgccaucaaggucaacggcuucaccugcaccggcgucgucaccgaggccgagaccuacaccaacuucgucggcuacgucaccaccaccuucaagcgcaagcacuuccgccccacccccgacgccugccgcgccgccuacaacuggaagauggccggcgacccccgcuacgaggagucccuccacaaccccuaccccgacuaccacuggcuccgcaccgucaagaccaccaaggagucccucgucaucaucucccccuccgucgccgaccucgaccccuacgacaagucccuccacucccgcgucuuccccuccggcaagugcuccggcaucaccgucuccuccaccuacugcuccaccaaccacgacuacaccaucuggaugcccgagaacccccgccucggcaccuccugcgacaucuucaccaacucccgcggcaagcgcgccuccaagggcuccaagaccugcggcuucgucgacgagcgcggccucuacaagucccucaagggcgccugcaagcucaagcucugcggcguccucggccuccgccucauggacggcaccugggccgccauccagaccuccgacgagaccaaguggugcccccccgaccagcucgucaaccuccacgacuuccacuccgacgagaucgagcaccucgucgucgaggagcucgucaagaagcgcgaggagugccucgacgcccucgaguccaucaugaccaccaaguccgucuccuuccgccgccucucccaccuccgcaagcucguccccggcuucggcaaggccuacaccaucuucaacaagacccucauggaggccgacgcccacuacaaguccguccgcaccuggaacgagaucauccccaccaagggcugccuccgcgucggcggccgcugccacccccacgucaacggcgucuucuucaacggcaucauccucggccccgacggccacguccucauccccgagaugcaguccucccuccuccagcagcacauggagcuccucgaguccuccgucaucccccucaugcacccccucgccgaccccuccaccgucuucaaggacgacgacgaggccgaggacuucgucgagguccaccuccccgacguccacaagcaggucuccggcgucgaccucggccuccccuccuggggcaaguacguccucauguccgccggcguccucaccgcccucaugcucaugaucuuccucaccaccugcugccgccgcgccgaccgcgccgaguccgcccagcacucccucggcgagcgcggccgcaaggucuccgucaccucccaguccggccgcgucaucuccuccugggaguccuacaaguccggcggcgagaccaagcucuga

SEQ ID NO: 126778 - RNA, 1575 nt, Artificial Sequence; identical to SEQ ID NO: 126638
  derived and/or modified CDS sequence (opt2) from glycoprotein__RABV__AB733965.1

SEQ ID NO: 126779 - RNA, 1575 nt, Artificial Sequence
  derived and/or modified CDS sequence (opt2) from glycoprotein__RABV__AB733966.1
augaucccccaggcccuccucuucgucccccuccucgucuucucccucugcuucggcaaguuccccaucuacaccauccccgacaagcucggccccuggucccccaucgacauccaccaccucuccugccccaacaaccucgucgucgaggacgagggcugcaccaaccucuccggcuucuccuacauggagcucaaggucggcuacaucuccgccaucaaggucaacggcuucaccugcaccggcgucgucaccgaggccgagaccuacaccaacuucgucggcuacgucaccaccaccuucaagcgcaagcacuuccgccccacccccgacgccugccgcgccgccuacaacuggaagauggccggcgacccccgcuacgaggagucccuccacaaccccuaccccgacuaccacuggcuccgcaccgucaagaccaccaaggagucccucgucaucaucucccccuccgucgccgaccucgaccccuacgacaagucccuccacucccgcgucuuccccuccggcaagugcuccggcaucaccgucuccuccaccuacugcuccaccaaccacgacuacaccaucuggaugcccgagaacccccgccucggcaccuccugcgacaucuucaccaacucccgcggcaagcgcgccuccaagggcuccaagaccugcggcuucgucgacgagcgcggccucuacaagucccucaagggcgccugcaagcucaagcucugcggcguccucggccuccgccucauggacggcaccugggccgccauccagaccuccgacgagaccaaguggugcccccccgaccagcucgucaaccuccacgacuuccacuccgacgagaucgagcaccucgucgucgaggagcucgucaagaagcgcgaggagugccucgacgcccucgaguccaucaugaccaccaaguccgucuccuuccgccgccucucccaccuccgcaagcucguccccggcuucggcaaggccuacaccaucuucaacaagacccucauggaggccgacgcccacuacaaguccguccgcaccuggaacgagaucauccccuccaagggcugccuccgcgucggcggccgcugccacccccacgucaacggcgucuucuucaacggcaucauccucggccccgacggccacguccucauccccgagaugcaguccucccuccuccagcagcacauggagcuccucgaguccuccgucaucccccucaugcacccccucgccgaccccuccaccgucuucaaggacgacgacgaggccgaggacuucgucgagguccaccuccccgacguccacaagcaggucuccggcgucgaccucggccuccccuccuggggcaaguacguccucauguccgccggcguccucaccgcccucaugcucaugaucuuccucaccaccugcugccgccgcgccaaccgcgccgaguccgcccagcacucccucggcgagcgcggccgcaaggucuccgucaccucccaguccggccgcgucaucuccuccugggaguccuacaaguccggcggcgagaccaagcucuga

SEQ ID NO: 126780 - RNA, 1575 nt, Artificial Sequence; identical to SEQ ID NO: 126736
  derived and/or modified CDS sequence (opt2) from glycoprotein__RABV__AB733967.1

SEQ ID NO: 126781 - RNA, 1575 nt, Artificial Sequence
  derived and/or modified CDS sequence (opt2) from glycoprotein__RABV__AB733968.1
augaucccccaggcccuccucuucgucccccuccucgucuucucccucugcuucggcaaguuccccaucuacaccauccccgacaagcucggccccuggucccccaucgacauccaccaccucuccugccccaacaaccucgucgucgaggacgagggcugcaccaaccucuccggcuucuccuacauggagcucaaggucggcuacaucuccgccaucaaggucaacggcuucaccugcaccggcgucgucaccgaggccgagaccuacaccaacuucgucggcuacgucaccaccaccuucaagcgcaagcacuuccgccccacccccgacgccugccgcgccgccuacaacuggaagauggccggcgacccccgcuacgaggagucccuccacaaccccuaccccgacuaccacuggcuccgcaccgucaagaccaccaaggagucccucgucaucaucucccccuccgucgccgaccucgaccccuacgacaagucccuccacucccgcgucuuccccuccggcaagugcuccggcaucaccgucuccuccaccuacugccccaccaaccacgacuacaccaucuggaugcccgagaacccccgccucggcaccuccugcgacaucuucaccaacucccgcggcaagcgcgccuccaagggcuccaagaccugcggcuucgucgacgagcgcggccucuacaagucccucaagggcgccugcaagcucaagcucugcggcguccucggccuccgccucauggacggcaccugggccgccauccagaccuccgacgagaccaaguggugcccccccgaccagcucgucaaccuccacgacuuccgcuccgacgagaucgagcaccucgucgucgaggagcucgucaagaagcgcgaggagugccucgacgcccucgaguccaucaugaccaccaaguccgucuccuuccgccgccucucccaccuccgcaagcucguccccggcuucggcaaggccuacaccaucuucaacaagacccucauggaggccgacgcccacuacaaguccguccgcaccuggaacgagaucauccccuccaagggcugccuccgcgucggcggccgcugccacccccacgucaacggcgucuucuucaacggcaucauccucggccccgacggccacguccucauccccgagaugcaguccucccuccuccagcagcacauggagcuccucgaguccuccgucaucccccucaugcacccccucgccgaccccuccaccgucuucaaggacgacgacgaggccgaggacuucgucgagguccaccuccccgacguccacaagcaggucuccggcgucgaccucggccuccccuccuggggcaaguacguccucauguccgccggcguccucaccgcccucaugcucaugaucuuccucaccaccugcugccgccgcgccgaccgcgccgaguccgcccagcacucccucggcgagcgcggccgcaaggucuccgucaccucccaguccggccgcgucaucuccuccugggaguccuacaaguccggcggcgagaccaagcucuga

SEQ ID NO: 126782 - RNA, 1575 nt, Artificial Sequence; identical to SEQ ID NO: 126635
  derived and/or modified CDS sequence (opt2) from glycoprotein__RABV__AB733969.1

SEQ ID NO: 126783 - RNA, 1575 nt, Artificial Sequence; identical to SEQ ID NO: 126724
  derived and/or modified CDS sequence (opt2) from glycoprotein__RABV__AB733970.1

SEQ ID NO: 126784 - RNA, 1575 nt, Artificial Sequence
  derived and/or modified CDS sequence (opt2) from glycoprotein__RABV__AB733971.1
augaucccccaggcccuccucuucgucccccuccucgucuccucccucugcuucggcaaguuccccaucuacaccauccccgacaagcucggccccuggucccccaucgacauccaccaccucuccugccccaacaaccucgucgucgaggacgagggcugcaccaaccucuccggcuucuccuacauggagcucaaggucggcuacaucuccgccaucaaggucaacggcuucaccugcaccggcgucgucaccgaggccgagaccuacaccaacuucgucggcuacgucaccaccaccuucaagcgcaagcacuuccgccccacccccgacgccugccgcgccgccuacaacuggaagauggccggcgacccccgcuacgaggagucccuccacaaccccuaccccgacuaccacuggcuccgcaccgucaagaccaccaaggagucccucgucaucaucucccccuccgucgccgaccucgaccccuacgacaagucccuccacucccgcgucuuccccuccggcaagugcuccggcaucaccgucuccuccaccuacugcuccaccaaccacgacuacaccaucuggaugcccgagaacccccgccucggcaccuccugcgacaucuucaccaacucccgcggcaagcgcgccuccaagggcuccaagaccugcggcuucgucaacgagcgcggccucuacaagucccucaagggcgccugcaagcucaagcucugcggcguccucggccucaagcucauggacggcaccugggccgccauccagaccuccaacgagaccaaguggugcccccccgaccagcucgucaaccuccacgacuuccgcuccgacgagaucgagcaccucgucgucgaggagcucgucaagaagcgcgaggagugccucgacgcccucgaguccaucaugaccaccaaguccgucuccuuccgccgccucucccaccuccgcaagcucguccccggcuucggcaaggccuacaccaucuucaacaagacccucauggaggccgacgcccacuacaaguccguccgcaccuggaacgagaucauccccuccaagggcugccuccgcgucggcggccgcugccacccccacgucaacggcgucuucuucaacggcaucauccucggccccgacggccacguccucauccccgagaugcaguccucccuccuccagcagcacauggagcuccucgaguccuccgucaucccccucaugcacccccucgccgaccccuccaccgucuucaaggacgacgacgaggccgaggacuucgucgagguccaccuccccgacguccacaagcaggucuccggcgucgaccucggccuccccuccuggggcaaguacguccucaccuccgccggcguccucaccgcccucaugcucaugaucuuccucaugaccugcugccgccgcgccaaccgcgccgaguccgcccagcacucccucggcgagcgcggccgcaaggucuccgucaccucccaguccggccgcgucaucuccuccugggaguccuacaaguccggcggcgagaccaagcucuga

SEQ ID NO: 126785 - RNA, 1575 nt, Artificial Sequence
  derived and/or modified CDS sequence (opt2) from glycoprotein__RABV__AB733972.1
augaucccccaggcccuccucuucgucccccuccucgucuucucccucugcuucggcaaguuccccaucuacaccauccccgacaagcucggccccuggucccccaucgacauccaccaccucuccugccccaacaaccucgucgucgaggacgagggcugcaccaaccucuccggcuucuccuacauggagcucaaggucggcuacaucuccgccaucaaggucaacggcuucaccugcaccggcgucgucaccgaggccgagaccuacaccaacuucgucggcuacgucaccaccaccuucaagcgcaagcacuuccgccccacccccgacgccugccgcgccgccuacaacuggaagauggccggcgacccccgcuacgaggagucccuccacaaccccuaccccgacuaccacuggcuccgcaccgucaagaccaccaaggagucccucgucaucaucucccccuccgucgccgaccucgaccccuacgacaagucccuccacucccgcgucuuccccuccggcaagugcuccggcaucaccgucuccuccaccuacugcuccaccaaccacgacuacaccaucuggaugcccgagaacccccgccucggcaccuccugcgacaucuucaccaacucccgcggcaagcgcgccuccaagggcuccaagaccugcggcuucgucgacgagcgcggccucuacaagucccucaagggcgccugcaagcucaagcucugcggcguccucggccuccgccucauggacggcaccugggccgccauccagaccuccgacgagaccaaguggugcccccccgaccagcucgucaaccuccacgacuuccgcuccgacgagaucgagcaccucgucgucgaggagcucgucaagaagcgcgaggagugccucgacgcccucgaguccaucaugaccaccaaguccgucuccuuccgccgccucucccaccuccgcaagcucguccccggcuucggcaaggccuacaccaucuucaacaagacccucauggaggccgacgcccacuacaaguccguccgcaccuggaacgagaucauccccuccaagggcugccuccgcgucggcggccgcugccacccccacgucaacggcgucuucuucaacggcaucauccucggccccgacggccacguccucauccccgagaugcaguccucccuccuccagcagcacauggagcuccucgaguccuccgucaucccccucaugcacccccucgccgaccccuccaccgucuucaagaacgacgacgaggccgaggacuucgucgagguccaccuccccgacguccacaagcaggucuccggcgucgaccucggccuccccuccuggggcaaguacguccucauguccgccggcguccucaccgcccucaugcucaugaucuuccucaugaccugcugccgccgcaccaaccgcgccgaguccgcccagcacucccucggcgagcgcggccgcaaggucuccgucaccucccaguccggccgcgucaucuccuccugggaguccuacaaguccggcggcgagaccaagcucuga

SEQ ID NO: 126786 - RNA, 1575 nt, Artificial Sequence; identical to SEQ ID NO: 126781
  derived and/or modified CDS sequence (opt2) from glycoprotein__RABV__AB733973.1

SEQ ID NO: 126787 - RNA, 1575 nt, Artificial Sequence
  derived and/or modified CDS sequence (opt2) from glycoprotein__RABV__AB733974.1
augaucccccaggcccuccucuucgucccccuccucgucuucucccucugcuucggcaaguuccccaucuacaccauccccgacaagcucggccccuggucccccaucgacauccaccaccucuccugccccaacaaccucgucgucgaggacgagggcugcaccaaccucuccggcuucuccuacauggagcucaaggucggcuacaucuccgccaucaaggucaacggcuucaccugcaccggcgucgucaccgaggccgagaccuacaccaacuucgucggcuacgucaccaccaccuucaagcgcaagcacuuccgccccacccccgacgccugccgcgccgccuacaacuggaagauggccggcgacccccgcuacgaggagucccuccacaaccccuaccccgacuaccacuggcuccgcaccgucaagaccaccaaggagucccucgucaucaucucccccuccgucgccgaccucgaccccuacgacaagucccuccacucccgcgucuuccccuccggcaagugcuccggcaucaccgucuccuccaccuacugcuccaccaaccacgacuacaccaucuggaugcccgagaacccccgccucggcaccuccugcgacaucuucaccaacucccgcggcaagcgcgccuccaagggcuccaagaccugcggcuucgucgacgagcgcggccucuacaagucccucaagggcgccugcaagcucaagcucugcggcguccucggccucaagcucauggacggcaccugggccgccauccagaccuccaacgagaccaaguggugcccccccgaccagcucgucaaccuccacgacuuccgcuccgacgagaucgagcaccucgucgucgaggagcucgucaagaagcgcgaggagugccucgacgcccucgaguccaucaugaccaccaaguccgucuccuuccgccgccucucccaccuccgcaagcucguccccggcuucggcaaggccuacaccaucuucaacaagacccucauggaggccgacgcccacuacaaguccguccgcaccuggaacgagaucauccccuccaagggcugccuccgcgucggcggccgcugccacccccacgucaacggcgucuucuucaacggcaucauccucggccccgacggccacguccucauccccgagaugcaguccucccuccuccagcagcacauggagcuccucgaguccuccgucaucccccucaugcacccccucgccgaccccuccaccgucuucaaggacgacgacgaggccgaggacuucgucgagguccaccuccccgacguccacaagcaggucuccggcgucgaccucggccuccccuccuggggcaaguacguccucauguccgccggcguccucaccgcccucaugcucaugaucuuccucaugaccugcugccgccgcgccaaccgcgccgaguccgcccagcacucccucggcgagcgcggccgcaaggucuccgucaccucccaguccggccgcgucaucuccuccugggaguccuacaaguccggcggcgagaccaagcucuga

SEQ ID NO: 126788 - RNA, 1575 nt, Artificial Sequence; identical to SEQ ID NO: 126787
  derived and/or modified CDS sequence (opt2) from glycoprotein__RABV__AB733975.1

SEQ ID NO: 126789 - RNA, 1575 nt, Artificial Sequence; identical to SEQ ID NO: 126608
  derived and/or modified CDS sequence (opt2) from glycoprotein__RABV__AB733976.1

SEQ ID NO: 126790 - RNA, 1575 nt, Artificial Sequence; identical to SEQ ID NO: 126669
  derived and/or modified CDS sequence (opt2) from glycoprotein__RABV__AB733977.1

SEQ ID NO: 126791 - RNA, 1575 nt, Artificial Sequence
  derived and/or modified CDS sequence (opt2) from glycoprotein__RABV__AB733979.1
augaucccccaggcccuccucuucgucccccuccucgucuucucccucugcuucggcaaguuccccaucuacaccauccccgacaagcucggccccuggucccccaucgacauccaccaccucuccugccccaacaaccucgucgucgaggacgagggcugcaccaaccucuccggcuucuccuacauggagcucaaggucggcuacaucuccgccaucaaggucaacggcuucaccugcaccggcgucgucaccgaggccgagaccuacaccaacuucgucggcuacgucaccaccaccuucaagcgcaagcacuuccgccccacccccgacgccugccgcgccgccuacaacuggaagauggccggcgacccccgcuacgaggagucccuccacaaccccuaccccgacuaccacuggcuccgcaccgucaagaccaccaaggagucccucgucaucaucucccccuccgucgccgaccucgaccccuacgacaagucccuccacucccgcgucuuccccuccggcaagugcuccggcaucaccgucuccuccaccuacugcuccaccaaccacgacuacaccaucuggaugcccgagaacccccgccucggcaccuccugcgacaucuucaccaacucccgcggcaagcgcgccuccaagggcuccaagaccugcggcuucgucgacgagcgcggccucuacaagucccucaagggcgccugcaagcucaagcucugcggcguccucggccuccgccucauggacggcaccugggccgccauccagaccuccgacgagaccaaguggugcccccccgaccagcucgucaaccuccacgacuuccgcuccgacgagaucgagcaccucgucgucgaggagcucgucaagaagcgcgaggagugccucgacgcccucgaguccaucaugaccaccaaguccgucuccuuccgccgccucucccaccuccgcaagcucguccccggcuucggcaaggccuacaccaucuucaacaagacccucauggaggccgacgcccacuacaaguccguccgcaccuggaacgagaucauccccuccaagggcugccuccgcgucggcggccgcugccacccccacgucaacggcgucuucuucaacggcaucauccucggccccgacggccacguccucauccccgagaugcaguccucccuccuccagcagcacauggagcuccucgaguccuccgucaucccccucaugcacccccucgccgaccccuccaccgucuucaaggacgacgacgaggccgaggacuucgucgagguccaccuccccgacguccacaagcaggucuccggcgucgaccucggccuccccuccuggggcaaguacguccucauguccgccggcguccucaccgcccucaugcucaugauccuccucaugaccugcugccgccgcgccaaccgcgucgaguccgcccagcacucccucggcgagcgcggccgcaaggucuccgucaccucccaguccggccgcgucaucuccuccugggaguccuacaaguccggcggcgagaccaagcucuga

SEQ ID NO: 126792 - RNA, 1575 nt, Artificial Sequence
  derived and/or modified CDS sequence (opt2) from glycoprotein__RABV__AB781935.1
auggucccccaggcccuccucuucgucccccuccucgucuucccccucugcuucggcaaguuccccaucuacaccauccccgacaagcucggccccuggucccccaucgacauccaccaccucuccugccccaacaaccucgucgucgaggacgagggcugcaccaaccucuccggcuucuccuacauggagcucaaggucggcuacauccucgccaucaagaugaacggcuucaccugcaccggcgucgucaccgaggccgagaccuacaccaacuucgucggcuacgucaccaccaccuucaagcgcaagcacuuccgccccacccccgacgccugccgcgccgccuacaacuggaagauggccggcgacccccgcuacgaggagucccuccagaaccccuaccccgacuaccgcuggcuccgcaccgucaagaccaccaaggagucccucgucaucaucucccccuccgucgccgaccucgaccccuacgaccgcucccuccacucccgcgucuuccccuccggcaagugcuccggcgucgccgucuccuccaccuacugcuccaccaaccacgacuacaccaucuggaugcccgagaacccccgccucggcauguccugcgacaucuucaccaacucccgcggcaagcgcgccuccaagggcuccgagaccugcggcuucgucgacgagcgcggccucuacaagucccucaagggcgccugcaagcucaagcucugcggcguccucggccuccgccucauggacggcaccugggucgccaugcagaccuccaacgagaccaaguggugcccccccgaccagcucgucaaccuccacgacuuccacuccgacgagaucgagcaccucgucgucgaggagcucguccgcaagcgcgaggagugccucgacgcccucgaguccaucaugaccaccaaguccgucuccuuccgccgccucucccaccuccgcaagcucguccccggcuucggcaaggccuacaccaucuucaacaagacccucauggaggccgacgcccacuacaaguccguccgcaccuggaacgagaucauccccuccaagggcugccuccgcgucggcggccgcugccacccccacgucaacggcgucuucuucaacggcaucauccucggccccgacggcaacguccucauccccgagaugcaguccucccuccuccagcagcacauggagcuccucgaguccuccgucaucccccucguccacccccucgccgaccccuccaccaucuucaaggacggcgacgaggccgaggacuucgucgagguccaccuccccgacguccacaaccaggucuccggcgucgaccucggccuccccaacuggggcaaguacguccuccucuccgccggcgcccucaccgcccucaugcucaucaucuuccucaugaccugcugccgccgcgucaaccgcuccgagcccacccagcacaaccuccgcggcaccggccgcgaggucuccgucaccccccaguccggcaagaucaucuccuccugggagucccacaaguccggcggcgagacccgccucuga

SEQ ID NO: 126793 - RNA, 1575 nt, Artificial Sequence
  derived and/or modified CDS sequence (opt2) from glycoprotein__RABV__AB817099.1
auggucccccaggcccuccucuucgucccccuccucgucuucucccucugcuucggcaaguuccccaucuacaccauccccgacaagcucggccccuggucccccaucgacauccaccaccucuccugccccaacaaccucgucgucgaggacgagggcugcaccaaccucuccggcuucuccuacauggagcucaaggucggcuacaucuccgccaucaaggucaacggcuucaccugcaccggcgucgucaccgaggccgagaccuacaccaacuucgucggcuacgucaccaccaccuuccgccgcaagcacuuccgccccacccccgacgccugccgcgccgccuacaacuggaagauggccggcgacccccgcuacgaggagucccuccacaaccccuaccccgacuaccacuggcuccgcaccgucaagaccaccaaggagucccucgucaucaucucccccuccgucgccgaccucgaccccuacgacaagucccuccacucccgcgucuuccccggcggcaagugcuccggcaucaccgucuccuccaccuacugcuccaccaaccacgacuacaccaucuggaugcccgagaacccccgccucggcaccuccugcgacaucuucgucaacucccgcggcaagcgcgccuccaagggcggcaagaccugcggcuucgucgacgagcgcggccucuacaagucccucaagggcgccugcaagcucaagcucugcggcguccccggccuccgccucauggacggcaccugggucgccauccagaccuccgacgagaccaaguggugcccccccgaccagcucgucaaccuccacgacuuccgcuccgacgagaucgagcaccucgucgucgaggagcucgucaagaagcgcgaggagugccucgacgcccucgaguccaucaugaccaccaaguccgucuccuuccgccgccucucccaccuccgcaagcucguccccggcuucggcaaggccuacaccaucuucaacaagacccucauggaggccgacgcccacuacaaguccguccgcaccuggaacgagaucauccccuccaagggcugccuccgcgucggcggccgcugccacccccacgucaacggcgucuucuucaacggcaucauccucggccccgacggccacguccucauccccgagaugcaguccucccuccuccagcagcacauggagcuccucgaguccuccgucaucccccucaugcacccccucgccgaccccuccaccgucuucaaggacggcgacgaggccgaggacuucgucgagguccaccuccccgacguccacaagcucaucuccggcgucgaccucggccuccccuccuggggcaaguacguccucauguccgccggcauccucaccacccucaugcucaugaucuuccucaugaccugcugccgccgcgucaaccaggccggcuccaagcagcacggccucgagggcgccggccgcaaggucuccgucaccucccagaacggccgcgucaucuccuccugggaguccuacaaguccggcggcgagacccgccucuga

SEQ ID NO: 126794 - RNA, 1575 nt, Artificial Sequence
  derived and/or modified CDS sequence (opt2) from glycoprotein__RABV__AB817100.1
auggucccccaggcccuccucuucgucccccuccucgucuucucccucugcuucggcaaguuccccaucuacaccauccccgacaagcucggccccuggucccccaucgacauccaccaccucuccugccccaacaaccucgucgucgaggacgagggcugcaccaaccucuccggcuucuccuacauggagcucaaggucggcuacaucuccgccaucaaggucaacggcuucaccugcaccggcgucgucaccgaggccgagaccuacaccaacuucgucggcuacgucaccaccaccuuccgccgcaagcacuuccgccccacccccgacgccugccgcgccgccuacaacuggaagauggccggcgacccccgcuacgaggagucccuccacaaccccuaccccgacuaccacuggcuccgcaccgucaagaccaccaaggagucccucgucaucaucucccccuccgucgccgaccucgaccccuacgacaagucccuccacucccgcgucuuccccggcggcaagugcuccggcaucaccgucuccuccaccuacugcuccaccaaccacgacuacaccaucuggaugcccgagaacccccgccucggcaccuccugcgacaucuucgucaacucccgcggcaagcgcgccuccaagggcggcaagaccugcggcuucgucgacgagcgcggccucuacaagucccucaagggcgccugcaagcucaagcucugcggcguccccggccuccgccucauggacggcaccugggucgccauccagaccuccgacgagaccaaguggugcccccccgaccagcucgucaaccuccacgacuuccgcuccgacgagaucgagcaccucgucgucgaggagcucgucaagaagcgcgaggagugccucgacgcccucgaguccaucaugaccaccaaguccgucuccuuccgccgccucucccaccuccgcaagcucguccccggcuucggcaaggccuacaccaucuucaacaagacccucauggaggccgacgcccacuacaaguccguccgcaccuggaacgagaucauccccuccaagggcugccuccgcgucggcggccgcugccacccccacgucaacggcgucuucuucaacggcaucauccucggccccgacggccacguccucauccccgagaugcaguccucccuccuccagcagcacauggagcuccucgaguccuccgucaucccccucaugcacccccucgccgaccccuccaccgucuucaaggacggcgacgaggccgaggacuucgucgagguccaccuccccgacguccacaagcucaucuccggcgucgaccucggccuccccuccuggggcaaguacguccucauguccgccggcauccucaucacccucaugcucaugaucuuccucaugaccugcugccgccgcgucaaccaggccggcuccaagcagcacggccucgagggcgccggccgcaaggucuccgucaccucccagaacggccgcgucaucuccuccugggaguccuacaaguccggcggcgagacccgccucuga

SEQ ID NO: 126795 - RNA, 1575 nt, Artificial Sequence
  derived and/or modified CDS sequence (opt2) from glycoprotein__RABV__AB817101.1
auggucccccaggcccuccucuucgucccccuccucgucuucucccucugcuucggcaaguuccccaucuacaccauccccgacaagcucggccccuggucccccaucgacauccaccaccucuccugccccaacaaccucgucgucgaggacgagggcugcaccaaccucuccggcuucuccuacauggagcucaaggucggcuacaucuccgccaucaaggucaacggcuucaccugcaccggcgucgucaccgaggccgagaccuacaccaacuucgucggcuacgucaccaccaccuuccgccgcaagcacuuccgccccacccccgacgccugccgcgccgccuacaacuggaagauggccggcgacccccgcuacgaggagucccuccacaaccccuaccccgacuaccacuggcuccgcaccgucaagaccaccaaggagucccucgucaucaucucccccuccgucgccgaccucgaccccuacgacaagucccuccacucccgcgucuuccccggcggcaagugcuccggcaucaccgucuccuccaccuacugcuccaccaaccacgacuacaccaucuggaugcccgagaacccccgccucggcaccuccugcgacaucuucgucaacucccgcggcaagcgcgccuccaagggcggcaagaccugcggcuucgucgacgagcgcggccucuacaagucccucaagggcgccugcaagcucaagcucugcggcguccccggccuccgccucauggacggcaccugggucgccauccagaccuccgacgagaccaaguggugcccccccgaccagcucgucaaccuccacgacuuccgcuccgacgagaucgagcaccucgucgucgaggagcucgucaagaagcgcgaggagugccucgacgcccucgaguccaucaugaccaccaaguccgucuccuuccgccgccucucccaccuccgcaagcucguccccggcuucggcaaggccuacaccaucuucaacaagacccucauggaggccgacgcccacuacaaguccguccgcaccuggaacgagaucauccccuccaagggcugccuccgcgucggcggccgcugccacccccacgucaacggcgucuucuucaacggcaucauccucggccccgacggccacguccucauccccgagaugcaguccucccuccuccagcagcacauggagcuccucgaguccuccgucaucccccucaugcacccccucgccgaccccuccaccgucuucaaggacggcgacgaggccgaggacuucgucgagguccaccuccccgacguccacaagcucaucuccggcgucgaccucggccuccccuccuggggcaaguacguccucauguccgccggcauccucaccacccucaugcucaugaucuuccucaugaccugcugccgccgcgucaaccaggccggcuccaagcagcacggccucgagggccccggccgcaaggucuccgucaccucccagaacggccgcgucaucuccuccugggaguccuacaaguccggcggcgagacccgccucuga

SEQ ID NO: 126796 - RNA, 1575 nt, Artificial Sequence
  derived and/or modified CDS sequence (opt2) from glycoprotein__RABV__AB817102.1
auggucccccagacccuccucuucgucccccuccucgucuucucccucugcuucggcaaguuccccaucuacaccauccccgacaagcucggccccuggucccccaucgacauccaccaccucuccugccccaacaaccucgucgucgaggacgagggcugcaccaaccucuccggcuucuccuacauggagcucaaggucggcuacaucuccgccaucaaggucaacggcuucaccugcaccggcgucgucaccgaggccgagaccuacaccaacuucgucggcuacgucaccaccaccuuccgccgcaagcacuuccgccccacccccgacgccugccgcgccgccuacaacuggaagauggccggcgacccccgcuacgaggagucccuccacaaccccuaccccgacuaccacuggcuccgcaccgucaagaccaccaaggagucccucgucaucaucucccccuccgucgccgaccucgaccccuacgacaagucccuccacucccgcgucuuccccggcggcaagugcuccggcaucaccgucuccuccaccuacugcuccaccaaccacgacuacaccaucuggaugcccgagaacccccgccucggcaccuccugcgacaucuucgucaacucccgcggcaagcgcgccucccgcggcggcaagaccugcggcuucgucgacgagcgcggccucuacaagucccucaagggcgccugcaagcucaagcucugcggcguccccggccuccgccucauggacggcaccugggucgccauccagaccuccgacgagaccaaguggugcccccccgaccagcucgucaaccuccacgacuuccgcuccgacgagaucgagcaccucgucgucgaggagcucgucaagaagcgcgaggagugccucgacgcccucgaguccaucaugaccaccaaguccgucuccuuccgccgccucucccaccuccgcaagcucguccccggcuucggcaaggccuacaccaucuucaacaagacccucauggaggccgacgcccacuacaaguccguccgcaccuggaacgagaucauccccuccaagggcugccuccgcgucggcggccgcugccacccccacgucaacggcgucuucuucaacggcaucauccucggccccgacggccacguccucauccccgagaugcaguccucccuccuccagcagcacauggagcuccucgaguccuccgucaucccccucaugcacccccucgccgaccccuccaccgucuucaaggacggcgacgaggccgaggacuucgucgagguccaccuccccgacguccacaagcucaucuccggcgucgaccucggccuccccuccuggggcaaguacguccucauguccgucggcauccucaccacccucaugcucaugaucuuccucaugaccugcugccgccgcgucaaccaggucggccccaagcagcacggccucgagggcgccggccgcaaggucuccgucaccucccagaacggccgcgucaucuccuccugggaguccuacaaguccggcggcgagacccgccucuga

SEQ ID NO: 126797 - RNA, 1575 nt, Artificial Sequence
  derived and/or modified CDS sequence (opt2) from glycoprotein__RABV__AB817103.1
auggucccccaggcccuccucuucgucccccuccucgucuucucccucugcuucggcaaguuccccaucuacaccauccccgacaagcucggccccuggucccccaucgacauccaccaccucuccugccccaacaaccucgucgucgaggacgagggcugcaccaaccucuccggcuucuccuacauggagcucaaggucggcuacaucuccgccaucaaggucaacggcuucaccugcaccggcgucgucaccgaggccgagaccuacaccaacuucgucggcuacgucaccaccaccuuccgccgcaagcacuuccgccccacccccgacgccugccgcgccgccuacaacuggaagauggccggcgacccccgcuacgaggagucccuccacaaccccuaccccgacuaccacuggcuccgcaccgucaagaccaccaaggagucccucgucaucaucucccccuccgucgccgaccucgaccccuacgacaagucccuccacucccgcgucuuccccggcggcaagugcuccggcaucaccgucuccuccaccuacugcuccaccaaccacgacuacaccaucuggaugcccgagaacccccgccucggcaccuccugcgacaucuucgucaacucccgcggcaagcgcgccuccaagggcggcaagaccugcggcuucgucgacgagcgcggccucuacaagucccucaagggcgccugcaagcucaagcucugcggcguccccggccuccgccucauggacggcaccugggucgccauccagaccuccgacgagaccaaguggugcccccccgaccagcucgucaaccuccacgacuuccgcuccgacgagaucgagcaccucgucgucgaggagcucgucaagaagcgcgaggagugccucgacgcccucgaguccaucaugaccaccaaguccgucuccuuccgccgccucucccaccuccgcaagcucguccccggcuucggcaaggccuacaccaucuucaacaagacccucauggaggccgacgcccacuacaaguccguccgcaccuggaacgagaucauccccuccaagggcugccuccgcgucggcggccgcugccacccccacgucaacggcgucuucuucaacggcaucauccucggccccgacggccacguccucauccccgagaugcaguccucccuccuccagcagcacauggagcuccucgaguccuccgucaucccccucaugcacccccucgccgaccccuccaccgucuucaaggacggcgacgaggccgaggacuucgucgagguccaccuccccgacguccacaagcucaucuccggcgucgaccucggccuccccuccuggggcaaguacguccucauguccgccggcauccucaccacccucaugcucaugaucuuccucaugaccugcugccgccgcgucaaccaggccggcuccaagcagcacggccucgagggcgccggccgcaaggucuccgucaccucccagaacggccgcaucaucuccuccugggaguccuacaaguccggcggcgagacccgccucuga

SEQ ID NO: 126798 - RNA, 1575 nt, Artificial Sequence; identical to SEQ ID NO: 126794
  derived and/or modified CDS sequence (opt2) from glycoprotein__RABV__AB817104.1

SEQ ID NO: 126799 - RNA, 1575 nt, Artificial Sequence
  derived and/or modified CDS sequence (opt2) from glycoprotein__RABV__AB817105.1
auggucccccaggcccuccucuucgucccccuccucgucuucucccucugcuucggcaaguuccccaucuacaccauccccgacaagcucggccccuggucccccaucgacauccaccaccucuccugccccaacaaccucgucgucgaggacgagggcugcaccaaccucuccggcuucuccuacauggagcucaaggucggcuacaucuccgccaucaaggucaacggcuucaccugcaccggcgucgucaccgaggccgagaccuacaccaacuucgucggcuacgucaccaccaccuuccgccgcaagcacuuccgccccacccccgacgccugccgcgccgccuacaacuggaagauggccggcgacccccgcuacgaggagucccuccacaaccccuaccccgacuaccacuggcuccgcaccgucaagaccaccaaggagucccucgucaucaucucccccuccgucgccgaccucgaccccuacgacaagucccuccacucccgcgucuuccccggcggcaagugcuccggcaucaccgucuccuccaccuacugcuccaccaaccacgacuacaccaucuggaugcccgagaacccccgccucggcaccuccugcgacaucuucgucaacucccgcggcaagcgcgccuccaagggcggcaagaccugcggcuucgucgacgagcgcggccucuacaagucccucaagggcgccugcaagcucaagcucugcggcguccccggccuccgccucauggacggcaccugggucgccauccagaccuccgacgagaccaaguggugcccccccgaccagcucgucaaccuccacgacuuccgcuccgacgagaucgagcaccucgucgucgaggagcucgucaagaagcgcgaggagugccucgacgcccucgaguccaucaugaccaccaaguccgucuccuuccgccgccucucccaccuccgcaagcucguccccggcuucggcaaggccuacaccaucuucaacaagacccucauggaggccgacgcccacuacaaguccguccgcaccuggaacgagaucauccccuccaagggcugccuccgcgucggcggccgcugccacccccacgucaacggcgucuucuucaacggcaucauccucggccccgacggccacguccucauccccgagaugcaguccucccuccuccagcagcacauggagcuccucgaguccuccgucaucccccucaugcacccccucgccgaccccuccaccgucuucaaggacggcgacgaggccgaggacuucgucgagguccaccuccccgacguccacaagcucaucuccggcgucgaccucggccuccccuccuggggcaaguacguccucauguccgccggcauccucaccacccucaugcucaugaucuuccucaugaccugcugccgccgcgucaaccaggccggcuccaagcagcacggccucgagggcgccggccgcaaggucuccgucaccucccagaccggccgcaucaucuccuccugggaguccuacaaguccggcggcgagacccgccucuga

SEQ ID NO: 126800 - RNA, 1575 nt, Artificial Sequence; identical to SEQ ID NO: 126793
  derived and/or modified CDS sequence (opt2) from glycoprotein__RABV__AB817106.1

SEQ ID NO: 126801 - RNA, 1575 nt, Artificial Sequence; identical to SEQ ID NO: 126794
  derived and/or modified CDS sequence (opt2) from glycoprotein__RABV__AB817107.1

SEQ ID NO: 126802 - RNA, 1575 nt, Artificial Sequence; identical to SEQ ID NO: 126794
  derived and/or modified CDS sequence (opt2) from glycoprotein__RABV__AB817108.1

SEQ ID NO: 126803 - RNA, 1575 nt, Artificial Sequence; identical to SEQ ID NO: 126794
  derived and/or modified CDS sequence (opt2) from glycoprotein__RABV__AB817109.1

SEQ ID NO: 126804 - RNA, 1575 nt, Artificial Sequence
  derived and/or modified CDS sequence (opt2) from glycoprotein__RABV__AB817110.1
auggucccccaggcccuccucuucgucccccuccucgucuucucccucugcuucggcaaguuccccaucuacaccauccccgacaagcucggccccuggucccccaucgacauccaccaccucuccugccccaacaaccucgucgucgaggacgagggcugcaccaaccucuccggcuucuccuacauggagcucaaggucggcuacaucuccgccaucaaggucaacggcuucaccugcaccggcgucgucaccgaggccgagaccuacaccaacuucgucggcuacgucaccaccaccuuccgccgcaagcacuuccgccccacccccgacgccugccgcgccgccuacaacuggaagauggccggcgacccccgcuacgaggagucccuccacaaccccuaccccgacuaccacuggcuccgcaccgucaagaccaccaaggagucccucgucaucaucucccccuccgucgccgaccucgaccccuacgacaagucccuccacucccgcgucuuccccggcggcaagugcuccggcaucaccgucuccuccaccuacugcuccaccaaccacgacuacaccaucuggaugcccgagaacccccgccucggcaccuccugcgacaucuucgucaacucccgcggcaagcgcgccuccaagggcggcaagaccugcggcuucgucgacgagcgcggccucuacaagucccucaagggcgccugcaagcucaagcucugcggcguccccggccuccgccucauggacggcaccugggucgccauccagaccuccgacgagaccaaguggugcccccccgaccagcucgucaaccuccacgacuuccgcuccgacgagaucgagcaccucgucgucgaggagcucgucaagaagcgcgaggagugccucgacgcccucgaguccaucaugaccaccaaguccgucuccuuccgccgccucucccaccuccgcaagcucguccccggcuucggcaaggccuacaccaucuucaacaagacccucauggaggccgacgcccacuacaaguccguccgcaccuggaacgagaucauccccuccaagggcugccuccgcgucggcggccgcugccacccccacgucaacggcgucuucuucaacggcaucauccucggccccgacggccacguccucauccccgagaugcaguccucccuccuccagcagcacauggagcuccucgaguccuccgucaucccccucaugcacccccucgccgaccccuccaccgucuucaaggacggcgacgaggccgaggacuucgucgagguccaccuccccgacguccacaagcucaucuccggcgucgaccucggccuccccuccuggggcaaguacguccucaucuccgccggcauccucaucacccucaugcucaugaucuuccucaugaccugcugccgccgcgucaaccaggccggcuccaagcagcacggccucgagggcgccggccgcaaggucuccgucaccucccagaacggccgcgucaucuccuccugggaguccuacaagaacggcggcgagacccgccucuga

SEQ ID NO: 126805 - RNA, 1575 nt, Artificial Sequence
  derived and/or modified CDS sequence (opt2) from glycoprotein__RABV__AB817111.1
auggucccccaggcccuccucuucgucccccuccucgucuucucccucugcuucggcaaguuccccaucuacaccauccccgacaagcucggccccuggucccccaucgacauccaccaccucuccugccccaacaaccucgucgucgaggacgagggcugcaccaaccucuccggcuucuccuacauggagcucaaggucggcuacaucuccgccaucaaggucaacggcuucaccugcaccggcgucgucaccgaggccgagaccuacaccaacuucgucggcuacgucaccaccaccuuccgccgcaagcacuuccgccccacccccgacgccugccgcgccgccuacaacuggaagauggccggcgacccccgcuacgaggagucccuccacaaccccuaccccgacuaccacuggcuccgcaccgucaagaccaccaaggagucccucgucaucaucucccccuccgucgccgaccucgaccccuacgacaagucccuccacucccgcgucuuccccggcggcaagugcuccggcaucaccgucuccuccaccuacugcuccaccaaccacgacuacaccaucuggaugcccgagaacccccgccucggcaccuccugcgacaucuucgucaacucccgcggcaagcgcgccuccaagggcggcaagaccugcggcuucgucgacgagcgcggccucuacaagucccucaagggcgccugcaagcucaagcucugcggcguccccggccuccgccucauggacggcaccugggucgccauccagaccuccgacgagaccaaguggugcccccccgaccagcucgucaaccuccacgacuuccgcuccgacgagaucgagcaccucgucgucgaggagcucgucaagaagcgcgaggagugccucgacgcccucgaguccaucaugaccaccaaguccgucuccuuccgccgccucucccaccuccgcaagcucguccccggcuucggcaaggccuacaccaucuucaacaagacccucauggaggccgacgcccacuacaaguccguccgcaccuggaacgagaucauccccuccaagggcugccuccgcgucggcggccgcugccacccccacgucaacggcgucuucuucaacggcaucauccucggccccgacggccacguccucauccccgagaugcaguccucccuccuccagcagcacauggagcuccucgaguccuccgucaucccccucaugcacccccucgccgaccccuccaccgucuucaaggacggcgacgaggccgaggacuucgucgagguccaccuccccgacguccacaagcucaucuccggcgucgaccucggccuccccuccuggggcaaguacguccucauguccgccggcauccucaucacccucaugcucaugaucuuccucaugaccugcugccgccgcgucaaccaggccggcucccgccagcacgagcucgagggcgccggccgcaaggucuccgucaccucccagaacggccgcgucaucuccuccugggaguccuacaaguccggcggcgagacccgccucuga

SEQ ID NO: 126806 - RNA, 1575 nt, Artificial Sequence; identical to SEQ ID NO: 126804
  derived and/or modified CDS sequence (opt2) from glycoprotein__RABV__AB817112.1

SEQ ID NO: 126807 - RNA, 1575 nt, Artificial Sequence
  derived and/or modified CDS sequence (opt2) from glycoprotein__RABV__AB817113.1
auggucccccaggcccuccucuucgucccccuccucgucuucucccucugcuucggcaaguuccccaucuacaccauccccgacaagcucggccccuggucccccaucgacguccaccaccucuccugccccaacaaccucgucgucgaggacgagggcugcaccaaccucuccggcuucuccuacauggagcucaaggucggcuacaucuccgccaucaaggucaacggcuucaccugcaccggcgucgucaccgaggccgagaccuacaccaaccucgucggcuacgucaccaccaccuuccgccgcaagcacuuccgccccacccccgacgccugccgcgccuccuacaacuggaagauggccggcgacccccgcuacgaggagucccuccacaaccccuaccccgacuaccacuggcuccgcaccgucaagaccaccaaggagucccucgucaucaucucccccuccgucgccgaccucgaccccuacgacaagucccuccacucccgcgucuuccccggcggcaagugcuccggcaucaccgucuccuccaccuacugcuccaccaaccacgacuacaccaucuggaugcccgagaacccccgccucggcaccuccugcgacaucuucgucaacucccgcggcaagcgcgccuccaagggcggcaagaccugcggcuucgucgacgagcgcggccucuacaagucccucaagggcgccugcaagcucaagcucugcggcguccccggccuccgccucauggacggcaccugggucgccauccagaccuccgacgagaccaaguggugcccccccgaccagcucgucaaccuccacgacuuccgcuccgacgagaucgagcaccucgucgucgaggagcucgucaagaagcgcgaggagugccucgacgcccucgaguccaucaugaccaccaaguccgucuccuuccgccgccucucccaccuccgcaagcucguccccggcuucggcaaggccuacaccaucuucaacaagacccucauggaggccgacgcccacuacaaguccguccgcaccuggaacgagaucauccccuccaagggcugccuccgcgucggcggccgcugccacccccacgucaacggcgucuucuucaacggcaucauccucggccccgacggccacguccucauccccgagaugcaguccucccuccuccagcagcacauggagcuccucgaguccuccgucaucccccucaugcacccccucgccgaccccuccaccgucuucaaggacggcgacgaggccgaggacuucgucgagguccaccuccccgacguccacaagcucaucuccggcgucgaccucggccuccccuccuggggcaaguacguccucauguccgccggcauccucaccacccucaugcucaugaucuuccucaugaccugcugccgccgcgucaaccaggccggcuccaagcagcacggccucgagggcgccggccgcaaggucuccgucaccucccagaacggccgcgucaucuccuccugggaguccuacaaguccggcggcgagacccgccucuga

SEQ ID NO: 126808 - RNA, 1575 nt, Artificial Sequence
  derived and/or modified CDS sequence (opt2) from glycoprotein__RABV__AB817114.1
auggucccccaggcccuccucuucgucccccuccucgucuucucccucugcuucggcaaguuccccaucuacaccauccccgacaagcucggccccuggucccccaucgacauccaccaccucuccugccccaacaaccucgucgucgaggacgagggcugcaccaaccucuccggcuucuccuacauggagcucaaggucggcuacaucuccgccaucaaggucaacggcuucaccugcaccggcgucgucaccgaggccgagaccuacaccaacuucgucggcuacgucaccaccaccuuccgccgcaagcacuuccgccccacccccgacgccugccgcgccgccuacaacuggaagauggccggcgacccccgcuacgaggagucccuccacaaccccuaccccgacuaccacuggcuccgcaccgucaagaccaccaaggagucccucgucaucaucucccccuccgucgccgaccucgaccccuacgacaagucccuccacucccgcgucuuccccggcggcaagugcuccggcaucaccgucuccuccaccuacugcuccaccaaccacgacuacaccaucuggaugcccgagaacccccgccucggcaccuccugcgacaucuucgucaacucccgcggcaagcgcgccuccaagggcggcaagaccugcggcuucgucgacgagcgcggccucuacaagucccucaagggcgccugcaagcucaagcucugcggcguccccggccuccgccucauggacggcaccugggucgccauccagaccuccgacgagaccaaguggugcccccccgaccagcucgucaaccuccacgacuuccgcuccgacgagaucgagcaccucgucgucgaggagcucgucaagaagcgcgaggagugccucgacgcccucgaguccaucaugaccaccaaguccgucuccuuccgccgccucucccaccuccgcaagcucguccccggcuucggcaaggccuacaccaucuucaacaagacccucauggaggccgacgcccacuacaaguccguccgcaccuggaacgagaucauccccuccaagggcugccuccgcgucggcggccgcugccacccccacgucaacggcgucuucuucaacggcaucauccucggccccgacggccacguccucauccccgagaugcaguccucccuccuccagcagcacauggagcuccucgaguccuccgucaucccccucaugcacccccucgccgaccccuccaccgucuucaaggacggcgacgaggccgaggacuucgucgagguccaccuccccgacguccacaagcucaucuccggcgucgaccucggccuccccuccuggggcaaguacguccucauguccgccggcauccucaccacccucaugcucaugaucuuccucaugaccugcugccgccgcgucaaccaggccggcuccaagcagcacggccucgagcgcgccggccgcaaggucuccgucaccucccagaacggccgcgucaucuccuccugggaguccuacaaguccggcggcgagacccgccucuga

SEQ ID NO: 126809 - RNA, 1575 nt, Artificial Sequence
  derived and/or modified CDS sequence (opt2) from glycoprotein__RABV__AB817115.1
auggucccccaggcccuccucuucgucccccuccucgucuucucccucugcuucggcaaguuccccaucuacaccauccccgacaagcucggccccuggucccccaucgacauccaccaccucuccugccccaacaaccucgucgucgaggacgagggcugcaccaaccucuccggcuucuccuacauggagcucaaggucggcuacaucuccgccaucaaggucaacggcuucaccugcaccggcgucgucaccgaggccgagaccuacaccaacuucgucggcuacgucaccaccaccuuccgccgcaagcacuuccgccccacccccgacgccugccgcgccgccuacaacuggaagauggccggcgacccccgcuacgaggagucccuccacaaccccuaccccgacuaccacuggcuccgcaccgucaagaccaccaaggagucccucgucaucaucucccccuccgucgccgaccucgaccccuacgacaagucccuccacucccgcgucuuccccggcggcaagugcuccggcaucaccgucuccuccaccuacugcuccaccaaccacgacuacaccaucuggaugcccgagaacccccgccucggcaccuccugcgacaucuucgucaacucccgcggcaagcgcgccuccaagggcggcaagaccugcggcuucgucgacgagcgcggccucuacaagucccucaagggcgccugcaagcucaagcucugcggcguccccggccuccgccucauggacggcaccugggucgccauccagaccuccgacgagaccaaguggugcccccccgaccagcucgucaaccuccacgacuuccgcuccgacgagaucgagcaccucgucgucgaggagcucgucaagaagcgcgaggagugccucgacgcccucgaguccaucaugaccaccaaguccgucuccuuccgccgccucucccaccuccgcaagcucguccccggcuucggcaaggccuacaccaucuucaacaagacccucauggaggccgacgcccacuacaaguccguccgcaccuggaacgagaucauccccuccaagggcugccuccgcgucggcggccgcugccacccccacgucaacggcgucuucuucaacggcaucauccucggccccgacggccacguccucauccccgagaugcaguccucccuccuccagcagcacauggagcuccucgaguccuccgucaucccccucaugcacccccucgccgaccccuccaccgucuucaaggacggcgacgaggccgaggacuucgucgagguccaccuccccgacguccacaagcucaucuccggcgucgaccucggccuccccggcuggggcaaguacguccucauguccgccggcauccucaccacccucaugcucaugaucuuccucaugaccugcugccgccgcgucaaccaggccggcuccaagcagcacggccucgagggcgccggccgcaaggucuccgucaccucccagaacggccgcgucaucuccuccugggaguccuacaaguccggcggcgagacccgccucuga

SEQ ID NO: 126810 - RNA, 1575 nt, Artificial Sequence; identical to SEQ ID NO: 126794
  derived and/or modified CDS sequence (opt2) from glycoprotein__RABV__AB817116.1

SEQ ID NO: 126811 - RNA, 1575 nt, Artificial Sequence; identical to SEQ ID NO: 126799
  derived and/or modified CDS sequence (opt2) from glycoprotein__RABV__AB817117.1

SEQ ID NO: 126812 - RNA, 1575 nt, Artificial Sequence; identical to SEQ ID NO: 126794
  derived and/or modified CDS sequence (opt2) from glycoprotein__RABV__AB817118.1

SEQ ID NO: 126813 - RNA, 1575 nt, Artificial Sequence; identical to SEQ ID NO: 126793
  derived and/or modified CDS sequence (opt2) from glycoprotein__RABV__AB817119.1

SEQ ID NO: 126814 - RNA, 1575 nt, Artificial Sequence; identical to SEQ ID NO: 126794
  derived and/or modified CDS sequence (opt2) from glycoprotein__RABV__AB817120.1

SEQ ID NO: 126815 - RNA, 1575 nt, Artificial Sequence; identical to SEQ ID NO: 126794
  derived and/or modified CDS sequence (opt2) from glycoprotein__RABV__AB817121.1

SEQ ID NO: 126816 - RNA, 1575 nt, Artificial Sequence; identical to SEQ ID NO: 126797
  derived and/or modified CDS sequence (opt2) from glycoprotein__RABV__AB817122.1

SEQ ID NO: 126817 - RNA, 1575 nt, Artificial Sequence
  derived and/or modified CDS sequence (opt2) from glycoprotein__RABV__AB817123.1
auggucccccaggcccuccucuucgucccccuccucgucuucucccucugcuucggcaaguuccccaucuacaccauccccgacaagcucggccccuggucccccaucgacauccaccaccucuccugccccaacaaccucgucgucgaggacgagggcugcaccaaccucuccggcuucuccuacauggagcucaaggucggcuacaucuccgccaucaaggucaacggcuucaccugcaccggcgucgucaccgaggccgagaccuacaccaacuucgucggcuacgucaccaccaccuuccgccgcaagcacuuccgccccacccccgacgccugccgcgccgccuacaacuggaagauggccggcgacccccgcuacgaggagucccuccacaaccccuaccccgacuaccacuggcuccgcaccgucaagaccaccaaggagucccucgucaucaucucccccuccgucgccgaccucgaccccuacgacaagucccuccacucccgcgucuuccccggcggcaagugcuccggcaucaccgucuccuccaccuacugcuccaccaaccacgacuacaccaucuggaugcccgagaacccccgccucggcaccuccugcgacaucuucgucaacucccgcggcaagcgcgccuccaagggcggcaagaccugcggcuucgucgacgagcgcggccucuacaagucccucaagggcgccugcaagcucaagcucugcggcguccccggccuccgccucauggacggcaccugggucgccauccagaccuccgacgagaccaaguggugcccccccgaccagcucgucaaccuccacgacuuccgcuccgacgagaucgagcaccucgucgucgaggagcucgucaagaagcgcgaggagugccucgacgcccucgaguccaucaugaccaccaaguccgucuccuuccgccgccucucccaccuccgcaagcucguccccggcuucggcaaggccuacaccaucuucaacaagacccucauggaggccgacgcccacuacaaguccguccgcaccuggaacgagaucauccccuccaagggcugccuccgcgucggcggccgcugccacccccacgucaacggcgucuucuucaacggcaucauccucggccccgacggccacguccucauccccgagaugcaguccucccuccuccagcagcacauggagcuccucgaguccuccgucaucccccucaugcacccccucgccgaccccuccaccgucuucaaggacggcgacgaggccgaggaguucgucgagguccaccuccccgacguccacaagcucaucuccggcgucgaccucggccuccccuccuggggcaaguacguccucauguccgccggcauccucaucacccucaugcucaugaucuuccucaugaccugcugccgccgcgucaaccaggccggcuccaagcagcacggccucgagggcgccggccgcaaggucuccgucaccucccagaacggccgcgucaucuccuccugggaguccuacaaguccggcggcgagacccgccucuga

SEQ ID NO: 126818 - RNA, 1575 nt, Artificial Sequence; identical to SEQ ID NO: 126794
  derived and/or modified CDS sequence (opt2) from glycoprotein__RABV__AB817124.1

SEQ ID NO: 126819 - RNA, 1575 nt, Artificial Sequence; identical to SEQ ID NO: 126797
  derived and/or modified CDS sequence (opt2) from glycoprotein__RABV__AB817125.1

SEQ ID NO: 126820 - RNA, 1575 nt, Artificial Sequence
  derived and/or modified CDS sequence (opt2) from glycoprotein__RABV__AB817128.1
auggucccccaggcccuccucuucgucccccuccucgccuucucccucugcuucggcaaguuccccaucuacaccauccccgacaagcucggccccuggucccccaucgacauccaccaccucuccugccccaacaaccucgucgucgaggacgagggcugcaccaaccucuccggcuucuccuacauggagcucaaggucggcuacaucuccgccaucaaggucaacggcuucaccugcaccggcgucgucaccgaggccgagaccuacaccaacuucgucggcuacgucaccaccaccuuccgccgcaagcacuuccgccccacccccgacgccugccgcgccgccuacaacuggaagauggccggcgacccccgcuacgaggagucccuccacaaccccuaccccgacuaccacuggcuccgcaccgucaagaccaccaaggagucccucgucaucaucucccccuccgucgccgaccucgaccccuacgacaagucccuccacucccgcgucuuccccggcggcaagugcuccggcaucaccgucuccuccaccuacugcuccaccaaccacgacuacaccaucuggaugcccgagaacccccgccucggcaccuccugcgacaucuucgucaacucccgcggcaagcgcgccuccaagggcggcaagaccugcggcuucgucgacgagcgcggccucuacaagucccucaagggcgccugcaagcucaagcucugcggcguccccggccuccgccucauggacggcaccugggucgccauccagaccuccgacgagaccaaguggugcccccccgaccagcucgucaaccuccacgacuuccgcuccgacgagaucgagcaccucgucgucgaggagcucgucaagaagcgcgaggagugccucgacgcccucgaguccaucaugaccaccaaguccgucuccuuccgccgccucucccaccuccgcaagcucguccccggcuucggcaaggccuacaccaucuucaacaagacccucauggaggccgacgcccacuacaaguccguccgcaccuggaacgagaucauccccuccaagggcugccuccgcgucggcggccgcugccacccccacgucaacggcgucuucuucaacggcaucauccucggccccgacggccacguccucauccccgagaugcaguccucccuccuccagcagcacauggagcuccucgaguccuccgucaucccccucaugcacccccucgccgaccccuccaccgucuucaaggacggcgacgaggccgaggacuucgucgagguccaccuccccgacguccacaagcucaucuccggcgucgaccucggccuccccuccuggggcaaguacguccucauguccgccggcauccucaucacccucaugcucaugaucuuccucaugaccugcugccgccgcgucaaccaggccggcuccaagcagcacggccucgagggcgccggccgcaaggucuccgucuccucccagaacggccgcgucaucuccuccugggaguccuacaaguccggcggcgagacccgccucuga

SEQ ID NO: 126821 - RNA, 1575 nt, Artificial Sequence
  derived and/or modified CDS sequence (opt2) from glycoprotein__RABV__AB817129.1
auggucccccaggcccuccucuucgucccccuccucgucuucucccucugcuucggcaaguuccccaucuacaccauccccgacaagcucggccccuggucccccaucgacauccaccaccucuccugccccaacaaccucgucgucgaggacgagggcugcaccaaccucuccggcuucuccuacauggagcucaaggucggcuacaucuccgccaucaaggucaacggcuucaccugcaccggcgucgucaccgaggccgagaccuacaccaacuucgucggcuacgucaccaccaccuuccgccgcaagcacuuccgccccacccccgacgccugccgcgccgccuacaacuggaagauggccggcgacccccgcuacgaggagucccuccacaaccccuaccccgacuaccacuggcuccgcaccgucaagaccaccaaggagucccucgucaucaucucccccuccgucgccgaccucgaccccuacgacaagucccuccacucccgcgucuuccccggcggcaagugcuccggcaucaccgucuccuccaccuacugcuccaccaaccacgacuacaccaucuggaugcccgagaacccccgccucggcaccuccugcgacaucuucgucaacucccgcggcaagcgcgccuccaagggcggcaagaccugcggcuucgucgacgagcgcggccucuacaagucccucaagggcgccugcaagcucaagcucugcggcguccccggccuccgccucauggacggcaccugggucgccauccagaccuccgacgagaccaaguggugcccccccgaccagcucgucaaccuccacgacuuccgcuccgacgagaucgagcaccucgucgucgaggagcucgucaagaagcgcgaggagugccucgacgcccucgaguccaucaugaccaccaaguccgucuccuuccgccgccucucccaccuccgcaagcucguccccggcuucggcaaggccuacaccaucuucaacaagacccucauggaggccgacgcccacuacaaguccguccgcaccuggaacgagaucauccccuccaagggcugccuccgcgucggcggccgcugccacccccacgucaacggcgucuucuucaacggcaucauccucggccccgacggccacguccucauccccgagaugcaguccucccuccuccagcagcacauggagcuccucgaguccuccgucaucccccucaugcacccccucgccgaccccuccaccgucuucaaggacggcgacgaggccgaggacuucgucgagguccaccuccccgacguccacaagcucaucuccggcgucgaccucggccuccccuccuggggcaaguacguccucauguccgccggcauccucaucacccucaugcucaugaucuuccucaugaccugcugccgccgcgucaaccaggccggcuccaagcagcacggccucgagggcgccggccgcaaggucuccgucuccucccagaacggccgcgucaucuccuccugggaguccuacaaguccggcggcgagacccgccucuga

SEQ ID NO: 126822 - RNA, 1575 nt, Artificial Sequence; identical to SEQ ID NO: 126794
  derived and/or modified CDS sequence (opt2) from glycoprotein__RABV__AB817130.1

SEQ ID NO: 126823 - RNA, 1575 nt, Artificial Sequence; identical to SEQ ID NO: 126794
  derived and/or modified CDS sequence (opt2) from glycoprotein__RABV__AB817131.1

SEQ ID NO: 126824 - RNA, 1575 nt, Artificial Sequence; identical to SEQ ID NO: 126794
  derived and/or modified CDS sequence (opt2) from glycoprotein__RABV__AB817132.1

SEQ ID NO: 126825 - RNA, 1575 nt, Artificial Sequence
  derived and/or modified CDS sequence (opt2) from glycoprotein__RABV__AB817133.1
auggucccccaggcccuccucuucgucccccuccucgucuucucccucugcuucggcaaguuccccaucuacaccauccccgacaagcucggccccuggucccccaucgacauccaccaccucuccugccccaacaaccucgucgucgaggacgagggcugcaccaaccucuccggcuucuccuacauggagcucaaggucggcuacaucuccgccaucaaggucaacggcuucaccugcaccggcgucgucaccgaggccgagaccuacaccaacuucgucggcuacgucaccaccaccuuccgccgcaagcacuuccgccccacccccgacgccugccgcgccgccuacaacuggaagauggccggcgacccccgcuacgaggagucccuccacaaccccuaccccgacuaccacuggcuccgcaccgucaagaccaccaaggagucccucgucaucaucucccccuccgucgccgaccucgaccccuacgacaagucccuccacucccgcgucuuccccggcggcaagugcuccggcaucaccgucuccuccaccuacugcuccaccaaccacgacuacaccaucuggaugcccgagaacccccgccucggcaccuccugcgacaucuucgucaacucccgcggcaagcgcgccuccaagggcggcaagaccugcggcuucgucgacgagcgcggccucuacaagucccucaagggcgccugcaagcucaagcucugcggcguccccggccuccgccucauggacggcaccugggucgccauccagaccuccgacgagaccaaguggugcccccccgaccagcucgucaaccuccacgacuuccgcuccgacgagaucgagcaccucgucgucgaggagcucgucaagaagcgcgaggagugccucgacgcccucgaguccaucaugaccaccaaguccgucuccuuccgccgccucucccaccuccgcaagcucguccccggcuucggcaaggccuacaccaucuucaacaagacccucauggaggccgacgcccacuacaaguccguccgcaccuggaacgagaucauccccuccaagggcugccuccgcgucggcggccgcugccacccccacgucaacggcgucuucuucaacggcaucauccucggccccgacggccacguccucauccccgagaugcaguccucccuccuccagcagcacauggagcuccucgaguccuccgucaucccccucaugcacccccucgccgaccccuccaccgucuucaaggacggcgacgaggccgaggacuucgucgagguccaccuccccgacguccacaagcucaucuccggcgucgaccucggccuccccuccuggggcaaguacgcccucauguccgccggcguccucaccacccucaugcucaugaucuuccucaugaccugcugccgccgcgucaaccaggccggcuccaagcagcacggccucgagggcgccggccgcaaggucuccgucaccucccagaacggccgcgucaucuccuccugggaguccuacaaguccggcggcgagacccgccucuga

SEQ ID NO: 126826 - RNA, 1575 nt, Artificial Sequence
  derived and/or modified CDS sequence (opt2) from glycoprotein__RABV__AB817134.1
auggucccccaggcccuccucuucgucccccuccucgucuucucccucugcuucggcaaguuccccaucuacaccauccccgacaagcucggccccuggucccccaucgacauccaccaccucuccugccccaacaaccucgucgucgaggacgagggcugcaccaaccucuccggcuucuccuacauggagcucaaggucggcuacaucuccgccaucaaggucaacggcuucaccugcaccggcgucgucaccgaggccgagaccuacaccaacuucgucggcuacgucaccaccaccuuccgccgcaagcacuuccgccccacccccgacgccugccgcgccgccuacaacuggaagauggccggcgacccccgcuacgaggagucccuccacaaccccuaccccgacuaccacuggcuccgcaccgucaagaccaccaaggagucccucgucaucaucucccccuccgucgccgaccucgaccccuacgacaagucccuccacucccgcgucuuccccggcggcaagugcuccggcaucaccgucuccuccaccuacugcuccaccaaccacgacuacaccaucuggaugcccgagaacccccgccucggcaccuccugcgacaucuucgucaacucccgcggcaagcgcgccuccaagggcggcaagaccugcggcuucgucgacgagcgcggccucuacaagucccucaagggcgccugcaagcucaagcucugcggcguccccggccuccgccucauggacggcaccugggucgccauccagaccuccgacgagaccaaguggugcacccccgaccagcucgucaaccuccacgacuuccgcuccgacgagaucgagcaccucgucgucgaggagcucgucaagaagcgcgaggagugccucgacgcccucgaguccaucaugaccaccaaguccgucuccuuccgccgccucucccaccuccgcaagcucguccccggcuucggcaaggccuacaccaucuucaacaagacccucauggaggccgacgcccacuacaaguccguccgcaccuggaacgagaucauccccuccaagggcugccuccgcgucggcggccgcugccacccccacgucaacggcgucuucuucaacggcaucauccucggccccgacggccacguccucauccccgagaugcaguccucccuccuccagcagcacauggagcuccucgaguccuccgucaucccccucaugcacccccucgccgaccccuccaccgucuucaaggacggcgacgaggccgaggacuucgucgagguccaccuccccgacguccacaagcucaucuccggcgucgaccucggccuccccuccuggggcaaguacguccucauguccgccggcauccucaucacccucaugcucaugaucuuccucaugaccugcugccgccgcgucaaccaggccggcuccaagcagcacggccucgagggcgccggccgcaaggucuccgucaccucccagaacggccgcgucaucuccuccugggaguccuacaaguccggcggcgagacccgccucuga

SEQ ID NO: 126827 - RNA, 1575 nt, Artificial Sequence
  derived and/or modified CDS sequence (opt2) from glycoprotein__RABV__AB817135.1
auggucccccaggcccuccucuucgucccccuccucgucuucucccucugcuucggcaaguuccccaucuacaccauccccgacaagcucggccccuggucccccaucgacauccaccaccucuccugccccaacaaccucgucgucgaggacgagggcugcaccaaccucuccggcuucuccuacauggagcucaaggucggcuacaucuccgccaucaaggucaacggcuucaccugcaccggcgucgucaccgaggccgagaccuacaccaacuucgucggcuacgucaccaccaccuuccgccgcaagcacuuccgccccacccccgacgccugccgcgccgccuacaacuggaagauggccggcgacccccgcuacgaggagucccuccacaaccccuaccccgacuaccacuggcuccgcaccgucaagaccaccaaggagucccucgucaucaucucccccuccgucgccgaccucgaccccuacgacaagucccuccacucccgcgucuuccccggcggcaagugcuccggcaucaccgucuccuccaccuacugcuccaccaaccacgacuacaccaucuggaugcccgagaacccccgccucggcaccuccugcgacaucuucgucaacucccgcggcaagcgcgccuccaagggcggcaagaccugcggcuucgucgacgagcgcggccucuacaagucccucaagggcgccugcaagcucaagcucugcggcguccccggccuccgccucauggacggcaccugggucgccauccagaccuccgacgagaccaaguggugcccccccgaccagcucgucaaccuccacgacuuccgcuccgacgagaucgagcaccucgucgucgaggagcucgucaagaagcgcgaggagugccucgacgcccucgaguccaucaugaccacccgcuccgucuccuuccgccgccucucccaccuccgcaagcucguccccggcuucggcaaggccuacaccaucuucaacaagacccucauggaggccgacgcccacuacaaguccguccgcaccuggaacgagaucauccccuccaagggcugccuccgcgucggcggccgcugccacccccacgucaacggcgucuucuucaacggcaucauccucggccccgacggccacguccucauccccgagaugcaguccucccuccuccagcagcacauggagcuccucgaguccuccgucaucccccucaugcacccccucgccgaccccuccaccgucuucaaggacggcgacgaggccgaggacuucgucgagguccaccuccccgacguccacaagcucaucuccggcgucgaccucggccuccccuccuggggcaaguacguccucauguccgccggcauccucaucacccucaugcucaugaucuuccucaugaccugcugccgccgcgucaaccaggccggcuccaagcagcacggccucgagggcgccggccgcaaggucuccgucaccucccagaacggccgcgucaucuccuccugggaguccuacaaguccggcggcgagacccgccucuga

SEQ ID NO: 126828 - RNA, 1575 nt, Artificial Sequence; identical to SEQ ID NO: 126793
  derived and/or modified CDS sequence (opt2) from glycoprotein__RABV__AB817136.1

SEQ ID NO: 126829 - RNA, 1575 nt, Artificial Sequence; identical to SEQ ID NO: 126793
  derived and/or modified CDS sequence (opt2) from glycoprotein__RABV__AB817137.1

SEQ ID NO: 126830 - RNA, 1575 nt, Artificial Sequence
  derived and/or modified CDS sequence (opt2) from glycoprotein__RABV__AB817138.1
auggucccccaggcccuccucuucgucccccuccucgucuucucccucugcuucggcaaguuccccaucuacaccauccccgacaagcucggccccuggucccccaucgacauccaccaccucuccugccccaacaaccucgucgucgaggacgagggcugcaccaaccucuccggcuucuccuacauggagcucaaggucggcuacaucuccgccaucaaggucaacggcuucaccugcaccggcgucgucaccgaggccgagaccuacaccaacuucgucggcuacgucaccaccaccuuccgccgcaagcacuuccgccccacccccgacgccugccgcgccgccuacaacuggaagauggccggcgacccccgcuacgaggagucccuccacaaccccuaccccgacuaccacuggcuccgcaccgucaagaccaccaaggagucccucgucaucaucucccccuccgucgccgaccucgaccccuacgacaagucccuccacucccgcgucuuccccggcggcaagugcuccggcaucaccgucuccuccaccuacugcuccaccaaccacgacuacaccaucuggaugcccgagaaccagcgccucggcaccuccugcgacaucuucgucaacucccgcggcaagcgcgccuccaagggcggcaagaccugcggcuucgucgacgagcgcggccucuacaagucccucaagggcgccugcaagcucaagcucugcggcguccccggccuccgccucauggacggcaccugggucgccauccagaccuccgacgagaccaaguggugcccccccgaccagcucgucaaccuccacgacuuccgcuccgacgagaucgagcaccucgucgucgaggagcucgucaagaagcgcgaggagugccucgacgcccucgaguccaucaugaccaccaaguccgucuccuuccgccgccucucccaccuccgcaagcucguccccggcuucggcaaggccuacaccaucuucaacaagacccucauggaggccgacgcccacuacaaguccguccgcaccuggaacgagaucauccccuccaagggcugccuccgcgucggcggccgcugccacccccacgucaacggcgucuucuucaacggcaucauccucggccccgacggccacauccucauccccgagaugcaguccucccuccuccagcagcacauggagcuccucgaguccuccgucaucccccucaugcacccccucgccgaccccuccaccgucuucaaggacggcgacgaggccgaggacuucgucgagguccaccuccccgacguccacaagcucaucuccggcgucgaccucggccuccccuccuggggcaaguacguccucauguccgccggcauccucaccacccucaugcucaugaucuuccucaugaccugcugccgccgcgucaaccgcgucggcuccaagcagcacggccucgagggcgccggccgcaaggucuccgucaccucccagaacggccgcgucaucuccuccugggaguccuacaaguccggcggcgagacccgccucuga

SEQ ID NO: 126831 - RNA, 1575 nt, Artificial Sequence; identical to SEQ ID NO: 126759
  derived and/or modified CDS sequence (opt2) from glycoprotein__RABV__AB817140.1

SEQ ID NO: 126832 - RNA, 1575 nt, Artificial Sequence; identical to SEQ ID NO: 126804
  derived and/or modified CDS sequence (opt2) from glycoprotein__RABV__AB817141.1

SEQ ID NO: 126833 - RNA, 1575 nt, Artificial Sequence
  derived and/or modified CDS sequence (opt2) from glycoprotein__RABV__AB817142.1
auggucccccagguccuccucuucgucccccuccucgucuucucccucugcuucggcaaguuccccaucuacaccauccccgacaagcucggccccuggucccccaucgacauccaccaccucuccugccccaacaaccucgucgucgaggacgagggcugcaccaaccucuccggcuucuccuacauggagcucaaggucggcuacaucuccgccaucaaggucaacggcuucaccugcaccggcgucgucaccgaggccgagaccuacaccaacuucgucggcuacgucaccaccaccuuccgccgcaagcacuuccgccccacccccgacgccugccgcgccgccuacaacuggaagauggccggcgacccccgcuacgaggagucccuccacaaccccuaccccgacuaccacuggcuccgcaccgucaagaccaccaaggagucccucgucaucaucucccccuccgucgccgaccucgaccccuacgacaagucccuccacucccgcgucuuccccggcggcaagugcuccggcaucaccgucuccuccaccuacugcuccaccaaccacgacuacaccaucuggaugcccgagaacccccgccucggcaccuccugcgacaucuucgucaacucccgcggcaagcgcgccuccaagggcggcaagaccugcggcuucgucgacgagcgcggccucuacaagucccucaagggcgccugcaagcucaagcucugcggcguccccggccuccgccucauggacggcaccugggucgccauccagaccuccgacgagaccaaguggugcccccccgaccagcucgucaaccuccacgacuuccgcuccgacgagaucgagcaccucgucgucgaggagcucgucaagaagcgcgaggagugccucgacgcccucgaguccaucaugaccaccaaguccgucuccuuccgccgccucucccaccuccgcaagcucguccccggcuucggcaaggccuacaccaucuucaacaagacccucauggaggccgacgcccacuacaaguccguccgcaccuggaacgagaucauccccuccaagggcugccuccgcgucggcggccgcugccacccccacgucaacggcgucuucuucaacggcaucauccucggccccgacggccacguccucauccccgagaugcaguccucccuccuccagcagcacauggagcuccucgaguccuccgucaucccccucaugcacccccucgccgaccccuccaccgucuucaaggacggcgacgaggccgaggacuucgucgagguccaccuccccgacguccacaagcucaucuccggcgucgaccucggccuccccuccuggggcaaguacguccucauguccgccggcauccucaccacccucaugcucaugaucuuccucaugaccugcugccgccgcgucaaccaggccggcuccaagcagcacggccucgagggcgccggccgcaaggucuccgucaccucccagaacggccgcgucaucuccuccugggaguccuacaaguccggcggcgagacccgccucuga

SEQ ID NO: 126834 - RNA, 1575 nt, Artificial Sequence
  derived and/or modified CDS sequence (opt2) from glycoprotein__RABV__AB817143.1
auggucccccaggcccuccucuucgucccccuccucgucuucucccucugcuucggcaaguuccccaucuacaccauccccgacaagcucggccccuggucccccaucgacauccaccaccucuccugccccaacaaccucgucgucgaggacgagggcugcaccaaccucuccggcuucuccuacauggagcucaaggucggcuacaucuccgccaucaaggucaacggcuucaccugcaccggcgucgucaccgaggccgagaccuacaccaacuucgucggcuacgucaccaccaccuuccgccgcaagcacuuccgccccacccccgacgccugccgcgccgccuacaacuggaagauggccggcgacccccgcuacgaggagucccuccacaaccccuaccccgacuaccacuggcuccgcaccgucaagaccaccaaggagucccucgucaucaucucccccuccgucgccgaccucgaccccuacgacaagucccuccacucccgcgucuuccccggcggcaagugcuccggcaucaccgucuccuccaccuacugcuccaccaaccacgacuacaccaucuggaugcccgagaacccccgccucggcaccuccugcgacaucuucgucaacucccgcggcaagcgcgccuccaagggcggcaagaccugcggcuucgucgacgagcgcggccucuacaagucccucaagggcgccugcaagcucaagcucugcggcguccccggccuccgccucauggacggcaccugggucgccauccagaccuccgacgagaccaaguggugcccccccgaccagcucgucaaccuccacgacuuccgcuccgacgagaucgagcaccucgucgucgaggagcucgucaagaagcgcgaggagugccucgacgcccucgaguccaucaugaccaccaaguccgucuccuuccgccgccucucccaccuccgcaagcucguccccggcuucggcaaggccuacaccaucuucaacaagacccucauggaggccgacgcccacuacaaguccguccgcaccuggaacgagaucauccccuccaagggcugccuccgcgucggcggccgcugccacccccacgucaacggcgucuucuucaacggcaucauccucggccccgacggccacguccucauccccgagaugcaguccucccuccuccagcagcacauggagcuccucgaguccuccgucaucccccucaugcacccccucgccgaccccuccaccgucuucaaggacggcgacgaggccgaggacuucgucgagguccaccuccccgacguccacaagcucaucuccggcgucgaccucggccuccccuccuggggcaaguacguccucauguccgccggcauccucaucacccucaugcucaugaucuuccucaugaccugcugccgccgcgucaaccaggccggcuccaagcagcacggccucgagggcaccggccgcaaggucuccgucaccucccagaacggccgcgucaucuccuccugggaguccuacaaguccggcggcgagacccgccucuga

SEQ ID NO: 126835 - RNA, 1575 nt, Artificial Sequence; identical to SEQ ID NO: 126794
  derived and/or modified CDS sequence (opt2) from glycoprotein__RABV__AB817144.1

SEQ ID NO: 126836 - RNA, 1575 nt, Artificial Sequence; identical to SEQ ID NO: 126797
  derived and/or modified CDS sequence (opt2) from glycoprotein__RABV__AB817146.1

SEQ ID NO: 126837 - RNA, 1575 nt, Artificial Sequence
  derived and/or modified CDS sequence (opt2) from glycoprotein__RABV__AB838709.1
augaucccccaggcccuccucuucgucccccuccucgucuucucccucugcuucggcaaguuccccaucuacaccauccccgacaagcucggccccuggucccccaucgacauccaccaccucuccugccccaacaaccucgucgucgaggacgagggcugcaccaaccucuccggcuucuccuacauggagcucaaggucggcuacaucuccgccaucaaggucaacggcuucaccugcaccggcgucgucaccgaggccgagaccuacaccaacuucgucggcuacgucaccaccaccuucaagcgcaagcacuuccgccccacccccgacgccugccgcgccgccuacaacuggaagauggccggcgacccccgcuacgaggagucccuccacaaccccuaccccgacuaccacuggcuccgcaccgucaagaccaccaaggagucccucgucaucaucugccccuccgucgccgaccucgaccccuacgacaagucccuccacucccgcgucuuccccuccggcaagugcuccggcaucaccgucuccuccaccuacugcuccaccaaccacgacuacaccaucuggaugcccgagaacccccgccucggcaccuccugcgacaucuucaccaacucccgcggcaagcgcgccuccaagggcuccaagaccugcggcuucgucgacgagcgcggccucuacaagucccucaagggcgccugcaagcucaagcucugcggcguccucggccuccgccucauggacggcaccugggccgccauccagaccuccgacgagaccaaguggugcccccccgaccagcucgucaaccuccacgacuuccgcuccgacgagaucgagcaccucgucgucgaggagcucgucaagaagcgcgaggagugccucgacgcccucgaguccaucaugaccaccaaguccgucuccuuccgccgccucucccaccuccgcaagcucguccccggcuucggcaaggccuacaccaucuucaacaagacccucauggaggccgacgcccacuacaaguccguccgcaccuggaacgagaucauccccuccaagggcugccuccgcgucggcggccgcugccacccccacgucaacggcgucuucuucaacggcaucauccucggccccgacggccacguccucauccccgagaugcaguccucccuccuccagcagcacauggagcuccucgaguccuccgucaucccccucaugcacccccucgccgaccccuccaccgucuucaaggacgacgacgaggccgaggacuucgucgagguccaccuccccgacguccacaagcaggucuccggcgucgaccucggccuccccuccuggggcaaguacguccucauguccgccggcguccucaccgcccucaugcucaugaucuuccucaccaccugcugccgccgcgccaaccgcgccgaguccgcccagcacucccucggcgagcgcggccgcaaggucuccgucaccucccaguccggccgcgucaucuccuccugggaguccuacaaguccggcggcgagaccaagcucuga

SEQ ID NO: 126838 - RNA, 1575 nt, Artificial Sequence; identical to SEQ ID NO: 126670
  derived and/or modified CDS sequence (opt2) from glycoprotein__RABV__AB838710.1

SEQ ID NO: 126839 - RNA, 1575 nt, Artificial Sequence
  derived and/or modified CDS sequence (opt2) from glycoprotein__RABV__AB905545.1
augaucccccaggcccuccucuucgucccccuccucaucuccuccuccugccucggcaaguuccccaucuacaccauccccgacaagcucggccccuggucccccaucgacauccaccaccucuccugccccaacaaccucgucgucgaggacgagggcugcaccaaccucuccggcuucuccuacauggagcucaaggucggcuacaucuccgccaucaaggucaacggcuucaccugcaccggcgucgucaccgaggccgagaccuacaccaacuucgucggcuacgucaccaccaccuucaagcgcaagcacuuccgccccauccccgacgccugccgcgccgccuacaacuggaagauggccggcgacccccgcuacgaggagucccuccagaaccccuaccccgacuaccacuggcuccgcaccgucaagaccaccaaggagucccucaucaucaucucccccuccgucgccgaccucgaccccuacgacaagucccuccacucccgcgucuuccccggcggcaagugccucggcaucaccgucuccuccaccuacugcuccaccaaccacgacuacaccaucuggaugcccgaggagccccgccucggcaccuccugcgacaucuucaccuccuccaagggcaagaaggccuccaagggcggcaagaccugcggcuucgucgacgagcgcggccucuacaagucccucaagggcgccugcaagcucaagcucugcggcguccucggccuccgccucauggacggcaccugggucuccauccagaccuccgacgacaccaaguggugcccccccgaccagcucgucaaccuccacgacuuccacuccgacgagaucgagcaccucgucgucgaggagcucgucaagaagcgcgaggagugccucgacgcccucgaguccaucaugaccaccaaguccgucuccuuccgccgccucuccuaccuccgcaagcucguccccggcuucggcaaggccuacaccaucuucaacaagacccucauggaggccgacgcccacuacaaguccguccgcaccuggaacgagaucauccccuccaagggcugccucaagguccgcgagcgcugccacccccccgucgacggcgucuucuucaacggcaucauccucggccccgacggcaacguccucauccccgagaugcaguccucccuccuccagcagcacauggagcuccucgaguccuccgucaucccccucaugcacccccucgccgaccccuccaccgucuucaaggagggcgacgaggccgaggacuucgucgagguccaccuccccgacguccacaagcagaucuccggcgucgaccucggccuccccuccuggggcaaguaccuccucaugaucgccggcggccucgccacccucguccucaucaucugcuccauggccugcugccgccgcaccaagcgcaccgagucccgccgccgcggcuccggcgaguccggcaagaaggucaccgccaccccccagaccaagaaggucgucuccuccugggagcucuacaaguccgagggcgacgcccgccucuga

SEQ ID NO: 126840 - RNA, 1575 nt, Artificial Sequence
  derived and/or modified CDS sequence (opt2) from glycoprotein__RABV__AB981663.1
augaucccccaggcccuccucuucgucccccuccucgucuucucccucugcuucggcaaguuccccaucuacaccauccccgacaagcucggccccuggucccccaucgacauccaccaccucuccugccccaacaaccucgucgucgaggacgagggcugcaccaaccucuccggcuucuccuacauggagcucaaggucggcuacaucuccgccaucaaggucaacggcuucaccugcaccggcgucgucaccgaggccgagaccuacaccaacuucgucggcuacgucaccaccaccuucaagcgcaagcacuuccgccccacccccgacgccugccgcgccgccuacaacuggaagauggccggcgacccccgcuacgaggagucccuccacaaccccuaccccgacuaccacuggcuccgcaccgucaagaccaccaaggagucccucgucaucaucucccccuccgucuccgaccucgaccccuacgacaagucccuccacucccgcgucuuccccuccggcaagugcuccggcaucaccgucuccuccaccuacugccccaccaaccacgacuacaccaucuggaugcccgagaacccccgccucggcaccuccugcgacaucuucaccaacucccgcggcaagcgcgccuccaagggcuccaagaccugcggcuucgucgacgagcgcggccucuacaagucccucaagggcgccugcaagcucaagcucugcggcguccucggccuccgccucauggacggcaccugggccgccauccagaccuccgacgaggccaaguggugcccccccgaccagcucgucaacauccacgacuuccgcuccgacgagaucgagcaccucgucgucgaggagcucgucaagaagcgcgaggagugccucgacgcccucgaguccaucaugaccaccaaguccgucuccuuccgccgccucucccaccuccgcaagcucguccccggcuucggcaaggccuacaccaucuucaacaagacccucauggaggccgacgcccacuacaaguccguccgcaccuggaacgagaucauccccuccaagggcugccuccgcgucggcggccgcugccacccccacgucaacggcgucuucuucaacggcaucauccucggccccgacggccacguccucauccccgagaugcaguccucccuccuccagcagcacauggagcuccucgaguccuccgucaucccccucaugcacccccucgccgaccccuccaccgucuucaaggacggcgacgaggccgaggacuucgucgagguccaccuccccgacguccacaagcaggucuccggcgucgaccucggccuccccuccuggggcaaguacguccucauguccgucggcgccaugaucgcccucaugcucaccaucuuccucaccaccugcugccgcaagaccaacggcgccggcuccauccagcaccgccccggcgagaccggccgcaaggucuccgucaccucccaguccggccgcgucaucuccuccugggaguccuacaaguccggcggcgagaccaagcucuga

SEQ ID NO: 126841 - RNA, 1575 nt, Artificial Sequence
  derived and/or modified CDS sequence (opt2) from glycoprotein__RABV__AB981664.1
augaucccccaggcccuccucuucgucccccuccucgucuucucccucugcuucggcaaguuccccaucuacaccauccccgacaagcucggccccuggucccccaucgacauccaccaccucuccugccccaacaaccucgucgucgaggacgagggcugcaccaaccucuccggcuucuccuacauggagcucaaggucggcuacaucuccgccaucaaggucaacggcuucaccugcaccggcgucgucaccgaggccgagaccuacaccaacuucgucggcuacgucaccaccaccuucaagcgcaagcacuuccgccccacccccgacgccugccgcgccgccuacaacuggaagauggccggcgacccccgcuacgaggagucccuccacaaccccuaccccgacuaccacuggcuccgcaccgucaagaccaccaaggagucccucgucaucaucucccccuccgucuccgaccucgaccccuacgacaagucccuccacucccgcgucuuccccuccggcaagugcuccggcaucaccgucuccuccaccuacugccccaccaaccacgacuacaccaucuggaugcccgagaacccccgccucggcaccuccugcgacaucuucaccaacucccgcggcaagcgcgccuccaagggcuccaagaccugcggcuucgucgacgagcgcggccucuacaagucccucaagggcgccugcaagcucaagcucugcggcguccucggccuccgccucauggacggcaccugggccgccauccagaccuccgacgaggucaaguggugcccccccgaccagcucgucaacauccacgacuuccgcuccgacgagaucgagcaccucgucgucgaggagcucgucaagaagcgcgaggagugccucgacgcccucgaguccaucaugaccuccaaguccgucuccuuccgccgccucucccaccuccgcaagcucguccccggcuucggcaaggccuacaccaucuucaacaagacccucauggaggccgacgcccacuacaaguccguccgcaccuggaacgagaucauccccuccaagggcugccuccgcgucggcggccgcugccacccccacgucaacggcgucuucuucaacggcaucauccucggccccgacggccacguccucauccccgagaugcaguccucccuccuccagcagcacauggagcuccucgaguccuccgucaucccccucaugcacccccucgccgaccccuccaccgucuucaaggacggcgacgaggccgaggacuucgucgagguccaccuccccgacguccacaagcaggucuccggcgucgaccucggccuccccuccuggggcaaguacguccucauguccgucggcgccaugaucgcccucaugcucaugaucuuccucaugaccugcugccgcaaggccaacggcgccgaguccauccagcaccgccucggcgagaccggccgcaaggucuccgucaccucccaguccggccgcgucaucuccuccugggaguccuacaaguccggcggcgagaccaagcucuga

SEQ ID NO: 126842 - RNA, 1575 nt, Artificial Sequence
  derived and/or modified CDS sequence (opt2) from glycoprotein__RABV__AF344305.1
auggucccccaggcccuccucgucgucccccuccucggcuucucccucugcuucggcaaguuccccaucuacaccauccccgacaagcucggccccuggucccccaucgacauccaccaccucuccugccccaacaaccucgucgucgaggacgagggcugcaccaaccucuccggcuucuccuacauggagcucaaggucggcuacaucuccgccaucaaggucaacggcuucaccugcaccggcgucgucaccgaggccgagaccuacaccaacuucgucggcuacgucaccaccaccuucaagcgcaagcacuuccgccccacccccgacgagugccgcgccgcccacaacuggaagauggccggcgacccccgcuacgaggagucccuccacaaccccuaccccgacuaccacuggcuccgcaccgucaagaccaccaaggagucccucgucaucaucucccccuccgucgccgaccucgaccccuacgacaagucccuccacucccgcgucuuccccuccggcaagugcuccggcaucaccgucuccuccaccuacugcuccaccaaccacgacuacaccaucuggaugcccgagaacccccgccucggcaccuccugcgacaucuucaccaacucccgcggcaagcgcgccuccaagggcuccaagaccugcggcuucgucgacgagcgcggccucuacaagucccucaagggcgccugcaagcucaagcucugcggcguccucggccucaagcucauggacggcaccugggucgccaugcagaccuccgacgagaccaaguggugcccccccgaccagcucgucaaccuccacgaccuccgcuccgacgagaucgagcaccucgucgucgaggagcucgucaagaagcgcgaggagugccucgacgcccucgaguccaucaugaccaccaaguccgucuccuuccgccgccucucccaccuccgcaagcucguccccggcuucggcaaggccuacaccaucuucaacaagacccucauggaggccgacgcccacuacaaguccguccgcaccuggaacgagaucauccccuccaagggcugccucaaggucggcggccgcugccacccccacgucaacggcgucuucuucaacggcgucauccucggccccgacggccacguccucauccccgagaugcaguccucccuccuccagcagcacauggagcuccucgaguccuccgucaucccccucaugcacccccucgccgaccccuccaccgucuucaaggacggcgacgaggccgaggacuucgucgagguccaccuccccgacguccacaagcaggucuccggcgucgaccucggccuccccaacuggggcaaguacaucucccucuccgccggcgcccucaucgcccucaugcucaucauccuccucaugaccugcugccgcaaggucaaccgccccgagcccacccagcgcucccucgagggcaagaagcgcaaggucuccgucaccucccaguccggcaaggucaucuccuccugggaguccuacaaguccggcggcgagacccgccucuga

SEQ ID NO: 126843 - RNA, 1575 nt, Artificial Sequence
  derived and/or modified CDS sequence (opt2) from glycoprotein__RABV__AF344307.1
auggucccccaggcccuccucgucgucccccuccucggcuucucccucugcuucggcaaguuccccaucuacaccauccccgacaagcucggccccuggucccccaucgacauccaccaccucuccugccccaacaaccucgucgucgaggacgagggcugcaccaaccucuccggcuucuccuacauggagcucaaggucggcuacaucuccgccaucaaggucaacggcuucaccugcaccggcgucgucaccgaggccgagaccuacaccaacuucgucggcuacgucaccaccaccuucaagcgcaagcacuuccgccccacccccgacgagugccgcgccgccuacaacuggaagauggccggcgacccccgcuacgaggagucccuccacaaccccuaccccgacuaccacuggcuccgcaccgucaagaccaccaaggagucccucgucaucaucucccccuccgucgccgaccucgaccccuacgacaagucccuccacucccgcgucuuccccuccggcaagugcuccggcaucaccgucuccuccaccuacugcuccaccaaccacgacuacaccaucuggaugcccgagaacccccgccucggcaccuccugcgacaucuucaccaacucccgcggcaagcgcgccuccaagggcuccaagaccugcggcuucgucgacgagcgcggccucuacaagucccucaagggcgccugcaagcucaagcucugcggcguccucggccucaagcucauggacggcaccugggucgccaugcagaccuccgacgagaccaaguggugcccccccgaccagcucgucaaccuccacgaccuccgcuccgacgagaucgagcaccucgucgucgaggagcucgucaagaagcgcgaggagugccucgacgcccucgaguccaucaugaccaccaaguccgucuccuuccgccgccucucccaccuccgcaagcucguccccggcuucggcaaggccuacaccaucuucaacaagacccucauggaggccgacgcccacuacaaguccguccgcaccuggaacgagaucauccccuccaagggcugccucaaggucgagggccgcugccacccccacgucaacggcgucuucuucaacggcgucauccucggccccgacggccacguccucauccccgagaugcaguccucccuccuccagcagcacauggagcuccucgaguccuccgucaucccccucaugcacccccucgccgaccccuccaccgucuucaaggacggcgacgaggccgaggacuucgucgagguccaccuccccgacguccacaagcaggucuccggcgucgaccucggccuccccaacuggggcaaguacaucucccucuccgccggcgcccucaucgcccucaugcucaucauccuccucaugaccugcugccgcaaggucaaccgccccgagcccacccagcgcucccucgagggcaagaagcgcaaggucuccgucaccucccaguccggcaaggucaucuccuccugggaguccuacaaguccggcggcgagacccgccucuga

SEQ ID NO: 126844 - RNA, 1575 nt, Artificial Sequence
  derived and/or modified CDS sequence (opt2) from glycoprotein__RABV__AF499686.2
auggucccccaggcccuccucuucgucccccuccucgucuucccccucugcuucggcaaguuccccaucuacaccauccccgacaagcucggccccuggucccccaucgacauccaccaccucuccugccccaacaaccucgucgucgaggacgaggagugcaccaaccucuccggcuucuccuacauggagcucaaggucggcuacauccucgccaucaaggucaacggcuucaccugcaccggcgucgucaccgaggccgagaccuacaccaacuucgucggcuacgucaccaccaccuucaagcgcaagcacuuccgccccacccccgacgccugccgcgccgccuacaacuggaagauggccggcgacccccgcuacgaggagucccuccacaaccccuaccccgacuaccgcuggcuccgcaccgucaagaccaccaaggagucccucgucaucaucucccccuccgucgccgaccucgaccccuacgaccgcucccuccacucccgcgucuuccccuccggcaagugcuccggcgucgccgucuccuccaccuacugcuccaccaaccacgacuacaccaucuggaugcccgagaacccccgccucggcauguccugcgacaucuucaccaacucccgcggcaagcgcgccuccaagggcuccgagaccugcggcuucgucgacgagcgcggccucuacaagucccucaagggcgccugcaagcucaagcucugcggcguccucggccuccgccucauggacggcaccugggucuccaugcagaccuccaacgagaccaaguggugcccccccgacaagcucgucaaccuccacgacuuccgcuccgacgagaucgagcaccucgucgucgaggagcucguccgcaagcgcgaggagugccucgacgcccucgaguccaucauggccaccaaguccgucuccuuccgccgccucucccaccuccgcaagcucguccccggcuucggcaaggccuacaccaucuucaacaagacccucauggaggccgacgcccacuacaaguccgucuccaccuggaacgagguccuccccuccaagggcugccuccgcgucggcggccgcugccacccccacgucaacggcgucuucuucaacggcaucauccucggccccgacggcaacguccucauccccgagaugcaguccucccuccuccagcagcacauggagcuccucgaguccuccgucaucccccucguccacccccucgccgaccccuccaccgucuucaaggacggcgacgaggccgaggacuucgucgagguccaccuccccgacguccacaaccaggucuccggcgucgaccucggccuccccaacuggggcaaguacguccuccucuccgccggcgcccucaccgcccucaugcucaucaucuuccucaugaccugcugccgccgcgucaaccgcuccgagcccacccagcacaaccuccgcggcaccggccgcgaggucuccgucaccccccaguccggcaagaucaucuccuccugggagucccacaaguccggcggcgagacccgccucuga

SEQ ID NO: 126845 - RNA, 1575 nt, Artificial Sequence
  derived and/or modified CDS sequence (opt2) from glycoprotein__RABV__AJ871962.1
auggucccccaggcccuccucuucgucccccuccucggcuucucccucugcuucggcaaguuccccaucuacaccauccccgacgagcucggccccuggucccccaucgacauccaccaccucuccugccccaacaaccucgucgucgaggacgagggcugcaccaaccucuccgaguucuccuacauggagcucaaggucggcuacaucuccgccaucaaggucaacggcuucaccugcaccggcgucgucaccgaggccgagaccuacaccaacuucgucggcuacgucaccaccaccuucaagcgcaagcacuuccgccccacccccgacgccugccgcgccgccuacaacuggaagauggccggcgacccccgcuacgaggagucccuccacaaccccuaccccgacuaccacuggcuccgcaccguccgcaccaccaaggagucccucaucaucaucucccccuccgucaccgaccucgaccccuacgacaagucccuccacucccgcgucuuccccggcggcaagugcuccggcaucaccgucuccuccaccuacugcuccaccaaccacgacuacaccaucuggaugcccgagaacccccgcccccgcacccccugcgacaucuucaccaacucccgcggcaagcgcgccuccaagggcaacaagaccugcggcuucgucgacgagcgcggccucuacaagucccucaagggcgccugccgccucaagcucugcggcguccucggccuccgccucauggacggcaccugggucgccaugcagaccuccgacgagaccaaguggugcccccccgaccagcucgucaaccuccacgacuuccgcuccgacgagaucgagcaccucgucgucgaggagcucgucaagaagcgcgaggagugccucgacgcccucgaguccaucaugaccaccaaguccgucuccuuccgccgccucucccaccuccgcaagcucguccccggcuucggcaaggccuacaccaucuucaacaagacccucauggaggccgacgcccacuacaaguccguccgcaccuggaacgagaucauccccuccaagggcugccucaaggucggcggccgcugccacccccacgucaacggcgucuucuucaacggcaucauccucggccccgacggccacguccucauccccgagaugcaguccucccuccuccagcagcacauggagcuccucaaguccuccgucaucccccucaugcacccccucgccgaccccuccaccgucuucaaggagggcgacgaggccgaggacuucgucgagguccaccuccccgacgucuacaagcagaucuccggcgucgaccucggccuccccaacuggggcaaguacguccucaugaccgccggcgccaugaucggccucguccucaucuucucccucaugaccuggugccgccgcgccaaccgccccgaguccaagcagcgcuccuucggcggcaccggccgcaacgucuccgucaccucccaguccggcaaggucauccccuccugggaguccuacaaguccggcggccagacccgccucuga

SEQ ID NO: 126846 - RNA, 1575 nt, Artificial Sequence
  derived and/or modified CDS sequence (opt2) from glycoprotein__RABV__AY683208.1
auggucccccaggcccuccucuucguccccuuccucggcuucucccucugcuucggcaaguuccccaucuacaccauccccgacaagcucggccccuggucccccaucgacauccaccaccucuccugccccaacaaccucgucgucgaggacgagggcugcaccaaccucuccggcuucuccuaccucgagcucaaggucggccacaucuccgccaucaaggucaacggcuucaccugcaccggcgucgucaccgaggccgagaccuacaccaacuucgucggcuacgucaccaccaccuucaagcgcaagcacuuccgccccacccccgacgccugccgcgccgccuacaacuggaagaccgccggcgacccccgcuacgaggagucccuccagaaccccuaccccgacuaccaguggcuccgcaccguccgcaccaccaaggagucccucgucaucaucucccccuccgccgccgaccucgaccccuacgacaagucccuccacucccgcgucuuccccuccggcaagugcuccggcaucaccgucuccuccgucuacugcuccaccaaccacgacuacaccaucuggaugcccgagaacccccgccagggcauguccugcgacaucuucaccaacucccgcggcaagcgcgccuccaaggagcgcaagaccugcggcuucgucgacgagcgcggccucuacaagucccuccgcggcuccugcaagcucaagcucugcggcguccucggccuccgccucauggacggcaccugggucgccaugcagaccuccaacgagaccaaguggugcucccccgaccagcucgucaaccuccacgacuuccacuccgacgagaucgagcaccucgucgucgaggagcucgucaagaagcgcgaggagugccucgacgcccucgaguccaucaugaccaccaaguccgucuccuuccgccgccucucccaccuccgcaagcucguccccggcuucggcaaggccuacaccaucaucaacaagacccucauggaggccgaggcccacuacaaguccguccgcaccuggaacgagaucguccccuccaagggcugccuccgcgucgagggccgcugccacccccacgucaacggcgucuucuucaacggcaucauccucggccccgacggccacguccucauccccgagaugcaguccucccuccuccagcagcacauggagcuccucgaguccuccgucaucccccucaugcacccccucgccgaccccuccaccgucuucaaggagggcgacgaggccgaggacuucgucgagguccacuuccccgacguccacaagaaggucuccgaggucgaccucggccuccccaacuggggcgaguacguccuccucuccgccggcacccucaucgcccucaugcucaucaucuuccucaugaucugccgccgccgcgucaaccgccccgaguccacccagcgcucccuccgcggcaccgagaugaaggucuccgucaccccccaguccggcaaguucaaguccuccugggaguccuacaaguccggcgacgaggcccgccucuga

SEQ ID NO: 126847 - RNA, 1575 nt, Artificial Sequence
  derived and/or modified CDS sequence (opt2) from glycoprotein__RABV__AY705373.1
augaucccccaggcccuccucuucgucccccuccucauccccucccucugccucggcaaguuccccaucuacaccauccccgacaagcucggccccuggucccccaucgacauccaccaccucuccugccccaacaaccucgucgucgaggacgagggcugcaccucccucuccggcuucuccuacauggagcucaaggucggcuacaucuccgccaugaaggucaacggcuucaccugcaccggcgucgucaccgaggccgagaccuacaccaacuucgucggcuacgucaccaccaccuucaagcgcaagcacuuccgccccaugcccgacgccugccgcgccgcccacgacuggaagaucgccggcgacccccgcuacgaggacucccuccagaaccccuaccccgacuaccacuggcuccgcaccgucaagaccaccaaggagucccucgucaucaucucccccuccgucgccgaccucgaccccuacgacaagucccuccacucccgcgucuuccccuccggcaagugccucggcaucaccgucuccuccaccuacugccccaccaaccacgacuacaccaucuggaugcccgucgaggcccgccucggcaccuccugcgacaucuucaccaacucccgcggcaagaaggccuccaagggcggccgcaccugcggcuucgucgacgagcgcggccucuacaagucccucaagggcgccugcaagcucaagcucugcggcguccccggccuccgccucaugaacggcaccugggucuccauccagaccuccgacgacaucaaguggugcccccccgaccagcucgucaaccuccacgacuuccacuccgacgagaucgagcaccucgucgucgaggagcucaucaagaagcgcgagggcugccucgacgcccucgaguccaucaugaccaccaaguccgucuccuuccgccgccucucccaccuccgcaagcucguccccggcuucggcaaggccuacaccaucuucaacaacacccucauggaggccgacgcccacuacaaguccguccgcaccuggaacgaggucauccccuccaagggcugccucaaggucggcggccgcugccacccccccgucaacggcgucuucuucaacggcaucauccucggccccgacggcaacguccucauccccgagaugcaguccucccuccuccagcagcacauggagcuccucgaguccuccgucaucccccucaugcacccccucgccgaccccuccaccgucuucaaggacggcgacgaggccgaggacuucgucgagguccaccuccccgacguccacaagcaggucuccgacgucgaccucggccuccccuccuggggcaaguaccuccucauguccgccggcgcccucgccacccucauccucgccaucuuccucaucaccugcugccgccgcgccaaccgcaccaaguccacccagcgcggccaccgcgaguccggcggcaaggucuccgucgccccccagaacggcaagaucaucuccuccugggagcucuacaaguccgaguccgagaccggcauguga

SEQ ID NO: 126848 - RNA, 1575 nt, Artificial Sequence
  derived and/or modified CDS sequence (opt2) from glycoprotein__RABV__AY956319.1
auggucccccaggcccuccucuucgucccccuccucgucgucuccaugugcuucggcaaguuccccaucuacaccguccccgacaagcucggccccuggucccccaucgacauccaccaccucuccugccccaacaaccucgucgucgaggacgagggcugcaccaaccucuccggcuucuccuacauggagcucaaggucggcuacaucuccgccaucaaggucaacggcuucaccugcaccggcgucgucaccgaggccgagaccuacaccaacuucgucggcuacgucaccaccaccuucaagcgcaagcacuuccgccccacccccgacgccugccgcgccgccuacaacuggaagauggccggcgacccccgcuacgaggagucccuccacaaccccuaccccgacuaccacuggcuccgcaccgucaagaccaccaaggagucccucgucaucaucucccccuccgucgccgaccucgaccccuacgacaagucccuccacucccgcgucuuccccuccggcaagugcuccggcaucaccaucuccuccaccuacugcuccaccaaccacgacuacaccaucuggaugcccgagaacccccgccucggcaccuccugcgacaucuucaccaacucccgcggcaagcgcgccuccaagggcggcaagaccugcggcuucgucgacgagcgcggccucuacaagucccucaagggcgccugcaagcucaagcucugcggcguccucggccuccgccucauggacggcaccugggucgccaugcagaccuccgacgagaccaaguggugcccccccgaccagcucgucaaccuccacgacuuccgcuccgacgagaucgagcaccucgucgucgaggagcucgucaagaagcgcgaggagugccucgacgcccucgaguccaucaugaccaccaaguccgucuccuuccgccgccucucccaccuccgcaagcucguccccggcuucggcaaggccuacaccaucuucaacaagacccucauggaggccgacgcccacuacaaguccguccgcaccuggaacgagaucauccccuccaagggcugccuccgcgucggcggccgcugccacccccacgucaacggcgucuucuucaacggcaucauccucggccccgacggccacguccucauccccgagaugcaguccucccuccuccagcagcacauggagcuccucgaguccuccgucaucccccucaugcacccccucgccgaccccuccaccgucuucaaggacggcgacgaggccgaggacuucgucgagguccaccuccccgacguccacaagcaggucuccggcgucgaccucggccuccccuccuggggcaaguacguccucgucuccgccggcguccucgucguccucaugcucaccaucuucaucaugaccugcugccgccgcguccaccgccccaaguccacccagcacggccucggcggcaccggccgcaaggucuccgucaccucccaguccggcaaggucaucuccuccugggaguccuacaaguccggcggcgagacccgccucuga

SEQ ID NO: 126849 - RNA, 1575 nt, Artificial Sequence
  derived and/or modified CDS sequence (opt2) from glycoprotein__RABV__DQ074978.1
auggucccccaggcccuccucuucgucccccuccucgucuucccccucugcuucggcaaguuccccaucuacaccauccccgacaagcucggccccuggucccccaucgacauccaccaccucuccugccccaacaaccucgucgucgaggacgagggcugcaccaaccucuccggcuucuccuacauggagcucaaggucggcuacaucuccgccaucaagaugaacggcuucaccugcaccggcgucgucaccgaggccgagaccuacaccaacuucgucggcuacgucaccaccaccuucaagcgcaagcacuuccgccccacccccgacgccugccgcgccgccuacaacuggaagauggccggcgacccccgcuacgaggagucccuccacaaccccuaccccgacuaccacuggcuccgcaccgucaagaccaccaaggagucccucgucaucaucucccccuccgucgccgaccucgaccccuacgacaucucccuccacucccgcgucuuccccggcggcaacugcuccggcgucgccgucuccuccaccuacugcuccaccaaccacgacuacaccaucuggaugcccgagaacccccgccucggcauguccugcgacaucuucaccaacucccgcggcaagcgcgaguccaagggcuccgagaccugcggcuucgucgacgagcgcggccucuacaagucccucaagggcgccugcaagcucaagcucugcggcguccucggccuccgccucauggacggcaccugggucgccaugcagaccuccaacgagaccaaguggugcccccccggccagcucgucaaccuccacgacuuccgcuccgacgagaucgagcaccucgucgucgaggagcucguccgcaagcgcgaggagugccucgacgcccucgaguccaucaugaccaccaaguccgucuccuuccgccgccucucccaccuccgcaagcucguccccggcuucggcaaggccuacaccaucuucaacaagacccucauggaggccgacgcccacuacaaguccguccgcaccuggaacgagaucauccccuccaagggcugccuccgcgucggcggccgcugccacccccacgucaacggcgucuucuucaacggcaucauccucggccccgacggcaacguccucauccccgagaugcaguccucccuccuccagcagcacauggagcuccucgucuccuccgucaucccccucaugcacccccucgccgaccccuccaccgucuucaagaacggcgacgaggccgaggacuucgucgagguccaccuccccgacguccacgagcgcaucuccggcgucgaccucggccuccccaacuggggcaaguacguccuccucuccgccggcgcccucaccgcccucaugcucaucaucuuccucaugaccugcuggcgccgcgucaaccgcuccgagcccacccagcacaaccuccgcggcaccggccgcgaggucuccgucaccccccaguccggcaagaucaucuccuccugggagucccacaaguccggcggcgagacccgccucuga

SEQ ID NO: 126850 - RNA, 1575 nt, Artificial Sequence
  derived and/or modified CDS sequence (opt2) from glycoprotein__RABV__DQ076093.1
auggucccccaggcccuccucuucgucccccuccucgucuucuccaugugcuucggcaaguuccccaucuacaccauccccgacaagcucggccccuggucccccaucgacauccaccaccucuccugccccaacaaccucgucgucgaggacgagggcugcaccaaccucuccggcuucuccuacauggagcucaaggucggcuacaucuccgccaucaaggucaacggcuucaccugcaccggcgucgucaccgaggccgagaccuacaccaacuucgucggcuacgucaccaccaccuucaagcgcaagcacuuccgccccacccccgacgccugccgcgccgccuacaacuggaagauggccggcgacccccgcuacgaggagucccuccacaaccccuaccccgacuaccacuggcuccgcaccgucaagaccaccaaggagucccucgucaucaucucccccuccgucgccgaccucgaccccuacgacaagucccuccacucccgcgucuuccccaacggcaagugcuccggcaucaccaucuccuccaccuacugccccaccaaccacgacuacaccaucuggcuccccgagaacccccgccucggcaccuccugcgacaucuucaccaacucccgcggcaagcgcgccuccaagggcuccaagaccugcggcuucgucgacgagcgcggccucuacaagucccucaagggcgccugcaagcucaagcucugcggcguccucggccuccgccucauggacggcaccugggucgccaugcaggccuccgacgagaccaaguggugcccccccgaccagcucgucaaccuccacgacuuccgcuccgacgagaucgagcaccucgucgucgaggagcucgucaagaagcgcgaggagugccucgacgcccucgaguccaucaugaccaccaaguccgucuccuuccgccgccucucccaccuccgcaagcucguccccggcuucggcaaggccuacaccaucuucaacaagacccucauggaggccgacgcccacuacaaguccguccgcaccuggaacgagaucauccccuccaagggcugccuccgcgucggcggccgcugccacccccacgucaacggcgucuucuucaacggcaucauccucggccccgacggccacguccucauccccgagaugcaguccucccuccuccagcagcacauggagcuccucgaguccuccgucaucccccucaugcacccccucgccgaccccuccaccgucuucaaggacggcgacgaggccgagaacuucgucgagguccaccuccccgacguccacaagcagaucuccggcgucgaccucggccuccccaacuggggcaaguacguccucgucuccgccggcguccucaucgcccucaugcucaucaucuuccucaugaccugcugcggccgcgucaaccgccccaaguccacccagcacaaccucggcggcaccggccgcaaggucuccgucaccccccaguccggcaaggucaucuccuccugggaguccuacaaguccggcggcggcacccgccucuga

SEQ ID NO: 126851 - RNA, 1575 nt, Artificial Sequence
  derived and/or modified CDS sequence (opt2) from glycoprotein__RABV__DQ076096.1
auggucccccaggcccuccucuucgucccccuccucgucuucuccaugugcuucggcaaguuccccaucuacaccauccccgacaagcucggccccuggucccccaucgacauccaccaccucuccugccccaacaaccucgucgucgaggacgagggcugcaccaaccucuccggcuucuccuacauggagcucaaggucggcuacaucuccgccaucaaggucaacggcuucaccugcaccggcgucgucaccgaggccgagaccuacaccaacuucgucggcuacgucaccaccaccuucaagcgcaagcacuuccgccccacccccgacgccugccgcgccgccuacaacuggaagauggccggcgacccccgcuacgaggagucccuccacaaccccuaccccgacuaccacuggcuccgcaccgucaagaccaccaaggagucccucgucaucaucucccccuccgucgccgaccucgaccccuacgacaagucccuccacucccgcgucuuccccaacggcaagugcuccggcaucaccaucuccuccaccuacugccccaccaaccacgacuacaccaucuggcuccccgagaacccccgccucggcaccuccugcgacaucuucaccaacucccgcggcaagcgcgccuccaagggcuccaagaccugcggcuucgucgacgagcgcggccucuacaagucccucaagggcgccugcaagcucaagcucugcggcguccucggccuccgccucauggacggcaccugggucgccaugcaggccuccgacgagaccaaguggugcccccccgaccagcucgucaaccuccacgacuuccgcuccgacgagaucgagcaccucgucgucgaggagcucgucaagaagcgcgaggagugccucgacgcccucgaguccaucaugaccaccaaguccgucuccuuccgccgccucucccaccuccgcaagcucguccccggcuucggcaaggccuacaccaucuucaacaagacccucauggaggccgacgcccacuacaaguccguccgcaccuggaacgagaucauccccuccaagggcugccuccgcgucggcggccgcugccacccccacgucaacggcgucuucuucaacggcaucauccucggccccgacggccacguccucauccccgagaugcaguccucccuccuccagcagcacauggagcuccucgaguccuccgucaucccccucaugcacccccucgccgaccccuccaccgucuucaaggacggcgacgaggccgagaacuucgucgagguccaccuccccgacguccacaagcagaucuccggcgucgaccucggccuccccaacuggggcaaguacguccucgucuccgccggcguccucaucgcccucaugcucaccaucuuccucaugaccugcugcggccgcgucaaccgccccaaguccacccagcacaaccucggcggcaccggccgcaaggucuccgucaccccccaguccggcaaggucaucuccuccugggaguccuacaaguccggcggcggcacccgccucuga

SEQ ID NO: 126852 - RNA, 1575 nt, Artificial Sequence
  derived and/or modified CDS sequence (opt2) from glycoprotein__RABV__DQ076097.1
auggucccccaggcccuccucuucgucccccuccucgucuucuccaugugcuucggcaaguuccccaucuacaccauccccgacaagcucggccccuggucccccaucgacauccaccaccucuccugccccaacaaccucgucgucgaggacgacggcugcaccaaccucuccggcuucuccuacauggagcucaaggucggcuacaucuccgccaucaaggucaacggcuucaccugcaccggcgucgucaccgaggccgagaccuacaccaacuucgucggcuacgucaccaccaccuucaagcgcaagcacuuccgccccacccccgacgccugccgcgccgccuacaacuggaagauggccggcgacccccgcuacgaggagucccuccacacccccuaccccgacuaccacuggcuccgcaccgucaagaccaccaaggagucccucgucaucaucucccccuccgucgccgaccucgaccccuacgacaagucccuccacucccgcgucuuccccaacggcaagugcuccggcaucaccaucuccuccaccuacugccccaccaaccacgacuacaccaucuggcuccccgagaacccccgccucggcaccuccugcgacaucuucaccaacucccgcggcaagcgcgccuccaagggcuccaagaccugcggcuucgucgacgagcgcggccucuacaagucccucaagggcgccugcaagcucaagcucugcggcguccucggccuccgccucauggacggcaccugggucgccaugcaggccuccgacgagaccaaguggugcccccccgaccagcucgucaaccuccacgacuuccgcuccgacgagaucgagcaccucgucgucgaggagcucgucaagaagcgcgaggagugccucgacgcccucgaguccaucaugaccaccaaguccgucuccuuccgccgccucucccaccuccgcaagcucguccccggcuucggcaaggccuacaccaucuucaacaagacccucauggaggccgacgcccacuacaaguccguccgcaccuggaacgagaucauccccuccaagggcugccuccgcgucggcggccgcugccacccccacgucaacggcgucuucuucaacggcaucauccucggccccgacggccacguccucauccccgagaugcaguccucccuccuccagcagcacauggagcuccucgaguccuccgucaucccccucaugcacccccucgccgaccccuccaccgucuucaaggacggcgacgaggccgagaacuucgucgagguccaccuccccgacguccacaagcagaucuccggcgucgaccucggccuccccaacuggggcaaguacguccucgucuccgccggcguccucaucgcccucaugcucaucaucuuccucaugaccugcugcggccgcgucaaccgccccaaguccacccagcacaaccucggcggcaccggccgcaaggucuccgucaccccccaguccggcaaggucaucuccuccugggaguccuacaaguccggcggcggcacccgccucuga

SEQ ID NO: 126853 - RNA, 1575 nt, Artificial Sequence; identical to SEQ ID NO: 126850
  derived and/or modified CDS sequence (opt2) from glycoprotein__RABV__DQ076098.1

SEQ ID NO: 126854 - RNA, 1575 nt, Artificial Sequence
  derived and/or modified CDS sequence (opt2) from glycoprotein__RABV__DQ076099.1
auggucccccaggcccuccucuucaucccccuccucgucuuccccaugugcuucggcaaguuccccaucuacaccauccccgacaagcucggccccuggucccccaucgacauccaccaccucuccugccccaacaaccucgucgucgaggacgaggagugcaccaaccucuccggcuucuccuacauggagcucaaggucggcuacaucuccgccaucaaggucaacggcuucaccugcaccggcgucgucaccgaggccgagaccuacaccaacuucgucggcuacgucaccaccaccuucaagcgcaagcacuuccgccccacccccgacgccugccgcgccgccuacaacuggaagauggccggcgacccccgcuacgaggagucccuccacaaccccuaccccgacuaccacuggcuccgcaccgucaagaccaccaaggagucccucgucaucaucucccccuccgucgccgaccucgaccccuacgacaagucccuccacucccgcgucuuccccaacggcaagugcuccggcaucaccaucuccuccaccuacugccccaccaaccacgacuacaccaucuggcuccccgagaacccccgccucggcaccuccugcgacaucuucgccaacucccgcggcaagcgcgccuccaagggcuccaagaccugcggcuucgucgacgagcgcggccucuacaagucccucaagggcgccugcaagcucaagcucugcggcguccucggccuccgccucauggacggcaccugggucgccaugcagaccuccgacgagaccaaguggugcccccccgaccagcucgucaaccuccacgacuuccgcuccgacgagaucgagcaccucgucgucgaggagcucgucaagaagcgcgaggagugccucgacgcccucgaguccaucaugaccaccaaguccgucuccuuccgccgccucucccaccuccgcaagcucguccccggcuucggcaaggccuacaccaucuucaacaagacccucauggaggccgacgcccacuacaaguccguccgcaccuggaacgagaucauccccuccaagggcugccuccgcgucggcggccgcugccacccccacgucaacggcgucuucuucaacggcaucauccucggccacgacggccacguccucauccccgagaugcaguccucccuccuccagcagcacauggagcuccucgaguccuccgucaucccccucaugcacccccucgccgaccccuccaccgucuucaaggacggcgacgaggccgaggacuucgucgagguccaccuccccgacguccacaagcagaucuccggcgucgaccucggccuccccaacuggggcaaguacguccucgucuccgccggcguccucaucgcccucaugcucaucaucuuccucaugaccugcugcggccgcgucaaccgccccaaguccacccagcacaaccucggcgagaccggccgcaaggucuccgucaccucccaguccggcaaggucaucuccuccugggaguccuacaaguccggcggcggcacccgccucuga

SEQ ID NO: 126855 - RNA, 1575 nt, Artificial Sequence
  derived and/or modified CDS sequence (opt2) from glycoprotein__RABV__DQ076100.1
auggucccccaggcccuccucuucgucccccuccucgucuucuccaugugcuucggcaaguuccccaucuacaccauccccgacaagcucggccccuggucccccaucgacauccaccaccucuccugccccaacaaccucgucgucgaggacgagggcugcaccaaccucuccggcuucuccuacauggagcucaaggucggcuacaucuccgccaucaaggucaacggcuucaccugcaccggcgucgucaccgaggccgagaccuacaccaacuucgucggcuacgucaccaccaccuucaagcgcaagcacuuccgccccacccccgacgccugccgcgccgccuacaacuggaagauggccggcgacccccgcuacgaggagucccuccacaaccccuaccccgacuaccacuggcuccgcaccgucaagaccaccaaggagucccucgucaucaucucccccuccgucgccgaccucgaccccuacgacaagucccuccacucccgcgucuuccccaacggcaagugcuccggcaucaccaucuccuccaccuacugccccaccaaccacgacuacaccaucuggcuccccgagaacccccgccucggcaccuccugcgacaucuucaccaacucccgcggcaagcgcgccuccaagggcuccaagaccugcggcuucgucgacgagcgcggccucuacaagucccucaagggcgccugcaagcucaagcucugcggcguccucggccuccgccucauggacggcaccugggucgccaugcagaccuccgacgagaccaaguggugcccccccgaccagcucgucaaccuccacgacuuccgcuccgacgagaucgagcaccucgucgucgaggagcucgucaagaagcgcgaggagugccucgacgcccucgaguccaucaugaccaccaaguccgucuccuuccgccgccucucccaccuccgcaagcucguccccggcuucggcaaggccuacaccaucuucaacaagacccucauggaggccgacgcccacuacaaguccguccgcaccuggaacgagaucauccccuccaagggcugccuccgcgucggcggccgcugccacccccacgucaacggcgucuucuucaacggcaucauccucggccccgacggccacguccucauccccgagaugcaguccucccuccuccagcagcacauggagcuccucgaguccuccgucaucccccucaugcacccccucgccgaccccuccaccgucuucaaggacggcgacgaggccgaggacuucgucgagguccaccuccccgacguccacaagcagaucuccggcgucgaccucggccuccccaacuggggcaaguacguccucgucuccgccggcguccucaucgcccucaugcucaucaucuuccucaugaccugcugcggccgcgucaaccgccccaaguccacccagcacaaccucggcggcaccggccgcaaggucuccgucaccucccaguccggcaaggucaucuccuccugggaguccuacaaguccggcggcgagacccgccucuga

SEQ ID NO: 126856 - RNA, 1575 nt, Artificial Sequence
  derived and/or modified CDS sequence (opt2) from glycoprotein__RABV__DQ076102.1
auggucccccaggcccuccucuucgucccccuccucgucuucuccaugugcuucggcaaguuccccaucuacaccauccccgacaagcucggccccuggucccccaucggcauccaccaccucuccugcuccaacaaccucgucgucgaggacgagggcugcaccaaccucuccggcuucuccuacauggagcucaaggucggcuacaucuccgccaucaaggucaacggcuucaccugcaccggcgucgucaccgaggccgagaccuacaccaacuucgucggcuacgucaccaccaccuucaagcgcaagcacuuccgccccacccccgacgccugccgcgccgccuacaacuggaagauggccggcgacccccgcuacgaggagucccuccacaaccccuaccccgacuaccacuggcuccgcaccgucaagaccaccaaggagucccucgucaucaucucccccuccgucgccgaccucgaccccuacgacaagucccuccacucccgcgucuuccccaacggcaagugcuccggcaucaccaucuccuccaccuacugccccaccaaccacgacuacaccaucuggcuccccgagaacccccgccucggcaccuccugcgacaucuucaccaacucccgcggcaagcgcgccuccaagggcuccaagaccugcggcuucgucgacgagcgcggccucuacaagucccucaagggcgccugcaagcucaagcucugcggcguccucggccuccgccucauggacggcaccugggucgccaugcagaccuccgacgagaccaaguggugcccccccgaccagcucgucaaccuccacgacuuccgcuccgacgagaucgagcaccucgucgucgaggagcucgucaagaagcgcgaggagugccucgacgcccucgaguccaucaugaccaccaaguccgucuccuuccgccgccucucccaccuccgcaagcucguccccggcuucggcaaggccuacaccaucuucaacaagacccucauggaggccgacgcccacuacaaguccguccgcaccuggaacgagaucauccccuccaagggcugccuccgcgucggcggccgcugccacccccacgucaacggcgucuucuucaacggcaucauccucggccccgacggccacguccucauccccgagaugcaguccucccuccuccagcagcacauggagcuccucgaguccuccgucaucccccucaugcacccccucgccgaccccuccaccgucuucaaggacggcgacgaggccgaggacuucgucgagguccaccuccccgacguccacaagcagaucuccggcgucgaccucggccuccccaacuggggcaaguacguccucgucuccgccggcguccucaucgcccucaugcucaucaucuuccucaugaccugcugcggccgcgucaaccgccccaaguccacccagcacaaccucggcggcaccggccgcaaggucuccgucaccucccaguccggcaaggucaucuccuccugggaguccuacaaguccggcggcgagacccgccucuga

SEQ ID NO: 126857 - RNA, 1575 nt, Artificial Sequence
  derived and/or modified CDS sequence (opt2) from glycoprotein__RABV__DQ076103.1
auggucccccaggcccuccucuucgucccccuccucgucuucuccaugugcuucggcaaguuccccaucuacaccauccccgacaagcucggccccuggucccccaucgacauccaccaccucuccugccccaacaaccucgucgucgaggacgagggcugcaccaaccucuccggcuucuccuacauggagcucaaggucggcuacaucuccgccaucaaggucaacggcuucaccugcaccggcgucgucaccgaggccgagaccuacaccaacuccgucggcuacgucaccaccaccuucaagcgcaagcacuuccgccccacccccgacgccugccgcgccgccuacaacuggaagauggccggcgacccccgcuacgaggagucccuccacaaccccuaccccgacuaccacuggcuccgcaccgucaagaccaccaaggagucccucgucaucaucucccccuccgucgccgaccucgaccccuacgacaagucccuccacucccgcgucuuccccaacggcaagugcuccggcaucaccaucuccuccaccuacugccccaccaaccacgacuacaccaucuggcuccccgagaacccccgccucggcaccuccugcgacaucuucaccaacucccgcggcaagcgcgccuccaagggcuccaagaccugcggcuucgucgacgagcgcggccucuacaagucccucaagggcgccugcaagcucaagcucugcggcguccucggccuccgccucauggacggcaccugggucgccaugcagaccuccgacgagaccaaguggugcccccccgaccagcucgucaaccuccacgacuuccgcuccgacgagaucgagcaccucgucgucgaggagcucgucaagaagcgcgaggagugccucgacgcccucgaguccaucaugaccaccaaguccgucuccuuccgccgccucucccaccuccgcaagcucguccccggcuucggcaaggccuacaccaucuucaacaagacccucauggaggccgacgcccacuacaaguccguccgcaccuggaacgagaucauccccuccaagggcugccuccgcgucggcggccgcugccacccccacgucaacggcgucuucuucaacggcaucauccucggccccgacggccacguccucauccccgagaugcaguccucccuccuccagcagcacauggagcuccucgaguccuccgucaucccccucaugcacccccucgccgaccccuccaccgucuucaaggacggcgacgaggccgaggacuucgucgagguccaccuccccgacguccacaagcagaucuccggcgucgaccucggccuccccaacuggggcaaguacguccucgucuccgccggcguccucaucgcccucaugcucaucaucuuccucaugaccugcugcggccgcgucaaccgccccaaguccacccagcacaaccucggcggcaccggccgcaaggucuccgucaccucccaguccggcaaggucaucuccuccugggaguccuacaaguccggcggcgagacccgccucuga

SEQ ID NO: 126858 - RNA, 1575 nt, Artificial Sequence
  derived and/or modified CDS sequence (opt2) from glycoprotein__RABV__DQ076104.1
auggucccccaggcccuccucuucgucccccuccucgucuucuccaugugcuucggcaaguuccccaucuacaccauccccgacaagcucggccccuggucccccaucgacauccaccaccucuccugccccaacaaccucgucgucgaggacgagggcugcaccaaccucuccggcuucuccuacauggagcucaaggucggcuacaucuccgccaucaaggucaacggcuucaccugcaccggcgucgucaccgaggccgagaccuacaccaacuucgucggcuacgucaccaccaccuucaagcgcaagcacuuccgccccacccccgacgccugccgcaccgccuacaacuggaagauggccggcgacccccgcuacgaggagucccuccacaaccccuaccccgacuaccacuggcuccgcaccgucaagaccaccaaggagucccucgucaucaucucccccuccgucgccgaccucgaccccuacgacaagucccuccacucccgcgucuuccccaacggcaagugcuccggcaucaccaucuccuccaccuacugccccaccaaccacgacuacaccaucuggcuccccgagaacccccgccucggcaccuccugcgacaucuucaccaacucccgcggcaagcgcgccuccaagggcuccaagaccugcggcuucgucgacgagcgcggccucuacaagucccucaagggcgccugcaagcucaagcucugcggcguccucggccuccgccucauggacggcaccugggucgccaugcagaccuccgacgagaccaaguggugcccccccgaccagcucgucaaccuccacgacuuccgcuccgacgagaucgagcaccucgucgucgaggagcucgucaagaagcgcgaggagugccucgacgcccucgaguccaucaugaccaccaaguccgucuccuuccgccgccucucccaccuccgcaagcucguccccggcuucggcaaggccuacaccaucuucaacaagacccucauggaggccgacgcccacuacaaguccguccgcaccuggaacgagaucauccccuccaagggcugccuccgcgucggcggccgcugccacccccacgucaacggcgucuucuucaacggcaucauccucggccccgacggccacguccucauccccgagaugcaguccucccuccuccagcagcacauggagcuccucgaguccuccgucaucccccucaugcacccccucgccgaccccuccaccgucuucaaggacggcgacgaggccgaggacuucgucgagguccaccuccccgacguccacaagcagaucuccggcgucgaccucggccuccccaacuggggcaaguacguccucgucuccgccggcguccucaucgcccucaugcucaucaucuuccucaugaccugcugcggccgcgucaaccgccccaaguccacccagcacaaccucggcggcaccggccgcaaggucuccgucaccucccaguccggcaaggucaucuccuccugggaguccuacaaguccggcggcgagacccgccucuga

SEQ ID NO: 126859 - RNA, 1575 nt, Artificial Sequence
  derived and/or modified CDS sequence (opt2) from glycoprotein__RABV__DQ076105.1
auggucccccaggcccuccucuucgucccccuccucgucuucuccaugugcuucggccgcuuccccaucuacaccauccccgacaagcucggccccuggucccccaucgacauccaccaccucuccugccccaacaaccucgucgucgaggacgagggcugcaccaaccucuccggcuucuccuacauggagcucaaggucggcuacaucuccgccaucaaggucaacggcuucaccugcaccggcgucgucaccgaggccgagaccuacaccaacuucgucggcuacgucaccaccaccuucaagcgcaagcacuuccgccccacccccgacgccugccgcgccgccuacaacuggaagauggccggcgacccccgcuacgaggagucccuccacaaccccuaccccgacuaccacuggcuccgcaccgucaagaccaccaaggagucccucgucaucaucucccccuccgucgccgaccucgaccccuacgacaagucccuccacucccgcgucuuccccaacggcaagugcuccggcaucaccaucuccuccaccuacugccccaccaaccacgacuacaccaucuggcuccccgagaacccccgccucggcaccuccugcgacaucuucaccaacucccgcggcaagcgcgccuccaagggcuccaagaccugcggcuucgucgacgagcgcggccucuacaagucccucaagggcgccugcaagcucaagcucugcggcguccucggccuccgccucauggacggcaccugggucgccaugcagaccuccgacgagaccaaguggugcccccccgaccagcucgucaaccuccacgacuuccgcuccgacgagaucgagcaccucgucgucgaggagcucgucaagaagcgcgaggagugccucgacgcccucgaguccaucaugaccaccaaguccgucuccuuccgccgccucucccaccuccgcaagcucguccccggcuucggcaaggccuacaccaucuucaacaagacccucauggaggccgacgcccacuacaaguccguccgcaccuggaacgagaucauccccuccaagggcugccuccgcgucggcggccgcugccacccccacgucaacggcgucuucuucaacggcaucauccucggccccgacggccacguccucauccccgagaugcaguccucccuccuccagcagcacauggagcuccucgaguccuccgucaucccccucaugcacccccucgccgaccccuccaccgucuucaaggacggcgacgaggccgaggacuucgucgagguccaccuccccgacguccacaagcagaucuccggcgucgaccucggccuccccaacuggggcaaguacguccucgucuccgccggcguccucaucgcccucaugcucaugaucuuccucaugaccugcugcggccgcgucaaccgccccaaguccacccagcacaaccucggcggcaccggccgcaaggucuccgucaccucccaguccggcaaggucaucuccuccugggaguccuacaaguccggcggcgagacccgccucuga

SEQ ID NO: 126860 - RNA, 1575 nt, Artificial Sequence
  derived and/or modified CDS sequence (opt2) from glycoprotein__RABV__DQ849044.1
augaucccccagguccuccucuucgucccccuccucgucuucuccuccugcuucggcaaguuccccaucuacaccauccccgacaagcucggccccuggucccccaucgacauccaccaccucuccugccccaacaaccucgucgucgaggacgagggcugcaccaaccucuccggcuucuccuacauggagcucaaggucggcuacaucuccgccaucaaggucaacggcuucaccugcaccggcgucgucaccgaggccgagaccuacaccaacuucgucggcuacgucaccaccaccuucaagcgcaagcacuuccgccccacccccgacgccugccgcgccgccuacaacuggaagauggccggcgacccccgcuacgaggagucccuccacaaccccuaccccgacuaccacuggcuccgcaccgucaagaccuccaaggagucccucgucaucaucucccccuccgucgccgaccucgaccccuacgacaagucccuccacucccgcgucuuccccggcggcaagugcuccggcaucaccgucuccuccaccugcugcuccaccaaccacgacuacaccaucuggaugcccgagaacccccgccucggcaccuccugcgacaucuucaccaacucccgcggcaagcgcgccuccaagggcggcaagaccugcggcuucgucgacgagcgcggccucuacaaguccaucaagggcgccugcaagcucaagcucugcggcguccucggccuccgccucauggacggcaccugggucgccauccagaccuccgacgagaucaaguggugcucccccgaccagcucgucaaccuccacgacuuccacuccgacgagaucgagcaccucgucgucgaggagcucgucaagaagcgcgaggagugccucgacgcccucgagaccaucaugaccaccaaguccgucuccuuccgccgccucucccaccuccgcaagcucguccccggcuucggcaaggccuacaccaucuucaacaagacccucauggaggccgacgcccacuacaaguccauccgcaccuggaacgagaucauccccuccaagggcugccuccgcgucggcggccgcugccacccccacgucaacggcgucuucuucaacggcaucauccucggccccgacggccacguccucauccccgagaugcaguccucccuccuccaccagcacauggagcuccucgaguccuccgucaucccccucaugcacccccucgccgaccccuccaccgucuucaaggacggcgacgaggccgaggacuucgucgagguccaccuccccgacguccacaagcagaucuccggcgucgaccucggccuccccaacuggggcaaguacguccucgucuccgccggcgcccucaccgcccucaugcucaugaucuuccucaugaccugcugccgcaagaccaaccgcgccgaguccauccagcacucccccggcgagaccggccgcaaggucuccgucaccucccacaacggccgcgucaucuccuccugggaguccuacaaguccggcggcgagaccaagcucuga

SEQ ID NO: 126861 - RNA, 1575 nt, Artificial Sequence
  derived and/or modified CDS sequence (opt2) from glycoprotein__RABV__DQ849045.1
augaucccccagguccuccucuucgucccccuccucgucuucuccuccugcuucggcaaguuccccaucuacaccauccccgacaagcucggccccuggucccccaucgacauccaccaccucuccugccccaacaaccucgucgucgaggacgagggcugcaccaaccucuccggcuucuccuacauggagcucaaggucggcuacaucuccgccaucaaggucaacggcuucaccugcaccggcgucgucaccgaggccgagaccuacaccaacuucgucggcuacgucaccaccaccuucaagcgcaagcacuuccgccccacccccgacgccugccgcgccgccuacaacuggaagauggccggcgacccccgcuacgaggagucccuccacaaccccuaccccgacuaccacuggcuccgcaccgucaagaccuccaaggagucccucgucaucaucucccccuccgucgccgaccucgaccccuacgacaagucccuccacucccgcgucuuccccggcggcaagugcuccggcaucaccgucuccuccaccugcugcuucaccaaccacgacuacaccaucuggaugcccgagaacccccgccucggcaccuccugcgacaucuucaccaacucccgcggcaagcgcgccuccaagggcggcaagaccugcggcuucgucgacgagcgcggccucuacaagucccucaagggcgccugcaagcucaagcucugcggcguccucggccuccgccucauggacggcaccugggucgccauccagaccuccgacgagaucaaguggugcucccccgaccagcucgucaaccuccacgacuuccacuccgacgagaucgagcaccucgucgucgaggagcucgucaagaagcgcgaggagugccucgacgcccucgagaccaucaugaccaccaaguccgucuccuuccgccgccucucccaccuccgcaagcucguccccggcuucggcaaggccuacaccaucuucaacaagacccucauggaggccgacgcccacuacaaguccauccgcaccuggaacgagaucauccccuccaagggcugccuccgcgucggcggccgcugccacccccacgucaacggcgucuucuucaacggcaucauccucggccccgacggccacguccucauccccgagaugcaguccucccuccuccaccagcacauggagcuccucgaguccuccgucaucccccucaugcacccccucgccgaccccuccaccgucuucaaggacggcgacgaggccgaggacuucgucgagguccaccuccccgacguccacaagcagaucuccggcgucgaccucggccuccccaacuggggcaaguacguccucgucuccgccggcgcccucaccgcccucaugcucaugaucuuccucaugaccugcugccgcaagaccaaccgcgccgaguccauccagcacucccccggcgagaccggccgcaaggucuccgucaccucccacaacggccgcgucaucuccuccugggaguccuacaaguccggcggcgagaccaagcucuga

SEQ ID NO: 126862 - RNA, 1575 nt, Artificial Sequence
  derived and/or modified CDS sequence (opt2) from glycoprotein__RABV__DQ849046.1
augaucccccagguccuccucuucgucccccuccucgucuucuccuccugcuucggcaaguuccccaucuacaccauccccgacaagcucggccccuggucccccaucgacauccaccaccucuccugccccaacaaccucgucgucgaggacgagggcugcaccaaccucuccggcuucuccuacauggagcucaaggucggcuacaucuccgccaucaaggucaacggcuucaccugcaccggcgucgucaccgaggccgagaccuacaccaacuucgucggcuacgucaccaccaccuucaagcgcaagcacuuccgccccacccccgacgccugccgcgccgccuacaacuggaagauggccggcgacccccgcuacgaggagucccuccacaaccccuaccccgacuaccacuggcuccgcaccgucaagaccuccaaggagucccucgucaucaucucccccuccgucgccgaccucgaccccuacgacaagucccuccacucccgcgucuuccccggcggcaagugcuccggcaucaccgucuccuccaccugcugcuucaccaaccacgaguacaccaucuggaugcccgagaacccccgccucggcaccuccugcgacaucuucaccaacucccgcggcaagcgcgccuccaagggcggcaagaccugcggcuucgucgacgagcgcggccucuacaagucccucaagggcgccugcaagcucaagcucugcggcguccucggccuccgccucauggacggcaccugggucgccauccagaccuccgacgagaucaaguggugcucccccgaccagcucgucaaccuccacgacuuccacuccgacgagaucgagcaccucgucgucgaggagcucgucaagaagcgcgaggagugccucgacgcccucgagaccaucaugaccaccaaguccgucuccuuccgccgccucucccaccuccgcaagcucguccccggcuucggcaaggccuacaccaucuucaacaagacccucauggaggccgacgcccacuacaaguccauccgcaccuggaacgagaucauccccuccaagggcugccuccgcgucggcggccgcugccacccccacgucaacggcgucuucuucaacggcaucauccucggccccgacggccacguccucauccccgagaugcaguccucccuccuccaccagcacauggagcuccucgaguccuccgucaucccccucaugcacccccucgccgaccccuccaccgucuucaaggacggcgacgaggccgaggacuucgucgagguccaccuccccgacguccacaagcagaucuccggcgucgaccucggccuccccaacuggggcaaguacguccucgucuccgccggcgcccucaccgcccucaugcucaugaucuuccucaugaccugcugccgcaagaccaaccgcgccgaguccauccagcacucccccggcgagaccggccgcaaggucuccgucaccucccacaacggccgcgucaucuccuccugggaguccuacaaguccggcggcgagaccaagcucuga

SEQ ID NO: 126863 - RNA, 1575 nt, Artificial Sequence
  derived and/or modified CDS sequence (opt2) from glycoprotein__RABV__DQ849047.1
augaucccccagguccuccucuucgucccccuccucgucuucuccuccugcuucggcaaguuccccaucuacaccauccccgacaagcucggccccuggucccccaucgacauccaccaccucuccugccccaacaaccucgucgucgaggacgagggcugcaccaaccucuccggcuucuccuacauggagcucaaggucggcuacaucuccgccaucaaggucaacggcuucaccugcaccggcgucgucaccgaggccgagaccuacaccaacuucgucggcuacgucaccaccaccuucaagcgcaagcacuuccgccccacccccgacgccugccgcgccgccuacaacuggaagauggccggcgacccccgcuacgaggagucccuccacaaccccuaccccgacuaccacuggcuccgcaccgucaagaccuccaaggagucccucgucaucaucucccccuccgucgccgaccucgaccccuacgacaagucccuccacucccgcgucuuccccggcggcaagugcuccggcaucaccgucuccuccaccugcugcuccaccaaccacgacuacaccaucuggaugcccgagaacccccgccucggcaccuccugcgacaucuucaccaacucccgcggcaagcgcgccuccaagggcggcaagaccugcggcuucgucgacgagcgcggccucuacaagucccucaagggcgccugcaagcucaagcucugcggcguccucggccuccgccucauggacggcaccugggucgccauccagaccuccgacgagaucaaguggugcucccccgaccagcucgucaaccuccacgacuuccacuccgacgagaucgagcaccucgucgucgaggagcucgucaagaagcgcgaggagugccucgacgcccucgagaccaucaugaccaccaaguccgucuccuuccgccgccucucccaccuccgcaagcucguccccggcuucggcaaggccuacaccaucuucaacaagacccucauggaggccgacgcccacuacaaguccauccgcaccuggaacgagaucauccccuccaagggcugccuccgcgucggcggccgcugccacccccacgucaacggcgucuucuucaacggcaucauccucggccccgacggccacguccucauccccgagaugcaguccucccuccuccaccagcacauggagcuccucgaguccuccgucaucccccucaugcacccccucgccgaccccuccaccgucuucaaggacggcgacgaggccgaggacuucgucgagguccaccuccccgacguccacaagcagaucuccggcgucgaccucggccuccccaacuggggcaaguacguccucgucuccgccggcgcccucaccgcccucaugcucaugaucuuccucaugaccugcugccgcaagaccaaccgcgccgaguccauccagcacucccccggcgagaccggccgcaaggucuccgucaccucccacaacggccgcgucaucuccuccugggaguccuacaaguccggcggcgagaccaagcucuga

SEQ ID NO: 126864 - RNA, 1575 nt, Artificial Sequence; identical to SEQ ID NO: 126863
  derived and/or modified CDS sequence (opt2) from glycoprotein__RABV__DQ849048.1

SEQ ID NO: 126865 - RNA, 1575 nt, Artificial Sequence
  derived and/or modified CDS sequence (opt2) from glycoprotein__RABV__DQ849049.1
augaucccccagguccuccucuucgucccccuccucgucuuccucuccugcuucggcaaguuccccaucuacaccauccccgacaagcucggccccuggucccccaucgacauccaccaccucuccugccccaacaaccucgucgucgaggacgagggcugcaccaaccucuccggcuucuccuacauggagcucaaggucggcuacaucuccgccaucaaggucaacggcuucaccugcaccggcgucgucaccgaggccgagaccuacaccaacuucgucggcuacgucaccaccaccuucaagcgcaagcacuuccgccccacccccgacgccugccgcgccgccuacaacuggaagauggccggcgacccccgcuacgaggagucccuccacaaccccuaccccgacuaccacuggcuccgcaccgucaagaccuccaaggagucccucgucaucaucucccccuccgucgccgaccucgaccccuacgacaagucccuccacucccgcgucuuccccggcggcaagugcuccggcaucaccgucuccuccaccugcugcuccaccaaccacgacuacaccaucuggaugcccgagaacccccgccucggcaccuccugcgacaucuucaccaacucccgcggcaagcgcgccuccaagggcggcaagaccugcggcuucgucgacgagcgcggccucuacaagucccucaagggcgccugcaagcucaagcucugcggcguccucggccuccgccucauggacggcaccugggucgccauccagaccuccgacgagaucaaguggugcucccccgaccagcucgucaaccuccacgacuuccacuccgacgagaucgagcaccucgucgucgaggagcucgucaagaagcgcgaggagugccucgacgcccucgagaccaucaugaccaccaaguccgucuccuuccgccgccucucccaccuccgcaagcucguccccggcuucggcaaggccuacaccaucuucaacaagacccucauggaggccgacgcccacuacaaguccauccgcaccuggaacgagaucauccccuccaagggcugccuccgcgucggcggccgcugccacccccacgucaacggcgucuucuucaacggcaucauccucggccccgacggccacguccucauccccgagaugcaguccucccuccuccaccagcacauggagcuccucgaguccuccgucaucccccucaugcacccccucgccgaccccuccaccgucuucaaggacggcgacgaggccgaggacuucgucgagguccaccuccccgacguccacaagcagaucuccggcgucgaccucggccuccccaacuggggcaaguacguccucgucuccgccggcgcccucaccgcccucaugcucaugaucuuccucaugaccugcugccgcaagaccaaccgcgccgaguccauccagcacucccccggcgagaucggccgcaaggucuccgucaccucccacaacggccgcgucaucuccuccugggaguccuacaaguccggcggcgagaccaagcucuga

SEQ ID NO: 126866 - RNA, 1575 nt, Artificial Sequence; identical to SEQ ID NO: 126863
  derived and/or modified CDS sequence (opt2) from glycoprotein__RABV__DQ849050.1

SEQ ID NO: 126867 - RNA, 1575 nt, Artificial Sequence; identical to SEQ ID NO: 126863
  derived and/or modified CDS sequence (opt2) from glycoprotein__RABV__DQ849051.1

SEQ ID NO: 126868 - RNA, 1575 nt, Artificial Sequence
  derived and/or modified CDS sequence (opt2) from glycoprotein__RABV__DQ849052.1
augaucccccagguccuccucuucgucccccuccucgucuucuccuccugcuucggcaaguuccccaucuacaccauccccgacaagcucggccccuggucccccaucgacauccaccaccucuccugccccaacaaccucgucgucgaggacgagggcugcaccaaccucuccggcuucuccuacauggagcucaaggucggcuacaucuccgccaucaaggucaacggcuucaccugcaccggcgucgucaccgaggccgagaccuaccccaacuucgucggcuacgucaccaccaccuucaagcgcaagcacuuccgccccacccccgacgccugccgcgccgccuacaacuggaagauggccggcgacccccgcuacgaggagucccuccacaaccccuaccccgacuaccacuggcuccgcaccgucaagaccuccaaggagucccucgucaucaucucccccuccgucgccgaccucgaccccuacgacaagucccuccacucccgcgucuuccccggcggcaagugcuccggcaucaccgucuccuccaccugcugcuucaccaaccacgacuacaccaucuggaugcccgagaacccccgccucggcaccuccugcgacaucuucaccaacucccgcggcaagcgcgccuccaagggcggcaagaccugcggcuucgucgacgagcgcggccucuacaagucccucaagggcgccugcaagcucaagcucugcggcguccucggccuccgccucauggacggcaccugggucgccauccagaccuccgacgagaucaaguggugcucccccgaccagcucgucaaccuccacgacuuccacuccgacgagaucgagcaccucgucgucgaggagcucgucaagaagcgcgaggagugccucgacgcccucgagaccaucaugaccaccaaguccgucuccuuccgccgccucucccaccuccgcaagcucguccccggcuucggcaaggccuacaccaucuucaacaagacccucauggaggccgacgcccacuacaaguccauccgcaccuggaacgagaucauccccuccaagggcugccuccgcgucggcggccgcugccacccccacgucaacggcgucuucuucaacggcaucauccucggccccgacggccacguccucauccccgagaugcaguccucccuccuccaccagcacauggagcuccucgaguccuccgucaucccccucaugcacccccucgccgaccccuccaccgucuucaaggacggcgacgaggccgaggacuucgucgagguccaccuccccgacguccacaagcagaucuccggcgucgaccucggccuccccaacuggggcaaguacguccucgucuccgccggcgcccucaccgcccucaugcucaugaucuuccucaugaccugcugccgcaagaccaaccgcgccgaguccauccagcacucccccggcgagaccggccgcaaggucuccgucaccucccacaacggccgcgucaucuccuccugggaguccuacaaguccggcggcgagaccaagcucuga

SEQ ID NO: 126869 - RNA, 1575 nt, Artificial Sequence
  derived and/or modified CDS sequence (opt2) from glycoprotein__RABV__DQ849053.1
augaucccccagguccuccucuucgucccccuccucgucuucuccuccugcuucggcaaguuccccaucuacaccauccccgacaagcucggccccuggucccccaucgacauccaccaccucuccugccccaacaaccucgucgucgaggacgagggcugcaccaaccucuccggcuucuccuacauggagcucaaggucggcuacaucuccgccaucaaggucaacggcuucaccugcaccggcgucgucaccgaggccgagaccuacaccaacuucgucggcuacgucaccaccaccuucaagcgcaagcacuuccgccccacccccgacgccugccgcgccgccuacaacuggaagauggccggcgacccccgcuacgaggagucccuccacaaccccuaccccgacuaccacuggcuccgcaccgucaagaccuccaaggagucccucgucaucaucucccccuccgucgccgaccucgaccccuacgacaagucccuccacucccgcgucuuccccggcggcaagugcuccggcaucaccgucuccuccaccugcugcuccaccaaccacgacuacaccaucuggaugcccgagaacccccgccucggcaccuccugcgacaucuucaccaacucccgcggcaagcgcgccuccaagggcggcaagaccugcggcuucgucgacgagcgcggccucuacaagucccucaagggcgccugcaagcucaagcucugcggcguccucggccuccgccucauggacggcaccugggucgccauccagaccuccgacgagauccgcuggugcucccccgaccagcucgucaaccuccacgacuuccacuccgacgagaucgagcaccucgucgucgaggagcucgucaagaagcgcgaggagugccucgacgcccucgagaccaucaugaccaccaaguccgucuccuuccgccgccucucccaccuccgcaagcucguccccggcuucggcaaggccuacaccaucuucaacaagacccucauggaggccgacgcccacuacaaguccauccgcaccuggaacgagaucauccccuccaagggcugccuccgcgucggcggccgcugccacccccacgucaacggcgucuucuucaacggcaucauccucggccccgacggccacguccucauccccgagaugcaguccucccuccuccaccagcacauggagcuccucgaguccuccgucaucccccucaugcacccccucgccgaccccuccaccgucuucaaggacggcgacgaggccgaggacuucgucgagguccaccuccccgacguccacaagcagaucuccggcgucgaccucggccuccccaacuggggcaaguacguccucgucuccgccggcgcccucaccgcccucaugcucaugaucuuccucaugaccugcugccgcaagaccaaccgcgccgaguccauccagcacucccccggcgagaccggccgcaaggucuccgucaccucccacaacggccgcgucaucuccuccugggaguccuacaaguccggcggcgagaccaagcucuga

SEQ ID NO: 126870 - RNA, 1575 nt, Artificial Sequence
  derived and/or modified CDS sequence (opt2) from glycoprotein__RABV__DQ849054.1
augaucccccagguccuccucuucgucccccuccucgucuucuccuccugcuucggcaaguuccccaucuaccccauccccgacaagcucggccccuggucccccaucgacauccaccaccucuccugccccaacaaccucgucgucgaggacgagggcugcaccaaccucuccggcuucuccuacauggagcucaaggucggcuacaucuccgccaucaaggucaacggcuucaccugcaccggcgucgucaccgaggccgagaccuaccccaacuucgucggcuacgucaccaccaccuucaagcgcaagcacuuccgccccacccccgacgccugccgcgccgccuacaacuggaagauggccggcgacccccgcuacgaggagucccuccacaaccccuaccccgacuaccacuggcuccgcaccgucaagaccuccaaggagucccucgucaucaucucccccuccgucgccgaccucgaccccuacgacaagucccuccacucccgcgucuuccccggcggcaagugcuccggcaucaccgucuccuccaccugcugcuucaccaaccacgacuacaccaucuggaugcccgagaacccccgccucggcaccuccugcgacaucuucaccaacucccgcggcaagcgcgccuccaagggcggcaagaccugcggcuucgucgacgagcgcggccucuacaagucccucaagggcgccugcaagcucaagcucugcggcguccucggccuccgccucauggacggcaccugggucgccauccagaccuccgacgagaucaaguggugcucccccgaccagcucgucaaccuccacgacuuccacuccgacgagaucgagcaccucgucgucgaggagcucgucaagaagcgcgaggagugccucgacgcccucgagaccaucaugaccaccaaguccgucuccuuccgccgccucucccaccuccgcaagcucguccccggcuucggcaaggccuacaccaucuucaacaagacccucauggaggccgacgcccacuacaaguccauccgcaccuggaacgagaucauccccuccaagggcugccuccgcgucggcggccgcugccacccccacgucaacggcgucuucuucaacggcaucauccucggccccgacggccacguccucauccccgagaugcaguccucccuccuccaccagcacauggagcuccucgaguccuccgucaucccccucaugcacccccucgccgaccccuccaccgucuucaaggacggcgacgaggccgaggacuucgucgagguccaccuccccgacguccacaagcagaucuccggcgucgaccucggccuccccaacuggggcaaguacguccucgucuccgccggcgcccucaccgcccucaugcucaugaucuuccucaugaccugcugccgcaagaccaaccgcgccgaguccauccagcacucccccggcgagaccggccgcaaggucuccgucaccucccacaacggccgcgucaucuccuccugggaguccuacaaguccggcggcgagaccaagcucuga

SEQ ID NO: 126871 - RNA, 1575 nt, Artificial Sequence
  derived and/or modified CDS sequence (opt2) from glycoprotein__RABV__DQ849055.1
augaucccccagguccuccucuucgucccccuccucgucuucuccuccugcuucggcaaguuccccaucuacaccauccccgacaagcucggccccuggucccccaucgacauccaccaccucuccugccccaacaaccucgucgucgaggacgagggcugcaccaaccucuccggcuucuccuacauggagcucaaggucggcuacaucuccgccaucaaggucaacggcuucaccugcaccggcgucgucaccgaggccgagaccuacaccaacuucgucggcuacgucaccaccaccuucaagcgcaagcacuuccgccccacccccgacgccugccgcgccgccuacaacuggaagauggccggcgacccccgcuacgaggagucccuccacaaccccuaccccgacuaccacuggcuccgcaccgucaagaccuccaaggagucccucgucaucaucucccccuccgucgccgaccucgaccccuacgacaagucccuccacucccgcgucuuccccggcggcaagugcuccggcaucaccgucuccuccaccugcugcuucaccaaccacgacuacaccaucuggaugcccgagaacccccgccucggcaccuccugcgacaucuucaccaacucccgcggcaagcgcgccuccaagggcggcaagaccugcggcuucgucgacgagcgcggccucuacaagucccucaagggcgccugcaagcucaagcucugcggcguccucggccuccgccucauggacggcaccugggucgccauccagaccuccgacgagaucaaguggugcucccccgaccagcucgucaaccuccacgacuuccacuccgacgagaucgagcaccucgucgucgaggagcucgucaagaagcgcgaggagugccucgacgcccucgagaccaucaugaccaccaaguccgucuccuuccgccgccucucccaccuccgcaagcucguccccggcuucggcaaggccuacaccaucuucaacaagacccucauggaggccgacgcccacuacaaguccauccgcaccuggaacgagaucauccccuccaagggcugccuccgcgucggcggccgcugccacccccacgucaacggcgucuucuucaacggcaucauccucggccccgacggccacguccucauccccgagaugcaguccucccuccuccaccagcacauggagcuccucgaguccgccgucaucccccucaugcacccccucgccgaccccuccaccgucuucaaggacggcgacgaggccgaggacuucgucgagguccaccuccccgacguccacaagcagaucuccggcgucgaccucggccuccccaacuggggcaaguacguccucgucuccgccggcgcccucaccgcccucaugcucaugaucuuccucaugaccugcugccgcaagaccaaccgcgccgaguccauccagcacucccccggcgagaccggccgcaaggucuccgucaccucccacaacggccgcgucaucuccuccugggaguccuacaaguccggcggcgagaccaagcucuga

SEQ ID NO: 126872 - RNA, 1575 nt, Artificial Sequence
  derived and/or modified CDS sequence (opt2) from glycoprotein__RABV__DQ849056.1
augaucccccagguccuccucuucgucccccuccucgucuucuccuccugcuucggcaaguuccccaucuacaccauccccgacaagcucggccccuggucccccaucgacauccaccaccucuccugccccaacaaccucgucgucgaggacgagggcugcaccaaccucuccggcuucuccuacauggagcucaaggucggcuacaucuccgccaucaaggucaacggcuucaccugcaccggcgucgucaccgaggccgagaccuacaccaacuucgucggcuacgucaccaccaccuucaagcgcaagcacuuccgccccacccccgacgccugccgcgccgccuacaacuggaagauggccggcgacccccgcuacgaggagucccuccacaaccccuaccccgacuaccacuggcuccgcaccgucaagaccuccaaggagucccucgucaucaucucccccuccgucgccgaccucgaccccuacgacaagucccuccacucccgcgucuuccccggcggcaagugcuccggcaucaccgucuccuccaccuggugcuccaccaaccacgacuacaccaucuggaugcccgagaacccccgccucggcaccuccugcgacaucuucaccaacucccgcggcaagcgcgccuccaagggcggcaagaccugcggcuucgucgacgagcgcggccucuacaagucccucaagggcgccugcaagcucaagcucugcggcguccucggccuccgccucauggacggcaccugggucgccauccagaccuccgacgagaucaaguggugcucccccgaccagcucgucaaccuccacgacuuccacuccgacgagaucgagcaccucgucgucgaggagcucgucaagaagcgcgaggagugccucgacgcccucgagaccaucaugaccaccaaguccgucuccuuccgccgccucucccaccuccgcaagcucguccccggcuucggcaaggccuacaccaucuucaacaagacccucauggaggccgacgcccacuacaaguccauccgcaccuggaacgagaucauccccuccaagggcugccuccgcgucggcggccgcugccacccccacgucaacggcgucuucuucaacggcaucauccucggccccgacggccacguccucauccccgagaugcaguccucccuccuccaccagcacauggagcuccucgaguccuccgucaucccccucaugcacccccucgccgaccccuccaccgucuucaaggacggcgacgaggccgaggacuucgucgagguccaccuccccgacguccacaagcagaucuccggcgucgaccucggccuccccaacuggggcaaguacguccucgucuccgccggcgcccucaccgcccucaugcucaugaucuuccucaugaccugcugccgcaagaccaaccgcgccgaguccauccagcacucccccggcgagaccggccgcaaggucuccgucaccucccacaacggccgcgucaucuccuccugggaguccuacaaguccggcggcgagaccaagcucuga

SEQ ID NO: 126873 - RNA, 1575 nt, Artificial Sequence
  derived and/or modified CDS sequence (opt2) from glycoprotein__RABV__DQ849057.1
augaucccccagguccuccucuucgucccccuccucgucuucuccuccugcuucggcaaguuccccaucuacaccauccccgacaagcucggccccuggucccccaucgacauccaccaccucuccugccccaacaaccucgucgucgaggacgagggcugcaccaaccucuccggcuucuccuacauggagcucaaggucggcuacaucuccgccaucaaggucaacggcuucaccugcaccggcgucgucaccgaggccgagaccuacaccaacuucgucggcuacgucaccaccaccuucaagcgcaagcacuuccgccccacccccgacgccugccgcgccgccuacaacuggaagauggccggcgacccccgcuacgaggagucccuccacaaccccuaccccgacuaccacuggcuccgcaccgucaagaccuccaaggagucccucgucaucaucucccccuccgucgccgaccucgaccccuacgacaagucccuccacucccgcgucuuccccggcggcaagugcuccggcaucaccgucuccuccaccugcugcuccaccaaccacgacuacaccaucuggaugcccgagaacccccgccucggcaccuccugcgacaucuucaccaacucccgcggcaagcgcgccuccaagggcggcaagaccugcggcuucgucgacgagcgcggccucuacaagucccucaagggcgccugcaagcucaagcucugcggcguccucggccuccgccucauggacggcaccugggucgccauccagaccuccgacgagaucaaguggugcucccccgaccagcucgucaaccuccacgacuuccacuccgacgagaucgagcaccucgucgucgaggagcucgucaagaagcgcgaggagugccucgacgcccucgagaccaucaugaccaccaaguccgucuccuuccgccgccucucccaccuccgcaagcucguccccggcuucggcaaggccuacaccaucuucaacaagacccucauggaggccgacgcccacuacaaguccauccgcaccuggaacgagaucauccccuccaagggcugccuccgcgucggcggccgcugccacccccacgucaacggcgucuucuucaacggcaucauccucggccccgacggccacguccucauccccgagaugcaguccucccuccuccaccagcacauggagcuccucgaguccuccgucaucccccucaugcacccccucgccgaccccuccaccaucuucaaggacggcgacgaggccgaggacuucgucgagguccaccuccccgacguccacaagcagaucuccggcgucgaccucggccuccccaacuggggcaaguacguccucgucuccgccggcgcccucaccgcccucaugcucaugaucuuccucaugaccugcugccgcaagaccaaccgcgccgaguccauccagcacucccccggcgagaccggccgcaaggucuccgucaccucccacaacggccgcgucaucuccuccugggaguccuacaaguccggcggcgagaccaagcucuga

SEQ ID NO: 126874 - RNA, 1575 nt, Artificial Sequence
  derived and/or modified CDS sequence (opt2) from glycoprotein__RABV__DQ849058.1
augaucccccagguccuccucuucgucccccuccucgucuucuccuccugcuucggcaaguuccccaucuacaccauccccgacaagcucggccccuggucccccaucgacauccaccaccucuccugccccaacaaccucgucgucgaggacgagggcugcaccaaccucuccggcuucuccuacauggagcucaaggucggcuacaucuccgccaucaaggucaacggcuucaccugcaccggcgucgucaccgaggccgagaccuacaccaacuucgucggcuacgucaccaccaccuucaagcgcaagcacuuccgccccacccccgacgccugccgcgccgccuacaacuggaagauggccggcgacccccgcuacgaggagucccuccacaaccccuaccccgacuaccacuggguccgcaccgucaagaccuccaaggagucccucgucaucaucucccccuccgucgccgaccucgaccccuacgacaagucccuccacucccgcgucuuccccggcggcaagugcuccggcaucaccgucuccuccaccugcugcuccaccaaccacgacuacaccaucuggaugcccgagaacccccgccucggcaccuccugcgacaucuucaccaacucccgcggcaagcgcgccuccaagggcggcaagaccugcggcuucgucgacgagcgcggccucuacaagucccucaagggcgccugcaagcucaagcucugcggcguccucggccuccgccucauggacggcaccugggucgccauccagaccuccgacgagaucaaguggugcucccccgaccagcucgucaaccuccacgacuuccacuccgacgagaucgagcaccucgucgucgaggagcucgucaagaagcgcgaggagugccucgacgcccucgagaccaucaugaccaccaaguccgucuccuuccgccgccucucccaccuccgcaagcucguccccggcuucggcaaggccuacaccaucuucaacaagacccucauggaggccgacgcccacuacaaguccauccgcaccuggaacgagaucauccccuccaagggcugccuccgcgucggcggccgcugccacccccacgucaacggcgucuucuucaacggcaucauccucggccccgacggccacguccucauccccgagaugcaguccucccuccuccaccagcacauggagcuccucgaguccuccgucaucccccucaugcacccccucgccgaccccuccaccgucuucaaggacggcgacgaggccgaggacuucgucgagguccaccuccccgacguccacaagcagaucuccggcgucgaccucggccuccccaacuggggcaaguacguccucgucuccgccggcgcccucaccgcccucaugcucaugaucuuccucaugaccugcugccgcaagaccaaccgcgccgaguccauccagcacucccccggcgagaccggccgcaaggucuccgucaccucccacaacggccgcgucaucuccuccugggaguccuacaaguccggcggcgagaccaagcucuga

SEQ ID NO: 126875 - RNA, 1575 nt, Artificial Sequence
  derived and/or modified CDS sequence (opt2) from glycoprotein__RABV__DQ849059.1
augaucccccagguccuccucuucgucccccuccucgucuucuccuccugcuucggcaaguuccccaucuacaccauccccgacaagcucggccccuggucccccaucgacauccaccaccucuccugccccaacaaccucgucgucgaggacgagggcugcaccaaccucuccggcuucuccuacauggagcucaaggucggcuacaucuccgccaucaaggucaacggcuucaccugcaccggcgucgucaccgaggccgagaccuacaccaacuucgucggcuacgucaccaccaccuucaagcgcaagcacuuccgccccaugcccgacgccugccgcgccgccuacaacuggaagauggccggcgacccccgcuacgaggagucccuccacaaccccuaccccgacuaccacuggcuccgcaccgucaagaccaccaaggagucccucgucaucaucucccccuccgucgccgaccucgaccccuacgacaagucccuccacucccgcgucuuccccggcggcaagugcuccggcaucaccgucuccuccaccugcugcuccaccaaccacgacuacaccaucuggaugcccgagaacccccgccucggcaccuccugcgacaucuucaccaacucccgcggcaagcgcgccuccaagggcggcaagaccugcggcuucgucgacgagcgcggccucuacaagucccucaagggcgccugcaagcucaagcucugcggcguccucggccuccgccucauggacggcaccugggucgccauccagaccuccgacgagaucaaguggugcucccccgaccagcucgucaaccuccacgacuuccacuccgacgagaucgagcaccucgucgucgaggagcucgucaagaagcgcgaggagugccucgacgcccucgagaccaucaugaccaccaaguccgucuccuuccgccgccucucccaccuccgcaagcucguccccggcuucggcaaggccuacaccaucuucaacaagacccucauggaggccgacgcccacuacaaguccauccgcaccuggaacgagaucauccccuccaagggcugccuccgcgucggcggccgcugccacccccacgucaacggcgucuucuucaacggcaucauccucggccccgacggccacguccucauccccgagaugcaguccucccuccuccaccagcacauggagcuccucgaguccuccgucaucccccucaugcacccccucgccgaccccuccaccgucuucaaggacggcgacgaggccgaggacuucgucgagguccaccuccccgacguccacaagcagaucuccggcgucgaccucggccuccccaacuggggcaaguacguccucaucuccgccggcgcccucaccgcccucauguccaugaucuuccucaugaccugcugccgcaagaccaaccgcgccgaguccauccagcacucccccggcgagaccggccgcaaggucuccgucaccucccacaacggccgcgucaucuccuccugggaguccuacaaguccggcggcgagaccaagcucuga

SEQ ID NO: 126876 - RNA, 1575 nt, Artificial Sequence; identical to SEQ ID NO: 126875
  derived and/or modified CDS sequence (opt2) from glycoprotein__RABV__DQ849060.1

SEQ ID NO: 126877 - RNA, 1575 nt, Artificial Sequence
  derived and/or modified CDS sequence (opt2) from glycoprotein__RABV__DQ849061.1
augaucccccagguccuccucuucgucccccuccucgucuucuccuccugcuucggcaaguuccccaucuacaccauccccgacaagcucggccccuggucccccaucgacauccaccaccucuccugccccaacaaccucgucgucgaggacgagggcugcaccaaccucuccggcuucuccuacauggagcucaaggucggcuacaucuccgccaucaaggucaacggcuucaccugcaccggcgucgucaccgaggccgagaccuacaccaacuucgucggcuacgucaccaccaccuucaagcgcaagcacuuccgccccaugcccgacgccugccgcgccgccuacaacuggaagauggccggcgacccccgcuacgaggagucccuccacaaccccuaccccgacuaccacuggcuccgcaccgucaagaccaccaaggagucccucgucaucaucucccccuccgucgccgaccucgaccccuacgacaagucccuccacucccgcgucuuccccggcggcaagugcuccggcaucaccgucuccuccaccugcugcuccaccaaccacgacuacaccaucuggaugcccgagaacccccgccucggcaccuccugcgacaucuucaccaacucccgcggcaagcgcgccuccaagggcggcaagaccugcggcuucgucgacgagcgcggccucuacaagucccucaagggcgccugcaagcucaagcucugcggcguccucggccuccgccucauggacggcaccugggucgccauccagaccuccgacgagaucaaguggugcucccccgaccagcucgucaaccuccacgacuuccacuccgacgagaucgagcaccucgucgucgaggagcucgucaagaagcgcgaggagugccucgacgcccucgagaccaucaugaccaccaaguccgucuccuuccgccgccucucccaccuccgcaagcucguccccggcuucggcaaggccuacaccaucuucaacaagacccucauggaggccgacgcccacuacaaguccauccgcaccuggaacgagaucauccccuccaagggcugccuccgcgucggcggccgcugccacccccacgucaacggcgucuucuucaacggcaucauccucggccccgacggccacguccucauccccgagaugcaguccucccuccuccaccagcacauggagcuccucgaguccuccgucaucccccucaugcacccccucgccgaccccuccaccgucuucaaggacggcgacgaggccgaggacuucgucgagguccaccuccccgacguccacaagcagaucuccggcgucgaccucggccuccccaacuggggcaaguacguccucaucuccgucggcgcccucaccgcccucaugcucaugaucuuccucaugaccugcugccgcaagaccaaccgcgccgaguccacccagcacucccccggcgagaccggccgcaaggucuccgucaccucccacaacggccgcgucaucuccuccugggaguccuacaaguccggcggcgagaccaagcucuga

SEQ ID NO: 126878 - RNA, 1575 nt, Artificial Sequence
  derived and/or modified CDS sequence (opt2) from glycoprotein__RABV__DQ849062.1
augaucccccagguccuccucuucgucccccuccucgucuucuccuccugcuucggcaaguuccccaucuacaccauccccgacaagcucggccccuggucccccaucgacauccaccaccucuccugccccaacaaccucgucgucgaggacgagggcugcaccaaccucuccggcuucuccuacauggagcucaaggucggcuacaucuccgccaucaaggucaacggcuucaccugcaccggcgucgucaccgaggccgagaccuacaccaacuucgucggcuacgucaccaccaccuucaagcgcaagcacuuccgccccaugcccgacgccugccgcgccgccuacaacuggaagauggccggcgacccccgcuacgaggagucccuccacaaccccuaccccggcuaccacuggcuccgcaccgucaagaccaccaaggagucccucgucaucaucucccccuccgucgccgaccucgaccccuacgacaagucccuccacucccgcgucuuccccggcggcaagugcuccggcaucaccgucuccuccaccugcugcuccaccaaccacgacuacaccaucuggaugcccgagaacccccgccucggcaccuccugcgacaucuucaccaacucccgcggcaagcgcgccuccaagggcggcaagaccugcggcuucgucgacgagcgcggccucuacaagucccucaagggcgccugcaagcucaagcucugcggcguccucggccuccgccucauggacggcaccugggucgccauccagaccuccgacgagaucaaguggugcucccccgaccagcucgucaaccuccacgacuuccacuccgacgagaucgagcaccucgucgucgaggagcucgucaagaagcgcgaggagugccucgacgcccucgagaccaucaugaccaccaaguccgucuccuuccgccgccucucccaccuccgcaagcucguccccggcuucggcaaggccuacaccaucuucaacaagacccucauggaggccgacgcccacuacaaguccauccgcaccuggaacgagaucauccccuccaagggcugccuccgcgucggcggccgcugccacccccacgucaacggcgucuucuucaacggcaucauccucggccccgacggccacguccucauccccgagaugcaguccucccuccuccaccagcacauggagcuccucgaguccuccgucaucccccucaugcacccccucgccgaccccuccaccgucuucaaggacggcgacgaggccgaggacuucgucgagguccaccuccccgacguccacaagcagaucuccggcgucgaccucggccuccccaacuggggcaaguacguccucaucuccgccggcgcccucaccgcccucaugcucaugaucuuccucaugaccugcugccgcaagaccaaccgcgccgaguccauccagcacucccccggcgagaccggccgcaaggucuccgucaccucccacaacggccgcgucaucuccuccugggaguccuacaaguccggcggcgagaccaagcucuga

SEQ ID NO: 126879 - RNA, 1575 nt, Artificial Sequence
  derived and/or modified CDS sequence (opt2) from glycoprotein__RABV__DQ849063.1
augaucccccagguccuccucuucgucccccuccucgucuucuccuccugcuucggcaaguuccccaucuacaccauccccgacaagcucggccccuggucccccaucgacauccaccaccucuccugccccaacaaccucgucgucgaggacgagggcugcaccaaccucuccggcuucuccuacauggagcucaaggucggcuacaucuccgccaucaaggucaacggcuucaccugcaccggcgucgucaccgaggccgagaccuacaccaacuucgucggcuacgucaccaccaccuucaagcgcaagcacuuccgccccaugcccgacgccugccgcgccgccuacaacuggaagauggccggcgacccccgcuacgaggagucccuccacaaccccuaccccgacuaccacuggcuccgcaccgucaagaccaccaaggagucccucgucaucaucucccccuccgucgccgaccucgaccccuacgacaagucccuccacucccgcgucuuccccggcggcaagugcuccggcaucaccgucuccuccaccugcugcuccaccaaccacgacuacaccaucuggaugcccgagaacccccgccucggcaccuccugcgacaucuucaccaacucccgcggcaagcgcgccuccaagggcggcaagaccugcggcuucgucgacgagcgcggccucuacaagucccucaagggcgccugcaagcucaagcucugcggcguccucggccuccgccucauggacggcaccugggucgccauccagaccuccgacgagaucaaguggugcucccccgaccagcucgucaaccuccacgacuuccacuccgacgagaucgagcaccucgucgucgaggagcucgucaagaagcgcgaggagugccucgacgcccucgagaccaucaugaccaccaaguccgucuccuuccgccgccucucccaccuccgcaagcucguccccggcuucggcaaggccuacaccaucuucaacaagacccucauggaggccgacgcccacuacaaguccauccgcaccuggaacgagaucauccccuccaagggcugccuccgcgucggcggccgcugccacccccacgucaacggcgucuucuucaacggcaucauccucggccccgacggccacguccucauccccgagaugcaguccucccuccuccaccagcacauggagcuccucgaguccuccgucaucccccucaugcacccccucgccgaccccuccaccgucuucaaggacggcgacgaggccgaggacuucgucgagguccaccuccccgacguccacaagcagaucuccggcgucgaccucggccuccccaacuggggcaaguacguccucaucuccgccggcgcccucaccgcccucaugcucaugaucuuccucaugaccugcugccgcaagaccaaccgcgccgaguccauccagcacucccccggcgagaccggccgcaaggucuccgucaccucccacaacggccgcgucaucuccuccugggaguccuacaaguccggcggcgagaccaagcucuga

SEQ ID NO: 126880 - RNA, 1575 nt, Artificial Sequence
  derived and/or modified CDS sequence (opt2) from glycoprotein__RABV__DQ849064.1
augauccuccagguccuccucuucgccccccuccucgucuucuccuccugcuucggcaaguuccccaucuacaccauccccgacaagcucggccccuggucccccaucgacauccaccaccucuccugccccaacaaccucgucgucgaggacgagggcugcaccaaccucuccggcuucuccuacauggagcucaaggucggcuacaucuccgccaucaaggucaacggcuucaccugcaccggcgucgucaccgaggccgagaccuacaccaacuucgucggcuacgucaccaccaccuucaagcgcaagcacuuccgccccaugcccgacgccugccgcgccgccuacaacuggaagauggccggcgacccccgcuacgaggagucccuccacaaccccuaccccgacuaccacuggcuccgcaccgucaagaccaccaaggagucccucgucaucaucucccccuccgucgccgaccucgaccccuacgacaagucccuccacucccgcgucuuccccggcggcaagugcuccggcaucaccgucuccuccaccugcugcuccaccaaccacgacuacaccaucuggaugcccgagaacccccgccucggcaccuccugcgacaucuucaccaacucccgcggcaagcgcgccuccaagggcggcaagaccugcggcuucgucgacgagcgcggccucuacaagucccucaagggcgccugcaagcucaagcucugcggcguccucggccuccgccucauggacggcaccugggucgccauccagaccuccgacgagaucaaguggugcccccccgaccagcucgucaaccuccacgacuuccacuccgacgagaucgagcaccucgucgucgaggagcucgucaagaagcgcgaggagugccucgacgcccucgagaccaucaugaccaccaaguccgucuccuuccgccgccucucccaccuccgcaagcucguccccggcuucggcaaggccuacaccaucuucaacaagacccucauggaggccgacgcccacuacaaguccauccgcaccuggaacgagaucauccccuccaagggcugccuccgcgucggcggccgcugccacccccacgucaacggcgucuucuucaacggcaucauccucggccccgacggccacguccucauccccgagaugcaguccucccuccuccaccagcacauggagcuccucgaguccuccgucaucccccucaugcacccccucgccgaccccuccaccgucuucaaggacggcgacgaggccgaggacuucgucgagguccaccuccccgacguccacaagcagaucuccggcgucgaccucggccuccccaacuggggcaaguacguccucaucuccgccggcgcccucaccgcccucaugcucaugaucuuccucaugaccugcugccgcaagaacaaccgcgccgaguccauccagcacucccccggcgagaccggccgcaaggucuccgucaccucccacaacggccgcgucaucuccuccugggaguccuacaaguccggcggcgagaccaagcucuga

SEQ ID NO: 126881 - RNA, 1575 nt, Artificial Sequence
  derived and/or modified CDS sequence (opt2) from glycoprotein__RABV__DQ849065.1
augaucccccagguccuccucuucgucccccuccucgucuucuccuccugcuucggcaaguuccccaucuacaccauccccgacaagcucggccccuggucccccaucgacauccaccaccucuccugccccaacaaccucgucgucgaggacgagggcugcaccaaccucuccggcuucuccuacauggagcucaaggucggcuacaucuccgccaucaaggucaacggcuucaccugcaccggcgucgucaccgaggccgagaccuacaccaacuucgucggcuacgucaccaccaccuucaagcgcaagcacuuccgccccaugcccgacgccugccgcgccgccuacaacuggaagauggccggcgacccccgcuacgaggagucccuccacaaccccuaccccgacuaccacuggcuccgcaccgucaagaccaccaaggagucccucgucaucaucucccccuccgucgccgaccucgaccccuacgacaagucccuccacucccgcgucuuccccggcggcaagugcuccggcaucaccgucuccuccaccugcugcuccaccaaccacgacuacaccaucuggaugcccgagaacccccgccucggcaccuccugcgacaucuucaccaacucccgcggcaagcgcgccuccaagggcggcaagaccugcggcuucgucgacgagcgcggccucuacaagucccucaagggcgccugcaagcucaagcucugcggcguccucggccuccgccucauggacggcaccugggucgccauccagaccuccgacgagaucaaguggugcucccccgaccagcucgucaaccuccacgacuuccacuccgacgagaucgagcaccucgucgucgaggagcucgucaagaagcgcgaggagugccucgacgcccucgagaccaucaugaccaccaaguccgucuccuuccgccgccucucccaccuccgcaagcucguccccggcuucggcaaggccuacaccaucuucaacaagacccucauggaggccgacgcccacuacaaguccauccgcaccuggaacgagaucauccccuccaagggcugccuccgcgucggcggccgcugccacccccacgucaacggcgucuucuucaacggcaucauccucggccccgacggccacguccucauccccgagaugcaguccucccuccuccaccagcacauggagcuccucgaguccuccgucaucccccucaugcacccccucgccgaccccuccaccgucuucaaggacggcgacgaggccgaggacuucgucgagguccaccuccccgacguccacaagcagaucuccggcgucgaccucggccuccccaacuggggcaaguacguccucaucuccgccggcgcccucaccgcccucaugcucaccaucuuccucaugaccugcugccgcaagaccaaccgcgccgaguccauccagcacucccccggcgagaccggccgcaaggucuccgucaccucccacaacggccgcgucaucuccuccugggaguccuacaaguccggcuccgagaccaagcucuga

SEQ ID NO: 126882 - RNA, 1575 nt, Artificial Sequence
  derived and/or modified CDS sequence (opt2) from glycoprotein__RABV__DQ849066.1
augaucccccagguccuccucuucgucccccuccucgucuucuccuccugcuucggcaaguuccccaucuacaccauccccgacaagcucggccccuggucccccaucgacauccaccaccucuccugccccaacaaccucgucgucgaggacgagggcugcaccaaccucuccggcuucuccuacauggagcucaaggucggcuacaucuccgccaucaaggucaacggcuucaccugcaccggcgucgucaccgaggccgagaccuacaccaacuucgucggcuacgucaccaccaccuucaagcgcaagcacuuccgccccaugcccgacgccugccgcgccgccuacaacuggaagauggccggcgacccccgcuacgaggagucccuccacaaccccuaccccgacuaccacuggcuccgcaccgucaagaccaccaaggagucccucgucaucaucucccccuccgucgccgaccucgaccccuacgacaagucccuccacucccgcgucuuccccggcggcaagugcuccggcaucaccgucuccuccaccugcugcuccaccaaccacgacuacaccaucuggaugcccgagaacccccgccucggcaccuccugcgacaucuucaccaacucccgcggcaagcgcgccuccaagggcggcaagaccugcggcuucgucgacgagcgcggccucuacaagucccucaagggcgccugcaagcucaagcucugcggcguccucggccuccgccucauggacggcaccugggucgccauccagaccuccgacgagaucaaguggugcucccccgaccagcucgucaaccuccacgacuuccacuccgacgagaucgagcaccucgucgucgaggagcucgucaagaagcgcgaggagugccucgacgcccucgagaccaucaugaccaccaaguccgucuccuuccgccgccucucccaccuccgcaagcucguccccggcuucggcaaggccuacaccaucuucaacaagacccucauggaggccgacgcccacuacaaguccauccgcaccuggaacgagaucauccccuccaagggcugccuccgcgucggcggccgcugccacccccacgucaacggcgucuucuucaacggcaucauccucggccccgacggccacguccucauccccgagaugcaguccucccuccuccaccagcacauggagcuccucgaguccuccgucaucccccucaugcacccccucgccgaccccuccaccgucuucaaggacggcgacgaggccgaggacuucgucgagguccaccuccccgacguccacaagcagaucuccggcgucgaccucggccuccccaacuggggcaaguacguccucaucuccgccggcgcccucaccgcccucaugcucaccaucuuccucaugaccugcugccgcaagaccaaccgcgccggcuccauccagcacucccccggcgagaccggccgcaaggucuccgucaccucccacaacggccgcgucaucuccuccugggaguccuacaaguccggcuccgagaccaagcucuga

SEQ ID NO: 126883 - RNA, 1575 nt, Artificial Sequence; identical to SEQ ID NO: 126882
  derived and/or modified CDS sequence (opt2) from glycoprotein__RABV__DQ849067.1

SEQ ID NO: 126884 - RNA, 1575 nt, Artificial Sequence; identical to SEQ ID NO: 126881
  derived and/or modified CDS sequence (opt2) from glycoprotein__RABV__DQ849068.1

SEQ ID NO: 126885 - RNA, 1575 nt, Artificial Sequence
  derived and/or modified CDS sequence (opt2) from glycoprotein__RABV__DQ849069.2
augaucccccaggcccuccucuucgucccccuccucgucuucuccuucugcuucggcaaguuccccaucuacaccauccccgacaagcucggccccuggucccccaucgacauccaccaccucuccugccccaacaaccucgucgucgaggacgagggcugcaccaaccucuccggcuucuccuacauggagcucaaggucggcuacaucuccgccaucaaggucaacggcuucaccugcaccggcgucgucaccgaggccgagaccuacaccaacuucgucggcuacgucaccaccaccuucaagcgcaagcacuuccgccccacccccgacgccugccgcgccgccuacaacuggaagauggccggcgacccccgcuacgaggagucccuccacaaccccuaccccgacuaccacuggcuccgcaccgucaagaccaccaaggagucccucgucaucaucucccccuccgucuccgaccucgaccccuacgacaagucccuccacucccgcgucuuccccuccggcaagugcucccgcaucaccgucuccuccaccuacugccccaccaaccacgacuacaccaucuggaugcccgagaacccccgccucggcaccuccugcgacaucuucaccaacucccgcggcaagcgcgccuccaagggcuccaagaccugcggcuucgucgacgagcgcggccucuacaagucccucaagggcgccugcaagcucaagcucugcggcguccucggccucacccucauggacggcaccugggucgccauccagaccuccgacgaggccaaguggugcccccccgaccagcucgucaacauccacgacuuccgcuccgacgagaucgagcaccucgucgucgaggagcucgucaagaagcgcgaggagugccucgacgcccucgaguccaucaugaccaccaaguccgucuccuuccgccgccucucccaccuccgcaagcucguccccggcuucggcaaggccuacaccaucuucaacaagacccucauggaggccgacgcccacuacaaguccguccgcaccuggaacgagaucauccccuccaagggcugccuccgcgucggcggccgcugccacccccacgucaacggcgucuucuucaacggcaucauccucggccccgacggccacguccucauccccgagaugcaguccucccuccuccagcagcacauggagcuccucgaguccuccgucaucccccucaugcacccccucgccgaccccuccaccgucuucaaggaggacgacgaggccgaggacuucgucgagguccaccuccccgacguccacaagcaggucuccggcgucgaccucggccuccccuccuggggcaaguacguccucauguccgucggcgccaugaucgcccucaugcucaugaucuuccucaugaccugcugccgccgcgccaacggcgccgaguccauccagcacucccucggcgagaccggccgcaaggucuccgucaccucccaguccggccgcgucaucuccuccugggaguccuacaaguccggcggcgagaccaagcucuga

SEQ ID NO: 126886 - RNA, 1575 nt, Artificial Sequence
  derived and/or modified CDS sequence (opt2) from glycoprotein__RABV__DQ849070.1
augaucccccagguccuccucuucgucccccuccucgucuucuccuccugcuucggcaaguuccccaucuacaccauccccgacaagcucggccccuggucccccaucgacauccaccaccucuccugccccaacaaccucgucgucgaggacgagggcugcaccaaccucuccggcuucuccuacauggagcucaaggucggcuacaucuccgccaucaaggucaacggcuucaccugcaccggcgucgucaccgaggccgagaccuacaccaacuucgucggcuacgucaccaccaccuucaagcgcaagcacuuccgccccaugcccgacgccugccgcgccgccuacaacuggaagauggccggcgacccccgcuacgaggagucccuccacaaccccuaccccgacuaccacuggcuccgcaccgucaagaccaccaaggagucccucgucaucaucucccccuccgucgccgaccucgaccccuacgacaagucccuccacucccgcgucuuccccggcggcaagugcuccggcaucaccgucuccuccaccugcugcuccaccaaccacgacuacaccaucuggaugcccgagaacccccgccucggcaccuccugcgacaucuucaccaacucccgcggcaagcgcgccuccaagggcggcaagaccugcggcuucgucgacgagcgcggccucuacaagucccucaagggcgccugcaagcucaagcucugcggcguccucggccuccgccucauggacggcaccugggucgccauccagaccuccgacgagaucaaguggugcucccccgaccagcucgucaaccuccacgacuuccacuccgacgagaucgagcaccucgucgucgaggagcucgucaagaagcgcgaggagugccucgacgcccucgagaccaucaugaccaccaaguccgucuccuuccgccgccucucccaccuccgcaagcucguccccggcuucggcaaggccuacaccaucuucaacaagacccucauggaggccgacgcccacuacaaguccauccgcaccuggaacgagaucauccccuccaagggcugccuccgcgucggcggccgcugccacccccacgucaacggcgucuucuucaacggcaucauccucggccccgacggccacguccucauccccgagaugcaguccucccuccuccaccagcacauggagcuccucgaguccuccgucaucccccucaugcacccccucgccgaccccuccaccgucuucaaggacggcgacgaggccgaggacuucgucgacguccaccuccccgacguccacaagcagaucuccggcgucgaccucggccuccccaacuggggcaaguacguccucaucuccgccggcgcccucaccgcccucaugcucaugaucuuccucaugaccugcugccgcaaggccaaccgcgccgaguccauccagcacaaccccggcgagaccggccgcaaggucuccgucaccucccacaacggccgcgucaucuccuccugggaguccuacaaguccggcggcgagaccaagcucuga

SEQ ID NO: 126887 - RNA, 1575 nt, Artificial Sequence; identical to SEQ ID NO: 126563
  derived and/or modified CDS sequence (opt2) from glycoprotein__RABV__DQ849071.1

SEQ ID NO: 126888 - RNA, 1575 nt, Artificial Sequence
  derived and/or modified CDS sequence (opt2) from glycoprotein__RABV__DQ849072.1
augaucccccaggcccuccucuucgucccccuccucgucuucucccucugcuucggcaaguuccccaucuacaccauccccgacaagcucggccccuggucccccaucgacauccaccaccucuccugccccaacaaccucgucgucgaggacgagggcugcaccaaccucuccggcuucuccuacauggagcucaaggucggcuacaucuccgccaucaaggucaacggcuucaccugcaccggcgucgucaccgaggccgagaccuacaccaacuucgucggcuacgucaccaccaccuucaagcgcaagcacuuccgccccacccccgacgccugccgcgccgccuacaacuggaagauggccggcgacccccgcuacgaggagucccuccacaaccccuaccccgacuaccacuggcuccgcaccgucaagaccaccaaggagucccucgucaucaucucccccuccgucgccgaccucgaccccuacgacaagucccuccacucccgcgucuuccccuccggcaagugcuccggcaucaccgucuccuccaccuacugcuccaccaaccacgacuacaccaucuggaugcccgagaacccccgccucggcaccuccugcgacaucuucgucaacucccgcggcaagcgcgccuccaagggcuccaagaccugcggcuucgucgacgagcgcggccucuacaagucccucaagggcgccugcaagcucaagcucugcggcguccucggccuccgccucauggacggcaccugggucgccauccagaccuccgacgagaccaaguggugcccccccgaccagcucgucaaccuccacgacuuccgcuccgacgagaucgagcaccucgucgucgaggagcucgucaagaagcgcgaggagugccucgacgcccucgaguccaucaugaccaccaaguccgucuccuuccgccgccucucccaccuccgcaagcucguccccggcuucggcaaggccuacaccaucuucaacaagacccucauggaggccgacgcccacuacaaguccguccgcaccuggaacgagaucauccccuccaagggcugccuccgcgucggcggccgcugccacccccacgucaacggcgucuucuucaacggcaucauccucggccccgacggccacguccucauccccgagaugcaguccucccuccuccagcagcacauggagcuccucgaguccuccgucaucccccucaugcacccccucgccgaccccuccaccaucuucaaggacggcgacgaggccgaggacuucgucgagguccaccuccccgacguccacaagcaggucuccggcgucgaccucggccuccccaacuggggcaaguacguccucauguccgccggcgcccucaccgcccucaugcucaugaucuuccucaugaccugcugccgcaagaccgaccgcaccggcuccacccaccacucccccggcgagaccggccgcaaggucuccgucaccucccagaacggccgcgucaucgccuccugggaguccuacaaguccggcggcgagaccaagcucuga

SEQ ID NO: 126889 - RNA, 1575 nt, Artificial Sequence
  derived and/or modified CDS sequence (opt2) from glycoprotein__RABV__DQ849073.1
augaucccccagguccuccucuucgucccccuccucgucuucuccuccugccucggcaaguuccccaucuacaccauccccgacaagcucggccccuggucccccaucgacauccaccaccucuccugccccaacaaccucgucgucgaggacgagggcugcaccaaccucuccggcuucuccuacauggagcucaaggucggcuacaucuccgccaucaaggucaacggcuucaccugcaccggcgucgucaccgaggccgagaccuacaccaacuucgucggcuacgucaccaccaccuucaagcgcaagcacuuccgccccaugcccgacgccugccgcgccgccuacaacuggaagauggccggcgacccccgcuacgaggagucccuccacaaccccuaccccgacuaccacuggcuccgcaccgucaagaccuccaaggagucccucgucaucaucucccccuccgucgccgaccucgaccccuacgacaagucccuccacucccgcgucuuccccggcggcaagugcuccggcaucaccgucuccuccaccugcugcuccaccaaccacgacuacaccaucuggaugcccgagaacccccgccucggcaccuccugcgacaucuucaccaacucccgcggcaagcgcgccuccaagggcggcaagaccugcggcuucgucgacgagcgcggccucuacaagucccucaagggcgccugcaagcucaagcucugcggcguccucggccuccgccucauggacggcaccugggucgccauccagaccuccgacgagaucaaguggugcucccccgaccagcucgucaaccuccacgacuuccacuccgacgagaucgagcaccucgucgucgaggagcucgucaagaagcgcgaggagugccucgacgcccucgagaccaucaugaccaccaaguccgucuccuuccgccgccucucccaccuccgcaagcucguccccggcuucggcaaggccuacaccaucuucaacaagacccucauggaggccgacgcccacuacaaguccauccgcaccuggaacgagaucauccccuccaagggcugccuccgcgucggcggccgcugccacccccacgucaacggcgucuucuucaacggcaucauccucggccccgacggccacguccucauccccgagaugcaguccucccuccuccaccagcacauggagcuccucgaguccuccgucaucccccucaugcacccccucgccgaccccuccaccgucuucaaggacggcgacgaggccgaggacuucgucgagguccaccuccccgacguccacaagcagaucuccggcgucgaccucggccuccccaacuggggcaaguacguccucaucuccgccggcgcccucaccgccuccaugcucaugaucuuccucaugaccugcugccgcaagaccaaccgcgccgaguccauccagcacucccccggcgagaccggccgcaaggucuccgucaccucccacaacggccgcgucaucuccuccugggaguccuacaaguccggcggcgagaccaagcucuga

SEQ ID NO: 126890 - RNA, 1575 nt, Artificial Sequence
  derived and/or modified CDS sequence (opt2) from glycoprotein__RABV__DQ875050.1
auggucccccagguccuccucuucguccuccuccucggcuucucccucugcuucggcaaguuccccaucuacaccauccccgacgagcucggccccuggucccccaucgacauccaccaccucuccugccccaacaaccucgucgucgaggacgagggcugcaccaaccucuccgaguucuccuacauggagcucaaggucggcuacaucuccgccaucaaggucaacggcuucaccugcaccggcgucgucaccgaggccgagaccuacaccaacuucgucggcuacgucaccaccaccuucaagcgcaagcacuuccgccccacccccgacgccugccgcgccgccuacaacuggaagauggccggcgacccccgcuacgaggagucccuccacaaccccuaccccgacuaccacuggcuccgcaccguccgcaccaccaaggagucccucaucaucaucucccccuccgucaccgaccucgaccccuacgacaagucccuccacucccgcgucuuccccggccgcaagugcuccggcaucaccgucuccuccaccuacugcuccaccaaccacgacuacaccaucuggaugcccgagaacccccgcccccgcacccccugcgacaucuucaccaacucccgcggcaagcgcgccuccaacggcaacaagaccugcggcuucgucgacgagcgcggccucuacaagucccucaagggcgccugccgccucaagcucugcggcguccucggccuccgccucauggacggcaccugggucgccaugcagaccuccggcgagaccaaguggugcccccccgaccagcucgucaaccuccacgacuuccgcuccgacgagaucgagcaccucgucgucgaggagcucgucaagaagcgcgaggagugccucgacgcccucgaguccaucaugaccaccaaguccgucuccuuccgccgccucucccaccuccgcaagcucguccccggcuucggcaaggccuacaccaucuucaacaagacccucauggaggccgacgcccacuacaaguccguccgcaccuggaacgagaucauccccuccaagggcugccucaaggucggcggccgcugccacccccacgucaacggcgucuucuucaacggccucauccucggccccgacgaccacguccucauccccgagaugcaguccucccuccuccagcagcacauggagcuccucgaguccuccgucaucccccucaugcacccccucgccgaccccuccaccgucuucaaggagggcgacgaggccgaggacuucgucgagguccaccuccccgacgucuacaagcagaucuccggcgucgaccucggccuccccaacuggggcaaguacguccucaugaccgccggcgccaugaucggccucguccucaucuucucccucaugaccuggugccgccgcgccaaccgccccgaguccaagcagcgcuccuucggcggcaccggcggcaacgucuccgucaccucccaguccggcaaggucauccccuccugggaguccuacaaguccggcggcgagauccgccucuga

SEQ ID NO: 126891 - RNA, 1575 nt, Artificial Sequence
  derived and/or modified CDS sequence (opt2) from glycoprotein__RABV__DQ875051.1
auggucccccaggcccuccuccucgucccccuccucggcuucucccucugcuucggcaaguuccccaucuacaccauccccaccaagcucggccccuggucccccaucgacauccaccaccucuccugccccaacaaccucgucgucgaggacgagggcugcaccaaccucuccggcuucuccuacauggagcucaaggucggccgcaucuccgccaucaaggucaacggcuucaccugcaccggcgucgucaccgaggccgagaccuacaccaacuucgucggcuacgucaccaccaccuucaagcgcaagcacuuccgccccaugcccggcugcauguacucccgcguccagcucgaggacggccgcuccccccagaucgaggagucccuccacaaccccuaccccgacuaccacuggcuccgcaccguccgcaccaccaaggagucccucaucaucaucucccccuccgucaccgaccucgaccccuacgacaagucccuccacucccgcgucuuccccggccgcaagugcuccggcaucaccgucuccuccaccuacugcuccaccaaccacgacuacaccgucuggaugcccgagauccuccgccucggcaccuccugcgacaucuucaccaacucccgcggcaagcgcgccuccaagggcuccaagaccugcggcuucgucgacgagcgcggccucuacaagucccucaagggcgccugcaagcucaagcucugcggcguccccggccuccgccucauggacggcaccugggucgccaugcagaccuccaacgagaccaaguggugcccccccggccagcucgucaaccuccacgaccuccacuccgacgagaucgagcaccucgucgucgaggagcucgucaagaagcgcgaggagugccucgacgcccucgaguccaucaccaccaccaaguccgucuccuuccgccgccucucccaccuccgcaagcucguccccggcuucggcaaggccuacaccaucuucaacaagacccucauggaggccgaggcccacuacaaguccguccgcaccuggaacgagaucauccccuccaagggcugccuccgcgucggcggcggcugccacccccacgucaacggcgucuucuucaacggcaucauccucggccccgacggccacguccucauccccgagaugcaguccucccuccuccagcagcacaucgagcuccucgaguccuccgucaucccccucaugcacccccucgccgaccccuucaccgucuucaaggacggcgacgagaucgaggacuucgucgagguccaccuccccgacguccacgagcaggucuccggcgucgaccucggccuccccaacuggggcgaguacguccuccucuccgccggcacccucaucgcccucaugcucaucaucuuccucaucaccugcugcaagcgcgucgaccgccccgaguccacccagcgcucccuccgcggcaccggccgcaacgucuccgucaccucccaguccggcaaguucauccccucccgcgaguccuacaaguccggcggcgagaccggccucuga

SEQ ID NO: 126892 - RNA, 1575 nt, Artificial Sequence
  derived and/or modified CDS sequence (opt2) from glycoprotein__RABV__E02022.1
auggucccccaggcccuccuccucguccccauccucggcuucuccuccugcuucggcaaguuccccaucuacaccauccccgacacccucggccccuggucccccaucgacauccaccaccucuccugccccaacaaccucgucgucgaggacgagggcugcaccaaccucuccggcuucuccuacauggagcucaaggucggccacaucuccgccaucaaggucaacggcuucaccugcaccggcgucgucaccgaggccgagaccuacaccaacuucgucggcuacgucaccaccaccuucaagcgcaagcacuuccgccccacccccgacgccugccgcgccgccuacaacuggaagauggccggcgacccccgcuacgaggagucccuccacucccccuaccccgacuaccacuggcuccgcaccgucaagaccaccaaggagucccucgucaucaucucccccuccgucgucgaccucgaccccuacgacaacucccuccacucccgcgucuuccccuccggcaagugcuccggcaucaccgucuccuccgucuacugcuccaccaaccacgacuacaccgucuggaugcccgagucccuccgccucggcaccuccugcgacaucuucaccaacucccgcggcaagcgcgucuccaagggcuccaagaccugcggcuucgucgacgagcgcggccucuacaagucccucaagggcgccugcaagcucaagcucugcggcguccgcggccuccgccucauggacggcaccugggucgccaugcagaccuccaacgagaccaaguggugcccccccgaccagcucgucaaccuccacgaccuccgcuccgacgagaucgagcaccucgucaucgaggagcucgucaagaagcgcgaggagugccucgacgcccucgaguccaucaucaccaccaaguccgucuccuuccgccgccucuccuaccuccgcaagcucguccccggcuucggcaaggccuacaccaucuucaacaagacccucauggaggccgaggcccacuacaaguccguccgcaccuggaacgagaucauccccuccaagggcugccuccgcgucggcggccgcugccacccccacgucaacggcgucuucuucaacggcaucauccucggccccgacggccacguccucauccccgagaugcaguccucccuccuccagcagcacaucgagcuccucgaguccuccgucaucccccucaugcacccccucgccgaccccuucaccgucuucaaggacggcgacgagaccgaggacuucaucgagguccaccuccccgacguccacgagcaggucuccggcgucgaccucggccuccccaacuggggcgaguacguccuccucuccgccggcacccucaucgcccucaugcucaucaucuuccucaugaccugcugccgcaaggucgaccgccccgaguccacccagcgcucccuccgcggcaccggccgcaacgucuccgucaccucccaguccggcaaguucauccccuccugggaguccuacaaguccggcggcgagaccggccucuga

SEQ ID NO: 126893 - RNA, 1575 nt, Artificial Sequence
  derived and/or modified CDS sequence (opt2) from glycoprotein__RABV__EF206707.1
auggucccccaggcccuccucuucgucccccuccucgucuucccccucugcuucggcaaguuccccaucuacaccauccccgacaagcucggccccuggucccccaucgacauccaccaccucuccugccccaacaaccucgucgucgaggacgagggcugcaccaaccucuccggcuucuccuacauggagcucaaggucggcuacauccucgccaucaagaugaacggcuucaccugcaccggcgucgucaccgaggccgagaccuacaccaacuucgucggcuacgucaccaccaccuucaagcgcaagcacuuccgccccacccccgacgccugccgcgccgccuacaacuggaagauggccggcgacccccgcuacgaggagucccuccacaaccccuaccccgacuaccgcuggcuccgcaccgucaagaccaccaaggagucccucgucaucaucucccccuccgucgccgaccucgaccccuacgaccgcucccuccacucccgcgucuuccccuccggcaagugcuccggcgucgccgucuccuccaccuacugcuccaccaaccacgacuacaccaucuggaugcccgagaacccccgccucggcauguccugcgacaucuucaccaacucccgcggcaagcgcgccuccaagggcuccgagaccugcggcuucgucgacgagcgcggccucuacaagucccucaagggcgccugcaagcucaagcucugcggcguccucggccuccgccucauggacggcaccugggucgccaugcagaccuccaacgagaccaaguggugcccccccgaccagcucgucaaccuccacgacuuccgcuccgacgagaucgagcaccucgucgucgaggagcucguccgcaagcgcgaggagugccucgacgcccucgaguccaucaugaccaccaaguccgucuccuuccgccgccucucccaccuccgcaagcucguccccggcuucggcaaggccuacaccaucuucaacaagacccucauggaggccgacgcccacuacaaguccguccgcaccuggaacgagauccuccccuccaagggcugccuccgcgucggcggccgcugccacccccacgucaacggcgucuucuucaacggcaucauccucggccccgacggcaacguccucauccccgagaugcaguccucccuccuccagcagcacauggagcuccucgaguccuccgucaucccccucguccacccccucgccgaccccuccaccgucuucaaggacggcgacgaggccgaggacuucgucgagguccaccuccccgacguccacaaccaggucuccggcgucgaccucggccuccccaacuggggcaaguacguccuccucuccgccggcgcccucaccgcccucaugcucaucaucuuccucaugaccugcugccgccgcgucaaccgcuccgagcccacccagcacaaccuccgcggcaccggccgcgaggucuccgucaccccccaguccggcaagaucaucuccuccugggagucccacaaguccggcggcgagacccgccucuga

SEQ ID NO: 126894 - RNA, 1575 nt, Artificial Sequence
  derived and/or modified CDS sequence (opt2) from glycoprotein__RABV__EF206709.1
auggucccccaggcccuccucuucgucccccuccucgucuucccccucugcuucggcaaguuccccaucuacaccauccccgacaagcucggccccuggucccccaucgacauccaccaccucuccugccccaacaaccucgucgucgaggacgagggcugcaccaaccucuccggcuucuccuacauggagcucaaggucggcuacauccucgccaucaaggucaacggcuucaccugcaccggcgucgucaccgaggccgagaccuacaccaacuucgucggcuacgucaccaccaccuucaagcgcaagcacuuccgccccacccccgacgccugccgcgccgccuacaacuggaagauggccggcgacccccgcuacgaggagucccuccacaaccccuaccccgacuaccgcuggcuccgcaccgucaagaccaccaaggagucccucgucaucaucucccccuccgucgccgaccucgaccccuacgaccgcucccuccacucccgcgucuuccccuccggcaagugcuccggcgucgccgucuccuccaccuacugcuccaccaaccacgacuacaccaucuggaugcccgagaacccccgccucggcauguccugcgacaucuucaccaacucccgcggcaagcgcgccuccaagggcuccgagaccugcggcuucgucgacgagcgcggccucuacaagucccucaagggcgccugcaagcucaagcucugcggcguccucggccuccgccucauggacggcaccugggucuccaugcagaccuccaacgagaccaaguggugcccccccgacaagcucgucaaccuccacgacuuccgcuccgacgagaucgagcaccucgucgucgaggagcucguccgcaagcgcgaggagugccucgacgcccucgaguccaucaugaccaccaaguccgucuccuuccgccgccucucccaccuccgcaagcucguccccggcuucggcaaggccuacaccaucuucaacaagacccucauggaggccgacgcccacuacaaguccguccgcaccuggaacgagauccuccccuccaagggcugccuccgcgucggcggccgcugccacccccacgucaacggcgucuucuucaacggcaucauccucggccccgacggcaacguccucauccccgagaugcaguccucccuccuccagcagcacauggagcuccucgaguccuccgucaucccccucguccacccccucgccgaccccuccaccgucuucaaggacggcgacgaggccgaggacuucgucgagguccaccuccccgacguccacaaccaggucuccggcgucgaccucggccuccccaacuggggcaaguacguccuccucuccgccggcgcccucaccgcccucaugcucaucaucuuccucaugaccugcugccgccgcgucaaccgcuccgagcccacccagcacaaccuccgcggcaccggccgcgaggucuccgucaccccccaguccggcaagaucaucuccuccugggagucccacaaguccggcggcgagacccgccucuga

SEQ ID NO: 126895 - RNA, 1575 nt, Artificial Sequence
  derived and/or modified CDS sequence (opt2) from glycoprotein__RABV__EF206715.1
auggucccccaggcccuccucuucgucccccuccucgucuucccccucugcuucggcaaguuccccaucuacaccauccccgacaagcucggccccuggucccccaucgacauccaccaccucuccugccccaacaaccucgucgucgaggacgagggcugcaccaaccucuccggcuucuccuacauggagcucaaggucggcuacauccucgccaucaaggucaacggcuucaccugcaccggcgucgucaccgaggccgagaccuacaccaacuucgucggcuacgucaccaccaccuucaagcgcaagcacuuccgccccacccccgacgccugccgcgccgccuacaacuggaagauggccggcgacccccgcuacgaggagucccuccacaaccccuaccccgacuaccgcuggcuccgcaccgucaagaccaccaaggagucccucgucaucaucucccccuccgucgccgaccucgaccccuacgaccgcucccuccacucccgcgucuuccccuccggcaagugcuccggcgucgccgucuccuccaccuacugcuccaccaaccacgacuacaccaucuggaugcccgagaacccccgccucggcauguccugcgacaucuucaccaacucccgcggcaagcgcgccuccaagggcuccgagaccugcggcuucgucgacgagcgcggccucuacaagucccucaagggcgccugcaagcucaagcucugcggcguccucggccuccgccucauggacggcaccugggucuccaugcagcccuccaacgagaccaaguggugcccccccgacaagcucgucaaccuccacgacuuccgcuccgacgagaucgagcaccucgucgucgaggagcucguccgcaagcgcgaggagugccucgacgcccucgaguccaucaugaccaccaaguccgucuccuuccgccgccucucccaccuccgcaagcucguccccggcuucggcaaggccuacaccaucuucaacaagacccucauggaggccgacgcccacuacaaguccguccgcaccuggaacgagauccuccccuccaagggcugccuccgcgucggcggccgcugccacccccacgucaacggcgucuucuucaacggcaucauccucggccccgacggcaacguccucauccccgagaugcaguccucccuccuccagcagcacauggagcuccucgaguccuccgucaucccccucguccacccccucgccgaccccuccaccgucuucaaggacggcgacgaggccgaggacuucgucgagguccaccuccccgacguccacaaccaggucuccggcgucgaccucggccuccccaacuggggcaaguacguccuccucuccgccggcgcccucaccgcccucaugcucaucaucuuccucaugaccugcugccgccgcgucaaccgcuccgagcccacccagcacaaccuccgcggcaccggccgcgaggucuccgucaccccccaguccggcaagaucaucuccuccugggagucccacaaguccggcggcgagacccgccucuga

SEQ ID NO: 126896 - RNA, 1575 nt, Artificial Sequence
  derived and/or modified CDS sequence (opt2) from glycoprotein__RABV__EF206716.1
auggucccccaggcccuccucuucgucccccuccucgucuucccccucugcuucggcaaguuccccaucuacaccauccccgacaagcucggccccuggucccccaucgacauccaccaccucuccugccccaacaaccucgucgucgaggacgagggcugcaccaaccucuccggcuucuccuacauggagcucaaggucggcuacauccucgccaucaaggucaacggcuucaccugcaccggcgucgucaccgaggccgagaccuacaccaacuucgucggcuacgucaccaccaccuucaagcgcaagcacuuccgccccacccccgacgccugccgcgccgccuacaacuggaagauggccggcgacccccgcuacgaggagucccuccacaaccccuaccccgacuaccgcuggcuccgcaccgucaagaccaccaaggagucccucgucaucaucucccccuccgucgccgaccucgaccccuacgaccgcucccuccacucccgcgucuuccccuccggcaagugcuccggcgucgccgucuccuccaccuacugcuccaccaaccacgacuacaccaucuggaugcccgagaacccccgccucggcauguccugcgacaucuucaccaacucccgcggcaagcgcgccuccaagggcuccgagaccugcggcuucgucgacgagcgcggccucuacaagucccucaagggcgccugcaagcucaagcucugcggcguccucggccuccgccucauggacggcaccugggucuccaugcagaccuccaacgagaccaaguggugcccccccgacaagcucgucaaccuccacgacuuccgcuccgacgagaucgagcaccucgucgucgaggagcucguccgcaagcgcgaggagugccucgacgcccucgaguccaucaugaccaccaaguccgucuccuuccgccgccucucccaccuccgcaagcucguccccggcuucggcaaggccuacaccaucuucaacaagacccucauggaggccgacgcccacuacaaguccgucggcaccuggaacgagauccuccccuccaagggcugccuccgcgucggcggccgcugccacccccacgucaacggcgucuucuucaacggcaucauccucggccccgacggcaacguccucauccccgagaugcaguccucccuccuccagcagcacauggagcuccucgaguccuccgucaucccccucguccacccccucgccgaccccuccaccgucuucaaggacggcgacgaggccgaggacuucgucgagguccaccuccccgacguccacaaccaggucuccggcgucgaccucggccuccccaacuggggcaaguacguccuccucuccgccggcgcccucaccgcccucaugcucaucaucuuccucaugaccugcugccgccgcgucaaccgcuccgagcccacccagcacaaccuccgcggcaccggccgcgaggucuccgucaccccccaguccggcaagaucaucuccuccugggagucccacaaguccggcggcgagacccgccucuga

SEQ ID NO: 126897 - RNA, 1575 nt, Artificial Sequence
  derived and/or modified CDS sequence (opt2) from glycoprotein__RABV__EF206717.1
auggucccccaggcccuccucuucgucccccuccucgucuucccccucugcuucggcaaguuccccaucuacaccauccccgacaagcucggccccuggucccccaucgacauccaccaccucuccugccccaacaaccucgucgucgaggacgagggcugcaccaaccucuccggcuucuccuacauggagcucaaggucggcuacaucuccgccaucaagaugaacggcuucaccugcaccggcgucgucaccgaggccgagaccuacaccaacuucgucggcuacgucaccaccaccuucaagcgcaagcacuuccgccccacccccgacgccugccgcgccgccuacaacuggaagauggccggcgacccccgcuacgaggagucccuccacaaccccuaccccgacuaccgcuggcuccgcaccgucaagaccaccaaggagucccucgucaucaucucccccuccgucgccgaccucgaccccuacgaccgcucccuccacucccgcgucuuccccuccggcaagugcuccggcgucgccgucuccuccaccuacugcuccaccaaccacgacuacaccaucuggaugcccgagaacccccgccucggcauguccugcgacaucuucaccaacucccgcggcaagcgcgccuccaagggcuccgagaccugcggcuucgucgacgagcgcggccucuacaagucccucaagggcgccugcaagcucaagcucugcggcguccucggccuccgccucauggacggcaccugggucgccaugcagaccuccaacgagaccaaguggugcccccccgaccagcucgucaaccuccacgacuuccgcuccgacgagaucgagcaccucgucgucgaggagcucguccgcaagcgcgaggagugccucgacgcccucgaguccaucaugaccaccaaguccgucuccuuccgccgccucucccaccuccgcaagcucguccccggcuucggcaaggccuacaccaucuucaacaagacccucauggaggccgacgcccacuacaaguccguccgcaccuggaacgagauccuccccuccaagggcugccuccgcgucggcggccgcugccacccccacgucaacggcgucuucuucaacggcaucauccucggccccgacggcaacguccucauccccgagaugcaguccucccuccuccagcagcacauggagcuccucgaguccuccgucaucccccucaugcacccccucgccgaccccuccaccgucuucaaggacggcgacgaggccgaggacuucgucgagguccaccuccccgacguccacaagcaggucuccggcgucgaccucggccuccccaacuggggcaaguacguccuccucuccgccggcgcccucaccgcccucaugcucaucaucuuccucaugaccugcugccgccgcgucaaccgcuccgagcccacccagcacaaccuccgcggcaccggccgcgaggucuccgucaccccccaguccggcaagaucaucuccuccugggaguccuacaaguccggcggcgagacccgccucuga

SEQ ID NO: 126898 - RNA, 1575 nt, Artificial Sequence
  derived and/or modified CDS sequence (opt2) from glycoprotein__RABV__EF206719.1
auggucccccaggcccuccucuucgucccccuccucgucuucccccucugcuucggcaaguuccccaucuacaccauccccgacaagcucggccccuggucccccaucgacauccaccaccucuccugccccaacaaccucgucgucgaggacgagggcugcaccaaccucuccggcuucuccuacauggagcucaaggucggcuacauccucgccaucaaggucaacggcuucaccugcaccggcgucgucaccgaggccgagaccuacaccaacuucgucggcuacgucaccaccaccuucaagcgcaagcacuuccgccccacccccgacgccugccgcgccgccuacaacuggaagauggccggcgacccccgcuacgaggagucccuccacaaccccuaccccgacuaccgcuggcuccgcaccgucaagaccaccaaggagucccucgucaucaucucccccuccgucgccgaccucgaccccuacgaccgcucccuccacucccgcgucuuccccuccggcaagugcuccggcgucgccgucuccuccaccuacugcuccaccaaccacgacuacaccaucuggaugcccgagaacccccgccucggcauguccugcgacaucuucaccaacucccgcggcaagcgcgccuccaagggcuccgagaccugcggcuucgucgacgagcgcggccucuacaagucccucaagggcgccugcaagcucaagcucugcggcguccucggccuccgccucauggacggcaccugggucuccaugcagaccuccaacgagaccaaguggugcccccccgacaagcucgucaaccuccacgacuuccgcuccgacgagaucgagcaccucgucgucgaggagcucguccgcaagcgcgaggagugccucgacgcccucgaguccaucaugaccaccaaguccgucuccuuccgccgccucucccaccuccgcaagcucguccccggcuucggcaaggccuacaccaucuucaacaagacccucauggaggccgacgcccacuacaaguccgucgagaccuggaacgagauccuccccuccaagggcugccuccgcgucggcggccgcugccacccccacgucaacggcgucuucuucaacggcaucauccucggccccgacggcaacguccucauccccgagaugcaguccucccuccuccagcagcacauggagcuccucgaguccuccgucaucccccucguccacccccucgccgaccccuccaccgucuucaaggacggcgacgaggccgaggacuucgucgagguccaccuccccgacguccacaaccaggucuccggcgucgaccucggccuccccaacuggggcaaguacguccuccucuccgccggcgcccucaccgcccucaugcucaucaucuuccucaugaccugcugccgccgcgucaaccgcuccgagcccacccagcacaaccuccgcggcaccggccgcgaggucuccgucaccccccaguccggcaagaucaucuccuccugggagucccacaaguccggcggcgagaccauccucuga

SEQ ID NO: 126899 - RNA, 1575 nt, Artificial Sequence; identical to SEQ ID NO: 126894
  derived and/or modified CDS sequence (opt2) from glycoprotein__RABV__EF206720.1

SEQ ID NO: 126900 - RNA, 1575 nt, Artificial Sequence
  derived and/or modified CDS sequence (opt2) from glycoprotein__RABV__EF437215.1
auggucccccagguccuccucuucgucccccuccucgucuucuccaugugcuucggcaaguuccccaucuacaccauccccgacaagcucggccccuggucccccaucgacauccaccaccucuccugccccaacaaccucgucgucgaggacgagggcugcaccaaccucuccggcuucuccuacauggagcucaaggucggcuacaucuccgccaucaaggucaacggcuucaccugcaccggcgucgucaccgaggccgagaccuacaccaacuucgucggcuacgucaccaccaccuucaagcgcaagcacuuccgccccacccccgacgccugccgcgccgccuacaacuggaagauggccggcgacccccgcuacgaggagucccuccacaaccccuaccccgacuaccacuggcuccgcaccgucaagaccaccaaggagucccucgucaucaucucccccuccgucgccgaccucgaccccuacgacaagucccuccacucccgcgucuuccccuccggcaagugcuccggcaucaccaucuccuccaccuacugcuccaccaaccacgacuacaccaucuggaugcccgagaacccccgccucggcaccuccugcgacaucuucaccaacucccgcggcaagcgcgccuccaagggcggcaagaccugcggcuucgucgacgagcgcggccucuacaagucccucaagggcgccugcaagcucaagcucugcggcguccucggccuccgccucauggacggcaccugggucgccaugcagaccuccgacgagaccaaguggugcccccccgaccagcucgucaaccuccacgacuuccgcuccgacgagaucgagcaccucgucgucgaggagcucgucaagaagcgcgaggagugccucgacgcccucgaguccaucauggccaccaaguccgucuccuuccgccgccucucccaccuccgcaagcucguccccggcuucggcaaggccuacaccaucuucaacaagacccucauggaggccgacgcccacuacaaguccguccgcaccuggaacgagaucauccccuccaagggcugccuccgcgucggcggccgcugccacccccacgucaacggcgucuucuucaacggcaucauccucggccccgacggccacguccucauccccgagaugcaguccucccuccuccagcagcacauggagcuccucgaguccuccgucaucccccucaugcacccccucgccgaccccuccaccgucuucaaggacggcgacgaggccgaggacuucgucgagguccaccuccccgacguccacaagcagaucuccggcgucgaccucggccuccccuccuggggcaaguacguccucgucuccgccggcguccucgucguccucaugcucaccaucuucaucaugaccugcugcggccgcguccaccgccccaaguccacccagcacggccucggcggcaccggccgcaaggucuccgucaccucccaguccggcaaggucaucuccuccugggaguccuacaaguccggcggcgagacccgccucuga

SEQ ID NO: 126901 - RNA, 1575 nt, Artificial Sequence
  derived and/or modified CDS sequence (opt2) from glycoprotein__RABV__EF556198.1
augaccccccagguccuccucuucgucccccuccucgucuucuccuccugcuucggcaaguuccccaucuacaccauccccgacaagcucggccccuggucccccaucgacauccaccaccucuccugccccaacaaccucgucgucgaggacgagggcugcaccaaccucuccggcuucuccuacauggagcucaaggucggcuacaucuccgccaucaaggucaacggcuucaccugcaccggcgucgucaccgaggccgagaccuacaccaacuucgucggcuacgucaccaccaccuucaagcgcaagcacuuccgccccaugcccgacgccugccgcgccgccuacaacuggaagauggccggcgacccccgcuacgaggagucccuccacaaccccuaccccgacuaccacuggcuccgcaccgucaagaccaccaaggagucccucgucaucaucucccccuccgucgccgaccucgaccccuacgacaagucccuccacucccgcgucuuccccggcggcaagugcuccggcaucaccgucuccuccgccugcugcuccaccaaccacgacuacaccaucuggaugcccgagaacccccgccucggcaccuccugcgacaucuucaccaacucccgcggcaagcgcgccuccaagggcggcaagaccugcggcuucgucgacgagcgcggccucuacaagucccucaagggcgccugcaagcucaagcucugcggcguccucggccuccgccucauggacggcaccugggucgccauccagaccuccgacgagaucaaguggugcucccccgaccagcucgucaaccuccacgacuuccacuccgacgagaucgagcaccucgucgucgaggagcucgucaagaagcgcgaggagugccucgacgcccucgagaccaucaugaccaccaaguccgucuccuuccgccgccucucccaccuccgcaagcucguccccggcuccggcaaggccuacaccaucuucaacaagacccucauggaggccgacgcccacuacaaguccauccgcaccuggaacgagaucauccccuccaagggcugccuccgcgucggcggccgcugccacccccacgucaacggcgucuucuucaacggcaucauccucggccccgacggccacguccucauccccgagaugcaguccucccuccuccaccagcacauggagcuccucgaguccuccgucaucccccucaugcacccccucgccgaccccuccaccgucuucaaggacggcgacgaggccgaggacuucgucgagguccaccuccccgacguccacaagcagaucuccggcgucgaccucggccuccccaacuggggcaaguacguccucaucuccgccggcgcccucaccgcccucaugcucaccaucuuccucaugaccugcugccgcaagaccaaccgcgccgaguccauccagcacucccccggcgagaccggccgcaaggucuccgucaccucccacaacggccgcgucaucuccuccugggaguccuacaaguccggcuccgagaccaagcucuga

SEQ ID NO: 126902 - RNA, 1575 nt, Artificial Sequence
  derived and/or modified CDS sequence (opt2) from glycoprotein__RABV__EF564174.1
augaucccccaggcccuccucuucgucccccuccucgucuucccccucugcuucggcaaguuccccaucuacaccauccccgacaagcucggccccuggucccccaucgacauccacaaccucuccugccccaacaaccucgucgucgaggacgagggcugcaccaaccucuccggcuucuccuacauggagcucaaggucggcuacaucuccgccaucaaggucaacggcuucaccugcaccggcgucgucaccgaggccgagaccuacaccaacuucgucggcuacgucaccaccaccuucaagcgcaagcacuuccgccccacccccgacgccugccgcuccgccuacaacuggaagauggccggcgacccccgcuacgaggagucccuccacaaccccuaccccgacuaccacuggcuccgcaccgucaagaccaccaaggaguccgucgucaucaucucccccuccgucgccgaccucgaccccuacgacaagucccuccacucccgcgucuucccccgcggcaagugcuccggcaucaccgucuccuccgccuacugcuccaccaaccacgacuacaccaucuggaugcccgagaacccccgccucggcaccuccugcgacaucuucaccaacucccgcggcaagcgcgccuccaagggcuccaagaccugcggcuucgucgacgagcgcggccucuacaagucccucaagggcgccugcaagcucaagcucugcggcguccucggccuccgccucauggacggcaccugggucgccauccagaccuccaacgagaccaaguggugcccccccgaccagcucgucaaccuccacgacuuccacuccgacgagaucgagcaccucgucgucgaggagcucgucgagaagcgcgaggagugccucgacgcccucgaguccaucaugaccaccaaccccgucuccuuccgccgccucuccccccuccgcaagcucguccccggcuucggcaaggccuacaccaucuucaacaagacccucauggaggccgacgcccacuacaaguccguccagaccugggacgagaucauccccuccaagggcugccuccgcgucggcgcccgcugccacccccacgucaacggcgucuucuucaacggcaucauccucggccccgacggccacguccucauccccgagaugcaguccucccuccuccagcagcacauggagcuccucgaguccuccgucaucccccucaugcacccccucgccgaccccuccaccgucuucaaggacggcgacgaggucgaggacuucgucgagguccaccuccccgacguccacaagcaggucuccggcgucgaccucggccuccccaacuggggcaaggacguccucaugggcgccggcguccucaccgcccucaugcucaugaucuuccucaugaccugcugccgccgcaccaaccgcgccgaguccauccagcacucccucggcgagaccggccgcaaggucuccgucaccucccaguccggccgcgucaucuccuccugggaguccuacaaguccggcggcgagaccaagcucuga

SEQ ID NO: 126903 - RNA, 1581 nt, Artificial Sequence
  derived and/or modified CDS sequence (opt2) from glycoprotein__RABV__EF614261.1
augcccucccaggccgucuuccucguccucaccaccgucuucucccagugcgucggcaaguuccccaucuacaccauccccgacaagcucggccccuggucccccaucgacauccaccaccucuccugccccaacaaccucgucgucgaggacgacggcugcaccacccucuccggcuucaccuacauggagcucaaggucggcuacaucaccaccaucaaggucgacggcuucaccugcaccggcaucgucaccgaggccgagaccuacaccaacuucgucggcuacgucaccaccaccuucaagcgcaagcacuuccgccccggccccuccgccugccgcgacgccuacaacuggaaggccgccggcgacccccgcuacgaggagucccuccacaaccccuaccccgacucccacuggcuccgcaccgucaccaccaccaaggagucccuccucaucaucucccccuccgucgucgacauggacgccuacgacaagucccuccucuccaagaucuuccccaacggcaagugccccggcgucuccaucgccucccccuucugcuccaccaaccacgacuacaccaucuggaugcccgagaacaccaagaccggcauguccugcgacaucuucaccaccuccaagggcaagcgcgccaccaaggacggcaagcucugcggcuucgucgacgagcgcggccucuacaagucccucaagggcuccugcaagcucaagcucugcggcgucuccggccuccgccucauggacggcuccugggucuccauccagaaccacgaggaggccaaguggugcccccccgaccagcucgucaacguccacgacuuccacuccgacgagaucgagcaccucaucgucgaggagcucgucaagaagcgcgaggagugccucgacgcccucgaguccaucaugaccaccaaguccaucuccuuccgccgccucucccaccuccgcaagcucguccccggcuucggcaaggccuacaccaucaucaacaagacccucauggaggccgacgcccacuacaaguccauccgcgagugguccgagaucauccccuccaagggcugccucgucgccggcggccgcugcuaccaccaccacaacggcgucuucuucaacggcaucauccucucccccgacggccacguccucauccccgagaugcaguccgcccuccuccagcagcacaucgagcuccucgaguccuccgucaucccccucaugcacccccucgccgaccccuccaccgucuucaagggcgacgacggcgccgaggacuucgucgagguccaccuccccgacguccagaagcagaucuccggcaucgaccucggccuccccgaguggaagcgcuacuuccucaucggcgucgccgcccucacccucuucgcccucaccaucuucgucgucgucugcugccgccgcguccgccgccgcgagcgcgccaagcccaaccccgucgagcucauccgcaaggucuccgucaccucccaguccggcaaggucauccccuccugggaguccuacaaggucgaggccgagggccagucccaggccuga

SEQ ID NO: 126904 - RNA, 1575 nt, Artificial Sequence; identical to SEQ ID NO: 126879
  derived and/or modified CDS sequence (opt2) from glycoprotein__RABV__EF643518.1

SEQ ID NO: 126905 - RNA, 1575 nt, Artificial Sequence
  derived and/or modified CDS sequence (opt2) from glycoprotein__RABV__EU008924.1
augaucccccaggcccuccucuucgucccccuccucgucuucuccuccugcuucggcaaguuccccaucuacaccauccccgacaagcucggccccuggucccccaucgacauccaccaccucuccugccccaacaaccucgucgucgaggacgagggcugcaccaaccucuccggcuucuccuacauggagcucaaggucggcuacaucuccgccaucaaggucaacggcuucaccugcaccggcgucgucaccgaggccgagaccuacaccaacuucgucggcuacgucaccaccaccuucaagcgcaagcacuuccgccccaugcccggcgccugccgcgccgccuacaacuggaagauggccggcgacccccgcuacgaggagucccuccacaaccccuaccccgacuaccacuggcuccgcaccgucaagaccaccaaggagucccucgucaucaucucccccuccgucgccgaccucgaccccuacgacaagucccuccacucccgcgucuuccccuccggcaagugcuccggcaucaccgucuccuccaccugcugcuccaccaaccacgacuacaccaucuggaugcccgagaacccccgccucggcaccuccugcgacaucuucaccaacucccgcggcaagcgcgccuccaagggcggcaagaccugcggcuucgucgacgagcgcggccucuacaagucccucaagggcgccugcaagcucaagcucugcggcguccucggccuccgccucauggacggcaccugggucgccauccagaccuccgacgagaucaaguggugcucccccgaccagcucgucaaccuccacgacuuccacuccgacgagaucgagcaccucgucgucgaggagcucgucaagaagcgcgaggagugccucgacgcccucgagaccaucaugaccaccaaguccgucuccuuccgccgccucucccaccuccgcaagcucguccccggcuucggcaaggccuacaccaucuucaacaagacccucauggaggccgacgcccacuacaaguccauccgcaccuggaacgagaucauccccuccaagggcugccuccgcgucggcggccgcugccacccccacgucaacggcgucuucuucaacggcaucauccucggccccgacggccacguccucauccccgagaugcaguccucccuccuccaccagcacauggagcuccucgaguccuccgucaucccccucaugcacccccucgccgaccccuccaccgucuucaaggacggcgacgaggccgaggacuucgucgagguccaccuccccgacguccacaagcagaucuccggcgucgaccucggccuccccaacuggggcaaguacguccucaucuccgucggcgcccucaccgcccucauguccaugaucuuccucaugaccugcugccgcaagaccaaccgcgccgaguccauccagcacucccccggcgagaccggccgcaaggucuccgucaccucccacaacggccgcgucaucuccuccugggaguccuacaaguccggcggcgagaccaagcucuga

SEQ ID NO: 126906 - RNA, 1575 nt, Artificial Sequence
  derived and/or modified CDS sequence (opt2) from glycoprotein__RABV__EU008925.1
augaucccccaggcccuccucuucgucccccuccucgucuucucccucugcuucggcaaguuccccaucuacaccauccccgacaagcucggccccuggucccccaucgacauccaccaccucuccugccccaacaaccucgucgucgaggacgagggcugcaccaaccucuccggcuucuccuacauggagcucaaggucggcuacaucuccgccaucaaggucaacggcuucaccugcaccggcgucgucaccgaggccgagaccuacaccaacuucgucggcuacgucaccaccaccuucaagcgcaagcacuuccgccccaugcccggcgccugccgcgccgccuacaacuggaagauggccggcgacccccgcuacgaggagucccuccacaaccccuaccccgacuaccacuggcuccgcaccgucaagaccaccaaggagucccucgucaucaucucccccuccgucgccgaccucgaccccuacgacaagucccuccacucccgcgucuuccccggcggcaagugcuccggcaucaccgucuccuccaccugcugcuccaccaaccacgacuacaccaucuggaugcccgagaacccccgccucggcaccuccugcgacaucuucaccaacucccgcggcaagcgcgccuccaagggcggcaagaccugcggcuucgucgacgagcgcggccucuacaagucccucaagggcgccugcaagcucaagcucugcggcguccucggccuccgccucauggacggcaccugggucgccauccagaccuccgacgagaucaaguggugcucccccgaccagcucgucaaccuccacgacuuccacuccgacgagaucgagcaccucgucgucgaggagcucgucaagaagcgcgaggagugccucgacgcccucgagaccaucaugaccaccaaguccgucuccuuccgccgccucucccaccuccgcaagcucguccccggcuucggcaaggccuacaccaucuucaacaagacccucauggaggccgacgcccacuacaaguccauccgcaccuggaacgagaucauccccuccaagggcugccuccgcgucggcggccgcugccacccccacgucaacggcgucuucuucaacggcaucauccucggccccgacggccacguccucauccccgagaugcaguccucccuccuccaccagcacauggagcuccucgaguccuccgucaucccccucaugcacccccucgccgaccccuccaccgucuucaaggacggcgacgaggccgaggacuucgucgagguccaccuccccgacguccacaagcagaucuccggcgucgaccucggccuccccaacuggggcaaguacguccucaucuccgccggcgcccucaccgcccucauguccaugaucuuccucaugaccugcugccgcaagaccaaccgcgccggcuccauccagcacucccccggcgagaccggccgcaaggucuccgucaccucccacaacggccgcgucaucuccuccugggaguccuacaaguccggcggcgagaccaagcucuga

SEQ ID NO: 126907 - RNA, 1575 nt, Artificial Sequence
  derived and/or modified CDS sequence (opt2) from glycoprotein__RABV__EU008926.1
augaucccccaggcccuccucuucgucccccuccucgucuucuccuccugcuucggcaaguuccccaucuacaccauccccgacaagcucggccccuggucccccaucgacauccaccaccucuccugccccaacaaccucgucgucgaggacgagggcugcaccaaccucuccggcuucuccuacauggagcucaaggucggcuacaucuccgccaucaaggucaacggcuucaccugcaccggcgucgucaccgaggccgagaccuacaccaacuucgucggcuacgucaccaccaccuucaagcgcaagcacuuccgccccaugcccggcgccugccgcgccgccuacaacuggaagauggccggcgacccccgcuacgaggagucccuccacaaccccuaccccgacuaccacuggcuccgcaccgucaagaccaccaaggagucccucgucaucaucucccccuccgucgccgaccucgaccccuacgacaagucccuccacucccgcgucuuccccggcggcaagugcuccggcaucaccgucuccuccaccugcugcuccaccaaccacgacuacaccaucuggaugcccgagaacccccgccucggcaccuccugcgacaucuucaccaacucccgcggcaagcgcgccuccaagggcggcaagaccugcggcuucgucgacgagcgcggccucuacaagucccucaagggcgccugcaagcucaagcucugcggcguccucggccuccgccucauggacggcaccugggucgccauccagaccuccgacgagaucaaguggugcucccccgaccagcucgucaaccuccacgacuuccacuccgacgagaucgagcaccucgucgucgaggagcucgucaagaagcgcgaggagugccucgacgcccucgagaccaucaugaccaccaaguccgucuccuuccgccgccucucccaccuccgcaagcucguccccggcuucggcaaggccuacaccaucuucaacaagacccucauggaggccgacgcccacuacaaguccauccgcaccuggaacgagaucauccccuccaagggcugccuccgcgucggcggccgcugccacccccacgucaacggcgucuucuucaacggcaucauccucggccccgacggccacguccucauccccgagaugcaguccucccuccuccagcagcacauggagcuccucgaguccuccgucaucccccucaugcacccccucgccgaccccuccaccgucuucaaggacggcgacgaggccgaggacuucgucgagguccaccuccccgacguccacaagcagaucuccggcgucgaccucggccuccccaacuggggcaaguacguccucauguccgccggcgcccucaccgcccucauguccaugaucuuccucaugaccugcugccgcaagaccaaccgcgccgaguccauccagcacucccccggcgagaccggccgcaaggucuccgucaccucccacaacggccgcgucaucuccuccugggaguccuacaaguccggcggcgagaccaagcucuga

SEQ ID NO: 126908 - RNA, 1575 nt, Artificial Sequence
  derived and/or modified CDS sequence (opt2) from glycoprotein__RABV__EU008927.1
augaucccccaggcccuccucuucgucccccuccucgucuuccucuccugcuucggcaaguuccccaucuacaccauccccgacaagcucggccccuggucccccaucgacauccaccaccucuccugccccaacaaccucgucgucgaggacgagggcugcaccaaccucuccggcuucuccuacauggagcucaaggucggcuacaucuccgccaucaaggucaacggcuucaccugcaccggcgucgucaccgaggccgagaccuacaccaacuucgucggcuacgucaccaccaccuucaagcgcaagcacuuccgccccaugcccgacgccugccgcgccgccuacaacuggaagauggccggcgacccccgcuacgaggagucccuccacaaccccuaccccgacuaccacuggcuccgcaccgucaagaccaccaaggagucccucgucaucaucucccccuccgucgccgaccucgaccccuacgacaagucccuccacucccgcgucuuccccggcggcaagugcuccggcaucaccgucuccuccaccugcugcuccaccaaccacgacuacaccaucuggaugcccgagaacccccgccucggcaccuccugcgacaucuucaccaacucccgcggcaagcgcgccuccaagggcuccaagaccugcggcuucgucgacgagcgcggccucuacaagucccucaagggcgccugcaagcucaagcucugcggcguccucggccuccgccucauggacggcaccugggucgccauccagaccuccgacgagaucaaguggugcucccccgaccagcucgucaaccuccacgacuuccacuccgacgagaucgagcaccucgucgucgaggagcucgucaagaagcgcgaggagugccucgacgcccucgagaccaucaugaccaccaaguccgucuccuuccgccgccucucccaccuccgcaagcucguccccggcuucggcaaggccuacaccaucuucaacaagacccucauggaggccgacgcccacuacaaguccauccgcaccuggaacgagaucauccccuccaagggcugccuccgcgucggcggccgcugccacccccacgucaacggcgucuucuucaacggcaucauccucggccccgacggccacguccucauccccgagaugcaguccucccuccuccaccagcacauggagcuccucgaguccuccgucaucccccucaugcacccccucgccgaccccuccaccgucuucaaggacggcgacgaggccgaggacuucgucgagguccaccuccccgacguccacaagcagaucuccggcgucgaccucggccuccccaacuggggcaaguacguccucaucuccgccggcgcccucaccgcccucauguccaugaucuuccucaugaccugcugccgcaagaccaaccgcgccgaguccauccagcacucccccggcgagaccggccgcaaggucuccgucaccucccacaacggccgcgucaucuccuccugggaguccuacaaguccggcggcgagaccaagcucuga

SEQ ID NO: 126909 - RNA, 1575 nt, Artificial Sequence
  derived and/or modified CDS sequence (opt2) from glycoprotein__RABV__EU008928.1
augaucccccagguccuccucuucgucccccuccucgucuucuccuccugcuucggcaaguuccccaucuacaccauccccgacaagcucggccccuggucccccaucgacauccaccaccucuccugccccaacaaccucgucgucgaggacgagggcugcaccaaccucuccggcuucuccuacauggagcucaaggucggcuacaucuccgccaucaaggucaacggcuucaccugcaccggcgucgucaccgaggccgagaccuacaccaacuucgucggcuacgucaccaccaccuucaagcgcaagcacuuccgccccaugcccgacgccugccgcgccgccuacaacuggaagauggccggcgacccccgcuacgaggagucccuccacaaccccuaccccgacuaccacuggcuccgcaccgucaagaccaccaaggagucccucgucaucaucucccccuccgucgccgaccucgaccccuacgacaagucccuccacucccgcgucuuccccuccggcaagugcuccggcaucaccgucuccuccaccugcugcuccaccaaccacgacuacaccaucuggaugcccgagaacccccgccucggcaccuccugcgacaucuucaccaacucccgcggcaagcgcgccuccaagggcggcaagaccugcggcuucgucgacgagcgcggccucuacaagucccucaagggcgccugcaagcucaagcucugcggcguccucggccuccgccucauggacggcaccugggucgccauccagaccuccgacgagaucaaguggugcccccccgaccagcucgucaaccuccacgacuuccacuccgacgagaucgagcaccucgucgucgaggagcucgucaagaagcgcgaggagugccucgacgcccucgaguccaucaugaccaccaaguccgucuccuuccgccgccucucccaccuccgcaagcucguccccggcuucggcaaggccuacaccaucuucaacaagacccucauggaggccgacgcccacuacaaguccauccgcaccuggaacgagaucauccccuccaagggcugccuccgcgucggcggccgcugccacccccacgucaacggcgucuucuucaacggcaucauccucggccccgacggccacguccucauccccgagaugcaguccucccuccuccaccagcacauggagcuccucgaguccuccgucaucccccucaugcacccccucgccgaccccuccaccgucuucaaggacggcgacgaggccgaggacuucgucgagguccaccuccccgacguccacaagcagaucuccggcgucgaccucggccuccccaacuggggcaaguacguccucaucuccgccggcgcccucaccgcccucauguccaugaucuuccucaugaccugcugccgcaagaccucccgcgccgaguccacccagcacucccccggcgagaccggccgcaaggucuccgucaccucccacaacggccgcgucaucuccuccugggaguccuacaaguccggcggcgagaccaagcucuga

SEQ ID NO: 126910 - RNA, 1575 nt, Artificial Sequence
  derived and/or modified CDS sequence (opt2) from glycoprotein__RABV__EU086128.1
auggucccccagguccuccucuucgucccccuccucgucuucuccaugugcuucggcaaguuccccaucuacaccauccccgacaagcucggccccuggucccccaucgacauccaccaccucuccugccccaacaaccucgucgucgaggacgagggcugcaccaaccucuccggcuucuccuacauggagcucaaggucggcuacaucuccgccaucaaggucaacggcuucaccugcaccggcgucgucaccgaggccgagaccuacaccaacuucgucggcuacgucaccaccaccuucaagcgcaagcacuuccgccccacccccgacgccugccgcgccgccuacaacuggaagauggccggcgacccccgcuacgaggagucccuccacaaccccuaccccgacuaccacuggcuccgcaccgucaagaccaccaaggagucccucgucaucaucucccccuccgucgccgaccucgaccccuacgacaagucccuccacucccgcgucuuccccuccggcaagugccucggcaucaccaucuccuccaccuacugcuccaccaaccacgacuacaccaucuggaugcccgagaacccccgccucggcaccuccugcgacaucuucaccaacucccgcggcaagcgcgccuccaagggcuccaagaccugcggcuucgucgacgagcgcggccucuacaagucccucaagggcgccugcaagcucaagcucugcggcguccucggccuccgccucauggacggcaccugggucgccaugcagaccuccgacgagaccaaguggugcccccccgaccagcucgucaaccuccacgacuuccgcuccaacgagaucgagcaccucgucgucgaggagcucgucaagaagcgcgaggagugccucgacgcccucgaguccaucaugaccaccaaguccgucuccuuccgccgccucucccaccuccgcaagcucguccccggcuucggcaaggccuacaccaucuucaacaagacccucauggaggccgacgcccacuacaaguccguccgcaccuggaacgagaucauccccuccaagggcugccuccgcgucggcggccgcugccacccccacgucaacggcgucuucuucaacggcaucauccucggccccgacggccacguccucauccccgagaugcaguccucccuccuccagcagcacauggaccuccucgaguccuccgucaucccccucaugcacccccucgccgaccccuccaccgucuucaaggacggcgacgaggccgaggacuucgucgagguccaccuccccgacguccacaagcagaucuccggcgucgaccucggccuccccuccuggggcaaguacguccucgucuccgccggcguccucgucguccucaugcucaccaucuucaucaugaccugcugcggccgcguccaccgccccaaguccacccagcacucccucggcggcaccggccgcaaggucuccgucaccucccaguccggcaaggucaucuccuccugggaguccuacaagcgcggcggcgagacccgccucuga

SEQ ID NO: 126911 - RNA, 1575 nt, Artificial Sequence
  derived and/or modified CDS sequence (opt2) from glycoprotein__RABV__EU086129.1
augaucccccaggcccuccucuucguccccuuccucgccuucucccucugcuucggcaaguuccccaucuacaccauccccgacaagcucggccccuggucccccaucgacauccaccaccucuccugccccaacaaccucgucgucgaggacgagggcugcaccaaccucuccggcuucuccuacauggagcucaaggucggcuacaucuccgccaucaaggucaacggcuucaccugcaccggcgucgucaccgaggccgagaccuacaccaacuucaucggcuacgucaccaccaccuuccgccgcaagcacuuccgccccacccccgacgccugccgcgccgccuacaacuggaagauggccggcgacccccgcuacgaggagucccuccacaaccccuaccccgacuaccacuggcuccgcaccgucaagaccaccaaggagucccucgucaucaucucccccuccgucuccgaccucgaccccuacgacaagucccuccacucccgcgucuuccccuccggcaagugcuccggcaucaccgucuccuccaccuacugccccaccaaccacgacuacaccaucuggaugcccgagaacccccgccucggcaccuccugcgacaucuucaccaacucccgcggcaagcgcgccuccaagggcuccaagaccugcggcuucgucgacgagcgcggccucuacaagucccucaagggcgccugcaagcucaagcucugcggcguccucggccuccgccucauggacggcaccugggccgccauccagaccuccgacgaggccaaguggugcccccccgaccagcucgucaacauccacgacuuccgcuccgacgagaucgagcaccucgucgucgaggagcucgucaagaagcgcgaggagugccucgacgcccucgaguccaucaugaccaccaaguccgucuccuuccgccgccucucccaccuccgcaagcucguccccggcuucggcaaggccuacaccaucuucaacaagacccucauggaggccgacgcccacuacaaguccguccgcaccuggaacgagaucauccccuccaagggcugccuccgcgucggcggccgcugccacccccacgucaacggcgucuucuucaacggcaucauccucggccccgacggccacguccucauccccgagaugcaguccucccuccuccagcagcacauggagcuccucgaguccuccgucaucccccucaugcacccccucgccgaccccuccaccgucuucaaggacggcgacgaggccgaggacuucgucgagguccaccuccccgacguccacaagcaggucuccggcgucgaccucggccuccccuccuggggcaaguacguccucauguccgucggcgcccucaucguccucaugcucaugaucuuccucaccaccugcugccgcaaggccaacggcgccgaguccauccgccaccgccucggcgagaccggccgcaaggucuccgucaccucccagaacggccgcgucaucuccuccugggaguccuacaaguccggcggcgagaccaagcucuga

SEQ ID NO: 126912 - RNA, 1575 nt, Artificial Sequence
  derived and/or modified CDS sequence (opt2) from glycoprotein__RABV__EU086130.1
augaucccccaggcccuccucuucgucccccuccucgucuucucccucugcuacggcaaguuccccaucuacaccauccccgacaagcucggccccuggucccccaucgacauccaccaccucuccugccccaacaaccucgucgucgaggacgagggcugcaccaaccucuccggcuucuccuacauggagcucaaggucggcuacaucuccgccaucaaggucaacggcuucaccugcaccggcgucgucaccgaggccgagaccuacaccaacuucgucggcuacgucaccaccaccuucaagcgcaagcacuuccgccccacccccgacgccugccgcgccgccuacaacuggaagauggccggcgacccccgcuacgaggagucccuccacaaccccuaccccgacuaccacuggcuccgcaccgucaagaccaccaaggagucccucgucaucaucucccccuccgucuccgaccucgaccccuacgacaagucccuccacucccgcgucuuccccuccggcaagugcuccggcaucaccgucuccuccaccuacugccccaccaaccacgacuacaccaucuggaugcccgagaacccccgccucggcaccuccugcgacaucuucaccaacucccgcggcaagcgcgccuccaagggcuccaagaccugcggcuucgucgacgagcgcggccucuacaagucccucaagggcgccugcaagcucaagcucugcggcguccucggccuccgccucauggacggcaccugggccgccauccagaccuccgacgaggccaaguggugcccccccgaccagcucgucaacauccacgacuuccgcuccgacgagaucgagcaccucgucgucgaggagcucgucaagaagcgcgaggagugccucgacgcccucgaguccaucaugaccaccaaguccgucuccuuccgccgccucucccaccuccgcaagcucguccccggcuucggcaaggccuacaccaucuucaacaagacccucauggaggccgacgcccacuacaaguccguccgcaccuggaacgagaucauccccuccaagggcugccuccgcgucggcggccgcugccacccccacgucaacggcgucuucuucaacggcaucauccucggccccgacggccacguccucauccccgagaugcaguccucccuccuccagcagcacauggagcuccucgaguccuccgucaucccccucaugcacccccucgccgaccccuccaccgucuucaaggacggcgacgaggccgaggacuucgucgagguccaccuccccgacguccacaagcaggucuccggcgucgaccucggccuccccuccuggggcaaguacguccucauguccgucggcgccaugaucgcccucaugcucgucaucuuccucaccaccugcugccgcaaggucaacggcgccgagaccauccagcaccgccucggcgagaccggccgcaaggucuccgucaccucccaguccggccgcgucaucuccuccugggaguccuacaaguccggcggcgagaccaagcucuga

SEQ ID NO: 126913 - RNA, 1575 nt, Artificial Sequence
  derived and/or modified CDS sequence (opt2) from glycoprotein__RABV__EU086131.1
augaucccccaggcccuccucuucgucccccuccucgucuucucccucugccucggcaaguuccccaucuacaccauccccgacaagcucggccccuggucccccaucgacauccaccaccucuccugccccaacaaccucgucgucgaggacgagggcugcaccaaccucuccggcuucuccuacauggagcucaaggucggcuacaucuccgccaucaaggucaacggcuucaccugcaccggcgucgucaccgaggccgagaccuacaccaacuucgucggcuacgucaccaccaccuucaagcgcaagcacuuccgccccacccccgacgccugccgcgccgccuacaacuggaagauggccggcgacccccgcuacgaggagucccuccacaaccccuaccccgacuaccacuggcuccgcaccgucaagaccaccaaggagucccucgucaucaucucccccuccgucuccgaccucgaccccuacgacaagucccuccacucccgcgucuuccccggcggcaagugcuccggcaucaccgucuccuccaccuacugccccaccaaccacgacuacaccaucuggaugcccgagaacccccgccucggcaccuccugcgacaucuucaccaacucccgcggcaagcgcgccuccaagggcuccaagaccugcggcuucgucgacgagcgcggccucuacaagucccucaagggcgccugcaagcucaagcucugcggcguccucggccuccgccucauggacggcaccugggccgccauccagaccuccgacgaggccaaguggugcccccccgaccagcucgucaacauccacgacuuccgcuccgacgagaucgagcaccucgucgucgaggagcucgucaagaagcgcgaggagugccucgacgcccucgaguccaucaugaccaccaaguccgucuccuuccgccgccucucccaccuccgcaagcucguccccggcuucggcaaggccuacaccaucuucaacaagacccucauggaggccgacgcccacuacaaguccguccgcaccuggaacgagaucauccccuccaagggcugccuccgcgucggcggccgcugccacccccacgucaacggcgucuucuucaacggcaucauccucggccccgacggccacguccucauccccgagaugcaguccucccuccuccagcagcacauggagcuccucgaguccuccgucaucccccucaugcacccccucgccgaccccuccaccgucuucaaggacggcgacgaggccgaggacuucgucgagguccaccuccccgacguccacaagcaggucuccggcgucgaccucggccuccccuccuggggcaaguacguccucauguccgucggcgccaugaucgcccucaugcucaugaucuuccucaccaccugcugccgcaaggccaacggcgccgagaccauccagcaccgccucggcgagaccggccgcaaggucuccgucaccucccaguccggccgcgucaucuccuccugggaguccuacaaguccggcggcgagaccaagcucuga

SEQ ID NO: 126914 - RNA, 1575 nt, Artificial Sequence
  derived and/or modified CDS sequence (opt2) from glycoprotein__RABV__EU086132.1
augaucccccaggcccuccucuucgucccccuccucgucuucucccucugcuucggcaaguuccccaucuacaccauccccgacaagcucggccccuggucccccaucgacauccaccaccucuccugccccaacaaccucgucgucgaggacgagggcugcaccaaccucuccggcuucuccuacauggagcucaaggucggcuacaucuccgccaucaaggucaacggcuucaccugcaccggcgucgucaccgaggccgagaccuacaccaacuucgucggcuacgucaccaccaccuucaagcgcaagcacuuccgccccacccccgacgccugccgcgccgccuacaacuggaagauggccggcgacccccgcuacgaggagucccuccacaaccccuaccccgacuaccacuggcuccgcaccgucaagaccaccaaggagucccucgucaucaucucccccuccgucuccgaccucgaccccuacgacaagucccuccacucccgcgucuuccccuccggcaagugcuccggcaucaccgucuccuccaccuacugccccaccaaccacgacuacaccaucuggaugcccgagaacccccgccucggcaccuccugcgacaucuucaccaacucccgcggcaagcgcgccuccaagggcuccaagaccugcggcuucgucgacgagcgcggccucuacaagucccucaagggcgccugcaagcucaagcucugcggcguccucggccuccgccucauggacggcaccugggccgccauccagaccuccgacgaggccaaguggugcccccccgaccagcucgucaacauccacgacuuccgcuccgacgagaucgagcaccucgucgucgaggagcucgucaagaagcgcgaggagugccucgacgcccucgaguccaucaugaccaccaaguccgucuccuuccgccgccucucccaccuccgcaagcucguccccggcuucggcaaggccuacaccaucuucaacaagacccucauggaggccgacgcccacuacaaguccguccgcaccuggaacgagaucauccccuccaagggcugccuccgcgucggcggccgcugccacccccacgucaacggcgucuucuucaacggcaucauccucggccccgacggccacguccucauccccgagaugcaguccucccuccuccagcagcacauggagcuccucgaguccuccgucaucccccucaugcacccccucgccgaccccuccaccgucuucaaggacggcgacgaggccgaggacuucgucgagguccaccuccccgacguccacaagcaggucuccggcgucgaccucggccuccccuccuggggcaaguacguccucauguccgucggcgccaugaucgcccucaugcucaugauccuccucaccaccugcugccgcaaggucaacggcgccgagaccauccagcaccgccucggcgagaccggccgcaaggucuccgucaccucccaguccggccgcgucaucuccuccugggaguccuacaaguccggcggcgagaccaagcucuga

SEQ ID NO: 126915 - RNA, 1575 nt, Artificial Sequence
  derived and/or modified CDS sequence (opt2) from glycoprotein__RABV__EU086133.1
augaucccccaggcccuccucuucgucccccuccucgucuucucccucugcuucggcaaguuccccaucuacaccauccccgacaagcucggccccuggucccccaucgacauccaccaccucuccugccccaacaaccucgucgucgaggacgagggcugcaccaaccucuccggcuucuccuacauggagcucaaggucggcuacaucuccgccaucaaggucaacggcuucaccugcaccggcgucgucaccgaggccgagaccuacaccaacuucgucggcuacgucaccaccaccuucaagcgcaagcacuuccgccccacccccgacgccugccgcgccgccuacaacuggaagauggccggcgacccccgcuacgaggagucccuccacaaccccuaccccgacuaccacuggcuccgcaccgucaagaccaccaaggagucccucgucaucaucucccccuccgucuccgaccucgaccccuacgacaagucccuccacucccgcgucuuccccuccggcaagugcuccggcaucaccgucuccuccaccuacugccccaccaaccacgacuacaccaucuggaugcccgagaacccccgccucggcaccuccugcgacaucuucaccaacucccgcggcaagcgcgccuccaagggcuccaagaccugcggcuucgucgacgagcgcggccucuacaagucccucaagggcgccugcaagcucaagcucugcggcguccucggccuccgccucauggacggcaccugggccgccauccagaccuccgacgaggccaaguggugcccccccgaccagcucgucaacauccacgacuuccgcuccgacgagaucgagcaccucgucgucgaggagcucgucaagaagcgcgaggagugccucgacgcccucgaguccaucaugaccaccaaguccgucuccuuccgccgccucucccaccuccgcaagcucguccccggcuucggcaaggccuacaccaucuucaacaagacccucauggaggccgacgcccacuacaaguccguccgcaccuggaacgagaucauccccuccaagggcugccuccgcgucggcggccgcugccacccccacgucaacggcgucuucuucaacggcaucauccucggccccgacggccacguccucauccccgagaugcaguccucccuccuccagcagcacauggagcuccucgaguccuccgucaucccccucaugcacccccucgccgaccccuccaccgucuucaaggacggcgacgaggccgaggacuucgucgagguccaccuccccgacguccacaagcaggucuccggcgucgaccucggccuccccuccuggggcaaguacguccucauguccgucggcgccaugaucgcccucaugcucaugaucuuccucaccaccugcugccgcaaggucaacggcgccgagaccauccagcgccgccucggcgagaccggccgcaaggucuccgucaccucccaguccggccgcgucaucuccuccugggaguccuacaaguccggcggcgagaccaagcucuga

SEQ ID NO: 126916 - RNA, 1575 nt, Artificial Sequence
  derived and/or modified CDS sequence (opt2) from glycoprotein__RABV__EU086134.1
augaucccccaggcccuccucuucgucccccuccucgucuucucccucugcuucggcaaguuccccaucuacaccauccccgacaagcucggccccuggucccccaucgacauccaccaccucuccugccccaacaaccucgucgucgaggacgagggcugcaccaaccucuccggcuucuccuacauggagcucaaggucggcuacaucuccgccaucaaggucaacggcuucaccugcaccggcgucgucaccgaggccgagaccuacaccaacuucgucggcuacgucaccaccaccuucaagcgcaagcacuuccgccccacccccgacgccugccgcgccgccuacaacuggaagauggccggcgacccccgcuacgaggagucccuccacaaccccuaccccgacuaccacuggcuccgcaccgucaagaccaccaaggagucccucgucaucaucucccccuccgucuccgaccucgaccccuacgacaagucccuccacucccgcgucuuccccuccggcaagugcuccggcaucaccgucuccuccaccuacugccccaccaaccacgacuacaccaucuggaugcccgagaacccccgccucggcaccuccugcgacaucuucaccaacucccgcggcaagcgcgccuccaagggcuccaagaccugcggcuucgucgacgagcgcggccucuacaagucccucaagggcgccugcaagcucaagcucugcggcguccucggccuccgccucauggacggcaccugggccgccauccagaccuccgacgaggccaaguggugcccccccgaccagcucgucaacauccacgacuuccgcuccgacgagaucgagcaccucgucgucgaggagcucgucaagaagcgcgaggagugccucgacgcccucgaguccaucaugaccaccaaguccgucuccuuccgccgccucucccaccuccgcaagcucguccccggcuucggcaaggccuacaccaucuucaacaagacccucauggaggccgacgcccacuacaaguccguccgcaccuggaacgagaucauccccuccaagggcugccuccgcgucggcggccgcugccacccccacgucaacggcgucuucuucaacggcaucauccucggccccgacggccacguccucauccccgagaugcaguccucccuccuccagcagcacauggagcuccucgaguccuccgucaucccccucaugcacccccucgccgaccccuccaccgucuucaaggacggcgacgaggccgaggacuucgucgagguccaccuccccgacguccacaagcaggucuccggcgucgaccucggccuccccuccuggggcaaguacguccucauguccgucggcgccaugaucgcccucaugcucaugaucuuccucaccaccugcugccgcaaggucaaccgcgccgagaccauccagcgccgccucggcgagaccggccgcaaggucuccgucaccucccagaccggccgcgucaucuccuccugggaguccuacaaguccggcggcgagaccaagcucuga

SEQ ID NO: 126917 - RNA, 1575 nt, Artificial Sequence
  derived and/or modified CDS sequence (opt2) from glycoprotein__RABV__EU086135.1
augaucccccagguccuccucuucgucccccuccucgucuucuccuccugcuucggcaaguuccccaucuacaccauccccgacaagcucggccccuggucccccaucgacauccaccaccucuccugccccaacaaccucgucgucgaggacgagggcuccaccaaccucuccggcuuccccuacauggagcucaaggucggcuacaucuccgccaucaaggucaacggcuucaccugcaccggcgucgucaccgaggccgagcccuacaccaacuucgucggcuacgucaccaccaccuucaagcgcaagcacuuccgccccaugcccgacgccugccgcgccgccuacaacuggaagauggccggcgacccccgcuacgaggagucccuccacaaccccuaccccgacuaccacuggcuccgcaccgucaagaccaccaaggagucccucgucaucaucucccccuccgucgccgaccucgaccccuacgacaagucccuccacucccgcgucuuccccggcggcaagugcuccggcaucaccgucuccuccaccugcugcuccaccaaccacgacuacaccaucuggaugcccgagaacccccgccucggcaccuccugcgacaucuucaccaacucccgcggcaagcgcgccuccaagggcggcaagaccugcggcugcgucgacgagcgcggccucuacaagucccucaagcgcgccugcaagcucaagcucugcggcguccucggccuccgccucauggacggcaccugggucgccauccagaccuccgacgagaucaaguggugcucccccgaccagcucgucaaccuccacgacuuccacuccgacgagaucgagcaccucgucgucgaggagcucgucaagaagcgcgaggagugccucgacgcccucgagaccaucaugaccaccaaguccgucuccuuccgccgccucucccaccuccgcaagcucguccccggcuucggcaaggccuacaccaucuucaacaagacccucauggaggccgacgcccacuacaaguccauccgcaccuggaacgagaucauccccuccaagggcugccuccgcgucggcggccgcugccacccccacgucaacggcgucuucuucaacggcaucauccucggccccgacggccacguccucauccccgagaugcaguccucccuccuccaccagcacauggagcuccucgaguccuccgucaucccccucaugcacccccucgccgaccccuccaccgucuucaaggacggcgacgaggccgaggacuucgucgagguccaccuccccgacguccacaagcagaucuccggcgucgaccucggccuccccaacuggggcaaguacguccucaucuccgccggcgcccucaccgcccucaugcucaccaucuuccucaugaccugcugccgcaagaccaaccgcgccgaguccauccagcacucccccggcgagaccggccgcaaggucuccgucaccucccacaacggccgcgucaucuccuccugggaguccuacaaguccggcuccgagaccaagcucuga

SEQ ID NO: 126918 - RNA, 1575 nt, Artificial Sequence
  derived and/or modified CDS sequence (opt2) from glycoprotein__RABV__EU086136.1
augaucccccagguccuccucuucgucccccuccucgucuucuccuccugcuucggcaaguuccccaucuacaccauccccgacaagcucggccccuggucccccaucgacauccaccaccucuccugccccaacaaccucgucgucgaggacgagggcugcaccaaccucuccggcuucuccuacauggagcucaaggucggcuacaucuccgccaucaaggucaacggcuucaccugcaccggcgucgucaccgaggccgagaccuacaccaacuucgucggcuacgucaccaccaccuucaagcgcaagcacuuccgccccaugcccgacgccugccgcgccgccuacaacuggaagauggccggcgacccccgcuacgaggagucccuccacaaccccuaccccgacuaccacuggcuccgcaccgucaagaccaccaaggagucccucgucaucaucucccccuccgucgccgaccucgaccccuacgacaagucccuccacucccgcgucuuccccggcggcaagugcuccggcaucaccgucuccuccaccugcugcuccaccaaccacgacuacaccaucuggaugcccgagaacccccgccucggcaccuccugcgacaucuucaccaacucccgcggcaagcgcgccuccaagggcggcaagaccugcggcuucgucgacgagcgcggcuucgucaagucccucaagggcgccugcaagcucaagcucugcggcguccucggccuccgccucauggacggcaccugggucgccauccagaccuccgacgagaucaaguggugcucccccgaccagcucgucaaccuccacgacuuccacuccgacgagaucgagcaccucgucgucgaggagcucgucaagaagcgcgaggagugccucgacgcccucgagaccuucaugaccaccaaguccgucuccuuccgccgccucucccuccuccgcaagcucguccccggcuucggcaaggccuucaccaucuucaacaagacccucauggaggccgacgcccacuucaaguccauccucaccuggaacgagaucuuccccuacaaguggugcuuccgccucggcgagauccuccacccccacgucaaccgcgucuucuucaacggcaucauccucggccccgacggccacguccucauccccgagaugcaguccucccuccuccaccagcacauggagcuccucgaguccuccgucaucccccucaugcacccccucgccgaccccuccaccgucuucaaggacggcgacgaggccgaggacuucgucgacguccaccuccccgacguccacaagcagaucuccggcgucgaccucggccuccccaacuggggcaaguacguccucaucuccgccggcgcccucaccgcccucaugcucaugaucuuccucaugaccugcugccgcaaggccaaccgcgccgaguccauccagcacaaccccggcgagaccggccgcaaggucuccgucaccucccacaacggccgcgucaucuccuccugggaguccuacaaguccggcggcgagaccaagcucuga

SEQ ID NO: 126919 - RNA, 1575 nt, Artificial Sequence
  derived and/or modified CDS sequence (opt2) from glycoprotein__RABV__EU086137.1
augaucccccagguccuccucuucgucccccuccucgucuucuccuccugcuucggcaaguuccccaucuacaccauccccgacaagcucggccccuggucccccaucgacauccaccaccucuccugccccaacaaccucgucgucgaggacgagggcugcaccaaccucuccggcuucuccuacauggagcucaaggucggcuacaucuccgccaucaaggucaacggcuucaccugcaccggcgucgucaccgaggccgagaccuacaccaacuucgucggcuacgucaccaccaccuucaagcgcaagcacuuccgccccaugcccgacgccugccgcgccgccuacaacuggaagauggccggcgacccccgcuacgaggagucccuccacaaccccuaccccgacuaccacuggcuccgcaccgucaagaccaccaaggagucccucgucaucaucucccccuccgucgccgaccucgaccccuacgacaagucccuccacucccgcgucuuccccggcggcaagugcuccggcaucaccgucuccuccaccugcugcuccaccaaccacgacuacaccaucuggaugcccgagaacccccgccucggcaccuccugcgacaucuucaccaacucccgcggcaagcgcgccuccaagggcggcaagaccugcggcuucgucgacgagcgcggccucuacaagucccucaagggcgccugcaagcucaagcucugcggcguccucggccuccgccucauggacggcaccugggucgccauccagaccuccgacgagaucaaguggugcucccccgaccagcucgucaaccuccacgacuuccacuccgacgagaucgagcaccucuucgucgaggagcucgucaagaagcgcgaggagugccucgacgcccucgagaccaucaugaccaccaaguccgucuccuucaagcgccucucccaccucaccaaccucguccccggcuucggcaaggccuacaccaucuucaacaagacccucauggaggccgacgcccacuacaaguccauccccaccuggaacgagaucauccccuccaagggcugccucaaguucggcggccgcugccacccccccgucaacggcgucuucuucaacggcaucauccucggccccgacggccacguccucauccccgagaugcaguccucccuccuccaccagcacauggagcuccucgaguccuccgucaucccccucaugcacccccucgccgaccccuccaccgucuucaaggacggcgacgaggccgaggacuucgucgacguccaccuccccgacguccacaagcagaucuccggcgucgaccucggccuccccaacuggggcaaguacguccucaucuccgccggcgcccucaccgcccucaugcucaugaucuuccucaugaccugcugccgcaaggccaaccgcgccgaguccauccagcacaaccccggcgagaccggccgcaaggucuccgucaccucccacaacggccgcgucaucuccuccugggaguccuacaaguccggcggcgagaccaagcucuga

SEQ ID NO: 126920 - RNA, 1575 nt, Artificial Sequence
  derived and/or modified CDS sequence (opt2) from glycoprotein__RABV__EU086138.1
augaucccccagguccuccucuucgucccccuccucgucuucuccuccugcuucggcaaguuccccaucuacaccauccccgacaagcucggccccuggucccccaucgacauccaccaccucuccugccccaacaaccucgucgucgaggacgagggcugcaccaaccucuccggcuucuccuacauggagcucaaggucggcuacaucuccgccaucaaggucaacggcuucaccugcaccggcgucgucaccgaggccgagaccuacaccaacuucgucggcuacgucaccaccaccuucaagcgcaagcacuuccgccccaugcccgacgccugccgcgccgccuacaacuggaagauggccggcgacccccgcuacgaggagucccuccacaaccccuaccccgacuaccacuggcuccgcaccgucaagaccaccaaggagucccucgucaucaucucccccuccgucgccgaccucgaccccuacgacaagucccuccacucccgcgucuuccccggcggcaagugcuccggcaucaccgucuccuccaccuggugcuccaccaaccacgacuacaccaucuggaugcccgagaacccccgccucggcaccuccugcgacaucuucaccaacucccgcggcaagcgcgccuccaagggcggcaagaccugcggcuucgucgacgagcgcggccucuacaagucccucaagggcgccugcaagcucaagcucugcggcguccucggccuccgccucauggacggcaccugggucgccauccagaccuccgacgagaucaaguggugcucccccgaccagcucgucaaccuccacgacuuccacuccgacgagaucgagcaccucgucgucgaggagcucgucaagaagcgcgaggagugccucgacgcccucgagaccaucaugaccaccaaguccgucuccuuccgccgccucucccaccuccgcaagcucguccccggcuucggcaaggccuacaccaucuucaacaagacccucauggaggccgacgcccacuacaaguccauccgcaccuggaacgagaucauccccuccaagggcugccuccgcgucggcggccgcugccacccccucgucaacggcgucuccuucaacggcaucauccucggccccgacggccacguccucauccccgagaugcaguccucccuccuccaccagcacauggagcuccucgaguccuccgucaucccccucaugcacccccucgccgaccccuccaccgucuucaaggacggcgacgaggccgaggacuucgucgagguccaccuccccgacguccacaagcagaucuccggcgucgaccucggccuccccaacuggggcaaguacguccucaucuccgccggcgcccucaccgcccucaugcucaccaucuuccucaugaugugcugccgcaagaccaaccgcgccgaguccauccagcacucccccggcgagaucggccgcaaggucuccgucaccucccacaacggccgcgucaucuccuccugggaguccuacaaguccggcuccgagaccaagcucuga

SEQ ID NO: 126921 - RNA, 1575 nt, Artificial Sequence
  derived and/or modified CDS sequence (opt2) from glycoprotein__RABV__EU086139.1
augaucccccagguccuccucuucgucccccuccucgucuucuccuccugcuucggcaaguuccccaucuacaccauccccgacaagcucggccccuggucccccaucgacauccaccaccucuccugccccaacaaccucgucgucgaggacgagggcugcaccaaccucuccggcuucuccuacauggagcucaaggucggcuacaucuccgccaucaaggucaacggcuucaccugcaccggcgucgucaccgaggccgagaccuacaccaacuucgucggcuacgucaccaccaccuucaagcgcaagcacuuccgccccaugcccgacgccugccgcgccgccuacaacuggaagauggccggcgacccccgcuacgaggagucccuccacaaccccuaccccgacuaccacuggcuccgcaccgucaagaccaccaaggagucccucgucaucaucucccccuccgucgccgaccucgaccccuacgacaacucccuccacucccgcgucuuccccggcggcaagugcuccggcaucaccgucuccuccaccugcugcuccaccaaccacgacuacaccaucuggaugcccgagaacccccgccucggcaccuccugcgacaucuucaccaacucccgcggcaagcgcgccuccaagggcggcaagaccugcggcuucgucgacgagcgcggccucuacaagucccucaagggcgccugcaagcucaagcucugcggcguccucggccuccgccucauggacggcaccugggucgccauccagaccuccgacgagaucaaguggugcucccccgaccagcucgucaaccuccacgacuuccacuccgacgagaucgagcaccucgucgucgaggagcucgucaagaagcgcgaggagugccucgacgcccucgagaccaucaugaccaccaaguccgucuccuuccgccgccucucccaccuccgcaagcucguccccggcuucggcaaggccuacaccaucuucaacaagacccucauggaggccgacgcccacuacaaguccauccgcaccuggaacgagaucauccccuccaagggcugccuccgcgucggcggccgcugccacccccacgucaacggcgucuucuucaacggcaucauccucggccccgacggccacguccucauccccgagaugcaguccucccuccuccaccagcacauggagcuccucgaguccuccgucaucccccucaugcacccccucgccgaccccuccaccgucuucaaggacggcgacgaggccgaggacuucgucgagguccaccuccccgacguccacaagcagaucuccggcgucgaccucggccuccccaacuggggcaaguacguccucaucuccgccggcgcccucaccgcccucaugcucaccaucuuccucaugaccugcugccgcaagaccaaccgcgccgaguccauccagcacucccccggcgagaucggccgcaaggucuccgucaccucccacaacggccgcgucaucuccuccugggaguccuacaaguccggcuccgagaccaagcucuga

SEQ ID NO: 126922 - RNA, 1575 nt, Artificial Sequence
  derived and/or modified CDS sequence (opt2) from glycoprotein__RABV__EU086140.1
augaucccccagguccuccucuucgucccccuccucgucuucuccuccugcuucggcaaguuccccaucuacaccauccccgacaagcucggccccuggucccccaucgacauccaccaccucuccugccccaacaaccucgucgucgaggacgagggcugcaccaaccucuccggcuucuccuacauggagcucaaggucggcuacaucuccgccaucaaggucaacggcuucaccugcaccggcgucgucaccgaggccgagaccuacaccaacuucgucggcuacgucaccaccaccuucaagcgcaagcacuuccgccccaugcccgacgccugccgcgccgccuacaacuggaagauggccggcgacccccgcuacgaggagucccuccacaaccccuaccccgacuaccacuggcuccgcaccgucaagaccuccaaggagucccucgucaucaucucccccuccgucgccgaccucgaccccuacgacaagucccuccacucccgcgucuuccccggcggcaagugcuccggcaucaccgucuccuccaccugcugcuccaccaaccacgacuacaccaucuggaugcccgagaacccccgccucggcaccuccugcgacaucuucaccaacucccgcggcaagcgcgccuccaagggcggcaagaccugcggcuucgucgacgagcgcggccucuacaagucccucaagggcgccugcaagcucaagcucugcggcguccucggccuccgccucauggacggcaccugggucgccauccagaccuccgacgagaucaaguggugcucccccgaccagcucgucaaccuccacgacuuccacuccgacgagaucgagcaccucgucgucgaggagcucgucaagaagcgcgaggagugccucgacgcccucgagaccaucaugaccaccaccuccgucuccuuccgccgccucucccaccuccgcaagcucguccccggcuucggccgcgccuucuccaucuucaacaagacccucgucgaggccgacgcccucuuccaguccuuccgcaccuggaacgagaucauccccuccaagggcugccuccgcgucggcggccgcugccacccccacgucaacggcgucuucuucaacggcaucauccucggccccgacggccacguccucauccccgagaugcaguccucccuccuccaccagcacauggagcuccucgaguccuccgucaucccccucaugcacccccucgccgaccccuccaccgucuucaaggacggcgacgaggccgaggacuucgucgagguccaccuccccgacguccacaagcagaucuccggcgucgaccucggccuccccaacuggggcaaguacguccucaucuccgccggcgcccucaccgcccucaugcucaugaucuuccucaugaccugcugccgcaagaccaaccgcgccgaguccauccagcacucccccggcgagaccggccgcaaggucuccgucaccucccacaacggccgcgucaucuccuccugggaguccuacaaguccggcggcgagaccaagcucuga

SEQ ID NO: 126923 - RNA, 1575 nt, Artificial Sequence
  derived and/or modified CDS sequence (opt2) from glycoprotein__RABV__EU086141.1
augaucccccagguccuccucuucgucccccuccucgucuucuccuccugccucggcaaguuccccaucuacaccauccccgacaagcucggccccuggucccccaucgacauccaccaccucuccugccccaacaaccucgucgucgaggacgagggcugcaccaaccucuccggcuucuccuacauggagcucaaggucggcuacaucuccgccaucaaggucaacggcuucaccugcaccggcgucgucaccgaggccgagaccuacaccaacuucgucggcuacgucaccaccaccuucaagcgcaagcacuuccgccccaugcucgacgccugccgcgccgccuacaacuggaagauggccggcgacccccgcuacgaggagucccuccacaaccccuaccccgacuaccacuggcuccgcaccgucaagaccuccaaggagucccucgucaucaucucccccuccgucgccgaccucgaccccuacgacaagucccuccacucccgcgucuuccccggcggcaagugcuccggcaucaccgucuccuccaccugcugcuccaccaaccacgacuacaccaucuggaugcccgagaacccccgccucggcaccuccugcgacaucuucaccaacucccgcggcaagcgcgccuccaagggcggcaagaccugcggcuucgucgacgagcgcggccucuacaagucccucaagggcgccugcaagcucaagcucugcggcguccucggccuccgccucauggacggcaccugggucgccauccagaccuccgacgagaucaaguggugcucccccgaccagcucgucaaccuccacgacuuccacuccgacgagaucgagcaccucgucgucgaggagcucgucaagaagcgcgaggagugccucgacgcccucgagaccaucaugaccaccaaguccgucuccuuccgccgccucucccaccuccgcaagcucguccccggcuucggcaaggccuacaccaucuucaacaagacccucauggaggccgacgcccacuacaaguccauccgcaccuggaacgagaucauccccuccaagggcugccuccgcgucggcggccgcugccacccccacgucaacgaggucuucuucaacggcaucauccucggccccgacggccacguccucauccccgagaugcaguccucccuccuccaccagcacauggagcuccucgaguccuccgucaucccccucaugcacccccucaccgaccccuccaccgucuucaaggacggcgacgaggccgaggacuucgucgagguccaccuccccgacguccacaagcagaucuccggcggcgaccucggccuccccaacuggggcaaguacguccucaucuccgccggcgcccucaccgccuccaugcucaugaucuuccucaugaccugcugccgcaagaccaaccgcgccgaguccauccagcacucccccggcgagaccggcgaggaggucuccggcaccucccagaccggccgcgucaucuccuccugggaguccuacaaguccggcggcgagaccaagcucuga

SEQ ID NO: 126924 - RNA, 1575 nt, Artificial Sequence
  derived and/or modified CDS sequence (opt2) from glycoprotein__RABV__EU086142.1
augaucccccagguccuccucuucgucccccuccucgucuucuccuccugccucggcaaguuccccaucuacaccauccccgacaagcucggccccuggucccccaucgacauccaccaccucuccugccccaacaaccucgucgucgaggacgagggcugcaccaaccucuccggcuucuccuacauggagcucaaggucggcuacaucuccgccaucaaggucaacggcuucaccugcaccggcgucgucaccgaggccgagaccuacaccaacuucgucggcuacgucaccaccaccuucaagcgcaagcacuuccgccccaugcucgacgccugccgcgccgccuacaacuggaagauggccggcgacccccgcuacgaggagucccuccacaaccccuaccccgacuaccacugguuccgcaccgucaagaccuccaaggagucccucgucaucaucucccccuccgucgccgaccucgaccccuacgacaagucccuccacucccgcgucuuccccggcggcaagugcuccggcaucaccgucuccuccaccugcugcuccaccaaccacgacuacaccaucuggaugcccgagaacccccgccucggcaccuccugcgacaucuucaccaacucccgcggcaagcgcgccuccaagggcggcaagaccugcggcuucgucgacgagcgcggccucuacaagucccucaagggcgccugcaagcucaagcucugcggcguccucggccuccgccucauggacggcaccugggucgccauccagaccuccgacgagaucaaguggugcucccccgaccagcucgucaaccuccacgacuuccacuccgacgagaucgagcaccucgucgucgaggagcucgucaagaagcgcgaggagugccucgacgcccucgagaccaucaugaccaccaaguccgucuccuuccgccgccucucccaccuccgcaagcucguccccggcuucggcaaggccuacaccaucuucaacaagacccucauggaggccgacgcccacuacaaguccauccgcaccuggaacgagaucauccccuccaagggcugccuccgcgucggcggccgcugccacccccacgucaacggcgucuucuucaacggcaucauccucggccccgacggccacguccucauccccgagaugcaguccugccuccuccaccagcacauggagcuccucgaguccuccuucaucccccucaugcucccccucgccgaccccuccaccgucuucaaggacggcgacgaggccgaggacuucgucgagguccaccuccccgacguccacaagcagaucuccggcggcgaccucggccuccccaacuggggcaaguacguccucaucuccgccggcgcccucaccgccuccaugcucaugaucuuccucaugaccugcugccgcaagaccaaccgcgccgaguccauccagcacucccccggcgagaccggccgcaaggucuccgucaccucccacaacggccgcgucaucuccuccugggaguccuacaaguccggcggcgagaccaagcucuga

SEQ ID NO: 126925 - RNA, 1575 nt, Artificial Sequence
  derived and/or modified CDS sequence (opt2) from glycoprotein__RABV__EU086143.1
augaucccccagguccuccucuucgucccccuccucgucuucuccuccugcuucggcaaguuccccaucuacaccauccccgacaagcucggccccuggucccccaucgacauccaccaccucuccugccccaacaaccucgucgucgaggacgagggcugcaccaaccucuccggcuucuccuacauggagcucaaggucggcuacaucuccgccaucaaggucaacggcuucaccugcaccggcgucgucaccgaggccgagaccuacaccaacuucgucggcuacgucaccaccaccuucaagcgcaagcacuuccgccccaugcccgacgccugccgcgccgccuacaacuggaagauggccggcgacccccgcuacgaggagucccuccacaaccccuaccccgacuaccacuggcuccgcaccgucaagaccuccaaggagucccucgucaucaucucccccuccgucgccgaccucgaccccuacgacaagucccuccacucccgcgucuuccccggcggcaagugcuccggcaucaccgucuccuccaccugcugcuccaccaaccacgacuacaccaucuggaugcccgagaacccccgccucggcaccuccugcgacaucuucaccaacucccgcggcaagcgcgccuccaagggcggcaagaccugcggcuucgucgacgagcgcggccucuacaagucccucaagggcgccugcaagcucaagcucugcggcguccucggccuccgccucauggacggcaccugggucgccauccagaccuccgacgagaucaaguggugcucccccgaccagcucgucaaccuccacgacuuccacuccgacgagaucgagcaccucgucgucgaggagcucgucaagaagcgcgaggagugccucgacgcccucgagaccaucaugaccaccaaguccgucuccuuccgccgccucucccaccuccgcaagcucguccccggcuucggcaaggccuacaccaucuucaacaagacccucauggaggccgacgcccacuacaaguccauccgcaccuggaacgagaucauccccuccaagggcugccuccgcgucggcggccgcugccacccccacgucaacggcgucuucuucaacggcaucauccucggccccgacggccacguccucauccccgagaugcaguccucccuccuccaccagcacauggagcuccucgaguccuccgucaucccccucaugcacccccucgccgaccccuccaccgucuucaaggacggcgacgaggccgaggacuucgucgagguccaccuccccgacguccacaagcagaucuccggcgucgaccucggccuccccaacuggggcaaguacguccucaucuccgccggcgcccucaccgcccucaugcucaugaucuuccucaugaccugcugccgccgccucaaccgcgccgaguccauccagcacucccccggcgagaccggccgcaaggucuccgucaccucccacuccggccgcgucaucuccuccugggaguccuacaaguccggcggcgagaccaagcucuga

SEQ ID NO: 126926 - RNA, 1575 nt, Artificial Sequence; identical to SEQ ID NO: 126563
  derived and/or modified CDS sequence (opt2) from glycoprotein__RABV__EU086144.1

SEQ ID NO: 126927 - RNA, 1575 nt, Artificial Sequence
  derived and/or modified CDS sequence (opt2) from glycoprotein__RABV__EU086145.1
augaucccccaggcccuccucuucgucccccuccucgucuucucccucugcuucggcaaguuccccaucuacaccauccccgacaagcucggccccuggucccccaucgacauccaccaccucuccugccccaacaaccucgucgucgaggacgagggcugcaccaaccucuccggcuucuccuacauggagcucaaggucggcuacaucuccgccaucaaggucaacggcuucaccugcaccggcgucgucaccgaggccgagaccuacaccaacuucgucggcuacgucaccaccaccuucaagcgcaagcacuuccgccccacccccgacgccugccgcgccgccuacaacuggaagauggccggcgacccccgcuacgaggagucccuccacaaccccuaccccgacuaccacuggcuccgcaccgucaagaccaccaaggagucccucgucaucaucucccccuccgucgccgaccucgaccccuacgacaagucccuccacucccgcgucuuccccuccggcaagugcuccggcaucaccgucuccuccaccuacugcuccaccaaccacgacuacaccaucuggaugcccgagaacccccgccucggcaccuccugcgacaucuucgucaacucccgcggcaagcgcgccuccaagggcuccaagaccugcggcuucgucgacgagcgcggccucuacaagucccucaagggcgccugcaagcucaagcucugcggcguccucggccuccgccucauggacggcaccugggucgccauccagaccuccgacgagaccaaguggugcccccccgaccagcucgucaaccuccacgacuuccgcuccgacgagaucgagcaccucgucgucgaggagcucgucaagaagcgcgaggagugccucgacgcccucgaguccaucaugaccaccaaguccgucuccuuccgccgccucucccaccuccgcaagcucguccccggcuucggcaaggccuacaccaucuucaacaagacccucauggaggccgacgcccacuacaaguccguccgcaccuggaacgagaucauccccuccaagggcugccuccgcgucggcggccgcugccacccccacgucaacggcgucuucuucaacggcaucauccucggccccgacggccacguccucauccccgagaugcaguccucccuccuccagcagcacauggagcuccucgaguccuccgucaucccccucaugcacccccucgccgaccccuccaccaucuucaaggacggcuacgaggccgaggacuucgucgagguccaccuccccgacguccacaagcaggucuccggcgucgaccucggccuccccaacuggggcaaguacguccucauguccgccggcgcccucaccgcccucaugcucaugaucuuccucaugaccugcugccgcaagaccgaccgcaccggcuccacccaccacucccccggcgagaccggccgcaaggucuccgucaccucccagaacggccgcgucaucgccuccugggaguccuacaaguccggcggcgagaccaagcucuga

SEQ ID NO: 126928 - RNA, 1575 nt, Artificial Sequence; identical to SEQ ID NO: 126879
  derived and/or modified CDS sequence (opt2) from glycoprotein__RABV__EU086146.1

SEQ ID NO: 126929 - RNA, 1575 nt, Artificial Sequence; identical to SEQ ID NO: 126881
  derived and/or modified CDS sequence (opt2) from glycoprotein__RABV__EU086147.1

SEQ ID NO: 126930 - RNA, 1575 nt, Artificial Sequence
  derived and/or modified CDS sequence (opt2) from glycoprotein__RABV__EU086148.1
augaucccccagguccuccucuucgucccccuccucgucuucuccuccugcuucggcaaguuccccaucuacaccauccccgacaagcucggccccuggucccccaucgacauccaccaccucuccugccccaacaaccucgucgucgaggacgagggcugcaccaaccucuccggcuucuccuacauggagcucaaggucggcuacaucuccgccaucaaggucaacggcuucaccugcaccggcgucgucaccgaggccgagaccuacaccaacuucgucggcuacgucaccaccaccuucaagcgcaagcacuuccgccccaugcccgacgccugccgcgccgccuacaacuggaagauggccggcgacccccgcuacgaggagucccuccacaaccccuaccccgacuaccacuggcuccgcaccgucaagaccaccaaggagucccucgucaucaucucccccuccgucgccgaccucgaccccuacgacaagucccuccacucccgcgucuuccccggcggcaagugcuccggcaucaccgucuccuccaccugcugcuccaccaaccacgacuacaccaucuggaugcccgagaacccccgccucggcaccuccugcgacaucuucaccaacucccgcggcaagcgcgccuccaagggcggcaagaccugcggcuucgucgacgagcgcggccucuacaagucccucaagggcgccugcaagcucaagcucugcggcguccucggccuccgccucauggacggcaccugggucgccauccagaccuccgacgagaucaaguggugcucccccgaccagcucgucaaccuccacgacuuccacuccgacgagaucgagcaccucgucgucgaggagcucgucaagaagcgcgaggagugccucgacgcccucgagaccaucaugaccaccaaguccgucuccuuccgccgccucucccaccuccgcaagcucguccccggcuucggcaaggccuacaccaucuucaacaagacccucauggaggccgacgcccacuacaaguccauccgcaccuggaacgagaucauccccuccaagggcugccuccgcgucggcggccgcugccacccccacgucaacggcgucuucuucaacggcaucauccucggccccgacggccacguccucauccccgagaugcaguccugccuccuccaccagcacauggagcuccucgaguccuccgucaucccccucaugcacccccucgccgaccccuccaccgucuucaaggacggcgacgaggccgaggacuucgucgagguccaccuccccgacguccacaagcagaucuccggcgucgaccucggccuccccaacuggggcaaguacguccucaucuccgccggcgcccucaccgcccucauguccaugaucuuccucaugaccugcugccgcaagaccaaccgcgccgaguccauccagcacucccccggcgagaccggccgcaaggucuccgucaccucccacaacggccgcgucaucuccuccugggaguccuacaaguccggcggcgagaccaagcucuga

SEQ ID NO: 126931 - RNA, 1575 nt, Artificial Sequence
  derived and/or modified CDS sequence (opt2) from glycoprotein__RABV__EU086149.1
augaucccccagguccuccucuucgucccccuccucgucuccuccuccugcuucggcaaguuccccaucuacaccauccccgacaagcucggccccuggucccccaucgacauccaccaccucuccugccccaacaaccucgucgucgaggacgagggcugcaccaaccucuccggcuucuccuacauggagcucaaggucggcuacaucuccgccaucaaggucaacggcuucaccugcaccggcgucgucaccgaggccgagaccuacaccaacuucgucggcuacgucaccaccaccuucaagcgcaagcacuuccgccccaugcccgacgccugccgcgccgccuacaacuggaagauggccggcgacccccgcuacgaggagucccuccacaaccccuaccccgacuaccacuggcuccgcaccgucaagaccaccaaggagucccucgucaucaucucccccuccgucgccgaccucgaccccuacgacaagucccuccacucccgcgucuuccccggcggcaagugcuccggcaucaccgucuccuccaccugcugcuccaccaaccacgacuacaccaucuggaugcccgagaacccccgccucggcaccuccugcgacaucuucaccaacucccgcggcaagcgcgccuccaagggcggcaagaccugcggcuucgucgacgagcgcggccucuacaagucccucaagggcgccugcaagcucaagcucugcggcguccucggccuccgccucauggacggcaccugggucgccauccagaccuccgacgagaucaaguggugcucccccgaccagcucgucaaccuccacgacuuccacuccgacgagaucgagcaccucgucgucgaggagcucgucaagaagcgcgaggagugccucgacgcccucgagaccaucaugaccaccaaguccgucuccuuccgccgccucucccaccuccgcaagcucguccccggcuucggcaaggccuacaccaucuucaacaagacccucauggaggccgacgcccacuacaaguccauccgcaccuggaacgagaucauccccuccaagggcugccuccgcgucggcggccgcugccacccccacgucaacggcgucuucuucaacggcaucauccucggccccgacggccacguccucauccccgagaugcaguccucccuccuccaccagcacauggagcuccucgaguccuccgucaucccccucaugcacccccucgccgaccccuccaccgucuucaaggacggcgacgaggccgaggacuucgucgagguccaccuccccgacguccacaagcagaucuccggcgucgaccucggccuccccaacuggggcaaguacguccucaucuccgccggcgcccucaccgcccucauguccaugaucuuccucaugaccugcugccgcaagaccaaccgcgccgaguccauccagcacucccccggcgagaccggccgcaaggucuccgucaccucccacaacggccgcgucaucuccuccugggaguccuacaaguccggcggcgagaccaagcucuga

SEQ ID NO: 126932 - RNA, 1575 nt, Artificial Sequence
  derived and/or modified CDS sequence (opt2) from glycoprotein__RABV__EU086150.1
augauccuccagguccuccucuucgucccccuccaggucuucuccuccugcuucggcgaguuccccaucuacaccauccccgacaagcucggccccuggucccccaucgacauccaccaccucuccugccccaacaaccucgucgucaaggacgagggcugcaccaaccucuccggcuucuccuacauggagcucaaggucggcuacaucuccgccaucaaggucaacggcuucaccugcaccggcgucgucaccgaggccgagaccuacaccaacuucgucggcuacgucaccaccaccuucaagcgcaagcacuuccgccccaugcccgacgccugccgcgccgccuacaacuggaagauggccggcgacccccgcuacgaggagucccuccacaaccccuaccccgacuaccacuggcuccgcaccgucaagaccaccaaggagucccucgucaucaucucccccuccgucgccgaccucgaccccuacgacaagucccuccacucccgcgucuuccccggcggcaagugcuccggcaucaccgucuccuccaccugcugcuccaccaaccacgacuacaccaucuggaugcccgagaacccccgccucggcaccuccugcgacaucuucaccaacucccgcggcaagcgcgccuccaagggcggcaagaccugcggcuucgucgacgagcgcggccucuacaagucccucaagggcgccugcaagcucaagcucugcggcguccucggccuccgccucauggacggcaccugggucgccauccagaccuccgacgagaucaaguggugcccccccgaccagcucgucaaccuccacgacuuccacuccgacgagaucgagcaccucgucgucgaggagcucgucaagaagcgcgaggagugccucgacgcccucgagaccaucaugaccaccaaguccgucuccuuccgccgccucucccaccuccgcaagcucguccccggcuucggcaaggccuacaccaucuucaacaagacccucauggaggccgacgcccacuacaaguccauccgcaccuggaacgagaucauccccuccaagggcugccuccgcgucggcggccgcugccacccccacgucaacggcgucuucuucaacggcaucauccucggccccgacggccacguccucauccccgagaugcaguccucccuccuccaccagcacauggagcuccucgaguccuccgucaucccccucaugcacccccucgccgaccccuccaccgucuucaaggacggcgacgaggccgaggacuucgucgagguccaccuccccgacguccacaagcagaucuccggcgucgaccucggccuccccaacuggggcaaguacguccucgucuccgccggcgcccucaccgcccucaugcucaugaucuuccucaugaccugcugccgcaagaccaaccgcgccgaguccauccagcacucccccggcgagaccggccgcaaggucuccgucaccucccacaacggccgcgucaucuccuccugggaguccuacaaguccggcggcgagaccaagcucuga

SEQ ID NO: 126933 - RNA, 1575 nt, Artificial Sequence
  derived and/or modified CDS sequence (opt2) from glycoprotein__RABV__EU086151.1
augaucccccaggcccuccucuucgucccccuccucgucuucucccucugcuucggcaaguuccccaucuacaccauccccgacaagcucggccccuggucccccaucgacauccaccaccucuccugccccaacaaccucgucgucgaggacgagggcugcaccaaccucuccggcuucuccuacauggagcucaaggucggcuacaucuccgccaucaaggucaacggcuucaccugcaccggcgucgucaccgaggccgagaccuacaccaacuucgucggcuacgucaccaccaccuucaagcgcaagcacuuccgccccacccccgacgccugccgcgccgccuacaacuggaagauggccggcgacccccgcuacgaggagucccuccacaaccccuaccccgacuaccacuggcuccgcaccgucaagaccaccaaggagucccucgucaucaucucccccuccgucgccgaccucgaccccuacgacaagucccuccacucccgcgucuuccccaacggcaagugcuccggcaucaccgucuccuccaccuacugcuccaccaaccacgacuacaccaucuggaugcccgagaacccccgccucggcaccuccugcgacaucuucaccaacucccgcggcaagcgcgccuccaagggcuccaagaccugcggcuucgucgacgagcgcggccucuacaagucccucaagggcgccugcaagcucaagcucugcggcguccucggccuccgccucauggacggcaccugggucgcccuccagaccuccgacgagaccaaguggugcucccccgaccagcucgucaaccuccacgacuuccacuccgacgagaucgagcaccucgucgucgaggagcucgucaagaagcgcgaggagugccucgacgcccucgaguccaucaugaccaccaaguccgucuccuuccgccgccucucccaccuccgcaagcucguccccggcuucggcaaggccuacaccaucuucaacaagacccucauggaggccgacgcccacuacaaguccauccgcaccuggaacgagaucauccccuccaagggcugccuccgcgucggcggcaagugccacccccacgucaacggcgucuucuucaacggcaucauccucggccccgacggccacguccucauccccgagaugcaguccucccuccuccaccagcacauggagcuccucgaguccuccgucaucccccucaugcacccccucgccgaccccuccaccgucuucaaggacggcgacgaggccgaggacuucgucgagguccaccuccccgacguccacaagcagaucuccggcgucgaccucggccuccccaacuggggcaaguacguccucauguccgccggcgcccucaccguccucaugcucaccaucuuccucgucaccugcugccgcaagaccaaccgcgccgaguccauccagcacuccuccggcgagaccggccgcaaggucuccgucaccucccagaacggccgcgucaucuccuccugggaguccuacaaguccggcggcgagaccaagcucuga

SEQ ID NO: 126934 - RNA, 1575 nt, Artificial Sequence
  derived and/or modified CDS sequence (opt2) from glycoprotein__RABV__EU086152.1
augaucccccaggcccuccucuucgucccccuccucgucuucucccucugcuucggcaaguuccccaucuacaccauccccgacaagcucggccccuggucccccaucgacauccaccaccucuccugccccaacaaccucgucgucgaggacgagggcugcaccaaccucuccggcuucuccuacauggagcucaaggucggcuacaucuccgccaucaaggucaacggcuucaccugcaccggcgucgucaccgaggccgagaccuacaccaacuucgucggcuacgucaccaccaccuucaagcgcaagcacuuccgccccacccccgacgccugccgcgccgccuacaacuggaagauggccggcgacccccgcuacgaggagucccuccacaaccccuaccccgacuaccacuggcuccgcaccgucaagaccaccaaggagucccucgucaucaucucccccuccgucuccgaccucgaccccuacgacaagucccuccacucccgcgucuuccccuccggcaagugcuccggcaucaccgucuccuccaccuacugccccaccaaccacgacuacaccaucuggaugcccgagaacccccgccucggcaccuccugcgacaucuucaccaacucccgcggcaagcgcgccuccaagggcuccaagaccugcggcuucgucgacgagcgcggccucuacaagucccucaagggcgccugcaagcucaagcucugcggcguccucggccuccgccucauggacggcaccugggccgccauccagaccuccgacgaggccaaguggugcccccccgaccagcucgucaacauccacgacuuccgcuccgacgagaucgagcaccucgucgucgaggagcucgucaagaagcgcgaggagugccucgacgcccucgaguccaucaugaccaccaaguccgucuccuuccgccgccucucccaccuccgcaagcucguccccggcuucggcaaggccuacaccaucuucaacaagacccucauggaggccgacgcccacuacaaguccguccgcaccuggaacgagaucauccccuccaagggcugccuccgcgucggcggccgcugccacccccacgucaacggcgucuucuucaacggcaucauccucggccccgacggccacguccucauccccgagaugcaguccucccuccuccagcagcacauggagcuccucgaguccuccgucaucccccucaugcacccccucgccgaccccuccaccgucuucaaggacggcgacgaggccgaggacuucgucgagguccaccuccccgacguccacaagcaggucuccggcgucgaccucggccuccccuccuggggcaaguacguccucauguccgucggcgccaugaucgcccucaugcucaugaucuuccucaugaccugcugccgcaaguccaacggcgccgaguccauccagcaccgccucggcgagaccggccgcaaggucuccgucaccucccaguccggccgcgucaucuccuccugggaguccuacaaguccggcggcgagaccaagcucuga

SEQ ID NO: 126935 - RNA, 1575 nt, Artificial Sequence
  derived and/or modified CDS sequence (opt2) from glycoprotein__RABV__EU086153.1
auggucccccagguccucugguucgucccccuccucgucuucuccaugugcuucggcaaguuccccaucuacaccauccccgacaagcucggccccuggucccccaucgacauccaccaccucuccugccccaacaaccucgucgucgaggacgagggcugcaccaaccucuccggcuucuccuacauggagcucaaggucggcuacaucuccgccaucaaggucaacggcuucaccugcaccggcgucgucaccgaggccgagaccuacaccaacuucgucggcuacgucaccaccaccuucaagcgcaagcacuuccgccccacccccgacgccugccgcgccgccuacaacuggaagauggccggcgacccccgcuacgaggagucccuccacaaccccuaccccgacuaccacuggcuccgcaccgucaagaccaccaaggagucccucgucaucaucucccccuccgucgccgaccucgaccccuacgacaagucccuccacucccgcgucuuccccuccggcaagugcuccggcaucaccaucuccuccaccuacugcuccaccaaccacgacuacaccaucuggaugcccgagaacccccgccucggcaccuccugcgacaucuucaccaacucccgcggcaagcgcgccuccaagggcuccaagaccugcggcuucgucgacgagcgcggccucuacaagucccucaagggcgccugcaagcucaagcucugcggcguccucggccuccgccucauggacggcaccugggucgccaugcagaccuccgacgagaccaaguggugcccccccgaccagcucgucaaccuccacgacuuccgcuccgacgagaucgagcaccucgucgucgaggagcucgucaagaagcgcgaggagugccucgacgcccucgaguccaucaugaccaccaaguccgucuccuuccgccgccucucccaccuccgcaagcucguccccggcuucggcaaggccuacaccaucuucaacaagacccucauggaggccgacgcccacuacaaguccguccgcaccuggaacgagaucauccccuccaagggcugccuccgcgucggcggccgcugccacccccacgucaacggcgucuucuucaacggcaucauccucggccccgacggccacguccucauccccgagaugcaguccucccuccuccagcagcacauggagcuccucgaguccuccgucaucccccucaugcacccccucgccgaccccuccaccgucuucaaggacggcgacgaggccgaggacuucgucgagguccaccuccccgacguccacaagcagaucuccggcgucgaccucggccuccccaacuggggcaaguacguccucgucuccgccggcguccucgucguccucaugcucgccaucuucaucaugaccugcugcggccgcgucaaccgccccaaguccacccagcacucccucgagggcaccggccgcaaggucuccgucaccucccaguccggcaaggucaucuccuccugggaguccuacaaguccggcggcgagacccgccucuga

SEQ ID NO: 126936 - RNA, 1575 nt, Artificial Sequence
  derived and/or modified CDS sequence (opt2) from glycoprotein__RABV__EU086154.1
auggucccccagguccucugguucgucccccuccucgucuucuccaugugcuucggcaaguuccccaucuacaccauccccgacaagcucggccccuggucccccaucgacauccaccaccucuccugccccaacaaccucgucgucgaggacgagggcugcaccaaccucuccggcuucuccuacauggagcucaaggucggcuacaucuccgccaucaaggucaacggcuucaccugcaccggcgucgucaccgaggccgagaccuacaccaacuucgucggcuacgucaccaccaccuucaagcgcaagcacuuccgccccacccccgacgccugccgcgccgccuacaacuggaagauggccggcgacccccgcuacgaggagucccuccacaaccccuaccccgacuaccacuggcuccgcaccgucaagaccaccaaggagucccucgucaucaucucccccuccgucgccgaccucgaccccuacgacaagucccuccacucccgcgucuuccccuccggcaagugcuccggcaucaccaucuccuccaccuacugcuccaccaaccacgacuacaccaucuggaugcccgagaacccccgccucggcaccuccugcgacaucuucaccaacucccgcggcaagcgcgccuccaagggcuccaagaccugcggcuucgucgacgagcgcggccucuacaagucccucaagggcgccugcaagcucaagcucugcggcguccucggccuccgccucauggacggcaccugggucgccaugcagaccuccgacgagaccaaguggugcccccccgaccagcucgucaaccuccacgacuuccgcuccgacgagaucgagcaccucgucgucgaggagcucgucaagaagcgcgaggagugccucgacgcccucgaguccaucaugaccaccaaguccgucuccuuccgccgccucucccaccuccgcaagcucguccccggcuucggcaaggccuacaccaucuucaacaagacccucauggaggccgacgcccacuacaaguccguccgcaccuggaacgagaucauccccuccaagggcugccuccgcgucggcggccgcugccacccccacgucaacggcgucuucuucaacggcaucauccucggccccgacggccacguccucauccccgagaugcaguccucccuccuccagcagcacauggagcuccucgaguccuccgucaucccccucaugcacccccucuccgaccccuccaccgucuucaaggacggcgacgaggccgaggacuucgucgagguccaccuccccgacguccacaagcagaucuccggcgucgaccucggccuccccaacuggggcaaguacguccucgucuccgccggcguccucgucguccucaugcucgccaucuucaucaugaccugcugcggccgcgucaaccgccccaaguccacccagcacucccucgagggcaccggccgcaaggucuccgucaccucccaguccggcaaggucaucuccuccugggaguccuacaaguccggcggcgagacccgccucuga

SEQ ID NO: 126937 - RNA, 1575 nt, Artificial Sequence; identical to SEQ ID NO: 126669
  derived and/or modified CDS sequence (opt2) from glycoprotein__RABV__EU086155.1

SEQ ID NO: 126938 - RNA, 1575 nt, Artificial Sequence
  derived and/or modified CDS sequence (opt2) from glycoprotein__RABV__EU086156.1
auggucccccagguccuccucuucgucccccuccucgucuucucccucugcuucggcaaguuccccaucuacaccauccccgacaagcucggccccuggucccccaucgacauccaccaccucuccugccccaacaaccucgucgucgaggacgagggcugcaccaaccucuccggcuucuccuacauggagcucaaggucggcuacaucuccgccaucaaggucaacggcuucaccugcaccggcgucgucaccgaggccgagaccuacaccaacuucgucggcuacgucaccaccaccuucaagcgcaagcacuuccgccccacccccgacgccugccgcgccgccuacaacuggaagcucgccggcgacccccgcuacgaggagucccuccacaaccccuaccccgacuaccacuggcuccgcaccgucaagaccaccaaggagucccucgucaucaucucccccuccgucgccgaccucgaccccuacgacaagucccuccacucccgcgucuucuccggcggcaagugcuccggcaucaccgucuccuccaccuacugcuccaccaaccacgacuacaccaucuggaugcccgagaacccccgccucggcaccuccugcgacaucuucgucaacucccgcggcaagcgcgccuccaagggcggcaagaccugcggcuucgucgacgagcgcggccucuacaagucccucaagggcgccugcaagcucaagcucugcggcguccccggccuccgccucauggacggcaccugggccgccauccagaccuccgacgagaccaaguggugcccccccgaccagcucgucaaccuccacgacuuccgcuccgacgagaucgagcaccucgucgucgaggagcucgucaagaagcgcgaggagugccucgacgcccucgaguccaucaugaccaccaaguccgucuccuuccgccgccucucccaccuccgcaagcucguccccggcuucggcaaggccuacaccaucuucaacaagacccucauggaggccgacgcccacuacgaguccguccgcaccuggaacgagaucauccccuccaagggcugccuccgcgucggcggccgcugccacccccacgucaacggcgucuucuucaacggcaucauccucggccccgacggccacguccucauccccgagaugcaguccucccuccuccagcagcacauggagcuccucgaguccuccgucaucccccucaugcacccccucgccgaccccuccaccguccucaaggacggcgacgaggccgaggacuucgucgagguccaccuccccgacguccacaagcucaucuccggcgucgaccucggccuccccuccuggggcaaguacguccucauguccgccggcguccucaccgcccucaugcucaugaucuuccucaugaccugcugccgccgcggcaaccaggccggcuccaagcagcacggccucgagggcaccggccgcaaggucuccgucaccucccagaacggcaaggucaucuccuccugggaguccuacaaguccggcggcgagacccgccucuga

SEQ ID NO: 126939 - RNA, 1575 nt, Artificial Sequence
  derived and/or modified CDS sequence (opt2) from glycoprotein__RABV__EU086157.1
augaucccccaggcccuccucuucgucccccuccucgucuucucccucugcuucggcaaguuccccaucuacaccauccccgacaagcucggccccuggucccccaucgacauccaccaccucuccugccccaacaaccucgucgucgaggacgagggcugcaccaaccucuccggcuucuccuacauggagcucaaggucggcuacaucuccgccaucaaggucaacggcuucaccugcaccggcgucgucaccgaggccgagaccuacaccaacuucgucggcuacgucaccaccaccuucaagcgcaagcacuuccgccccacccccgacgccugccgcgccgccuacaacuggaagauggccggcgacccccgcuacgaggagucccuccacaaccccuaccccgacuaccacuggcuccgcaccgucaagaccaccaaggagucccucgucaucaucucccccuccgucuccgaccucgaccccuacgacaagucccuccacucccgcgucuuccccuccggcaagugcuccggcaucaccgucuccuccaccuacugccccaccaaccacgacuacaccaucuggaugcccgagaacccccgccucggcaccuccugcgacaucuucaccaacucccgcggcaagcgcgccuccaagggcuccaagaacugcggcuucgucgacgagcgcggccucuaccgcucccucaagggcgccugcaagcucaagcucugcggcguccucggccuccgccucauggacggcaccugggccgccauccagaccuccgacgaggccaaguggugcccccccgaccagcucgucaacauccacgacuuccgcuccgacgagaucgagcaccucgucgucgaggagcucgucaagaagcgcgaggagugccucgacgcccucgaguccaucaugaccaccaaguccgucuccuuccgccgccucucccaccuccgcaagcucguccccggcuucggcaaggccuacaccaucuucaacaagacccucauggaggccgacgcccacuacaaguccguccgcaccuggaacgagaucauccccuccaagggcugccuccgcgucggcggccgcugccacccccacgucaacggcgucuucuucaacggcaucauccucggccccgacggccacguccucauccccgagaugcaguccucccuccuccagcagcacauggagcuccucgaguccuccgucaucccccucaugcacccccucgccgaccccuccaccgucuucaaggacggcgacgaggccgaggacuucgucgagguccaccuccccgacguccacaagcaggucuccggcgucgaccucggccuccccuccuggggcaaguacguccucauguccgucggcgcccucaucgcccucaugcucaugaucuuccucaugaccugcugccgcaaggccaacggcgucgaguccaugcagcaccgccucggcgagaccggccgcaaggucuccgucaccucccaguccggccgcgucaucuccuccugggaguccuacaaguccggcggcgagaccaagcucuga

SEQ ID NO: 126940 - RNA, 1575 nt, Artificial Sequence
  derived and/or modified CDS sequence (opt2) from glycoprotein__RABV__EU086158.1
augaucccccaggcccuccucuucgucccccuccucgucuucucccucugcuucggcaaguuccccaucuacaccauccccgacaagcucggccccuggucccccaucgacauccaccaccucuccugccccaacaaccucgucgucgaggacgagggcugcaccaaccucuccggcuucuccuacauggagcucaaggucggcuacaucuccgccaucaaggucaacggcuucaccugcaccggcgucgucaccgaggccgagaccuacaccaacuucgucggcuacgucaccaccaccuucaagcgcaagcacuuccgccccacccccgacgccugccgcgccgccuacaacuggaagauggccggcgacccccgcuacgaggagucccuccacaaccccuaccccgacuaccacuggcuccgcaccgucaagaccaccaaggagucccucgucaucaucucccccuccgucuccgaccucgaccccuacgacaagucccuccacucccgcgucuuccccuccggcaagugcuccggcaucaccgucuccuccaccuacugccccaccaaccacgacuacaccaucuggaugcccgagaacccccgccucggcaccuccugcgacaucuucaccaacucccgcggcaagcgcgccuccaagggcuccaagaccugcggcuucgucgacgagcgcggccucuaccgcucccucaagggcgccugcaagcucaagcucugcggcguccucggccuccgccucauggacggcaccugggccgccauccagaccuccgacgaggccaaguggugcccccccgaccagcucgucaacauccacgacuuccgcuccgacgagaucgagcaccucgucgucgaggagcucgucaagaagcgcgaggagugccucgacgcccucgaguccaucaugaccaccaaguccgucuccuuccgccgccucucccaccuccgcaagcucguccccggcuucggcaaggccuacaccaucuucaacaagacccucauggaggccgacgcccacuacaaguccguccgcaccuggaacgagaucauccccuccaagggcugccuccgcgucggcggccgcugccacccccacgucaacggcgucuucuucaacggcaucauccucggccccgacggccacguccucauccccgagaugcaguccucccuccuccgccagcacauggagcuccucgaguccuccgucaucccccucaugcacccccucgccgaccccuccaccgucuucaaggacggcgacgaggccgaggacuucgucgagguccaccuccccgacguccacaaccagaucuccggcgucgaccucggccuccccuccuggggcaaguacguccucauguccgucggcgccaugaucgcccucaugcucgucaucuuccucaccaccugcugccgcaaggccaacggcgccgagaccauccagcaccgccucggcgagaccggccgcaaggucuccgucaccucccaguccggccgcgucauguccuccugggaguccuacaaguccggcggcgagaccaagcucuga

SEQ ID NO: 126941 - RNA, 1575 nt, Artificial Sequence
  derived and/or modified CDS sequence (opt2) from glycoprotein__RABV__EU086159.1
augaucccccaggcccuccucuucgucccccuccucgucuucucccucugcuucggcaaguuccccaucuacaccauccccgacaagcucggccccuggucccccaucgacauccaccaccucuccugccccaacaaccucgucgucgaggacgagggcugcaccaaccucuccggcuucuccuacauggagcucaaggucggcuacaucuccgccaucaaggucaacggcuucaccugcaccggcgucgucaccgaggccgagaccuacaccaacuucgucggcuacgucaccaccaccuucaagcgcaagcacuuccgccccacccccgacgccugccgcgccgccuacaacuggaagauggccggcgacccccgcuacgaggagucccuccacaaccccuaccccgacuaccacuggcuccgcaccgucaagaccaccaaggagucccucgucaucaucucccccuccgucuccgaccucgaccccuacgacaagucccuccacucccgcgucuuccccuccggcaagugcuccggcaucaccgucuccuccaccuacugccccaccaaccacgacuacaccaucuggaugcccgagaacccccgccucggcaccuccugcgacaucuucaccaacucccgcggcaagcgcgccuccaagggcuccaagaccugcggcuucgucgacgagcgcggccucuacaagucccucaagggcgccugcaagcucaagcucugcggcguccucggccuccgccucauggacggcaccugggccgccauccagaccuccgacgaggccaaguggugcccccccgaccagcucgucaacauccacgacuuccgcuccgacgagaucgagcaccucgucgucgaggagcucgucaagaagcgcgaggagugccucgacgcccucgaguccaucaugaccaccaaguccgucuccuuccgccgccucucccaccuccgcaagcucguccccggcuucggcaaggccuacaccaucuucaacaagacccucauggaggccgacgcccacuacaaguccguccgcaccuggaacgagaucauccccuccaagggcugccuccgcgucggcggccgcugccacccccacgucaacggcgucuucuucaacggcaucauccucggccccgacggccacguccucauccccgagaugcaguccucccuccuccagcagcacauggagcuccucgaguccuccgucaucccccucaugcucccccucgccgaccccuccaccgucuucaaggacggcgacgaggccgaggacuucgucgagguccaccuccccgacguccacaagcaggucuccggcgucgaccucggccuccccuccuggggcaaguacguccucauguccgucggcgccaugaucgcccucaugcucaugaucuuccucaccaccugcugccgcaaggccaacggcgcccgcaccaugcagcacgccuccggcgagaccggccgcaaggucuccgucaccuuccccuccggccgcgucaucuccuccugggaguccuacaaguccggcggcgagaccaagcucuga

SEQ ID NO: 126942 - RNA, 1575 nt, Artificial Sequence
  derived and/or modified CDS sequence (opt2) from glycoprotein__RABV__EU086160.1
augaucccccaggcccuccucuucgucccccuccucgucuucucccucugcuucggcaaguuccccaucuacaccauccccgacaagcucggccccuggucccccaucgacauccaccaccucuccugccccaacaaccucgucgucgaggacgagggcugcaccaaccucuccggcuucuccuacauggagcucaaggucggcuacaucuccgccaucaaggucaacggcuucaccugcaccggcgucgucaccgaggccgagaccuacaccaacuucgucggcuacgucaccaccaccuucaagcgcaagcacuuccgccccacccccgacgccugccgcgccgccuacaacuggaagauggccggcgacccccgcuacgaggagucccuccacaaccccuaccccgacuaccacuggcuccgcaccgucaagaccaccaaggagucccucgucaucaucucccccuccgucuccgaccucgaccccuacgacaagucccuccacucccgcgucuuccccuccggcaagugcuccggcaucaccgucuccuccaccuacugccccaccaaccacgacuacaccaucuggaugcccgagaacccccgccucggcaccuccugcgacaucuucaccaacucccgcggcaagcgcgccuccaagggcuccaagaccugcggcuucgucgacgagcgcggccucuacaagucccucaagggcgccugcaagcucaagcucugcggcguccucggccuccgccucauggacggcaccugggccgccauccagaccuccgacgaggccaaguggugcccccccgaccagcucgucaacauccacgacuuccgcuccgacgagaucgagcaccucgucgucgaggagcucgucaagaagcgcgaggagugccucgacgcccucgaguccaucaugaccaccaaguccgucuccuuccgccgccucucccaccuccgcaagcucguccccggcuucggcaaggccuacaccaucuucaacaagacccucauggaggccgacgcccacuacaaguccguccgcaccuggaacgagaucauccccuccaagggcugccuccgcgucggcggccgcugccacccccacgucaacggcgucuucuucaacggcaucauccucggccccgacggccacguccucauccccgagaugcaguccucccuccuccagcagcacauggagcuccucgaguccuccgucaucccccucaugcacccccucgccgaccccuccaccgucuucaaggacggcgacgaggccgaggacuucgucgagguccaccuccccgacguccacaagcaggucuccggcgucgaccucggccuccccuccuggggcaaguacguccucauguccgucggcgccaugaucgcccucaugcucaugaucuuccucaccaccugcugccgcaaggccaacggcgccgagaccauccagcaccgccucggcgagaccggccgcaaggucuccgucaccucccaguccggccgcgucaucuccuccugggaguccuacaaguccggcggcgagaccaagcucuga

SEQ ID NO: 126943 - RNA, 1575 nt, Artificial Sequence
  derived and/or modified CDS sequence (opt2) from glycoprotein__RABV__EU126641.1
auggucccccagguccuccucuucguccuccuccucggcuucucccucugcuucggcaaguuccccaucuacaccauccccgacaagcucggccccuggucccccaucgacauccaccaccuccgcugccccaacaaccucgucgucgaggacgagggcugcaccaaccucuccggcuucuccuacauggagcucaaggucggcuacaucuccgccaucaaggucaacggcuucaccugcaccggcgucgucaccgaggccgagaccuacaccaacuucgucggcuacgucaccaccaccuucaagcgcaagcacuuccgccccacccccgacgccugccgcgccgccuacaacuggaagauggccggcgacccccgcuacgaggagucccuccagaaccccuaccccgacuaccacuggcuccgcaccguccgcaccaccaaggagucccucaucaucaucucccccuccgucaccgaccucgaccccuacgacaagucccuccacucccgcgucuuccccggcggcaagugcuccggcaucaccgucuccuccaccuacugcuccaccaaccacgacuacaccaucuggaugcccgaggacccccgccccggcacccccugcgacaucuucaccaacucccgcggcaagcgcgccuccaacggcaacaagaccugcggcuucgucgacgagcgcggccucuacaagucccucaagggcgccugccgccucaagcucugcggcguccucggccuccgccucauggacggcaccugggucgccaugcagaccuccgacgagaccaaguggugcucccccgaccagcucgucaaccuccacgacuuccgcuccaacgagaucgagcaccucgucgucgaggaccucgucaagaagcgcgaggagugccucgacacccucgaguccaucaugaccaccaaguccgucuccuuccgccgccucucccaccuccgcaagcucguccccggcuucggcaaggccuacaccaucuucaacaagacccucauggaggccgacguccacuacaaguccguccgcaccuggaacgagaucauccccuccaagggcugccucaaggucggcggccgcugccacccccacgucaacggcgucuucuucaacggcaucauccucggccccgacgaccgcguccucauccccgagaugcaguccucccuccuccgccagcacauggagcuccucgaguccuccgucaucccccucaugcacccccucgccgaccccuccaccgucuucaaggagggcgacgaggccgaggacuucgucgagguccaccuccccgacgucuacaagaagaucuccggcgucgaccucggccuccccaacuggggcaaguacguccucaugaccgccggcgccaugaucggccucguccucaucuucucccucaugaccuggugccgccgcgccaaccgccccgaguccaagcagcgcuccuucggcggcaccggcggcaacgucuccgucaccucccaguccggcaaggucauccccuccugggaguccuacaaguccggcggcgagauccgccucuga

SEQ ID NO: 126944 - RNA, 1575 nt, Artificial Sequence
  derived and/or modified CDS sequence (opt2) from glycoprotein__RABV__EU182346.1
auggucccccaggcccuccucuucgucccccuccucgucuucccccucugcuucggcaaguuccccaucuacaccauccccgacaagcucggccccuggucccccaucgacauccaccaccucuccugccccaacaaccucgucgucgaggacgagggcugcaccaaccucuccggcuucuccuacauggagcucaaggucggcuacauccucgccaucaagaugaacggcuucaccugcaccggcgucgucaccgaggccgagaccuacaccaacuucgucggcuacgucaccaccaccuucaagcgcaagcacuuccgccccacccccgacgccugccgcgccgccuacaacuggaagauggccggcgacccccgcuacgaggagucccuccacaaccccuaccccgacuaccgcuggcuccgcaccgucaagaccaccaaggagucccucgucaucaucucccccuccgucgccgaccucgaccccuacgaccgcucccuccacucccgcgucuuccccuccggcaagugcuccggcgucgccgucuccuccaccuacugcuccaccaaccacgacuacaccaucuggaugcccgagaacccccgccucggcauguccugcgacaucuucaccaacucccgcggcaagcgcgccuccaagggcuccgagaccugcggcuucgucgacgagcgcggccucuacaagucccucaagggcgccugcaagcucaagcucugcggcguccucggccuccgccucauggacggcaccugggucgccaugcagaccuccaacgagaccaaguggugcccccccgaccagcucgucaaccuccacgacuuccgcuccgacgagaucgagcaccucgucgucgaggagcucguccgcaagcgcgaggagugccucgacgcccucgaguccaucaugaccaccaaguccgucuccuuccgccgccucucccaccuccgcaagcucguccccggcuucggcaaggccuacaccaucuucaacaagacccucauggaggccgacgcccacuacaaguccguccgcaccuggaacgagauccuccccuccaagggcugccuccgcgucggcggccgcugccacccccacgucaacggcgucuucuucaacggcaucauccucggccccgacggcaacguccucauccccgagaugcaguccucccuccuccagcagcacauggagcuccucgaguccuccgucaucccccucguccacccccucgccgaccccuccaccgucuucaaggacggcgacgaggccgaggacuucgucgagguccaccuccccgacguccacaaccaggucuccggcgucgaccucggccuccccaacuggggcaaguacguccuccucuccgccggcgcccucaccgcccucaugcucaucaucuuccucaugaccugcugccgccgcgucaaccgcuccgagcccacccagcacaaccuccgcggcaccggccgcgaggucuccgucaccccccaguccggccgcaucaucuccuccugggagucccacaaguccggcggcgagacccgccucuga

SEQ ID NO: 126945 - RNA, 1575 nt, Artificial Sequence
  derived and/or modified CDS sequence (opt2) from glycoprotein__RABV__EU182347.1
auggucccccaggcccuccucuucgucccccuccucgucuucccccucugcuucggcaaguuccccaucuacaccauccccgacaagcucggccccuggucccccaucgacauccaccaccucuccugccccaacaaccucgucgucgaggacgagggcugcaccaaccucuccggcuucuccuacauggagcucaaggucggcuacaaccucgccaucaagaugaacggcuucaccugcaccggcgucgucaccgaggccgagaccuacaccaacuucgucggcuacgucaccaccaccuucaagcgcaagcacuuccgccccacccccgacgccugccgcgccgccuacaacuggaagauggccggcgacccccgcuacgaggagucccuccacaaccccuaccccgacuaccgcuggcuccgcaccgucaagaccaccaaggagucccucgucaucaucucccccuccgucgccgaccucgaccccuacgaccgcucccuccacucccgcgucuuccccuccggcaagugcuccggcgucgccgucuccuccaccuacugcuccaccaaccacgacuacaccaucuggaugcccgagaacccccgccucggcauguccugcgacaucuucaccaacucccgcggcaagcgcgccuccaagggcuccgagaccugcggcuucgucgacgagcgcggccucuacaagucccucaagggcgccugcaagcucaagcucugcggcguccucggccuccgccucauggacggcaccugggucgccaugcagaccuccaacgagaccaaguggugcccccccgaccagcucgucaaccuccacgacuuccgcuccgacgagaucgagcaccucgucgucgaggagcucguccgcaagcgcgaggagugccucgacgcccucgaguccaucaugaccaccaaguccgucuccuuccgccgccucucccaccuccgcaagcucguccccggcuucggcaaggccuacaccaucuucaacaagacccucauggaggccgacgcccacuacaaguccguccgcaccuggaacgagauccuccccuccaagggcugccuccgcgucggcggccgcugccacccccacgucaacggcgucuucuucaacggcaucauccucggccccgacggcaacguccucauccccgagaugcaguccucccuccuccagcagcacauggagcuccucgaguccuccgucaucccccucguccacccccucgccgaccccuccaccgucuucaaggacggcgacgaggccgaggacuucgucgagguccaccuccccgacguccacaaccaggucuccggcgucgaccucggccuccccaacuggggcaaguacguccuccucuccgccggcgcccucaccgcccucaugcucaucaucuuccucaugaccugcugccgccgcgucaaccgcuccgagcccacccagcacaacauccgcggcaccggccgcgaggucuccgucaccccccaguccggcaagaucaucuccuccugggagucccacaaguccggcggcgagacccgccucuga

SEQ ID NO: 126946 - RNA, 1575 nt, Artificial Sequence
  derived and/or modified CDS sequence (opt2) from glycoprotein__RABV__EU253477.1
augaccccccaggcccuccucuucgucccccuccucgucuucuccuccugcuucggcaaguuccccaucuacaccauccccgacaagcucggccccuggucccccaccgacauccaccaccucuccugccccaacaaccucgucgucgaggacgagggcugcaccaaccucuccggcuucuccuacauggagcucaaggucggcuacaucuccgccaucaaggucaacggcuucaccugcaccggcgucgucaccgaggccgagaccuacaccaacuucgucggcuacgucaccaccaccuucaagcgcaagcacuuccgccccaugcccgacgccugccgcgccgccuacaacuggaagauggccggcgacccccgcuacgaggagucccuccacaaccccuaccccgacuaccacuggcuccgcaccgucaagaccaccaaggagucccucgucaucaucucccccuccgucgccgaccucgaccccuacgacaagucccuccacucccgcgucuuccccggcggcaagugcuccggcaucaccgucuccuccaccugcugcuccaccaaccacgacuacaccaucuggaugcccgagaacccccgccucggcaccuccugcgacaucuucaccaacucccgcggcaagcgcgccuccaagggcggcaagaccugcggcuucgucgacgagcgcggccucuacaagucccucaagggcgccugcaagcucaagcucugcggcguccucggccuccgccucauggacggcaccugggucgccauccagaccuccgacgagaucaaguggugcucccccgaccagcucgucaaccuccacgacuuccacuccgacgagaucgagcaccucgucgucgaggagcucgucaagaagcgcgaggagugccucgacgcccucgagaccaucaugaccaccaaguccgucuccuuccgccgccucucccaccuccgcaagcucguccccggcuuccgcaaggccuacaccaucuucaacaagacccucauggaggccgacgcccacuacaaguccauccgcaccuggaacgagaucauccccuccaagggcugccuccgcgucggcggccgcugccacccccacgucaacggcgucuucuucaacggcaucauccucggccccgacggccacguccucauccccgagaugcaguccucccuccuccaccagcacauggagcuccucgaguccuccgucaucccccucaugcacccccucgccgaccccuccaccgucuucaaggacggcgacgaggccgaggacuucgucgagguccaccuccccgacguccacaagcagaucuccggcgucgaccucggccuccccaacuggggcaaguacguccucaucuccgccggcgcccucaccgcccucaugcucaccaucuuccucaugaccugcugccgcaagaccaaccgcgccgaguccauccagcacucccccggcgagaccggccgcaaggucuccgucaccucccacaacggccgcgucaucuccuccugggaguccuacaaguccggcggcgagaccaagcucuga

SEQ ID NO: 126947 - RNA, 1575 nt, Artificial Sequence
  derived and/or modified CDS sequence (opt2) from glycoprotein__RABV__EU267742.1
augaucccccagguccuccuccucgucccccuccucgucuucuccuccugcuucggcaaguuccccaucuacaccauccccgacaagcucggccccuggucccccaucgacauccaccaccucuccugccccaacaaccucgucgucgaggacgagggcugcaccaaccucuccggcuucuccuacauggagcucaaggucggcuacaucuccgccaucaaggucaacggcuucaccugcaccggcgucgucaccgaggccgagaccuacaccaacuucgucggcuacgucaccaccaccuucaagcgcaagcacuuccgccccacccccgacgccugccgcgccgccuacaacuggaagauggccggcgacccccgcuacgaggagucccuccacaaccccuaccccgacuaccacugguuccgcaccgucaagaccuccaaggagucccucgucaucaucucccccuccgucgccgaccucgaccccuacgacaagucccuccacucccgcgucuuccccggcggcaagugcuccggcaucaccgucuccuccaccugcugcuccaccaaccacgacuacaccaucuggaugcccgagaacccccgccucggcaccuccugcgacaucuucaccaacucccgcggcaagcgcgccuccaagggcggcaagaccugcggcuucgucgacgagcgcggccucuacaagucccucaagggcgccugcaagcucaagcucugcggcguccucggccuccgccucauggacggcaccugggucgccauccagaccuccgacgagaucaaguggugcucccccgaccagcucgucaaccuccacgacuuccacuccgacgagaucgagcaccucgucgucgaggagcucgucaagaagcgcgaggagugccucgacgcccucgagaccaucaugaccaccaaguccgucuccuuccgccgccucucccaccuccgcaagcucguccccggcuucggcaaggccuacaccaucuucaacaagacccucauggaggccgacgcccacuacaaguccauccgcaccuggaacgagaucauccccuccaagggcugccuccgcgucggcggccgcugccacccccacgucaacggcgucuucuacaacggcaucauccucggccccgacggccacguccucauccccgagaugcaguccucccuccuccaccagcacauggagcuccucgaguccuccgucaucccccucaugcacccccucgccgaccccuccaccgucuucaaggacggcgacgaggccgaggacuucgucgagguccaccuccccgacguccacaagcagaucuccggcgucgaccucggccuccccaacuggggcaaguacguccucgucuccgccggcgcccucaccgcccucaugcucaugaucuuccucaugaccugcugccgcaagaccaaccgcgccgaguccauccagcacucccccggcgagaccggccgcaaggucuccgucaccucccacaacggccgcgucaucuccuccugggaguccuacaaguccggcggcgagaccaagcucuga

SEQ ID NO: 126948 - RNA, 1575 nt, Artificial Sequence
  derived and/or modified CDS sequence (opt2) from glycoprotein__RABV__EU267743.1
augaucccccagguccuccucuucgucccccuccucgucuucuccuccugcuucggcaaguuccccaucuacaccaccuccgacaagcucggccccuggucccccaucgacaugcaccaccucuccugccccaacaaccucgucgucgaggacgagggcugcaccaaccucuccggcuucuccuacauggagcucaaggucggcuacaucuccgccaucaaggucaacggcuucaccugcaccggcgucgucaccgaggccgagaccuacaccaacuucgucggcuacgucaccaccaccuucaagcgcaagcacuuccgccccaugcccgacgccugccgcgccgccuacaacuggaagauggccggcgacccccgcuacgaggagucccuccacaaccccuaccccgacuaccacuggcuccgcaccgucaagaccaccaaggagucccucgucaucaucucccccuccgucgccgaccucgaccccuacgacaagucccuccacucccgcgucuuccccggcggcaagugcuccggcaucaccgucuccuccaccugcugcuccaccaaccacgacuacaccaucuggaugcccgagaacccccgccucggcaccuccugcgacaucuucaccaacucccgcggcaagcgcgccuccaagggcggcaagaccugcggcuucgucgacgagcgcggccucuacaagucccucaagggcgccugcaagcucaagcucugcggcguccucggccuccgccucauggacggcaccugggucgccauccagaccuccgacgagaucaaguggugcucccccgaccagcucgucaaccuccacgacuuccacuccgacgagaucgagcaccucgucgucgaggagcucgccaaggagcgcgaggagugccucgacgcccucgaggccaucaugaccaccaaguccgucuccuuccgccgccucucccaccuccgcaagcucguccccggcuucggcaaggccuacaccaucuucaacaagacccucauggaggccgacgcccacuacaaguccauccgcaccuggaacgagaucauccccuccaagggcugccuccgcgucggcggccgcugccacccccacgucaacggcgucuucuucaacggcaucauccucggccccgacggccacguccucauccccgagaugcaguccucccuccuccaccagcacauggagcuccucgaguccuccgucaucccccucaugcacccccucgccgaccccuccaccgucuucaaggacggcgacgaggccgaggacuucgucgaggaccaccuccccgacguccacaagcagaucuccggcgucgaccucggccuccccaacuggggcaaguacguccucaucuccgccggcgcccucaccgcccucauguccaugaucuuccucaugaccugcugccgcaagaccaaccgcgccgaguccauccagcacucccccggcgagaccggccgcaaggucuccgucaccucccacaacggccgcgucaucuccuccugggaguccuacaaguccggcggcgagaccaagcucuga

SEQ ID NO: 126949 - RNA, 1575 nt, Artificial Sequence
  derived and/or modified CDS sequence (opt2) from glycoprotein__RABV__EU267744.1
auggucccccagguccuccucuucgucccccuccucgucuucuccuccugcuucggcaaguuccccaucuacaccauccccgacaagcucggccccuggucccccaucgacauccaccaccucuccugccccaacaaccucgucgucgaggacgagggcugcaccaaccucuccggcuucuccuacauggagcucaaggucggcuacaucuccgccaucaaggucaacggcuucaccugcaccggcgucgucaccgaggccgagaccuacaccaacuucgucggcuacgucaccaccaccuucaagcgcaagcacuuccgccccaugcccgacgccugccgcgccgccuacaacuggaagauggccggcgacccccgcuacgaggagucccuccacaaccccuaccccgacuaccacuggcuccgcaccgucaagaccaccaaggagucccucgucaucaucucccccuccgucgccgaccucgaccccuacgacaagucccuccacucccgcgucuuccccggcggcaagugcuccggcaucaccgucuccuccaccugcugcuccaccaaccacgacuacaccaucuggaugcccgagaacccccgccucggcaccuccugcgacaucuucaccaacucccgcggcaagcgcgccuccaagggcggcaagaccugcggcuucgucgacgagcgcggccucuacaagucccucaagggcgccugcaagcucaagcucugcggcguccccggccuccgccucauggacggcaccugggucgccauccagaccuccgacgagaucaaguggugcucccccgaccagcucgucaaccuccacgacuuccacuccgacgagaucgagcaccucgucgucgaggagcucgucaagaagcgcgaggagugccucgacgcccucgagaccaucauggccaccaaguccgucuccuuccgccgccucucccaccuccgcaagcucguccccggcuucggcaaggccuacaccaucuucaacaagacccucauggaggccgacgcccacuacaaguccauccgcaccuggaacgagaucauccccuccaagggcugccuccgcgucggcggccgcugccacccccacgucuccggcgucuucuucaacggcaucauccucggccccgacggccacguccucauccccgagaugcaguccucccuccuccaccagcacauggagcuccucgaguccuccgucaucccccucaugcacccccucgccgaccccuccaccgucuucaaggacggcgacgaggccgaggacuucgucgagguccaccuccccgacguccacaagcagaucuccggcgucgaccucggccuccccaacugggagaaguacguccucaucuccgccggcgcccucaccgcccucaugcucaugaucuuccucaugaccugcugccgcaaggccaaccgcgccgaguccauccagcacaaccccggcgagaccggccgcaaggucuccgucaccucccacaacggccgcgucaucuccuccugggaguccuacaaguccggcggcgaggccaagcucuga

SEQ ID NO: 126950 - RNA, 1575 nt, Artificial Sequence
  derived and/or modified CDS sequence (opt2) from glycoprotein__RABV__EU267745.1
auggucccccaggcccuccucuucgucccccuccucgucuucccccucugcuucggcaaguuccccaucuacaccauccccgacaagcucggccccuggucccccaucgacauccaccaccuccgcugccccaacaaccucgucgucgaggacgagggcugcaccaaccucuccggcuucuccuacauggagcucaaggucggcuacauccucgccaucaagaugaacggcuucaccugcaccggcgucgucaccgaggccgagaccuacaccaacuucgucggcuacgucaccaccaccuucaagcgcaagcacuuccgccccacccccgacgccugccgcgccgccuacaacuggaagauggccggcgacccccgcuacgaggagucccuccacaaccccuaccccgacuaccgcuggcuccgcaccgucaagaccaccaaggagucccucgucaucaucucccccuccgucgccgaccucgaccccuacgaccgcucccuccacucccgcgucuuccccuccggcaagugcuccggcgucgccgucuccuccaccuacugcuccaccaaccacgacuacaccaucuggaugcccgagaacccccgccucggcauguccugcgacaucuucaccaacucccgcggcaagcgcgccuccaagggcuccgagaccugcggcuucgucgacgagcgcggccucuacaagucccucaagggcgccugcaagcucaagcucugcggcguccucggccuccgccucauggacggcaccugggucgccaugcagaccuccaacgagaccaaguggugcccccccgaccagcucgucaaccuccacgacuuccgcuccgacgagaucgagcaccucgucgucgaggagcucguccgcaagcgcgaggagugccucgacguccucgaguccaucaugaccaccaaguccgucuccuuccgccgccucucccaccuccgcaagcucguccccggcuucggcaaggccuacaccaucuucaacaagacccucauggaggccgacgcccacuacaaguccguccgcaccuggaacgagauccuccccuccaagggcugccuccgcgucggcggccgcugccacccccacgucuccggcgucuucuucaacggcaucauccucggccccgacggcaacguccucauccccgagaugcaguccucccuccuccagcagcacauggagcuccucgaguccuccgucaucccccucguccacccccucgccgaccccuccaccgucuucaaggacggcgacgaggccgaggacuucgucgagguccaccuccccgacguccacaaccaggucuccggcgucgaccucggccuccccaacuggggcaaguacguccuccucuccgccggcgcccucaccgcccucaugcucaucaucuuccucaugaccugcugccgccgcgucaaccgcuccgagcccacccagcacaaccuccgcggcaccggccgcgaggucuccgucaccccccaguccggcaagaucaucuccuccugggagucccacaaguccggcggcgagacccgccucuga

SEQ ID NO: 126951 - RNA, 1575 nt, Artificial Sequence
  derived and/or modified CDS sequence (opt2) from glycoprotein__RABV__EU267746.1
auggucccccaggcccuccucuucgucccccuccucgccaucccccucugcuucggcaaguuccccaucuacaccauccccgacaagcucggccccuggucccccaucgacauccaccaccucuccugccccaacaaccucgucgucgaggacgagggcugcaccaaccucuccggcuucuccuacauggagcucaaggucggcuacaucuccgccaucaaggucaacggcuucaccugcaccggcgucgucaccgaggccgagaccuacaccaacuucgucggcuacgucaccaccaccuucaagcgcaagcacuuccgccccacccccgacgccugccgcuccgccuacaacuggaagauggccggcgacccccgcuacgaggagucccuccacaaccccuaccccgacuaccacuggcuccgcaccgucaagaccaccaaggaguccuucgucaucaucucccccuccgucgccgaccucgaccccuacgacaagucccuccacucccgcgucuucccccgcggcaagugcuccggcaucaccgucuccuccaccuacugcuccaccaaccacgacuacaccaucuggaugcccgagaacccccgccucggcaccuccugcgacaucuucaccaacucccgcggcaagcgcgccuccaagggcuccaagaccugcggcuucgucgacgagcgcggccucuacaagucccucaagggcgccugcaagcucaagcucugcggcguccucggccuccgccucauggacggcaccugggucgccauccagaccuccgucgagaccaaguggugcccccccgaccagcucgucaaccuccacgacuuccacuccgacgagaucgagcaccucgucgucgaggagcucgucaagaagcgcgaggagugccucgacgcccucgaguccaucaugaccaccaaguccgucuccuuccgccgccucucccaccuccgcaagcucguccccggcuucggcaaggccuacaccaucuucaacaagacccucauggaggccgacgcccacuacaaguccguccgcaccuggaacgagaucauccccuccaagggcugccuccgcgucggcggccgcugccacccccacgucaacggcgucuucuucaacggcaucauccucggccccgacggccacguccucauccccgagaugcaguccucccuccuccagcagcacauggagcuccucgaguccuccgucaucccccucaugcacccccucgccgaccccuccaccgucuucaaggacggcgacgaggccgaggacuucgucgagguccaccuccccgacguccacaagcaggucuccggcgucgaccucggccuccccuccuggggcaaguacguccucauguccgccggcauccucaccgcccucaugcucaugaucuuccucaugaccugcugccgccgcaccaaccgcgccgaguccauccagcacucccucggcgagaccggccgcaaggucuccgucaccucccaguccggccgcgucaucuccuccugggaguccuacaaguccggcggcgagaccaagcucuga

SEQ ID NO: 126952 - RNA, 1575 nt, Artificial Sequence
  derived and/or modified CDS sequence (opt2) from glycoprotein__RABV__EU267747.1
auggucccccaggcccuccucuucgucccccuccucgccaucccccucugcuucggcaaguuccccaucuacaccauccccgacaagcucggccccuggucccccaucgacauccaccaccucuccugccccaacaaccucgucgucgaggacgagggcugcaccaaccuccccggcuucuccuacauggagcucaaggucggcuacaucuccgccaucaaggucaacggcuucaccugcaccggcgucgucaccgaggccgagaccuacaccaacuucgucggcuacgucaccaccaccuucaagcgcaagcacuuccgccccacccccgacgccugccgcuccgccuacaacuggaagauggccggcgacccccgcuacgaggaguccccccacaaccccuaccccgacuaccacuggcuccgcaccgucaagaccaccaaggaguccuucgucaucaucucccccuccgucgccgaccucgaccccuacgacaagucccuccacucccgcgucuucccccgcggcaagugcuccggcaucaccgucuccuccaccuacugcuccaccaaccacgacuacaccaucuggaugcccgagaacccccgccucggcaccuccugcgacaucuucaccaacucccgcggcaagcgcgccuccaagggcuccaagaccugcggcuucgucgacgagcgcggccucuacaagucccucaagggcgccugcaagcucaagcucugcggcguccucggccuccgccucauggacggcaccugggucgucauccagaccuccgacgagaccaaguggugcccccccgaccagcucgucaaccuccacgacuuccacuccgacgagaucgagcaccucgucgucgaggagcucgucaagaagcgcgaggagugccucgacgcccucgaguccaucaugaccaccaaguccgucuccuuccgccgccucucccaccuccgcaagcucguccccggcuucggcaaggccuacaccaucuucaacaagacccucauggaggccgacgcccacuacaaguccguccgcaccuggaacgagaucauccccuccaagggcugccuccgcgucggcggccgcugccacccccacgucaacggcgucuucuucaacggcaucauccucggccccgacggccacguccucauccccgagaugcaguccucccuccuccagcagcacauggagcuccucgaguccuccgucaucccccucaugcacccccucgccgaccccuccaccgucuucaaggacggcgacgaggccgaggacuucgucgagguccgccuccccgacguccacaagcaggucuccggcgucgaccucggccuccccuccuggggcaaguacguccucauguccgccggcauccucaccgcccucaugcucaugaucuuccucaugaccugcugccgccgcaccaacggcgccgaguccauccagcacucccucggcgagaccggccgcaaggucuccgucaccucccaguccggccgcgucaucuccuccugggaguccuacaaguccggcggcgagaccaagcucuga

SEQ ID NO: 126953 - RNA, 1575 nt, Artificial Sequence
  derived and/or modified CDS sequence (opt2) from glycoprotein__RABV__EU267748.1
augaucccccagguccuccucuucuucccccuccucgucuucuccuccugcuucggcaaguuccccaucuacaccauccccgacaagcucggccccuggucccccaucgacauccaccaccucuccugccccaacaaccucgucgucgaggacgagggcugcaccaaccucuccggcuucuccuacauggagcucaaggucggcuacaucuccgccaucaaggucaacggcuucaccugcaccggcgucgucaccgaggccgagaccuacaccaacuucgucggcuacgucaccaccaccuucaagcgcaagcacuuccgccccaugcccgacgccugccgcgccgccuacaacuggaagauggccggcgacccccgcuacgaggagucccuccacaaccccuaccccgacuaccacuggcuccgcaccgucaagaccaccaaggagucccucgucaucaucucccccuccgucgccgaccucgaccccuacgaccgcucccuccacucccgcgucuuccccggcggcaagugcuccggcaucaccgucuccuccaccugcugcuccaccaaccacgacuacaccaucuggaugcccgagaacccccgccuccgcaccuccugcgacaucuucaccaacucccgcggcaagcgcgcccccaagggcggcaagaccugcggcuucgucgacgagcgcggccucuacaagucccucaagggcgccugcaagcucaagcucugcggcguccucggccuccgccucauggacggcaccugggucgccauccagaccuccgacgagaucaaguggugcucccccgaccagcucgucaaccuccacgacuuccacuccgacgagaucgagcaccucgucgucgaggagcucgucaagaagcgcgaggagugccucgacgcccucgagaccaucaugaccaccaaguccgucuccuuccgccgccucucccaccuccgcaagcucguccccggcuucggcaaggccuacaccaucuucaacaagacccucauggaggccgacgcccacuacaaguccauccgcaccuggaacgagaucauccccuccaagggcugccuccgcgucggcggccgcugccacccccacgucaacggcgucuucuucaacggcaucauccucggccccgacggccacguccucauccccgagaugcaguccucccuccuccaccagcacauggagcuccucgaguccuccgucaucccccucaugcacccccucgccgaccccuccaccgucuucaaggacggcgacgaggccgaggacuucgucgagguccaccuccccgacguccacaagcagaucuccggcgucgaccucggccuccccaacuggggcaaguacguccucaucuccgccggcgcccucaccgcccucauguccaugaucuuccucaugaccugcugccgcaagaccaaccgcgccgaguccauccagcacucccccggcgagaccggccgcaaggucuccgucaccucccacaacggccgcgucaucuccuccugggaguccuacaaguccggcggcgagaccaagcucuga

SEQ ID NO: 126954 - RNA, 1575 nt, Artificial Sequence
  derived and/or modified CDS sequence (opt2) from glycoprotein__RABV__EU267749.1
auggucccccagguccuccucuucgucccccuccucgucuucuccuccugcuucggcaaguuccccaucuacaccauccccgacaagcucggccccuggucccccaucgacauccaccaccucuccugccccaacaaccucgucgucgaggacgagggcugcaccaaccucuccggcuucuccuacauggagcucaaggucggcuacaucuccgccaucaaggucaacggcuucaccugcaccggcgucgucaccgaggccgagaccuacaccaacuucgucggcuacgucaccaccaccuucaagcgcaagcacuuccgccccaugcccgacgccugccgcgccgccuacaacuggaagauggccggcgacccccgcuacgaggagucccuccacaaccccuaccccgacuaccacuggcuccgcaccgucaagaccaccaaggagucccucgucaucaucucccccuccgucgccgaccucgaccccuacgacaagucccuccacucccgcgucuuccccggcggcaagugcuccggcaucaccgucuccuccaccugcugcuccaccaaccacgacuacaccaucuggaugcccgagaacccccgccucggcaccuccugcgacaucuucaccaacucccgcggcaagcgcgccuccaagggcggcaagaccugcggcuucgucgacgagcgcggccucuacaagucccucaagggcgccugcaagcucaagcucugcggcguccucggccuccgccucauggacggcaccugggucgccauccagaccuccgacgagaucaaguggugcucccccgaccagcucgucaaccuccacgacuuccacuccgacgagaucgagcaccucgucgucgaggagcucgucaagaagcgcgaggagugccucgacgcccucgagaccaucaugaccaccaaguccgucuccuuccgccgccucucccaccuccgcaagcucguccccggcuucggcaaggccuacaccaucuucaacaagacccucaugggcgccgacgcccacuacaaguccauccgcaccuggaacgagaucauccccuccaagggcugccuccgcgucggcggccgcugccacccccacgucaacggcgucuucuucaacggcaucauccucggccccgacggccacgcccucauccccgagaugcaguccucccuccuccaccagcacauggagcuccucgaguccuccgucaucccccucaugcacccccucgccgaccccuccaccgucuucaaggacggcgacgaggccgaggacuucgucgagguccaccuccccgacguccacaagcagaucuccggcgucgaccucggccuccccaacuggggcaaguacguccucaucuccgccggcgcccucaccgcccucaugcucaugaucuuccucaugaccugcugccgcaaggccgaccgcgccgaguccauccagcacaaccccggcgagaccggccgcaaggucuccgucaccucccgcaacggccgcgucaucuccuccugggaguccuacaaguccggcggcgagaccaagcucuga

SEQ ID NO: 126955 - RNA, 1575 nt, Artificial Sequence
  derived and/or modified CDS sequence (opt2) from glycoprotein__RABV__EU267750.1
auggucccccagguccuccucuucgucccccuccucgucuucuccuccugcuucggcaaguuccccaucuacaccauccccgacaagcucggccccuggucccccaucgacauccaccaccucuccugccccaacaaccucgucgucgaggacgagggcugcaccaaccucuccggcuucuccuacauggagcucaaggucggcuacaucuccgccaucaaggucaacggcuacaccugcaccggcgucgucaccgaggccgagaccuacaccaacuucgucggcuacgucaccaccaccuucaagcgcaagcacuuccgccccaugcccgacgccugccgcgccgccuacaacuggaagauggccggcgacccccgcuacgaggagucccuccacaaccccuaccccgacuaccacuggcuccgcaccgucaagaccaccaaggagucccucgucaucaucucccccuccgucgccgaccucgaccccuacgacaagucccuccacucccgcgucuuccccggcggcaagugcuccggcaucaccgucuccuccaccugcugcuccaccaaccacgacuacaccaucuggaugcccgagaacccccgccucggcaccuccugcgacaucuucaccaacucccgcggcaagcgcgccuccaagggcggcaagaccugcggcuucgucgacgagcgcggccucuacaagucccucaagggcgccugcaagcucaagcucugcggcguccucggccuccgccucauggacggcaccugggucgccauccagaccuccgacgagaucaaguggugcucccccgaccagcucgucaaccuccacgacuuccacuccgacgagaucgagcaccucgucgucgaggagcucgucaagaagggcgaggagugccucgacgcccucgagaccaucaugaccaccaaguccgucuccuuccgccgccucucccaccuccgcaagcucguccccggcuucggcaaggccuacaccaucuucaacaagacccucauggaggccgacgcccacuacaaguccauccgcaccuggaacgagaucauccccuccaagggcugccuccgcgucggcggccgcugccacccccacgucaacggcgucuucuucaacggcaucauccucggccccgacggccacguccucauccccgagaugcaguccucccuccuccaccagcacauggagcuccucgaguccuccgucaucccccucaugcacccccucgccgaccccuccaccgucuucaaggacggcgacgaggccgaggacuucgucgagguccaccuccccgacguccacaagcagaucuccggcgucgaccucggccuccccaacuggggccgcuacguccucaucuccgccggcgcccucaccgcccucaugcucaugaucuuccucaugaccugcugccgcaaggccaaccgcgccgaguccauccagcacaaccccgaggagaccggccgcaaggucuccgucaccucccacaacggccgcgucaucuccuccugggaguccuacaaguccggcggcgagaccaagcucuga

SEQ ID NO: 126956 - RNA, 1575 nt, Artificial Sequence
  derived and/or modified CDS sequence (opt2) from glycoprotein__RABV__EU267751.1
auggucccccagguccuccucuucgucccccuccucgucuucuccuccugcuucggcaaguuccccaucuacaccauccccgacaagcucggccccuggucccccaucgacauccaccaccucggcugccccaacaaccucgucgucgaggacgagggcugcaccaaccucuccggcuucuccuacauggagcucaaggucggcuacaucuccgccaucaaggucaacggcuucaccugcaccggcgucgucaccgaggccgagaccuacaccaacuucgucggcuacgucaccaccaccuucaagcgcaagcacuuccgccccaugcccgacgccugccgcgccgccuacaacuggaagauggccggcgacccccgcuacgaggagucccuccacaaccccuaccccgacuaccacuggcuccgcaccgucaagaccaccaaggagucccucgucaucaucucccccuccgucgccgaccucgaccccuacgacaagucccuccacucccgcgucuuccccggcggcaagugcuccggcaucaccgucuccuccaccugcugcuccaccaaccacgacuacaccaucuggaugcccgagaacccccgccucggcaccuccugcgacaucuucaccaacucccgcggcaagcgcgccuccaagggcggcaagaccugcggcuucgucgacgagcgcggccucuacaagucccucaagggcgccugcaagcucaagcucugcggcguccucggccuccgccucauggaccgcaccugggucgccauccagaccuccgacgagaucaaguggugcucccccgaccagcucgucaaccuccacgacuuccacuccgacgagaucgagcaccucgucgucgaggagcucgucaagaagcgcgaggagugccucgacgcccucgagaccaucaugaccaccaaguccgucuccuuccgccgccucucccaccuccgcaagcucguccccggcuucggcaaggccuacaccaucuucaacaagacccucauggaggccgacgcccacuacaaguccauccgcaccuggaacgagaucauccccuccaagggcugccuccgcgucggcggccgcugccacccccacgucaacggcgucuucuucaacggcaucauccucggccccgacggccacguccucauccccgagaugcaguccucccuccuccaccagcacauggagcuccucgaguccuccgucaucccccucaugcacccccucgccgaccccuccaccgucuucaaggacggcgacgaggccgaggacuucgucgagguccaccuccccgacguccacaagcagaucuccggcgucgaccucggccuccccaacuggggcaaguacguccucaucuccgccggcgcccucaccgcccucaugcucaugauccuccucaugaccugcugccgcaaggccaaccgcgccgaguccauccagcacaaccccggcgagaccggccgcaaggucuccgucaccucccacaacggccgcgucaucuccuccugggaguccuacaaguccggcggcgagaccaagcucuga

SEQ ID NO: 126957 - RNA, 1575 nt, Artificial Sequence
  derived and/or modified CDS sequence (opt2) from glycoprotein__RABV__EU267752.1
augaucccccagguccuccucuucgucccccuccucgucuucuccuccugcuucggcaaguuccccaucuacaccauccccgacaagcucggccccuggucccccaucuucauccacccccuccuccgccccaacaaccucgucgucgaggacgagggcugcaccaaccucuccggcuucuccuacauggagcucaaggucggcuacaucuccgccaucaaggucaacggcuucaccugcaccggcgucgucaccgaggccgagaccuacaccaacuucgucggcuacgucaccaccaccuucaagcgcaagcacuuccgccccaugcccgacgccugccgcgccgccuacaacuggaagauggccggcgacccccgcuacgaggagucccuccacaaccccuaccccgacuaccacuggcuccgcaccgucaagaccaccaaggagucccucgucaucaucucccccuccgucgccgaccucgaccccuacgacaagucccuccacucccgcgucuuccccggcggcaagugcuccggcaucaccgucuccuccaccugcugcuccaccaaccacgacuacaccaucuggaugcccgagaacccccgccucggcaccuccugcgacaucuucaccaacucccgcggcaagcgcgccuccaagggcggcaagaccugcggcuucgucgacgagcgcggccucuacaagucccucaagggcgccugcaagcucaagcucugcggcguccucggccuccgccucauggacggcaccugggucgccauccagaccuccgacgagaucaaguggugcucccccgaccagcucgucaaccuccacgacuuccacuccgacgagaucgagcaccucgucgucgaggagcucgucaagaagcgcgaggagugccucgacgcccucgagaccaucaugaccaccaaguccgucuccuuccgccgccucucccaccuccgcaagcucguccccggcuucggcaaggccuacaccaucuucaacaagacccucauggaggccgacgcccacuacaaguccauccgcaccuggaacgagaucauccccuccaagggcugccuccgcgucggcggccgcugccacccccacgucaacggcgucuucuucaacggcaucauccucggccccgacggccacguccucauccccgagaugcaguccucccuccuccaccagcacauggagcuccucgaguccuccgucaucccccucaugcacccccucgccgaccccuccaccgucuucaaggacggcgacgaggccgaggacuucgucgagguccaccuccccgacguccacaagcagaucuccggcgucgaccucggccuccccaacuggggcaaguacguccucaucuccgccggcgcccucaccgcccucaugcucaccaucuuccucaugaccugcugccgcaagaccaaccgcgccggcuccauccagcacucccccggcgagaccggccgcaaggucuccgucaccucccacaacggccgcgucaucuccuccugggaguccuacaaguccggcuccgagaccaagcucuga

SEQ ID NO: 126958 - RNA, 1575 nt, Artificial Sequence
  derived and/or modified CDS sequence (opt2) from glycoprotein__RABV__EU267753.1
augaucccccagguccuccucuucgucccccuccucgucuucuccuccugcuucggcaaguuccccaucuacaccauccccgacaagcucggccccuggucccccaucgacauccaccaccucuccugccccaacaaccucgucgucgaggacgagggcugcaccaaccucuccggcuucuccuacauggagcucaaggucggcuacaucuccgccaucaaggucaacggcuucaccugcaccggcgucgucaccgaggccgagaccuacaccaacuucgucggcuacgucaccaccaccuucaagcgcaagcacuuccgccccacccccgacgccugccgcgccgccuacaacuggaagauggccggcgacccccgcuacgaggagucccuccacaaccccuaccccgacuaccacuggcuccgcaccgucaagaccuccaaggagucccucgucaucaucucccccuccgucgccgaccucgaccccuacgacaagucccuccacucccgcgucuuccccggcggcaagugcuccggcaucaccgucuccuccaccugcugcuccaccaaccacgacuacaccaucuggaugcccgagaacccccgccucggcaccuccugcgacaucuucaccaacucccgcggcaagcgcgccuccaagggcggcaagaccugcggcuucgucgacgagcgcggccucuacaagucccucaagggcgccugcaagcucaagcucugcggcguccucggccuccgccucauggacggcaccugggucgccauccagaccuccgacgagaucaaguggugcucccccgaccagcucgucaaccuccacgacuuccacuccgacgagaucgagcaccucgucgucgaggagcucgucaagaagcgcgaggagugccucgacgcccucgagaccaucaugaccaccaaguccgucuccuuccgccgccucucccaccuccgcaagcucguccccggcuucggcaaggccuacaccaucuucaacaagacccucauggaggccgacgcccacuacaaguccauccgcaccuggaacgagaucauccccuccaagggcugcuuccgcgucggcggccgcugccacccccacgucaacggcgucuucuucuccggcaucauccucggccccgacggccacguccucauccccgagaugcaguccucccuccuccaccagcacauggagcuccucgaguccuccgucaucccccucaugcacccccucgccgaccccuccaccgucuucaaggacggcgacgaggccgaggacuucgucgagguccaccuccccgacguccacaagcagaucuccggcgucgaccucggccuccccaacuggggcaaguacguccucgucggcgccggcgcccucaccgcccucaugcucaugaucuuccucaugaccugcugccgcaagaccaaccgcgccgaguccauccagcacucccccggcgagaccggccgcaaggucuccgucaccucccacaacggccgcgucaucuccuccugggaguccuacaaguccggcggcgagaccaagcucuga

SEQ ID NO: 126959 - RNA, 1575 nt, Artificial Sequence
  derived and/or modified CDS sequence (opt2) from glycoprotein__RABV__EU267754.1
augaucccccagguccuccucuucgucccccuccucgucuucuccuccugcuucggcaaguuccccaucuacaccauccccgaccgccucggccccuggucccccaucgacauccaccaccucuccugccccaacaacauggucgucgaggacgagggcugcaccaaccucuccggcuucuccuacauggagcucaaggucggcuacaucuccgccaucaaggucaacggcuucaccugcaccggcgucgucaccgaggccgagaccuacaccaacuucgucggcuacgucaccaccaccuucaagcgcaagcacuuccgccccaugcccgacgccugccgcgccgccuacaacuggaagauggccggcgacccccgcuacgaggagucccuccacaaccccuaccccgacuaccacuggcuccgcaccgucaagaccaccaaggagucccucgucaucaucucccccuccgucgccgaccucgaccccuacgacaagucccuccacucccgcgucuuccccggcggcaagugcuccggcaucaccgucuccuccaccugcugcuccaccaaccacgacuacaccaucuggaugcccgagaacccccgccucggcaccuccugcgacaucuucaccaacucccgcggcaagcgcgccuccaagggcggcaagaccugcggcuucgucgacgagcgcggccucuacaagucccucaagggcgccugcaagcuccgccucugcggcguccucggccuccgccucauggacggcaccugggucgccauccagaccuccgacgagaucaaguggugcucccccgaccagcucgucaaccuccacgacuuccacuccgacgagaucgagcaccucgucgccgaggagcucgucaagaagcgcgaggagugccucgacgcccucgagaccaucaugaccaccaaguccgucuccuuccgccgccucucccaccuccgcaagcucguccccggcuucggcaaggccuacaccaucuucaacaagacccucauggaggccgacgcccacuacaaguccauccgcaccuggaacgagaucauccccuccaagggcugccuccgcgucggcggccgcugccacccccacgucaacggcgucuucuucaacggcaucauccucggccccgacggccacguccucauccccgagaugcaguccucccuccuccaccagcacauggagcuccucgaguccuccgucaucccccucaugcacccccucgccgaccccuccaccgucuucaaggacggcgacgaggccgaggacuucgucgagguccaccuccccgacguccacaagcagaucuccggcgucgaccucggccuccccaacuggggcaaguacguccucaucuccgccggcgcccucaccgcccucaugcucaccaucuuccucaugaccugcugccgcaagaccucccgcgccgaguccauccagcacucccccggcgagaccggccgcaaggucuccgucaccucccacaacggccgcgucaucuccuccugggaguccuacaaguccggcggcgagaccaagcucuga

SEQ ID NO: 126960 - RNA, 1575 nt, Artificial Sequence
  derived and/or modified CDS sequence (opt2) from glycoprotein__RABV__EU267755.1
augaucccccagguccuccucuucgucccccuccucgucuucuccuccugcuucggcaaguuccccaucuacaccauccccgacaagcucggccccuggucccccaucgacauccaccaccucuccugccccaacaaccucgucgucgaggacgagggcugcaccaaccucuccggcuucuccuacauggagcucaaggucggcuacaucuccgccaucaaggucaacggcuucaccugcaccggcgucgucaccgaggccgagaccuacaccaacuucgucggcuacgucaccaccaccuucaagcgcaagcacuuccgccccacccccgacgccugccgcgccgccuacaacuggaagauggccggcgacccccgcuacgaggagucccuccacucccccuaccccgacuaccacuggccccgcaccgucaagaccuccaaggagucccucgucaucaucucccccggcgucgccgaccucgaccccuacgacaagucccuccacucccgcgucuuccccggcggcaagugcuccggcaucaccgucuccuccaccugcugcuccaccaaccacgacuacaccaucuggaugcccgagaacccccgccucggcaccuccugcgacaucuucaccaacucccgcggcaagcgcgccuccaagggcggcaagaccugcggcuucgucgacgagcgcggccucuacaagucccucaagggcgccugcaagcucaagcucugcggcguccucggccuccgccucauggacggcaccugggucgccauccagaccuccgacgagaucgaguggugcucccccgaccagcucgucaaccuccacgacuuccacuccgacgagaucgagcaccucgucgucgaggaguucgucaagaagcgcgaggagugccucgacgcccucgagaccaucaugaccaccaaguccgucuccuuccgccgccucucccaccuccgcaagcucguccccggcuucggcaaggccuacaccaucuucaacaagacccucauggaggccgacgcccacuacaaguccauccgcaccuggaacgagaucauccccuccaagggcugccuccgcgucggcggccgcugccacccccacgucuacggcgucuucuucaacggcaucauccucggccccgacggccacguccucauccccgagaugcaguccucccuccuccgccagcacauggagcuccucgaguccuccgucaucccccucaugcacccccucgccgaccccuccaccgucuucaaggacggcgacgaggccgaggacuucgucgagguccaccuccccgacguccacaagcagaucuccggcgucgaccccggccuccccaacuggggcaaguacguccucgucuccgccggcgcccucaccgcccucaugcucaugaucuuccucaccaccugcugccgcaagaccaaccgcgccgaguccauccagcacucccccggcgagaccggccgcaaggucuccgucaccucccacaacggccgcgucaucuccuccugggaguccuacaaguccggcggcgagaccaagcucuga

SEQ ID NO: 126961 - RNA, 1575 nt, Artificial Sequence
  derived and/or modified CDS sequence (opt2) from glycoprotein__RABV__EU267756.1
augaucccccagguccuccucuucgucccccuccucgucuucucccucugcuucggcaaguuccccaucuacaccauccccgacaagcucggccccuggucccccaucgacauccuccaccucuccugccccaacaaccucgucgucgaggacgagggcugcaccgaccucuccggcuucuccuacauggagcucaaggucggcuacaucuccgccaucaaggucaacggcuucaccugcaccggcgucgucaccgaggccgagaccuacaccaacuucgucggcuacgucaccaccaccuucaagcgcaagcacuuccgccccacccccgacgccugccgcgccgccuacaacuggaagauggccggcgacccccgcuacgaggagucccuccacaaccccuaccccgacuaccacuggcuccgcaccgucaagaccuccaaggagucccucgucaucaucucccccuccgacgccgaccucgaccccuacgacaagucccuccacucccgcgucuuccccggcggcaagugcuccggcaucaccgucuccuccaccugcugcuccaccaaccacgacuacaccaucuggaugcccgagaacccccgccucggcaccuccugcgacaucuucaccaacucccgcggcaagcgcgccuccaagggcggcaagaccugcggcuucgucgacgagcgcggccucuacaagucccucaagggcgccugcaagcucaagcucugcggcguccucggccuccgccucauggacggcaccugggucgccauccagaccuccgacgagaucaaguggugcucccccgaccagcucgucaaccuccacgacuuccacuccgacgagaucgagcaccucgucgucgaggagcucgucaagaagcgcgaggagugccucgacgcccucgagaccaucaugaccaccaaguccgucuccuuccgccgccucucccaccuccgcaagcucguccccggcuucggcaaggccuacaccaucuucaacaagacccucauggaggccgacgcccacuacaaguccauccgcaccuggaacgagaucauccccuccaagggcugccuccgcgucggcggccgcugccacccccacgucaacggcgucuucuucaacggcaucauccucggccccgacggccacguccucauccccgagaugcaguccucccuccuccaccagcacauggagcuccucgaguccuccgucaucccccucaugcacccccucgccgaccccuccaccgucuucaaggacggcgacgaggccgaggacuucgucgagguccaccuccccgacguccacaagcagaucuccggcgucgaccucggccuccccaacuggggcaaguacguccucgucuccgccggcgcccucaccgcccucaugcucaugaucuuccucaugaccugcugccgcaagaccaaccgcgccgaguccauccagcacucccccggcgagaccggccgcaaggucuccgucaccucccacaacggccgcgucaucuccuccugggaguccuacaaguccggcggcgagaccaagcucuga

SEQ ID NO: 126962 - RNA, 1575 nt, Artificial Sequence
  derived and/or modified CDS sequence (opt2) from glycoprotein__RABV__EU267757.1
augaucccccagguccuccucuucgucccccuccucgucuucuccuccugccucggcaaguuccccaucuacaccauccccgacaagcucggccccuggucccccaucgacauccaccaccucuccugccccaacaaccucgucgucgaggacgagggcugcaccaaccucuccggcuucuccuacauggagcucaaggucggcuacaucuccgccaucaaggucaacggcuucaccugcaccggcgucgucaccgaggccgagaccuacaccaacuucgucggcuacgucaccaccaccuucaagcgcaagcacuuccgccccacccccgacgccugccgcgccgccuacaacuggaagauggccggcgacccccgcuacgaggagucccuccacaaccccuaccccgacuaccacuggcuccgcaccgucaagaccuccaaggagucccucgucaucaucucccccuccgucgccgaccucgaccccuacgacaagucccuccacucccgcgucuuccccggcggcaagugcuccggcaucaccgucuccuccaccugcugcuccaccaaccacgacuacaccaucuggaugcccgagaacccccgccucggcaccuccugcgacaucuucaccaacucccgcggcaagcgcgccuccaagggcggcaagaccugcggcuucgucgacgagcgcggccucuacaagucccucaagggcgccugcaagcucaagcucugcggcguccucggccuccgccucauggacggcaccugggucgccauccagaccuccgacgagaucaaguggugcucccccgaccagcucgucaaccuccacgacuuccacuccgacgagaucgagcaccucgucgucgaggagcucgucgagaagcgcgaggagugccucgacgcccucggcaccaucaugaccaccaaguccgucuccuucggccgccucucccaccuccgcaagcucguccccggcuucggcaaggccuacaccaucuucaacaagacccucauggaggccgacgcccacuacaaguccauccgcaccuggaacgagaucauccccuccaagggcugccuccgcgucggcggccgcugccacccccacgucaacggcgucuucuucaacggcaucauccucggccccgaccgccacguccucauccccgagaugcaguccucccuccuccaccagcacauggagcuccucgaguccuccgucaucccccucaugcacccccucgccgaccccuccaccgucuucaaggacggcgacgaggccgaggacuucgucgagguccaccuccccgacguccacaagcagaucuccggcgucgaccucggccuccccaacuggggcaaguacguccucgucuccgccggcgcccucaccgcccucaugcucaugaucuuccucaugaccugcugccgcaagaccaaccgcgccgaguccauccagcacucccccggcgagaccggccgcaaggucuccgucaccucccacaacggccgcgucaucuccuccugggaguccuacaaguccggcggcgagaccaagcucuga

SEQ ID NO: 126963 - RNA, 1575 nt, Artificial Sequence
  derived and/or modified CDS sequence (opt2) from glycoprotein__RABV__EU267758.1
augaucccccagguccuccucuucgucccccuccucgucuucuccuccugcuucggcaaguuccccaucuacaccauccccgacaagcucggccccuggauccccaucgacauccaccaccucuccugccccaacaaccucgucgucgaggacgagggcugcaccaaccucuccggcuucuccuacauggagcucaaggucggcuacaucuccgccaucaaggucaacggcuucaccugcaccggcgucgucaccgaggccgagaccuacaccaacuucgucggcuacgucaccaccaccuucaagcgcaagcacuuccgccccaugcccgacgucugccgcgccgccuacaacuggaagauggccggcgacccccgcuacgaggagucccuccacaaccccuaccccgacuaccacuggcuccgcaccgucaagaccaccaaggagucccucgucaucaucucccccuccgucgccgaccucgaccccuacgacaagucccuccacucccgcgucuuccccggcggcaagugcuccggcaucaccgucuccuccaccugcugcuccaccaaccacgacuacaccaucuggaugcccgagaacccccgccucggcaccuccugcgacaucuucaccaacucccgcggcaagcgcgccuccaagggcggcaagaccugcggcuucgucgacgagcgcggccucuacaagucccucaagggcgccugccgccucaagcucugcggcguccucggccuccgccucauggacggcaccugggucgccauccagaccuccgacgagaucaaguggugcucccccgaccagcucgucaaccuccacgacuuccacuccgacgagaucgagcaccucgucgucgaggagcucgucaagaagcgcggcgagugccucgacgcccucgagaccaucaugaccaccaaguccgucuccuuccgccgccucucccaccuccgcaagcucgucccccgcuucggcaaggccuacaccaucuucaacaagacccucauggaggccgacgcccacuacaaguccauccgcaccuggaacgagaucauccccuccaagggcugccuccgcgucggcggccgcugccgcccccacgucaacggcgucuucuucaacggcaucauccucggccccgacggccacguccucauccccgagaugcaguccucccuccuccaccagcacauggagcuccucgaguccuccgucaucccccucaugcacccccucgccgaccccuccaccgucuucaaggacggcgacgaggccgaggacuucgucgaggucuaccuccccgacguccacaagcagaucuccggcgucgaccucggccuccccaacuggggcaaguacguccucaucuccgccggcgcccucaccgcccucauguccaugaucuuccucaugaccugcugccgcaagaccaaccgcgccgaguccauccagcacucccccggcgagaccggccgcaaggucuccgucaccucccacaacggccgcgacaucuucuccugggaguccuacaaguccggcggcgagaccaagcucuga

SEQ ID NO: 126964 - RNA, 1575 nt, Artificial Sequence
  derived and/or modified CDS sequence (opt2) from glycoprotein__RABV__EU267759.1
augaucccccagguccuccucuucgucccccuccucgucuucuccuccugcuucggcaaguuccccaucuacaccauccccgacaagcucggccccuggucccccaucgacauccaccaccucuccugccccaacaaccucgucgucgaggacgagggcugcaccaaccucuccggcuucuccuacauggagcucaaggucggcuacaucuccgccaucaaggucaacggcuucaccugcaccggcgucgucaccgaggccgagaccuacaccaacuucgucggcuacgucaccaccaccuucaagcgcaagcacuuccgccccacccccgacgccugccgcgccgccuacaacuggaagauggccggcgacccccgcuacgaggagucccuccacaaccccuaccccgacuaccacuggcuccgcaccgucgagaccuccaaggagucccucgucaucaucucccccuccgucgccgaccucgaccccuacgacaagucccuccacucccgcgucuuccccggcggcaagugcuccggcaucaccgucuccuccaccugcugcuccaccaaccacgacuacaccaucuggaugcccgagaacccccgccucggcaccuccugcgacaucuucaccaacucccgcggcaagcgcgccuccaagggcggcaagaccugcggcuucgucgacgagcgcggccucuacaagucccucaagggcgccugcaagcucaagcucugcggcguccucggccuccgccucauggacggcaccugggucgccauccagaccuccgacgagaucaaguggugcucccccgaccagcucgucaaccuccacggcuuccacuccgacgagaucgagcaccucgucgucgaggagcucgucaagaagcgcgaggagugccucgacgcccucgagaccaucaugaccaccaaguccgucuccuuccgccgccucucccaccuccgcaagcucguccccggcuucggcaaggccuacaccaucuucaacaagacccucauggaggccgacgcccacuacaaguccauccgcaccuggaacgagaucauccccuccaagggcugccuccgcgucggcggccgcugccacccccacgucaacggcgucuucuucaacggcaucauccucggccccgacggccacguccucauccccgagaugcaguccucccuccuccaccagcacauggagcuccucgaguccuccgucaucccccucaugcacccccucgccgaccccuccaccgucuucaaggacggcgacgaggccgaggacuucgucgagguccaccuccccgacguccacaagcagaucuccggcgucgaccucggccuccccaacuggggcaaguacguccucgucuccgccggcgcccucaccgcccucaugcucaugaucuuccucaugaccugcugccgcaagaccaaccgcgccgaguccauccagcacucccccggcgagaccggccgcaaggucuccgucaccucccacaacggccgcgucaucuccuccugggaguccuacaaguccggcggcgagaccaagcucuga

SEQ ID NO: 126965 - RNA, 1575 nt, Artificial Sequence
  derived and/or modified CDS sequence (opt2) from glycoprotein__RABV__EU267760.1
augaucccccagguccuccucuucgucccccuccucgucuucuccuccugcuucggcaaguuccccaucuacaccauccccgacaagcucggccccuggucccccaucgacauccaccaccucuccugccccaacaaccucgucgucgaggacgagggcugcaccaaccucuccggcuucuccuacauggagcucaaggucggcuacaucuccgccaucaaggucaacggcuucaccugcaccggcgucgucaccgucgccgagaccuacaccaacuucgucggcuacgucaccaccaccuucaagcgcaagcacuuccgccccaugcccgacgccugccgcgccgccuacaacuggaagauggccggcgacccccgcuacgaggagucccuccacaacuccuaccccgacuaccacuggcuccgcaccgucaagacccccaaggagucccucgucaucaucucccccuccgucgccgaccucgaccccuacgacaagucccuccacucccgcgucuuccccggcggcaagugcuccggcaucaccgucuccuccaccugcugcuccaccaaccacgacuacaccaucuggaugcccgagaacccccgccucggcaccuccugcgacaucuucaccaacucccgcggcaagcgcgccuccaagggcggcaagaccugcggcuucgucgacgagcgcggccucuacaagucccucaagggcgccugcaagcucaagcucugcggcguccucggccuccgccucauggacggcaccugggucgccauccagaccuccgacgagaucaaguggugcucccccgaccagcucgucaaccuccacgacuuccacuccgacgagaucgagcaccucgucgucgaggagcucgucaagaagcgcgaggagugccucgacgcccucgagaccaucaugaccaccaaguccgucuccuuccgccgccucucccaccuccgcaagcucguccccggcuucggcaaggccuacaccaucuucaacaagacccucauggaggccgacgcccacuacaaguccauccgcaccuggaacgagaucauccccuccaagggcugccuccgcgucggcggccgcugccacccccacgucaacggcgucuucuucaacggcaucauccucggccccgacggccacguccucauccccgagaugcaguccucccuccuccaccagcacauggagcuccucgaguccuccgucaucccccucaugcacccccucgccgaccccuccaccgucuucaaggacggcgacgaggccgaggacuucgucgagguccaccuccccgacguccacaagcagaucuccggcgucgaccucggccuccccaacuggggcaaguacguccucaucuccgccggcgcccucaccgcccucaugcucaugaucuuccucaugaccugcugccgcaagaccaaccgcgccgaguccauccagcacucccccggcgagaccggccgcaaggucuccgucaccucccacaacggccgcgucaucuccuccugggagcccuacaaguccggcggcgagaccaagcucuga

SEQ ID NO: 126966 - RNA, 1575 nt, Artificial Sequence; identical to SEQ ID NO: 126879
  derived and/or modified CDS sequence (opt2) from glycoprotein__RABV__EU267761.1

SEQ ID NO: 126967 - RNA, 1575 nt, Artificial Sequence; identical to SEQ ID NO: 126875
  derived and/or modified CDS sequence (opt2) from glycoprotein__RABV__EU267762.1

SEQ ID NO: 126968 - RNA, 1575 nt, Artificial Sequence
  derived and/or modified CDS sequence (opt2) from glycoprotein__RABV__EU267763.1
augaucccccagguccuccucuucgucccccuccucgucuucuccuccugcuucggcaaguuccccaucuacaccauccccgacaagcucggccccuggucccccaucgacauccaccaccucuccugccccaacaaccucgucgucgaggacgagggcugcaccaaccucuccggcuucuccuacauggagcucaaggucggcuacaucuccgccaucaaggucaacggcuucaccugcaccggcgucgucaccgaggccgagaccuacaccaacuucgucggcuacgucaccaccacccucaagcgcaagcacuuccgccccaugcccgacgccugccgcgccgccuacaacuggaagaucgccggcgacccccgcuacgaggagucccuccacaaccccuaccccgacuaccaccgccuccgcaccgucaagaccaccaaggagucccucgucaucaucucccccuccgucgccgaccucgaccccuacgacaagucccuccacucccgcgucuuccccggcggcaagugcuccggcaucaccgucuccuccaccugcugcuccaccaaccacgacuacaccaucuggaugcccgagaacccccgccucggcaccuccugcgacaucuucaccaacucccgcggcaagcgcgccuccaagggcggcaagaccugcggcuucgucgacgagcgcggccucuacaagucccucaagggcgccugcaagcucaagcucugcggcguccucggccuccgccucauggacggcaccugggucgccauccagaccuccgacgagaucaaguggugcucccccgaccagcucgucaaccuccacgacuuccacuccgacgagaucgagcaccucgucgucgaggagcucgucaagaugcgcgaggagugccucgacgcccucgagaccaucaugaccaccaaguccgucuccuuccgccgccucucccaccuccgcaagcucguccccggcuucggcaaggccuacaccaucuucaacaagacccucauggaggccgacgcccacuacaaguccauccgcaccuggaacgagaucauccccuccaagggcugccuccgcgucggcggccgcugccacccccacgucaacggcgucuucuucaacggcaucauccucggccccgacggccacguccucauccccgagaugcaguccucccuccuccaccagcacauggagcuccucgaguccuccgucaucccccucaugcacccccucgccgaccccuccaccgucuucaaggacggcgacgaggccgaggacuucgucgagguccaccuccccgacguccacaagcagaucuccggcgucgaccucggccuccccaacuggggcaaguacguccucaucuccgccggcgcccucaccgcccucauguccaugaucuuccucaugaccugcugccgcaagaccaaccgcgccgaguccauccagcacucccccggcgagaccggccgcaaggucuccgucaccucccacaacggccgcgucaucuccuccugggaguccuacaaguccggcggcgagaccaagcucuga

SEQ ID NO: 126969 - RNA, 1575 nt, Artificial Sequence
  derived and/or modified CDS sequence (opt2) from glycoprotein__RABV__EU267764.1
augaucccccagguccuccucuucgucccccuccucgucuccuccuccugcuucggcaaguuccccaucuacaccauccccgacaagcucggccccuggucccccaucgacauccaccaccucuccugccccaacaaccucgucgucgaggacgagggcugcaccucccucuccggcuucuccuacauggagcucaaggucggcuacaucuccgccaucaaggucaacggcuucaccugcaccggcgucgucaccgaggccgagaccuacaccaacuucgucggcuacgucaccaccaccuucaagcgcaagcacuuccgccccaugcccgacgccugccgcgccgccuacaacuggaagauggccggcgacccccgcuacgaggagucccuccacaaccccuaccccgacuaccacuggcuccgcaccgucaagaccaccaaggagucccucgucaucaucucccccuccgucgccgaccucgaccccuacgacaagucccuccacucccgcgucuuccccggcggcaagugcuccggcaucaccgucuccuccaccugcugcuccaccaaccacgacuacaccaucuggaugcccgagaacccccgccucggcaccuccugcgacgucuucaccaacucccgcggcaagcgcgccuccaagggcggcaagaccugcggcuucgucgacgagcgcggccucuacaagucccucaagggcgccugcaagcucaagcucugcggcguccucggccuccgccucauggacggcaccugggucgccauccagaccuccgacggcaucaaguggugcucccccgaccagcucgucaaccuccacgacuuccacuccgacgagaucgagcaccucgucgucgaggagcucgucaagaagcgcgaggagugccucgacgcccucgagaccaucaugaccaccaaguccgucuccuuccgccgccucucccaccuccgcaagcucguccccggcuucggcaaggccuacaccaucuucaacaagacccucauggaggccgacgcccacuacaaguccauccgcaccuggaacgagaucauccccuccaagggcugccuccgcgucggcggccgcugccacccccacgucaacggcgucuucuucaacggcaucauccucggccccgacggccacguccucauccccgagaugcaguccucccuccuccaccagcacauggagcuccucgaguccuccgucaucccccucaugcacccccucgccgaccccuccaccgucuucaaggacggcgacgaggccgaggacuucgucgagguccaccuccccgacguccacaagcagaucuccggcgucgaccucggccuccccaacuggggcaaguacguccucaucuccgccggcgcccucaccgcccucauguccaugaucuuccucaugaccugcugccgcaagaccaaccgcgccgaguccauccagcacucccccggcgagaccggccgcaaggucuccgucaccucccacaacggccgcgucaucuccuccugggaguccuacaaguccggcggcgagaccaagcucuga

SEQ ID NO: 126970 - RNA, 1575 nt, Artificial Sequence
  derived and/or modified CDS sequence (opt2) from glycoprotein__RABV__EU267765.1
augaucccccagguccuccucuucgucccccuccucgucuucuccuccugcuucuggaaguuccccaucuacaccauccccgacaagcucggccccuggucccccaucgacauccaccaccucuccugccccuccaaccucgucgucgaggacgagggcugcaccaaccucuucggcuucuccuacauggagcucaaggucggcuacaucuccgccaucaaggucaacggcuucaccugcaccggcgucgucaccgaggccgagaccuacaccaacuucgucggcuacgucaccaccaccuucaagcgcaagcacuuccgccccaugcccgacgccugccgcgccgccuacaacuggaagauggccggcgacccccgcuacgaggagucccuccacaaccccuaccccgacuaccacuggcuccgcaccgucaagaccaccaaggagucccucgucaucaucucccccuccgucgccgaccucgaccccuacgacaagucccuccacucccgcgucuuccccggcggcaagugcuccggcaucaccgucuccuccaccugcugcuccaccaaccacgacuacaccaucuggaugcccgagaacccccgccucggcaccuccugcgacaucuucaccaacucccgcggcaagcgcgccuccaagggcggcaagaccugcggcuucgucgacgagcgcggccucuacaagucccucaagggcgccugcaagcucaagcucugcggcguccucggccuccgccucauggacggcaccugggucgccauccagaccuccgacgagaucaaguggugcucccccgaccagcucgucaaccuccacgacuuccacuccgacgagaucgagcaccucgucgucgaggagcucgucaagaagcgcgaggagugccucgacgcccucgagaccaucaugaccaccaaguccgucuccuuccgccgccucucccaccuccgcaagcucguccccggcuucggcaaggccuacaccaucuucaacaagacccucauggaggccgacgcccacuacaaguccauccgcaccuggaacgagaucauccccuccaagggcugccuccgcgucggcggccgcugccacccccacgucaacggcgucuucuucaacggcaucauccucggccccgacggccacguccucauccccgagaugcaguccucccuccuccaccagcacauggagcuccucgaguccuccgucaucccccucaugcacccccucgccgaccccuccaccgucuucaaggacggcgacgaggccgaggacuucgucgagguccaccuccccgacguccacaagcagaucuccggcgucgaccucggccuccccaacuggggcaaguacguccucaucuccgccggcgcccucaccgcccucauguccaugaucuuccucaugaccugcugccgcaagaccauccgcgccgaguccauccagcacucccccggcgagaccggccgcaaggucuccgucaccucccacaacggccgcgucaucuccuccugggaguccuacaaguccggcggcgagaccaagcucuga

SEQ ID NO: 126971 - RNA, 1575 nt, Artificial Sequence
  derived and/or modified CDS sequence (opt2) from glycoprotein__RABV__EU267766.1
augaucccccagguccuccucuucgucccccuccucgucuucuccuccugcuucggcaaguuccccaucuacaccauccccgacaagcucggccccuggucccccaucgacauccaccaccucuccugccccaacaaccucgucgucgaggacgacggcugcaccaaccucuccggccucuccuacauggagcucaaggucggcuacaucuccgccaucaaggucaacggcuucaccugcaccggcgucgucaccgaggccgagaccuacaccaacuucgucggcuacgucaccaccaccuucaagcgcaagcacuuccgccccaugcccgacgccugccgcgccgccuacaacuggaagaucgccggcgacccccgcuacgaggagucccuccacaaccccuaccccgacuaccacuggcuccgcaccgucaagaccaccaaggagucccccgucaucaucucccccuccgucgccgaccucgaccccuacgacaagucccuccacucccgcgucuuccccggcggcaagugcuccggcaucaccgucuccuccaccugcugcuccaccaaccacgacuacaccaucuggaugcccgagaacccccgccucggcaccuccugcgacaucuucaccaacucccgcggcaagcgcgccuccaagggcggcaagaccugcggcuucgucgacgagcgcggccucuacaagucccucaagggcgccugcaagcucaagcucugcggcguccucggccucaagcucauggacggcaccugggucgccauccagaccuccgacgagaucaaguggugcucccccgaccagcucgucaaccuccacgacuuccacuccgacgagaucgagcaccucgucgucgaggagcucgucaagaagcgcgaggagugccucgacgcccucgagaccaucaugaccaccaaguccgucuccuuccgccgccucucccaccuccgcaagcucguccccggcuucggcaaggccuacaccaucuucaacaagacccucauggaggccgacgcccacuacaaguccauccgcaccuggaacgagaucauccccuccaagggcugccuccgcgucggcggccgcugccacccccacgucaacggcgucuucuucaacggcaucauccucggccccgacggccacguccucauccccgagaugcaguccucccuccuccaccagcacauggagcuccucgaguccuccgucaucccccucaugcacccccucgccgaccccuccaccgucuucaaggacggcgacgaggccgaggacuucgucgagguccaccuccccgacguccacaagcagaucuccggcgucgaccucggccuccccaacuggggcaaguacguccucaucuccgccggcgcccucaccgcccucauguccaugaucuuccucaugaccugcugccgcaagaccaaccgcgccgaguccauccagcacucccccggcgagaccggccgcaaggucuccgucaccucccacaacggccgcgucaucuccuccugggaguccuacaaguccggcggcgagaccaagcucuga

SEQ ID NO: 126972 - RNA, 1575 nt, Artificial Sequence
  derived and/or modified CDS sequence (opt2) from glycoprotein__RABV__EU267767.1
augaccccccagguccuccucuucgucccccuccucgucuucuccuccugcuucggccgcuuccccaucuacaccauccccgacaagcucggccccuggucccccaucgacauccaccaccucuccugccccaacaaccucgucgucgaggacgagggcugcaccaaccucuccggcuucuccugcauggagcucaaggucggcuacaucuccgccaucaaggucaacggcuucaccugcaccggcgucgucaccgaggccgagaccuacaccaacuucgucggcuacgucaccaccaccuucaagcgcaagcacuuccgccccaugcccgacgccugccgcgccgccuacaacuggaagauggccggcgacccccgcuacgaggagucccuccacaaccccuaccccgacuaccacuggcuccgcaccgucaagaccaccaaggagucccucgucaucaucucccccuccgucgccgaccucgaccccuacgacaagucccuccacucccgcgucuuccccggcggcaagugcuccggcaucaccgucuccuccacccgcugcuccaccaaccacgacuacaccaucuggaugcccgagaacccccgccucggcaccuccugcgacaucuucaccaacucccgcggcaagcgcgccuccaagggcggcaagaccugcggcuucgucgacgagcgcggccucuacaagucccucaagggcgccugcaagcucaagcucugcggcguccucgagcuccgccucauggacggcaccugggccgccauccagaccuccgacgagaucaaguggugcucccccgaccagcucgucaaccuccacgacuuccacuccgacgagaucgaccaccucgucgucgaggagcucgucaagaagcgcgaggagugccucgacgcccucgagaccaucaugaccaccaaguccgucuccuuccgccgccucucccaccuccgcaagcucguccccggcuucggcaaggccuacaccaucuucaacaagacccucauggaggccgacgcccacuacaaguccauccgcaccuggaacgagaucauccccuccaagggcugccuccgcgucggcggccgcugccacccccacgucaacggcgucuucuucaacggcaucauccucggccccgacggccacguccucauccccgagaugcaguccucccuccuccaccagcacauggagcuccucgaguccuccgucaucccccucaugcacccccucgccggccccuccaccgucuucaaggacggcgacgaggccgaggacuucgucgagguccaccuccccgacguccacaagcagaucuccggcgucgaccucggccuccccaacuggggcaaguacguccucaucuccgccggcgcccucaccgcccucauguccaugaucuuccucaugaccugcugccgcaagaccaaccgcgccgaguccauccagcacucccccggcgagaccggccgcaaggucuccgucaccucccacaacggccgcgucaucuccuccugggaguccuacaaguccggcggcgagaccaagcucuga

SEQ ID NO: 126973 - RNA, 1575 nt, Artificial Sequence
  derived and/or modified CDS sequence (opt2) from glycoprotein__RABV__EU267768.1
augaucccccagguccuccucuucgucccccuccucgucuucuccuccugcuucggcaaguuccccaucuacaccauccccgacaagcucggccccuggucccccaucgacauccaccaccucuccugccccaacaaccucgucgucgaggacgagggcugcaccaaccucuccggcuucuccuacauggagcucaaggucggcuacaucuccgccaucaaggucuccggcuucaccugcaccggcgucgucaccgaggccgagaccuacaccaacuucgucggcuacgucaccaccaccuucaagcgcaagcacuuccgccccaugcccgacgccugccgcgccgccuacaacuggaagauggccggcgacccccgcuacgaggagucccuccacaaccccuaccccgacuaccacuggcuccgcaccgucaagaccaccaaggagucccucgucaucaucucccccuccgucgccgaccucgaccccuacgacaagucccuccacucccgcgucuuccccggcggcaagugcuccggcaucaccgucuccuccaccugcugcuccaccaaccacgacuacaccaucuggaugcccgagaacccccgccucggcaccuccugcgacaucuucaccaacucccgcggcaagcgcgccuccaagggcggcaagaccugcggcuucgucgacgagcgcggccucuacaagucccucaagggcgccugcaagcucaagcucugcggcguccucggccuccgccucauggacggcaccugggucgccauccagaccuccgacgagaucaaguggugcucccccgaccagcucgucaaccuccacgacuuccacuccgacgagaucgagcaccucgucgucgaggagcucgucaagaagcgcgaggagugccucgacgcccucgagaccgucaugaccaccaaguccgucuccuuccgccgccucucccaccuccgcaagcucguccccggcuucggcaaggccuacaccaucuucaacaagacccucauggaggccgacgcccacuacaaguccauccgcaccuggaacgagaucauccccuccaagggcugccuccgcgucggcggccgcugccacccccacgucaacggcgucuucuucgacggcaucauccucggccccgacggccgcguccucauccccgagaugcaguccucccuccuccaccagcacauggagcuccucgaguccuccgucaucccccucaugcacccccucgccgaccccuccaccgucuucaaggacggcgacgaggccgaggacuucgucgagguccaccuccccgacguccacaagcucaucuccggcgucgaccucggccuccccaacuggggcaaguacguccucaucuccgccggcgcccucaccgcccucauguccaugaucuuccucaugaccugcugccgcaagaccaaccgcgccgaguccauccagcacucccccggcgagaccggccgcaaggucuccgucaccucccacaacggccgcgucaucuccuccugggaguccuacaaguccggcggcgagaccaagcucuga

SEQ ID NO: 126974 - RNA, 1575 nt, Artificial Sequence
  derived and/or modified CDS sequence (opt2) from glycoprotein__RABV__EU267769.1
augaucccccagguccuccucuucgucccccuccucgucuucuccuccugcuucggcaaguuccccaucuacaccauccccgacaagcucggccccuggucccccaucgacauccaccaccucuccugccccaacaacauggucgucgaggacgagggcugcaccaaccucuccggcuucuccuacauggagcucaaggucggcuacaucuccgccaucaaggucaacggcuucaccugcaccggcgucgucaccgaggccgagaccuacaccaacuucgucggcuacgucaccaccaccuucaagcgcaagcacuuccgccccaugcccgacgccugccgcgccgccuacaacuggaagauggccggcgacccccgcuacgaggagucccuccacaaccccuaccccgacuaccacuggcuccgcaccgucaagaccaccaaggagucccucgucaucaucucccccuccgucgccgaccucgaccccuacgacaagucccuccacucccgcgucuuccccggcggcaagugcuccggcaucaccgccuccuccaccugcugcuccaccaaccacgacuacaccaucuggaugcccgagaacccccgccucggcaccuccugcgacaucuucaccaacucccgcggcaagcgcgccuccaagggcggcaagaccugcggcuucgucggcggccgcggccucuacaagucccucaagggcgccugcaagcucaagcucugcggcguccucggccuccgccucauggacggcaccugggucgccauccagaccuccgacggcaucaaguggugcucccccgaccagcucgucaaccuccacgacuuccacuccgacgagaucgagcaccucgucgucgaggagcucgucaagaagcgcgaggagugccucgacgcccucgucaccaucaugaccaccaaguccgucuccuuccgccgccucucccaccuccgcaagcucguccccggcuucggcaaggccuacaccaucuucaacaagacccucauggaggccgacgcccacuacaaguccauccgcaccuggaacgagaucauccccuccaagggcugccuccgcgucggcggccgcugccacccccacgucaacggcgucuucuucaacggcaucauccucggccccgacggccacguccucauccccgagaugcaguccucccuccuccaccagcacauggagcuccucgaguccuccgucaucccccucaugcacccccucgccgaccccuccaccgucuucaaggacggcgacgaggccgaggacuucgucgagguccaccuccccgacguccacaagcagaucuccggcgucgaccucggccuccccaacuggggcaaguacguccucaucuccgccggcgcccucaccgcccucaugcucaccaucuuccucaugaccugcugccgcaagaccucccgcgccgaguccauccagcacucccccggcgagaccggccgcaaggucuccgucaccucccacaacggccgcgucaucuccuccugggaguccuacaaguccggcggcgagaccaagcucuga

SEQ ID NO: 126975 - RNA, 1575 nt, Artificial Sequence
  derived and/or modified CDS sequence (opt2) from glycoprotein__RABV__EU267770.1
augaucccccagguccuccucuucgucccccuccucgucuucuccuccugcuucggcaaguuccccaucuacaccauccccgacaagcucggccccuggucccccaucgacauccaccaccucuccugccccaacaacauggucgucgaggacgagggcugcaccaaccucuccggcuucuccuacauggagcucaaggucggcuacaucuccgccaucaaggucaacggcuucaccugcaccggcgucgucaccgaggccgagaccuacaccaacuucgucggcuacgucaccaccaccuucaagcgcaagcacuuccgccccaugcccgacgccugccgcgccgccuacaacuggaagauggccggcgacccccgcuacgaggagucccuccacaaccccuaccccgacuaccacuggcuccgcaccgucaagaccaccaaggagucccucgucaucaucucccccuccgucgccgaccucgaccccuacgacaagucccuccacucccgcgucuuccccggcggcaagugcuccggcaucaccgucuccuccaccugcugcuccaccaaccacgacuacaccaucuggaugcccgagaacccccgccucggcaccuccugcgacaucuucaccaacucccgcggcaagcgcgccuccaagggcggcaagaccugcggcuucgucgacgagcgcggccucuacaagucccucaagggcgccugcaagcucaagcucugcggcguccucggccuccgccucauggacggcaccugggucgccauccagaccuccgacgagaucaaguggugcucccccgaccagcucgucaaccuccacgacuuccacuccgacgagaucgagcaccucgucgucgaggagcucgucaagaagcgcgaggagugccucgacgcccucgagaccaucaugaccaccaaguccgucuccuuccgccgccucaaccaccuccgcaagcucguccccggcuucggcaaggccuacaccaucuucaacaagacccucauggaggccgacgcccacuacaaguccauccgcaccuggaacgagaucauccccuccaagggcugccuccgcgucggcggccgcugccacccccacgucaacggcgucuucuucaacggcaucauccucggccccgacggccacguccucauccccgagaugcaguccucccuccuccaccagcacauggagcuccucgaguccuccgucaucccccucaugcacccccucgccgaccccuccaccgucuucaaggacggcgacgaggccgaggacuucgucgagguccaccuccccgacguccacaagcagaucuccggcgucgaccucggccuccccaacuggggcaaguacguccucaucuccgccggcgcccucaccgcccucaugcucaccaucuuccucaugaccugcugccgcaagaccucccgcgccgaguccauccagcacucccccggcgagaccggccgcaaggucuccgucaccucccacaacggccgcgucaucuccuccugggaguccuacaaguccggcggcgagaccaagcucuga

SEQ ID NO: 126976 - RNA, 1575 nt, Artificial Sequence
  derived and/or modified CDS sequence (opt2) from glycoprotein__RABV__EU267771.1
augaucccccagguccuccucuucgucccccuccucgucuucuccuccugcuucggcaaguuccccaucuacaccauccccgacaagcucggccccuggucccccaucgacauccaccaccucuccugccccaacaacauggucgucgaggacgagggcugcaccaaccucuccggcuucuccuacauggagcucaaggucggcuacaucuccgccaucaaggucuccggcuucaccugcaccggcgucgucaccgaggccgagaccuacaccaacuucgucggcuacgucaccaccaccuucaagcgcaagcacuuccgccccaugcccgacgccugccgcgccgccuacaacuggaagauggccggcgacccccgcuacgaggagucccuccacaacccccaccccgacuaccacuggcuccgcaccgucaagaccaccaaggagucccucgucaucaucucccccuccgucgccgaccucgaccccuacgacaagucccuccacucccgcgucuuccccggcggcaagugcuccggcaucaccgucuccuccaccugcugcuccaccaaccacgacuacaccaucuggaugcccgagaacccccgccucggcaccuccugcgacaucuucaccaacucccgcggcaagcgcgccuccaagggcggcaagaccugcggcuucgucgacgagcgcggccucuacaagucccucaagggcgccugcaagcucaagcucugcggcguccucggccuccgccucauggacggcaccugggucgccauccagaccuccgacgagaucaaguggugcucccccgaccagcucgucaaccuccacgacuuccacuccgacggcaucgagcaccucgucgucgaggagcucgucaagaagcgcgaggagugccucgacgcccucgagaccaucaugaccaccaaguccgucuccuuccgccgccucucccaccuccgcaagcucguccccggcuucggcaaggccuacaccaucuucaacaagacccucauggaggccgacgcccacuacaaguccauccgcaccuggaacgagaucauccccuccaagggcugccuccgcgucggcggccgcugccacccccacgucaacggcgucuucuucaacggcaucauccucggccccgacggccacguccucauccccgagaugcaguccucccuccuccaccagcacauggagcuccucgaguccuccgucaucccccucaugcacccccucgccgaccccuccaccgucuucaaggacggcgacgaggccgaggacuucgucgagguccaccuccccgacguccacaagcagaucuccggcgucgaccucggccuccccaacuggggcaaguacguccucaucuccgccggcgcccucaccgcccucaugcucaccaucuuccucaugaccugcugccgcaagaccucccgcgccgaguccauccagcacucccccggcgagaccggccgcaaggucuccgucaccucccacuccggccgcgucaucuccuccugggaguccuacaaguccggcggcgagaccaagcucuga

SEQ ID NO: 126977 - RNA, 1575 nt, Artificial Sequence
  derived and/or modified CDS sequence (opt2) from glycoprotein__RABV__EU267772.1
auggucccccaggcccuccucuucgucccccuccucgucuucccccucugcuucggcaaguuccccaucuacaccauccccgacaagcucggccccuggucccccaucgacauccaccaccucuccugccccaacaaccucgucgucgaggacgagggcugcaccaaccucuccggcuucuccuacauggagcucaaggucggcuacauccucgccaucaagaugaacggcuucaccugcaccggcgucgucaccgaggccgagaccuacaccaacuucgucggcuacgucaccaccaccuucaagcgcaagcacuuccgccccacccccgacgccugccgcgccgccuacaacuggaagauggccggcgacccccgcuacgaggagucccuccacaaccccuaccccgacuaccgcuggcuccgcaccgucaagaccaccaaggagucccucgucaucaucucccccuccgucgccgaccucgaccccuacgaccgcucccuccacucccgcgucuuccccuccggcaagugcuccggcgucgccgucuccuccaccuacugcuccaccaaccacgacuacaccaucuggaugcccgagaacccccgccucggcauguccugcgacaucuucaccaacucccgcggcaagcgcgccuccaagggcuccgagaccugcggcuucgucgacgagcgcggccucuacaagucccucaagggcgccugcaagcucaagcucugcggcguccucggccuccgccucauggacggcaccugggucgccaugcagaccuccaacgagaccaaguggugcccccccgaccagcucgucaaccucuacgacuuccgcuccgacgagaucgagcaccucgucgucgaggagcucguccgcaagcgcgaggagugccucgacgcccucgaguccaucaugaccaccaaguccgucuccuuccgccgccucucccaccuccgcaagcucguccccggcuucggcaaggccuacaccaucuucaacaagacccucauggaggccgacgcccacuacaaguccguccgcaccuggaacgagauccuccccuccaagggcugccuccgcgucggcggccgcugccacccccacgucaacggcgucuucuucaacggcaucauccucggccccgacggcaacguccucauccccgagaugcaguccucccuccuccagcagcacauggagcuccucgaguccuccgucaucccccucguccacccccucgccgaccccuccaccgucuucaaggacggcgacgaggccgaggacuucgucgagguccaccuccccgacguccacaaccaggucuccggcgucgaccucggccuccccaacuggggcaaguacguccuccucuccgccggcgcccucaccgcccucaugcucaucaucuuccucaugaccugcugccgccgcgucaaccgcuccgagcccacccagcacaaccuccgcggcaccggccgcgaggucuccgucaccccccaguccggcaagaucaucuccuccugggagucccacaaguccggcggcgagacccgccucuga

SEQ ID NO: 126978 - RNA, 1575 nt, Artificial Sequence
  derived and/or modified CDS sequence (opt2) from glycoprotein__RABV__EU267773.1
augaucccccagguccuccucuucgucccccuccucgucuucuccuccugcuucggcaaguuccccaucuacaccauccccgacaagcucggccccuggucccccaucgacauccaccaccucuccugccccaacaaccucgucgucgaggacgagggcugcaccaaccucuccggcuucuccuacauggagcucaaggucggcuacaucuccgccaucaaggucaacggcuucaccugcaccggcgucgucaccgaggccgagaccuacaccaacuucgucggcuacgucaccaccaccuucaagcgcaagcacuuccgccccaugcccgacgccugccgcgccgccuacaacuggaagauggccggcgacccccgcuacgaggagucccuccacaaccccuaccccgacuaccacuggcuccgcaccgucaagaccaccaaggagucccucgucaucaucucccccuccgucgccgaccucgaccccuacgacaagucccuccacucccgcgucuuccccggcggcaagugcuccggcaucgccgucuccuccaccugcugcuccaccaaccacgacuacaccaucuggaugcccgagaacccccgccucggcaccuccugcgacaucuucaccaacucccgcggcaagcgcgccuccaagggcggcaagaccugcggcuucgucgacgagcgcggccucuacaagucccucaagggcgccugcaagcucaagcucugcggcguccucggccuccgccucauggacggcaccugggucgccauccagaccuccgacgagaucaaguggugcucccccguccagcucgucaaccuccacgacuuccacuccgacgagaucgagcaccucgucgucgaggagcucgucaagaagcgcgaggagugccucgacguccucgagaccaucaugaccaccaaguccgucuccuuccgccgccucucccaccuccgcaagcucguccccggcuucggcaaggccuacaccaucuucaacaagacccucauggaggccgacgcccacuacaaguccauccgcaccuggaacaagaucauccccuccaagggcugccuccgcgucggcggccgcugccacccccacgucaacggcgucuucuucaacggcaucauccucggccccgacggccacguccucauccccgagaugcaguccucccuccuccaccagcacauggagcuccucgaguccuccgucaucccccucaugcacccccucgccgaccccuccaccgucuucaaggacggcgacgaggccgaggacuucgucgagguccaccuccccgacguccacaagcagaucuccggcgucgaccucggccuccccaacuggggcaaguacguccucaucuccgccggcgcccucaccgcccucaugcucaccaucuuccucaugaccugcugccgcaagaccaaccgcgccgaguccauccagcacucccccggcgagaccggccgcaaggucuccgucaccucccacaacggccgcgucaucuccuccugggaguccuacaaguccggcuccgagaccaagcucuga

SEQ ID NO: 126979 - RNA, 1575 nt, Artificial Sequence
  derived and/or modified CDS sequence (opt2) from glycoprotein__RABV__EU267774.1
augaucccccagguccuccucuucgucccccuccucgucuucuccuccugcuucggcaaguuccccaucuacaccauccccgacaagcucggccccuggucccccaccgacauccaccaccucuccugccccaacaaccucgucgucgaggacgagggcugcaccaaccucuccggcuucuccuacauggagcucaaggucggcuacaucuccgccaucaaggucaacggcuucaccugcaccggcgucgucaccgaggccgagaccuacaccaacuucgucggcuacgucaccaccaccuucaagcgcaagcacuuccgccccaugcccgacgccugccgcgccgccuacaacuggaagauggccggcgacccccgcuacgaggagucccuccacaaccccuaccccgacuaccacuggcuccgcaccgucaagaccaccaaggagucccucgucaucaucucccccuccgucgccgaccucgaccccuacgacaagucccuccacucccgcgucuuccccggcggcaagugcuccggcaucaccgucuccuccaccugcugcuccaccaaccacgacuacaccaucuggaugcccgagaacccccgccucggcaccuccugcgacaucuucaccaacucccgcggcaagcgcgccuccaagggcggcaagaccugcggcuucgucgacgagcgcggccucuacaagucccucaagggcgccugcaagcucaagcucugcggcguccucggccuccgccucauggacggcaccugggucgccauccagaccuccgacgagaucaaguggugcucccccgaccagcucgucaaccuccacgacuuccacuccgacgagaucgagcaccucgucgucgaggagcucgucaagaagcgcgaggagugccucgacgcccucgagaccaucaugaccacccgcuccgucuccuuccgccgccucucccaccuccgcaagcucguccccggcuucggcaaggccuacaccaucuucaacaagacccucauggaggccgacgcccacuacaaguccauccgcaccuggaacgagaucauccccuccaagggcugccuccgcgucggcggccgcugccacccccacgucaacggcgucuucuucaacggcaucauccucggccccgacggccacguccucauccccgagaugcaguccucccuccuccaccagcacauggagcuccucgaguccuccgucaucccccucaugcacccccucgccgaccccuccaccgucuucaaggacggcggcgaggccgaggacuucgucgagguccaccuccccgacguccacaagcagaucuccggcgucgaccucggccuccccaacuggggcaaguacguccucaucuccgccggcgcccucaccgcccucauguccaugaucuuccucaugaccugcugccgcaagaccaaccgcgccgaguccauccagcacucccccggcgagaccggccgcaaggucuccgucaccucccacaacggccgcgucaucuccuccugggaguccuacaaguccggcggcgagaccaagcucuga

SEQ ID NO: 126980 - RNA, 1575 nt, Artificial Sequence
  derived and/or modified CDS sequence (opt2) from glycoprotein__RABV__EU267775.1
augaucccccagguccuccucuucgucccccuccucgucuucuccuccugcuuccgcaaguuccccaucuacaccauccccgacaagcucggccccuggucccccaucgacauccaccaccucuccugccucaacaaccucgucgucgaggacgagggcugcaccaaccucuccggcuucuccuacauggagcucaaggucggcuacaucuccgccaucaaggucaacggcuucaccugcaccggcgucgucaccgaggccgagaccuacaccaacuucgucggcuacgucaccaccaccuucaagcgcaagcacuuccgccccaugcccgacgccugccgcgccgccuacaacuggaagauggccggcgacccccgcuacgaggagucccuccacaaccccuaccccgacuaccacuggcuccgcaccgucaagaccaccaaggagucccucgucaucaucucccccuccgucgccgaccucgaccccuacgacaagucccuccacucccgcgucuuccccuccggcaagugcuccggcaucaccgucuccuccaccugcugcuccaccaaccacgacuacaccaucuggaugcccgagaacccccgccucggcaccuccugcgacaucuucaccaacucccgcggcaagcgcgccuccaagggcggcaagaccugcggcuucgucgacgagcgcggccucuacaagucccuccgcggcgccugcaagcucaagcucugcggcguccucggccuccgccucauggacggcaccugggucgccauccagaccuccgacgagaucaaguggugcucccccgaccagcucgucaaccuccacgacuuccacuccgacgagaucgagcaccucgucgucgaggagcucgucaagaagcgcgaggagugccucgacgcccucgagaccaucaugaccaccaaguccgucuccuuccgccgccucucccaccuccgcaagcucguccccggcuucggcaaggccuacaccaucuucaacaagacccucauggaggccgacgcccaccacaaguccauccgcaccuggaacgagaucauccccuccaagggcugccuccgcgucggcggccgcugccacccccacgucaacggcgucuucuccaacggcaucauccucggccccgacggccacguccucauccccgagaugcaguccucccuccuccaccagcacauggagcuccucgaguccuccgucaucccccucaugcacccccucgccgaccccuccaccgucuucaaggacuccgacgaggccgaggacuucgucgagguccaccuccccgacguccacaagcagaucuccggcgucgaccucggccuccccaacuggggcaaguacguccucaucuccgccggcgcccucaccgcccucaugcucaugaucuuccucaugaccugcugccgcaagaccaaccgcgccgaguccauccagcacucccccggcgagaccggccgcaaggucuccgucaccucccacaacggccgcgucaucuccuccugggaguccuacaaguccggcuccgagaccaagcucuga

SEQ ID NO: 126981 - RNA, 1575 nt, Artificial Sequence
  derived and/or modified CDS sequence (opt2) from glycoprotein__RABV__EU267776.1
augaucccccagguccuccucuucgucccccuccucgucuucuccuccugcuucggcaaguuccccaucuacaccauccccgacaagcucggccccuggucccccaucgacauccaccaccucuccugccccaacaaccucgucgucgaggacgagggcugcaccaaccucuccggcuucuccuacauggagcucaaggucggcuacaucuccgccaucaaggucaacggcuucaccugcaccggcgucgucaccgaggccgagaccuacaccaacuucgucggcuacgucaccaccaccuucaagcgcaagcacuuccgccccaugcccgacgccugccgcgccgccuacaacuggaagauggccggcgacccccgcuacgaggagucccuccacaaccccuaccccgacuaccacuggcuccgcaccgucaagaccaccaaggagucccucgucaucaucucccccuccgucgccgaccucgaccccuacgacaagucccuccacucccgcgucuuccccuccggcaagugcuccggcaucaccgucuccuccaccugcugcuccaccaaccacgacuacaccaucuggaugcccgagaacccccgccucggcaccuccugcgacaucuucaccaacucccgcggcaagcgcgccuccaagggcggcaagaccugcggcuucgucgacgagcgcggccucuacaagucccuccgcggcgccugcaagcucaagcucugcggcguccucggccuccgccucauggacggcaccugggucgccauccagaccuccgacgagaucaaguggugcucccccgaccagcucgucaaccuccacgacuuccacuccgacgagaucgagcaccucgucgucgaggagcucgucaagaagcgcgaggagugccucgacgcccucgagaccaucaugaccaccaaguccgucuccuuccgccgccucucccaccuccgcaagcucguccccggcuucggcaaggccuacaccaucuucaacaagacccucauggaggccgacgcccacuacaaguccauccgcaccuggaacgagaucauccccuccaagggcugccuccgcgucggcggccgcugccacccccacgucaacggcgucuucuucaacggcaucauccucggccccgacggccacguccucauccccgagaugcaguccucccuccuccaccagcacauggagcuccucgaguccuccgucaucccccucaugcacccccucgccgaccccuccaccgucuucaaggacggcgacgaggccgaggacuucgucgagguccaccuccccgacguccacaagcagaucuccggcgucgaccucggccuccccaacuggggcaaguacguccucaucuccgccggcgcccucaccgcccucaugcucaugaucuuccucaugaccugccgccgcaagaccaaccgcgccgaguccauccagcacucccccggcgagaccggccgcaaggucuccgucaccucccacaacggccgcgucaucuccuccugggaguccuacaaguccggcuccgagaccaagcucuga

SEQ ID NO: 126982 - RNA, 1575 nt, Artificial Sequence
  derived and/or modified CDS sequence (opt2) from glycoprotein__RABV__EU275240.1
augaucccccaggcccuccucuucgucccccuccucgucuucuccuccugcuucggcaaguuccccaucuacaccauccccgacaagcucggccccuggucccccaucgacauccaccaccucuccugccccaacaaccucgucgucgaggacgagggcugcaccaaccucuccggcuucuccuacauggagcucaaggucggcuacaucuccgccaucaaggucaacggcuucaccugcaccggcgucgucaccgaggccgagaccuacaccaacuucgucggcuacgucaccaccaccuucaagcgcaagcacuuccgccccaugcccgacgccugccgcgccgccuacaacuggaagauggccggcgacccccgcuacgaggagucccuccacaaccccuaccccgacuaccacuggcuccgcaccgucaagaccaccaaggagucccucgucaucaucucccccuccgucgccgaccucgaccccuacgacaagucccuccacucccgcgucuuccccgacggcaagugcuccggcaucaccgucuccuccaccugcugcuccaccaaccacgacuacaccaucuggaugcccgagaacccccgccucggcaccuccugcgacaucuucaccaacucccgcggcaagcgcgccuccaagggcggcaagaccugcggcuucgucgacgagcgcggccucuacaagucccucaagggcgccugcaagcucaagcucugcggcguccucggccuccgccucauggacggcaccugggucgccauccagaccuccgacgagaucaaguggugcucccccgaccagcucgucaaccuccacgacuuccacuccgacgagaucgagcaccucgucgucgaggagcucgucaagaagcgcgaggagugccucgacgcccucgagaccaucaugaccaccaaguccgucuccuuccgccgccucucccaccuccgcaagcucguccccggcuucggcaaggccuacaccaucuucaacaagacccucauggaggccgacgcccacuacaaguccauccgcaccuggaacgagaucauccccuccaagggcugccuccgcgucggcggccgcugccacccccacgucaacggcgucuucuucaacggcaucauccucggccccgacggccacguccucauccccgagaugcaguccucccuccuccaccagcacauggagcuccucgaguccuccgucaucccccucaugcacccccucgccgaccccuccaccgucuucaaggacggcgacgaggccgaggacuucgucgagguccaccuccccgacguccacaagcagaucuccggcgucgaccucggccuccccaacuggggcaaguacguccucaucuccgccggcgcccucaccgcccucaugcucaugaucuuccucaugaccugcugccgcaaggccaaccgcgccgaguccauccagcacaaccccggcgagaccggccgcaaggucuccgucaccucccacaacggccgcgucaucuccuccugggaguccuacaaguccggcuccgagaccaagcucuga

SEQ ID NO: 126983 - RNA, 1575 nt, Artificial Sequence
  derived and/or modified CDS sequence (opt2) from glycoprotein__RABV__EU275241.1
augaucccccaggcccuccucuucgucccccuccucgucuucuccucccgcuucggcaaguuccccaucuacaccauccccgacaagcucggccccuggucccccaucgacauccaccaccucuccugccccaacuaccucgucgucgaggacgagggcugcaccaaccucuccggcuucuccuacauggagcucaaggucggcuacaucuccgccaucaaggucaacggcuucaccugcaccggcgucgucaccgaggccgagaccuacaccaacuucgucggcuacgucaccaccaccuucaagcgcaagcacuuccgccccacccccgacgccugccgcgccgccuacaacuggaagauggccggcgacccccgcuacgaggagucccuccacaaccccuaccccgacuaccacuggcuccgcaccgucaagaccuccaaggagucccucgucaucaucucccccuccgucgccgaccucgaccccuacgacaagccccuccacucccgcgucuuccccggcggcaagugcuccggcaucaccgucuccuccaccugcugcuccaccaaccacgacuacaccaucuggaugcccgagaacccccgccuccgcaccuccugcgacaucuucaccaacucccgcggcaagcgcgccuccaagggcggcaagaccugcggcuucgucgacgagcgcggccucuacaagucccucaagggcgccugcaagcucaagcucugcggcguccucggccuccgccucauggacggcaccugggucgccauccagaccuccgacgagaucaaguggugcucccccgaccagcucgucaaccuccacgacuuccacuccgacgagaucgagcaccucgucgucgaggagcucgucaagaagcgcgaggagugccucgacgcccucgagaccaucaugaccaccaaguccgucuccuuccgccgccucucccaccuccgcaagcucguccccggcuucggcaaggccuacaccaucuucaacaagacccucauggaggccgacgcccacuacaaguccauccgcaccuggaacgagaucauccccuccaagggcugccuccgcgucggcggccgcugccacccccacgucaacggcgucuucuucaacggcaucauccucggccccgacggccacguccucauccccgagaugcaguccucccuccuccaccagcacauggagcuccucgaguccuccgucaucccccucaugcacccccucgccgaccccuccaccgucuucaaggacggcgacgaggccgaggacuucgucgagguccaccuccccgacguccacaagcagaucuccggcgucgaccucggccuccccaacuggggcaaguacguccucgucuccgccggcgcccucaccgcccucaugcucaugaucuuccucaugaccugcugccgcaagaccaaccgcgccgaguccauccagcacucccccggcgagaccggccgcaaggucuccgucaccucccacaacggccgcgucaucuccuccugggaguccuacaaguccggcuccgagaccaagcucuga

SEQ ID NO: 126984 - RNA, 1575 nt, Artificial Sequence
  derived and/or modified CDS sequence (opt2) from glycoprotein__RABV__EU275242.1
augaccccccaggcccuccucuucgucccccuccucgucuucucccucugcuucggcaaguuccccaucuacaccauccccgacaagcucggccccuggucccccaucgacauccaccaccucuccugccccaacaaccucgucgucgaggacgagggcugcaccaaccuccccggcuucuccuacauggagcucaaggucggcuacaucuccgccaucaaggucaacggcuucaccugcaccggcgucgucaccgaggccgagaccuacaccaacuucgucggcuacgucaccaccaccuucaagcgcaagcacuuccgccccacccccgacgccugccgcgccgccuacaacuggaagauggccggcgacccccgcuacgaggagucccuccacaaccccuaccccgacuaccacuggcuccgcaccgucaagaccaccaaggagucccucgucaucaucucccccuccgucuccgaccucggccccuacgacaagucccuccacucccgcgucuuccccuccggcaagugcuccggcaucaccgucuccuccaccuacugccccaccaaccacgacuacaccaucuggaugcccgagaacccccgccucggcaccuccugcgacaucuucaccaacucccgcggcaagcgcgccuccaagggcuccaagaccugcggcuucgucgacgagcgcggccucuacaagucccucaagggcgccugcaagcucaagcucugcggcguccucggccuccgccucauggacggcaccugggccgccauccagaccuccgacgaggccaaguggugcccccccgaccagcucgucaacauccacgacuuccgcuccgacgagaucgagcaccucgucgucgaggagcucgucaagaagcgcgaggagugccucgacgcccucgaguccaucaugaccaccaaguccgucuccuuccgccgccucucccaccuccgcaagcucguccccggcuucggcaaggccuacaccaucuucaacaagacccucauggaggccgacgcccacuacaaguccguccgcaccuggaacgagaucauccccuccaagggcugccuccgcgucggcggccgcugccacccccacgccaacggcgucuucuucaacggcaucauccucggccccgacggccacguccucauccccgagaugcaguccucccuccuccagcagcacauggagcuccucgaguccuccgucaucccccucaugcacccccucgccgaccccuccaccgucuucaaggacggcgacgaggccgaggacuucgucgagguccaccuccccgacguccacaagcaggucuccggcgucgaccucggccuccccuccuggggcaaguacguccucauguccgucggcgcccucaucgcccucaugcucaugaucuuccucgccaccugcugccgcaaggccaacggcgccgaguccauccagcaccgccucggcgagaccggccgcaaggucuccgucaccucccagaacggccgcgucaucuccuccugggaguccuacaaguccggcggcgagaccaagcucuga

SEQ ID NO: 126985 - RNA, 1575 nt, Artificial Sequence
  derived and/or modified CDS sequence (opt2) from glycoprotein__RABV__EU293111.1
augaucccccaggcccuccucuuccucccccuccucgucuucucccucugcuccggcaaguuccccaucuacaccauccccgacaagcucggccccuggucccccaucgacauccaccaccucuccugccccaacaaccucgucgucgaggacgagggcugcaccaaccucuccggcuucuccuacauggagcucaaggucggcuacaucuccgccaucaaggucaacggcuucaccugcaccggcgucgucaccgaggccgagaccuacaccaacuucgucggcuacgucaccaccaccuucaagcgcaagcacuuccgccccacccccgacgccugccgcgccgccuacaacuggaagauggccggcgacccccgcuacgaggagucccuccacaaccccuaccccgacuaccacuggcuccgcaccgucaagaccaccaaggagucccucgucaucaucucccccuccgucuccgaccucgaccccuacgacaagucccuccacucccgcgucuuccccuccggcaagugcuccggcaucaccgucuccuccaccuacugccccaccucccacgacuacaccaucuggaugcccgagaacccccgccucggcaccuccugcgacaucuucaucaacucccgcggcaagcgcgccuccaagggcuccaagaccugcggcuucgucgacgagcgcggccucuacaagucccucaagggcgccugcaagcucaagcucugcggcguccucggccuccgccucauggacggcaccugggucgccauccagaccuccgacgaggccaaguggugcccccccgaccagcucgucaacauccacgacuuccacuccgacgagaucgagcaccucgucgucgaggagcucgucaagaagcgcgaggagugccucgacgcccucgaguccaucaugaccaccaaguccgucuccuuccgccgccucucccaccuccgcaagcucguccccggcuucggcaaggccuacaccaucuucaacaagacccucauggaggccgacgcccacuacaaguccguccgcaccuggaacgagaucauccccuccaagggcugccuccgcgucggcggccgcugccacccccacgucaacggcgucuucuucaacggcaucauccucggccccgacggccacguccucauccccgagaugcaguccucccuccuccagcagcacauggagcuccucgaguccuccgucaucccccucaugcacccccucgccgaccccuccaccgucuucaaggacggcgacgaggccgaggacuucgucgagguccaccuccccgacguccacaagcaggucuccggcgucgaccucggccuccccaacuggggcaaguacguccucgucuccgucggcgcccucaucgcccucaugcucaugaucuuccucaugaccugcugccgcaaggccaacggcgucgaguccaugcagcaccgccucggcgagaccggccgcaaggucuccgucaccucccaguccggccgcgucaucuccuccugggaguccuacaaguccggcggcgagaccaagcucuga

SEQ ID NO: 126986 - RNA, 1575 nt, Artificial Sequence
  derived and/or modified CDS sequence (opt2) from glycoprotein__RABV__EU293115.1
auggucccccaggcccuccucuucgucccccuccucgucuucucccucugcuucggcaaguuccccaucuacaccauccccgacaagcucggccccuggucccccaucgacauccaccaccucuccugccccaacaaccucgucgucgaggacgagggcugcaccaaccucuccggcuucuccuacauggagcucaaggucggcuacaucuccuccaucaaggucaacggcuucaccugcaccggcgucgucaccgaggccgagaccuacaccaacuucgucggcuacgucaccaccaccuucaagcgcaagcacuuccgccccacccccgacgccugccgcgccgccuacaacuggaagauggccggcgacccccgcuacgaggagucccuccacaaccccuaccccgacuaccacuggcuccgcaccgucaagaccaccaaggagucccucgucaucaucucccccuccgucgccgaccucgaccccuacgacaagucccuccacucccgcgucuuccccggcggcaagugcuccggcaucaccgucuccuccaccuacugcuccaccaaccacgacuacaccaucuggcuccccgagaacccccgccucggcaccuccugcgacaucuucaccaacucccgcggcaagcgcgccuccaagggcuccaagaccugcggcuucgucgacgagcgcggccucuacaagucccucaagggcgccugcaagcucaagcucugcggcguccucggccuccgccucauggacggcaccugggucgccaugcagaccuccgacgagaccaaguggugcccccccgaccagcucgucaaccuccacgacuuccgcuccgacgagaucgagcaccucgucgucgaggagcucgucaagaagcgcgaggagugccucgacgcccucgaguccaucaugaccaccaaguccgucuccuuccgccgccucucccaccuccgcaagcucguccccggcuucggcaaggccuacaccaucuucaacaagacccucauggaggccgacgcccacuacaaguccguccgcaccuggaacgagaucauccccuccaagggcugccuccgcgucggcggccgcugccaccaccacgucaacggcgucuucuucaacggcaucauccucggccccgacggccacguccucauccccgagaugcaguccucccuccuccagcagcacauggagcuccucgaguccuccgucaucccccucaugcacccccucgccgaccccuccaccgucuucaaggacggcgacgaggccgaggacuucgucgagguccaccuccccgacguccacaagcaggucuccggcgucgaccucggccuccccaacuggggcaaguacguccuccucuccgccggcgcccucgucgcccucaugcucaucaucuuccucaugaccugcugccgccgcgucaaccgccccgaguccacccgccgcuccuucggcggcaccgagcgcaaggucuccaucaccccccaguccggcaaggucaucuccuccugggaguccuacaaguccggcuccgagacccgccucuga

SEQ ID NO: 126987 - RNA, 1575 nt, Artificial Sequence
  derived and/or modified CDS sequence (opt2) from glycoprotein__RABV__EU293116.1
augauccuccaggcccuccucuucgucccccuccucaucuccucccucugcuucggcaaguuccccaucuacaccauccccgacaagcucggccccuggucccccaucgacauccaccaccucuccugccccaacaaccucgucgucgaggacgagggcugcaccucccucuccggcuucuccuacauggagcucaaggucggcuacaucuccgccaucaaggucaacggcuucaccugcaccggcgucgucaccgaggccgagaccuacaccaacuucgucggcuacgucaccaccaccuucaagcgcaagcacuuccgccccacccccgacgccugccgcgccgccuacaacuggaaggucgccggcgacccccgcuacgaggagucccuccagaaccccuaccccgacuaccacuggcuccgcaccgucaagaccaccaaggagucccucaucaucaucucccccuccgucgccgaccucgaccccuacgacaagucccuccacucccgcgucuuccccuccggcaagugccucggcaucaccaucuccuccaccuacugcuccaccaaccacgacuacaccaucuggaugcccgaggaggcccgccucggcaccuccugcgacaucuucaccaacuccaagggcaagaaggccuccaagggcggccgcaccugcggcuucgucgacgagcgcggccucuacaagucccucaagggcgccugcaagcucaagcucugcggcguccccggccuccgccucauggacggcaccugggucaccauccagaccuccgacgagaccaaguggugcccccccgaccagcucgucaaccuccacgacuuccacuccgacgagaucgagcaccucgucgucgaggagcucgucaagaagcgcgaggagugccucgacgcccucgaguccaucaugaccaccaaguccgucuccuuccgccgccucucccaccuccgcaagcucguccccggcuucggcaaggccuacaccaucuucaacaagacccucauggaggccgacgcccacuacaaguccguccgcaccuggaacgagaucauccccuccaagggcugccucaaggucggcggccgcugccacccccacgucgacggcgucuucuucaacggcaucauccucggccccgacggcaacguccucauccccgagaugcaguccucccuccuccagcagcacauggagcuccucgaguccuccgucaucccccucaugcacccccucgccgaccccuccaccgucuucaaggacggcgacgaggccgaggacuucgucgagguccaccuccccgacguccacaagcagaucuccggcgucgaccucggccuccccaacuggggcaaguaccuccucaugaucgccggcgcccucgccggccucauccucaucaucuuccucauggccugcugccgccgcgccaagcgcaccgagucccgccgccgcggcuccggcgaguccgagcgcaagguccccguccccccccagaacggcaaggucaucuccuccugggagcucuacaaguccgagggcgagaccggccucuga

SEQ ID NO: 126988 - RNA, 1575 nt, Artificial Sequence
  derived and/or modified CDS sequence (opt2) from glycoprotein__RABV__EU293121.1
augaucccccaggcccuccucuucgucccccuccucgucuucucccucugcuucggcaaguuccccaucuacaccauccccgacaagcucggccccuggucccccaucgacauccaccaccucuccugccccaacaaccucgucgucgaggacgagggcugcaccaaccucuccggcuucuccuacauggagcucaaggucggcuacaucuccgccaucaaggucaacggcuucaccugcaccggcgucgucaccgaggccgagaccuacaccaacuucgucggcuacgucaccaccaccuucaagcgcaagcacuuccgccccacccccgacgccugccgcgccgccuacaacuggaagauggccggcgacccccgcuacgaggagucccuccacaaccccuaccccgacuaccacuggcuccgcaccgucaagaccaccaaggagucccucgucaucaucucccccuccgucuccgaccucgaccccuacgacaagucccuccacucccgcgucuuccccuccggcaagugcuccggcaucaccgucuccuccaccuacugccccaccaaccacgacuacaccaucuggaugcccgagaacccccgccucggcaccuccugcgacaucuucaccaacucccgcggcaagcgcgccuccaagggcuccaagaccugcggcuucgucgacgagcgcggccucuaccgcucccucaagggcgccugcaagcucaagcucugcggcguccucggccuccgccucauggacggcaccugggccgccauccagaccuccgacgaggccaaguggugcccccccgaccagcucgucaacauccacgacuuccgcuccgacgagaucgagcaccucgucgucgaggagcucgucaagaagcgcgaggagugccucgacgcccucgaguccaucaugaccaccaaguccgucuccuuccgccgccucucccaccuccgcaagcucguccccggcuucggcaaggccuacaccaucuucaacaagacccucauggaggccgacgcccacuacaaguccguccgcaccuggaacgagaucauccccuccaagggcugccuccgcgucggcggccgcugccacccccacgucaacggcgucuucuucaacggcaucauccucggccccgacggccacguccucauccccgagaugcaguccucccuccuccgccagcacauggagcuccucgaguccuccgucaucccccucaugcacccccucgccgaccccuccaccgucuucaaggacggcgacgaggccgaggacuucgucgagguccaccuccccgacguccacgagcagaucuccggcgucgaccucggccuccccuccuggggcaaguacguccucauguccgucggcgccaugaucgcccucaugcucgucaucuuccucaccaccugcugccgcaaggccaacggcgccgagaccauccagcaccgccucggcgagaccggccgcaaggucuccgucaccucccaguccggccgcgucaucuccuccugggaguccuacaaguccggcggcgagaccaagcucuga

SEQ ID NO: 126989 - RNA, 1575 nt, Artificial Sequence
  derived and/or modified CDS sequence (opt2) from glycoprotein__RABV__EU352767.1
auggucccccagguccuccucuucgucccccuccucggcuucucccucugcuucggcaaguuccccaucuacaccauccccgacgagcucggccccuggucccccaucgacauccaccaccucuccugccccaacaaccucgucgucgaggacgagggcugcaccaaccucuccgaguucuccuacauggagcucaaggucggcuacaucuccgccaucaaggucaacggcuucaccugcaccggcgucgucaccgaggccgagaccuacaccaacuucgucggcuacgucaccaccaccuucaagcgcaagcacuuccgccccacccccgacgccugccgcgccgccuacaacuggaagauggccggcgacccccgcuacgaggagucccuccacaaccccuaccccgacuaccacuggcuccgcaccguccgcaccaccaaggagucccucaucaucaucucccccuccgucaccgaccucgaccccuacgacaagucccuccacucccgcgucuuccccggcggcaagugcuccggcaucaccgucuccuccaccuacugcuccaccaaccacgacuacaccaucuggaugcccgaggacccccgcccccgcacccccugcaacaucuucaccaacucccgcggcaagcgcgccuccaagggcaacaagaccugcggcuucgucgacgagcgcggccucuacaagucccucaagggcgccugccgccucaagcucugcggcguccucggccuccgccucauggacggcaccugggucgccaugcagaccuccgacgagaccaaguggugcccccccgaccagcucgucaaccuccacgacuuccacuccgacgagaucgagcaccucgucgucgaggagcucgucaagaagcgcgaggagugccucgacgcccucgaguccaucaugaccaccaaguccgucuccuuccgccgccucucccaccuccgcaagcucguccccggcuucggcaaggccuacaccaucuucaacaagacccucauggaggccgacgcccacuacaaguccguccgcaccuggaacgagaucauccccuccaagggcugccucaaggucggcggccgcugccacccccacgucaacggcgucuucuucaacggcaucauccucggccccgacggccacguccucauccccgagaugcaguccucccuccuccagcagcacauggagcuccucaaguccuccgucaucccccucaugcacccccucgccgaccccuccaccgucuucaaggagggcgacgaggccgaggacuucgucgagguccaccuccccgacgucuacaagcgcaucuccggcgucgaccucggccuccccaacuggggcaaguacguccucaugaccgccggcgccaugaucggccucguccucaucuucucccucaugaccuggugccgccgcgccaaccgccccgaguccaagcagcgcuccuucggcggcaccggccgcaacgucuccgucaccucccaguccggcaaggucauccccuccugggaguccuacaaguccggcggcgagauccgccucuga

SEQ ID NO: 126990 - RNA, 1575 nt, Artificial Sequence
  derived and/or modified CDS sequence (opt2) from glycoprotein__RABV__EU549783.1
augaucccccagguccuccucuucgucccccuccucgucuucuccuccugcuucggcaaguuccccaucuacaccauccccgacaagcucggccccuggucccccaucgacauccaccaccucuccugccccaacaaccucgucgucgaggacgagggcugcaccaaccucuccggcuucuccuacauggagcucaaggucggcuacuccuccgccaucaaggucaacggcuucaccugcaccggcgucgucaccgaggccgagaccuacaccaacuucgucggcuacgucaccaccaccuucaagcgcaagcacuuccgccccaugcccgacgccugccgcgccgccuacaacuggaagauggccggcgacccccgcuacgaggagucccuccacaaccccuaccccgacuaccacuggcuccgcaccgucaagaccaccaaggagucccucgucaucaucucccccuccgucaccgaccucgaccccuacgacaagucccuccacucccgcgucuuccccggcggcaagugcuccggcaucaccgucuccuccaccugcugcuccaccaaccacgacuacaccaucuggaugcccgagaacccccgccucggcaccuccugcgacaucuucaccaacucccgcggcaagcgcgccuccaagggcggcaagaccugcggcuucgucgacgagcgcggccucuacaagucccucaagggcgccugcaagcucaagcucugcggcguccucggccuccgccucauggacggcaccugggucgccauccagaccuccgacgagaucaaguggugcucccccgaccagcucgucaaccuccacgacuuccacuccgacgagaucgagcaccucgucgucgaggagcucgucaagaagcgcgaggagugccucgacgcccucgagaccaucaugaccaccaaguccgucuccuuccgccgccucucccaccuccgcaagcucguccccggcuucggcaaggccuacaccaucuucaacaagacccucauggaggccgacgcccacuacaaguccauccgcaccuggaacgagaucauccccuccaagggcugccuccgcgucggcggccgcugccacccccacgucaacggcgucuucuucaacggcaucauccucggccccgacggccacguccucauccccgagaugcaguccucccuccuccaccagcacauggagcuccucgaguccuccgucaucccccucaugcacccccucgccgaccccuccaccgucuucaaggacggcgacgaggccgaggacuucgucgagguccaccuccccgacguccacaagcagaucuccggcgucgaccucggccuccccaacuggggcaaguacguccucaucuccgccggcgcccucaccgcccucaugcucaccaucuuccucaugaccugcugccgcaagaccaaccgcgccggcuccauccagcacucccccggcggcaccggccgcaaggucuccgucaccccccacaacggccgcgucaucugcuccugggaguccuacaaguccggcuccgagaccaagcucuga

SEQ ID NO: 126991 - RNA, 1575 nt, Artificial Sequence
  derived and/or modified CDS sequence (opt2) from glycoprotein__RABV__EU643590.1
auggucccccaggcccuccucuucgucccccuccucgccgucccccucugcuucggcaaguuccccaucuacaccauccccgacaagcucggccccuggucccccaucgacauccaccaccucuccugccccaacaaccucgucgucgaggacgagggcugcaccaaccucuccggcuucuccuacauggagcucaaggucggcuacaucuccgccaucaaggucaacggcuucaccugcaccggcgucgucaccgaggccgagaccuacaccaacuucgucggcuacgucaccaccaccuucaagcgcaagcacuuccgccccacccccgacgccugccgcuccgccuacaacuggaagauggccggcgacccccgcuacgaggagucccuccacaaccccuaccccgacuaccacuggcuccgcaccgucaagaccaccaaggaguccuucgucaucaucucccccuccgucgccgaccucgaccccuacgacaagucccuccacucccgcgucuucccccgcggcaagugcuccggcaucaccgucuccuccaccuacugcuccaccaaccacgacuacaccaucuggaugcccgagaacccccgccucggcaccuccugcgacaucuucaccaacucccgcggcaagcgcgccuccaagggcuccaagaccugcggcuucgucgacgagcgcggccucuacaagucccucaagggcgccugcaagcucaagcucugcggcguccucggccuccgccucauggacggcaccugggucgccauccagaccuccgacgagaccaaguggugcccccccgaccagcucgucaaccuccacgacuuccacuccgacgagaucgagcaccucgucgucgaggagcucgucaagaagcgcgaggagugccucgacgcccucgaguccaucaugaccaccaaguccgucuccuuccgccgccucucccaccuccgcaagcucguccccggcuucggcaaggccuacaccaucuucaacaagacccucauggaggccgacgcccacuacaaguccguccgcaccuggaacgagaucauccccuccaagggcugccuccgcgucggcggccgcugccacccccacgucaacggcgucuucuucaacggcaucauccucggccccgacggccacguccucauccccgagaugcaguccucccuccuccagcagcacauggagcuccucgaguccuccgucaucccccucaugcacccccucgccgaccccuccaccgucuucaaggacggcgacgaggccgaggacuucgucgagguccaccuccccgacguccacaagcaggucuccggcgucgaccucggccuccccuccuggggcaaguacguccucauguccgccggcauccucaccgcccucaugcucaccaucuuccucaugaccugcugccgccgcaccaaccgcgccgaguccauccagcacucccucggcgagaccggccgcaaggucuccgucaccucccaguccggccgcgucaucuccuccugggaguccuacaaguccggcggcgagaccaagcucuga

SEQ ID NO: 126992 - RNA, 1575 nt, Artificial Sequence
  derived and/or modified CDS sequence (opt2) from glycoprotein__RABV__EU700029.1
augaucccccagguccuccucuucgucccccuccucgucuucuccuccugcuucggcaaguuccccaucuacaccauccccgacaagcucggccccuggucccccaucgacauccaccaccucuccugccccaacaaccucgucgucgaggacgagggcugcaccaaccucuccggcuucuccuacauggagcucaaggucggcuacaucuccgccaucaaggucaacggcuucaccugcaccggcgucgucaccgaggccgagaccuacaccaacuucgucggcuacgucaccaccaccuucaagcgcaagcacuuccgccccaugcccgacgccugccgcgccgccuacaacuggaagauggccggcgacccccgcuacgaggagucccuccacaaccccuaccccgacuaccacuggcuccgcaccgucaagaccaccaaggagucccucgucaucaucucccccuccgucgccgaccucgaccccuacgacaagucccuccacucccgcgucuuccccggcggcaagugcuccggcaucaccgucuccuccaccugcugcuccaccaaccacgacuacaccaucuggaugcccgagaacccccgccucggcaccuccugcgacaucuucaccaacucccgcggcaagcgcgccuccaagggcggcaagaccugcggcuucgucgacgagcgcggccucuacaagucccucaagggcgccugcaagcucaagcucugcggcguccucggccuccgccucauggacggcaccugggucgccauccagaccuccgacgagaucaaguggugcccccccgaccagcucgucaaccuccacgacuuccacuccgacgagaucgagcaccucgucgucgaggagcucgucaagaagcgcgaggagugccucgacgcccucgagaccaucaugaccaccaaguccgucuccuuccgccgccucucccaccuccgcaagcucguccccggcuucggcaaggccuacaccaucuucaacaagacccucauggaggccgacgcccacuacaaguccauccgcaccuggaacgagaucauccccuccaagggcugccuccgcgucggcggccgcugccacccccacgucaacggcgucuucuucaacggcaucauccucggccccgacggccacguccucauccccgagaugcaguccucccuccuccaccagcacauggagcuccucgaguccuccgucaucccccucaugcacccccucgccgaccccuccaccgucuucaaggacggcgacgaggccgaggacuucgucgagguccaccuccccgacguccacaagcagaucuccggcgucgaccucggccuccccaacuggggcaaguacguccucaucuccgccggcgcccucaccgcccucaugcucaccaucuuccucaugaccugcugccgcaagaccaaccgcgccggcuccauccagcacucccccggcgagaccggccgcaaggucuccgucaccucccacaacggccgcgucaucuccuccugggaguccuacaaguccggcuccgagaccaagcucuga

SEQ ID NO: 126993 - RNA, 1575 nt, Artificial Sequence
  derived and/or modified CDS sequence (opt2) from glycoprotein__RABV__EU700030.1
auggucccccucgcccuccuccucgucccccuccucgucuucuccuccugcuucggcaaguuccccaucuacaccauccccgacaagcucggccccuggucccccaucgacauccaccaccucuccugccccaacaaccucgucgucgaggacgagggcugcaccaaccucuccggcuucuccuacauggagcucaaggucggcuacaucuccgccaucaaggucaacggcuucaccugcaccggcgucgucaccgaggccgagaccuacaccaacuucgucggcuacgucaccaccaccuucaagcgcaagcacuuccgccccaugcccgacgccugccgcgccgccuacaacuggaagauggccggcgacccccgcuacgaggagucccuccacaaccccuaccccgacuaccacuggcuccgcaccgucaagaccaccaaggagucccucgucaucaucucccccuccgucgccgaccucgaccccuacgacaagucccuccacucccgcgucuuccccggcggcaagugcuccggcaucaccgucuccuccaccugcugcuccaccaaccacgacuacaccaucuggaugcccgagaacccccgccucggcaccuccugcgacaucuucaccaacucccgcggcaagcgcgccuccaagggcggcaagaccugcggcuucgucgacgagcgcggccucuacaagucccucaagggcgccugcaagcucaagcucugcggcguccucggccuccgccucauggacggcaccugggucgccauccagaccuccgacgagaucaaguggugcucccccgaccagcucgucaaccuccacgacuuccacuccgacgagaucgagcaccucgucgucgaggagcucgucaagaagcgcgaggagugccucgacgcccucgagaccaucaugaccaccaaguccgucuccuuccgccgccucucccaccuccgcaagcucguccccggcuucggcaaggccuacaccaucuucaacaagacccucauggaggccgacgcccacuacaaguccauccgcaccuggaacgagaucauccccuccaagggcugccuccgcgucggcggccgcugccacccccacgucaacggcgucuucuucaacggcaucauccucggccccgacggccacguccucauccccgagaugcaguccucccuccuccaccagcacauggagcuccucgaguccuccgucaucccccucaugcacccccucgccgaccccuccaccgucuucaaggacggcgacgaggccgaggacuucgucgagguccaccuccccgacguccacaagcagaucuccggcgucgaccucggccuccccaacuggggcaaguacguccucaucuccgccggcgcccucaccgcccucaugcucaccaucuuccucaugaccugcugccgcaagaccaaccgcgccgaguccauccagcacucccccggcgagaucggccgcaaggucuccgucaccucccacaacggccgcgucaucuccuccugggaguccuacaaguccggcuccgagaccaagcucuga

SEQ ID NO: 126994 - RNA, 1575 nt, Artificial Sequence
  derived and/or modified CDS sequence (opt2) from glycoprotein__RABV__EU827276.1
auggucccccucacccuccucgucgccccccuccucguccucucccucugcuccggcaaguuccccaucuacaccauccccgacaagcucggccccuggucccccaucgacauccaccaccucuccugccccaacaaccucgucgucgaggacgagggcugcaccaaccucuccggcuucuccuacauggagcucaaggucggcuacaucuccgccaucaaggucaacggcuucaccugcaccggcgucgucaccgaggccgagaccuacaccaacuucgucggcuacgucaccaccaccuuccgccgcaagcacuuccgccccacccccgacgccugccgcaccgccuacaacuggaagauggccggcgacccccgcuacgaggagucccuccacaaccccuaccccgacuaccacuggcuccgcaccgucaagaccaccaaggagucccucgucaucaucucccccuccgucgccgaccucgaccccuacgaccgcucccuccacucccgcgucuuccccaacggcaagugcuccggcaucaccgucuccuccaccuacugccccaccaaccacgacuacaccaucuggaugcccgagaacccccgccucggcaccuccugcgacaucuucgucaacucccgcggcaagcgcgccuccaagggcuccaagaccugcggcuucgucgacgagcgcggccucuacaagucccucaagggcgccugcaagcucaagcucugcggcguccucggccuccgccucauggacggcaccugggucgccaugcgcaccuccgacgagaccaaguggugcccccccgaccagcucgucaacauccacgacuuccacuccgacgagaucgagcaccucgucgucgaggagcucgucaagaagcgcgaggagugccucgacgcccucgaguccaucaugaccaccaaguccgucuccuuccgccgccucucccaccuccgcaagcucguccccggcuucggcaaggccuacaccaucuucaacaagacccucauggaggccgacgcccacuacaaguccguccgcaccugggacgagaucauccccuccaagggcugccuccgcgucggcggccgcugccacccccacguccacggcgucuucuucaacggcaucauccucggccccgacggccacguccucauccccgagaugcaguccucccuccuccagcagcacauggagcuccucgaguccuccgucaucccccucaugcacccccucgccgaccccuccaccgucuucaaggacgacgacgaggccgaggacuucgucgagguccaccuccccgacguccacaagcagaucuccggcgucgaccucggccuccccaacuggggcaaguacguccucauguccgccggcgcccucaucgcccucaugcuccucaucuuccucaugaccugcugccgcaagaucaagcgccccgaguccacccagcacuccccccgcggcaccggccgcaaggucuccgucaccucccagaacggcaaggucaucuccuccugggaguccuacaaguccggcggcgagacccgccucuga

SEQ ID NO: 126995 - RNA, 1575 nt, Artificial Sequence
  derived and/or modified CDS sequence (opt2) from glycoprotein__RABV__EU827277.1
auggucccccucacccuccucgucgucccccuccucguccucucccucugcuccggcaaguuccccaucuacaccauccccgacaagcucggccccuggucccccaucgacauccaccaccucuccugccccaacaaccucgucgucgaggacgagggcugcaccaaccucuccggcuucuccuacauggagcucaaggucggcuacaucuccgccaucaaggucaacggcuucaccugcaccggcgucgucaccgaggccgagaccuacaccaacuucgucggcuacgucaccaccaccuuccgccgcaagcacuuccgccccacccccgacgccugccgcaccgccuacaacuggaagauggccggcgacccccgcuacgaggagucccuccacaaccccuaccccgacuaccacuggcuccgcaccgucaagaccaccaaggagucccucaucaucaucucccccuccgucgccgaccucgaccccuacgaccgcucccuccacucccgcgucuuccccaacggcaagugcuccggcaucaccgucuccuccaccuacugccccaccaaccacgacuacaccaucuggaugcccgagaacccccgccucggcaccuccugcgacaucuucgucaacucccgcggcaagcgcgccuccaagggcuccaagaccuccggcuucgucgacgagcgcggccucuacaagucccucaagggcgccugcaagcucaagcucugcggcguccucggccuccgccucauggacggcaccugggucgccaugcgcaccuccgacgagaccaaguggugcccccccguccagcucgucaacauccacgacuuccacuccgacgagaucgagcaccucgucgucgaggagcucgucaagaagcgcgaggagugccucgacgcccucgaguccaucaugaccaccaaguccgucuccuuccgccgccucucccaccuccgcaagcucguccccggcuucggcaaggccuacaccaucuucaacaagacccucauggaggccgacgcccacuacaaguccguccgcaccugggacgagaucauccccuccaagggcugccuccgcgucggcggccgcugccacccccacguccacggcgucuucuucaacggcaucauccucggccccgacggccacguccucauccccgagaugcaguccucccuccuccagcagcacauggagcuccucgaguccuccgucaucccccucaugcacccccucgccgaccccuccaccgucuucaaggacggcgacgaggccgaggacuucgucgagguccaccuccccgacguccacaagcagaucuccggcgucgaccucggccuccccaacuggggcaaguacguccucauguccgccggcgcccucaucgcccucaugcucaucaucuuccucaugaccugcugccgcaagaucaagcgccccgaguccacccagcacucccccggcggcaccggccgcaaggucuccgucaccucccagaacggcaaggucaucuccuccugggaguccuacaaguccggcggcgagacccgccucuga

SEQ ID NO: 126996 - RNA, 1575 nt, Artificial Sequence; identical to SEQ ID NO: 126894
  derived and/or modified CDS sequence (opt2) from glycoprotein__RABV__EU877067.1

SEQ ID NO: 126997 - RNA, 1575 nt, Artificial Sequence
  derived and/or modified CDS sequence (opt2) from glycoprotein__RABV__FJ418876.1
augaucccccaggcccuccucuucgucccccuccucgucuucucccucugcuucggcaaguuccccaucuacaccauccccgacaagcucggccccuggucccccaucgacauccaccaccucuccugccccaacaaccucgucgucgaggacgagggcugcaccaaccucuccggcuucuccuacauggagcucaaggucggcuacaucuccgccaucaaggucaacggcuucaccugcaccggcgucgucaccgaggccgagaccuacaccaacuucgucggcuacgucaccaccaccuucaagcgcaagcacuuccgccccacccccgacgccugccgcgccgccuacaacuggaagauggccggcgacccccgcuacgaggagucccuccacaaccccuaccccgacuaccacuggcuccgcaccgucaagaccaccaaggagucccucgucaucaucucccccuccgucgccgaccucgaccccuacgacaagucccuccacucccgcgucuuccccuccggcaagugcuccggcaucaccgucuccuccaccuacugcuccaccaaccacgacuacaccaucuggaugcccgagaacccccgccucggcaccuccugcgacaucuucgucaacucccgcggcaagcgcgccuccaagggcuccaagaccugcggcuucgucgacgagcgcggccucuacaagucccucaagggcgccugcaagaucaagcucugcggcguccucggccuccgccucauggacggcaccugggucgccauccagaccuccgacgagaccaaguggugcccccccgaccagcucgucaaccuccacgacuuccgcuccgacgagaucgagcaccucgucgucgaggagcucgucaagaagcgcgaggagugccucgacgcccucgaguccaucaugaccaccaaguccgucuccuuccgccgccucucccaccuccgcaagcucguccccggcuucggcaaggccuacaccaucuucaacaagacccucauggaggccgacgcccacuacaaguccguccgcaccuggaacgagaucauccccuccaagggcugccuccgcgucggcggccgcugccacccccacgucaacggcgucuucuucaacggcaucauccucggccccgacggccacguccucauccccgagaugcaguccucccuccuccagcagcacauggagcuccucgaguccuccgucaucccccucaugcacccccucgccgaccccuccaccaucuucaaggacggcgacgaggccgaggacuucgucgagguccaccuccccgacguccacaagcaggucuccggcgucgaccucggccuccccaacuggggcaaguacguccucauguccgccggcgcccucaucgcccucaugcucaugaucuuccucaugaccugcugccgcaagaccgaccgcaccggcuccacccaccacucccccggcgagaccggccgcaaggucuccgucaccucccagaacggccgcgucaucgccuccugggaguccuacaaguccggcggcgagacccgccucuga

SEQ ID NO: 126998 - RNA, 1575 nt, Artificial Sequence
  derived and/or modified CDS sequence (opt2) from glycoprotein__RABV__FJ418877.1
auggucccccaggcccuccucuucgucccccuccucgccaucccccucugcuucggcaaguuccccaucuacaccauccccgacaagcucggccccuggucccccaucgacauccaccaccucuccugccccaacaaccucgucgucgaggacgagggcugcaccaaccucuccggcuucuccuacauggagcucaaggucggcuacaucuccgccaucaaggucaacggcuucaccugcaccggcgucgucaccgaggccgagaccuacaccaacuucgucggcuacgucaccaccaccuucaagcgcaagcacuuccgccccacccccgacgccugccgcuccgccuacaacuggaagauggccggcgacccccgcuacgaggagucccuccacaaccccuaccccgacuaccacuggcuccgcaccgucaagaccaccaaggaguccuucgucaucaucucccccuccgucgccgaccucgaccccuacgacaagucccuccacucccgcgucuucccccgcggcaagugcuccggcaucaccgucuccuccaccuacugcuccaccaaccacgacuacaccaucuggaugcccgagaacccccgccucggcaccuccugcgacaucuucaccaacucccgcggcaagcgcgccuccaagggcuccaagaccugcggcuucgucgacgagcgcggccucuacaagucccucaagggcgccugcaagaugaagcucugcggcguccucggccuccgccucauggacggcaccugggucgccauccagaccuccgacgagaccaaguggugcccccccgaccagcucgucaaccuccacgacuuccacuccgacgagaucgagcaccucgucgucgaggagcucgucaagaagcgcgaggagugccucgacgcccucgaguccaucaugaccaccaaguccgucuccuuccgccgccucucccaccuccgcaagcucguccccggcuucggcaaggccuacaccaucuucaacaagacccucauggaggccgacgcccacuacaaguccguccgcaccuggaacgagaucauccccuccaagggcugccuccgcgucggcggccgcugccacccccacgucaacggcgucuucuucaacggcaucauccucggccccgacggccacguccucauccccgagaugcaguccucccuccuccagcagcacauggagcuccucgaguccuccgucaucccccucaugcacccccucgccgaccccuccaccgucuucaaggacggcgacgaggccgaggacuucgucgagguccaccuccccgacguccacaagcaggucuccggcgucgaccucggccuccccuccuggggcaaguacguccucauguccgccggcauccucaccgcccucaugcucaugaucuuccucaugaccugcugccgccgcaccaaccgcgccgaguccauccagcacucccucggcgagaccggccgcaaggucuccgucaccucccaguccggccgcgucaucuccuccugggaguccuacaaguccggcggcgagaccaagcucuga

SEQ ID NO: 126999 - RNA, 1575 nt, Artificial Sequence
  derived and/or modified CDS sequence (opt2) from glycoprotein__RABV__FJ418878.1
augaucccccagguccuccucuucgucccccuccucgucuucuccuccugcuucggcaaguuccccaucuacaccauccccgacaagcucggccccuggucccccaucgacauccaccaccucuccugccccaacaaccucgucgucgaggacgagggcugcaccaaccucuccggcuucuccuacauggagcucaaggucggcuacaucuccgccaucaaggucaacggcuucaccugcaccggcgucgucaccgaggccgagaccuacaccaacuucgucggcuacgucaccaccaccuucaagcgcaagcacuuccgccccaugcccgacgccugccgcgccgccuacaacuggaagauggccggcgacccccgcuacgaggagucccuccacaaccccuaccccgacuaccacuggcuccgcaccgucaagaccaccaaggagucccucgucaucaucucccccuccgucgccgaccucgaccccuacgacaagucccuccacucccgcgucuuccccggcggcaagugcuccggcaucaccgucuccuccaccugcugcuccaccaaccacgacuacaccaucuggaugcccgagaacccccgccucggcaccuccugcgacaucuucaccaacucccgcggcaagcgcgccuccaagggcggcaagaccugcggcuucgucgacgagcgcggccucuacaagucccucaagggcgccugcaagaugaagcucugcggcguccucggccuccgccucauggacggcaccugggucgccauccagaccuccgacgagaucaaguggugcucccccgaccagcucgucaaccuccacgacuuccacuccgacgagaucgagcaccucgucgucgaggagcucgucaagaagcgcgaggagugccucgacgcccucgagaccaucaugaccaccaaguccgucuccuuccgccgccucucccaccuccgcaagcucguccccggcuucggcaaggccuacaccaucuucaacaagacccucauggaggccgacgcccacuacaaguccauccgcaccuggaacgagaucauccccuccaagggcugccuccgcgucggcggccgcugccacccccacgucaacggcgucuucuucaacggcaucauccucggccccgacggccacguccucauccccgagaugcaguccucccuccuccaccagcacauggagcuccucgaguccuccgucaucccccucaugcacccccucgccgaccccuccaccgucuucaaggacggcgacgaggccgaggacuucgucgacguccaccuccccgacguccacaagcagaucuccggcgucgaccucggccuccccaacuggggcaaguacguccucaucuccgccggcgcccucaccgcccucaugcucaugaucuuccucaugaccugcugccgcaaggccaaccgcgccgaguccauccagcacaaccccggcgagaccggccgcaaggucuccgucaccucccacaacggccgcgucaucuccuccugggaguccuacaaguccggcggcgagaccaagcucuga

SEQ ID NO: 127000 - RNA, 1575 nt, Artificial Sequence
  derived and/or modified CDS sequence (opt2) from glycoprotein__RABV__FJ418879.1
augaucccccagguccuccucuucgucccccuccucgucuucuccuccugccucggcaaguuccccaucuacaccauccccgacaagcucggccccuggucccccaucgacauccaccaccucuccugccccaacaaccucgucgucgaggacgagggcugcaccaaccucuccggcuucuccuacauggagcucaaggucggcuacaucuccgccaucaaggucaacggcuucaccugcaccggcgucgucaccgaggccgagaccuacaccaacuucgucggcuacgucaccaccaccuucaagcgcaagcacuuccgccccaugcucgacgccugccgcgccgccuacaacuggaagauggccggcgacccccgcuacgaggagucccuccacaaccccuaccccgacuaccacuggcuccgcaccgucaagaccuccaaggagucccucgucaucaucucccccuccgucgccgaccucgaccccuacgacaagucccuccacucccgcgucuuccccggcggcaagugcuccggcaucaccgucuccuccaccugcugcuccaccaaccacgacuacaccaucuggaugcccgagaacccccgccucggcaccuccugcgacaucuucaccaacucccgcggcaagcgcgccuccaagggcggcaagaccugcggcuucgucgacgagcgcggccucuacaagucccucaagggcgccugcaaggucaagcucugcggcguccucggccuccgccucauggacggcaccugggucgccauccagaccuccgacgagaucaaguggugcucccccgaccagcucgucaaccuccacgacuuccacuccgacgagaucgagcaccucgucgucgaggagcucgucaagaagcgcgaggagugccucgacgcccucgagaccaucaugaccaccaaguccgucuccuuccgccgccucucccaccuccgcaagcucguccccggcuucggcaaggccuacaccaucuucaacaagacccucauggaggccgacgcccacuacaaguccauccgcaccuggaacgagaucauccccuccaagggcugccuccgcgucggcggccgcugccacccccacgucaacggcgucuucuucaacggcaucauccucggccccgacggccacguccucauccccgagaugcaguccucccuccuccaccagcacauggagcuccucgaguccuccgucaucccccucaugcacccccucgccgaccccuccaccgucuucaaggacggcgacgaggccgaggacuucgucgagguccaccuccccgacguccacaagcagaucuccggcgucgaccucggccuccccaacuggggcaaguacguccucaucuccgccggcgcccucaccgccuccaugcucaugaucuuccucaugaccugcugccgcaagaccaaccgcgccgaguccauccagcacucccccggcgagaccggccgcaaggucuccgucaccucccacaacggccgcgucaucuccuccugggaguccuacaaguccggcggcgagaccaagcucuga

SEQ ID NO: 127001 - RNA, 1575 nt, Artificial Sequence; identical to SEQ ID NO: 126998
  derived and/or modified CDS sequence (opt2) from glycoprotein__RABV__FJ418880.1

SEQ ID NO: 127002 - RNA, 1575 nt, Artificial Sequence
  derived and/or modified CDS sequence (opt2) from glycoprotein__RABV__FJ418881.1
augaucccccagguccuccucuucgucccccuccucgucuucuccuccugcuucggcaaguuccccaucuacaccauccccgacaagcucggccccuggucccccaucgacauccaccaccucuccugccccaacaaccucgucgucgaggacgagggcugcaccaaccucuccggcuucuccuacauggagcucaaggucggcuacaucuccgccaucaaggucaacggcuucaccugcaccggcgucgucaccgaggccgagaccuacaccaacuucgucggcuacgucaccaccaccuucaagcgcaagcacuuccgccccaugcccgacgccugccgcgccgccuacaacuggaagauggccggcgacccccgcuacgaggagucccuccacaaccccuaccccgacuaccacuggcuccgcaccgucaagaccuccaaggagucccucgucaucaucucccccuccgucgccgaccucgaccccuacgacaagucccuccacucccgcgucuuccccggcggcaagugcuccggcaucaccgucuccuccaccugcugcuccaccaaccacgacuacaccaucuggaugcccgagaacccccgccccggcaccuccugcgacaucuucaccaacucccgcggcaagcgcgccuccaagggcggcaagaccugcggcuucgucgacgagcgcggccucuacaagucccucaagggcgccugcaaggucaugcucugcggcguccucggccuccgccucauggacggcaccugggucgccauccagaccuccgacgagaucaaguggugcucccccgaccagcucgucaaccuccacgacuuccacuccgacgagaucgagcaccucgucgucgaggagcucgucaagaagcgcgaggagugccucgacgcccucgagaccaucaugaccaccaaguccgucuccuuccgccgccucucccaccuccgcaagcucguccccggcuucggcaaggccuacaccaucuucaacaagacccucauggaggccgacgcccacuacaaguccauccgcaccuggaacgagaucauccccuccaagggcugccuccgcgucggcggccgcugccacccccacgucaacggcgucuucuucaacggcaucauccucggccccgacggccacguccucauccccgagaugcaguccucccuccuccaccagcacauggagcuccucgaguccuccgucaucccccucaugcacccccucgccgaccccuccaccgucuucaaggacggcgacgaggccgaggacuucgucgagguccaccuccccgacguccacaagcagaucuccggcgucgaccucggccuccccaacuggggcaaguacguccucaucuccgccggcgcccucaccgcccucaugcucaugaucuuccucaugaccugcugccgcaagaccaaccgcgccgaguccauccagcacucccccggcgagaccggccgcaaggucuccgucaccucccacaacggccgcgucaucuccuccugggaguccuacaaguccggcggcgagaccaagcucuga

SEQ ID NO: 127003 - RNA, 1575 nt, Artificial Sequence
  derived and/or modified CDS sequence (opt2) from glycoprotein__RABV__FJ418883.1
augaucccccagguccuccucuucgucccccuccucgucuucuccuccugcuucggcaaguuccccaucuacaccauccccgacaagcucggccccuggucccccaucgacauccaccaccucuccugccccaacaaccucgucgucgaggacgagggcugcaccaaccucuccggcuucuccuacauggagcucaaggucggcuacaucuccgccaucaaggucaacggcuucaccugcaccggcgucgucaccgaggccgagaccuacaccaacuucgucggcuacgucaccaccaccuucaagcgcaagcacuuccgccccaugcccgacgccugccgcgccgccuacaacuggaagauggccggcgacccccgcuacgaggagucccuccacaaccccuaccccgacuaccacuggcuccgcaccgucaagaccaccaaggagucccucgucaucaucucccccuccgucgccgaccucgaccccuacgacaagucccuccacucccgcgucuuccccggcggcaagugcuccggcaucaccgucuccuccaccugcugcuccaccaaccacgacuacaccaucuggaugcccgagaacccccgccucggcaccuccugcgacaucuucaccaacucccgcggcaagcgcgccuccaagggcggcaagaccugcggcuucgucgacgagcgcggccucuacaagucccucaagggcgccugcaagaugaagcucugcggcguccucggccuccgccucauggacggcaccugggucgccauccagaccuccgacgagaucaaguggugcucccccgaccagcucgucaaccuccacgacuuccacuccgacgagaucgagcaccucgucgucgaggagcucgucaagaagcgcgaggagugccucgacgcccucgagaccaucaugaccaccaaguccgucuccuuccgccgccucucccaccuccgcaagcucguccccggcuucggcaaggccuacaccaucuucaacaagacccucauggaggccgacgcccacuacaaguccauccgcaccuggaacgagaucauccccuccaagggcugccuccgcgucggcggccgcugccacccccacgucaacggcgucuucuucaacggcaucauccucggccccgacggccacguccucauccccgagaugcaguccucccuccuccaccagcacauggagcuccucgaguccuccgucaucccccucaugcacccccucgccgaccccuccaccgucuucaaggacggcgacgaggccgaggacuucgucgagguccaccuccccgacguccacaagcagaucuccggcgucgaccucggccuccccaacuggggcaaguacguccucaucuccgccggcgcccucaccgcccucaugcucaagaucuuccucaugaccugcugccgcaagaccaaccgcgccgaguccauccagcacucccccggcgagaucggccgcaaggucuccgucaccucccacaacggccgcgucaucuccuccugggaguccuacaaguccggcuccgagaccaagcucuga

SEQ ID NO: 127004 - RNA, 1575 nt, Artificial Sequence
  derived and/or modified CDS sequence (opt2) from glycoprotein__RABV__FJ418884.1
augaucccccagguccuccucuucgucccccuccucgucuucuccuccugcuucggcaaguuccccaucuacaccauccccgacaagcucggccccuggucccccaucgacauccaccaccucuccugccccaacaaccucgucgucgaggacgagggcugcaccaaccucuccggcuucuccuacauggagcucaaggucggcuacaucuccgccaucaaggucaacggcuucaccugcaccggcgucgucaccgaggccgagaccuacaccaacuucgucggcuacgucaccaccaccuucaagcgcaagcacuuccgccccaugcccgacgccugccgcgccgccuacaacuggaagauggccggcgacccccgcuacgaggagucccuccacaaccccuaccccgacuaccacuggcuccgcaccgucaagaccaccaaggagucccucgucaucaucucccccuccgucgccgaccucgaccccuacgacaagucccuccacucccgcgucuuccccggcggcaagugcuccggcaucaccgucuccuccaccugcugcuccaccaaccacgacuacaccaucuggaugcccgagaacccccgccucggcaccuccugcgacaucuucaccaacucccgcggcaagcgcgccuccaagggcggcaagaccugcggcuucgucgacgagcgcggccucuacaagucccucaagggcgccugcaagaugaagcucugcggcguccucggccuccgccucauggacggcaccugggucgccauccagaccuccgacgagaucaaguggugcucccccgaccagcucgucaaccuccacgacuuccacuccgacgagaucgagcaccucgucgucgaggagcucgucaagaagcgcgaggagugccucgacgcccucgagaccaucaugaccaccaaguccgucuccuuccgccgccucucccaccuccgcaagcucguccccggcuucggcaaggccuacaccaucuucaacaagacccucauggaggccgacgcccacuacaaguccauccgcaccuggaacgagaucauccccuccaagggcugccuccgcgucggcggccgcugccacccccacgucaacggcgucuucuucaacggcaucauccucggccccgacggccacguccucauccccgagaugcaguccucccuccuccaccagcacauggagcuccucgaguccuccgucaucccccucaugcacccccucgccgaccccuccaccgucuucaaggacggcgacgaggccgaggacuucgucgagguccaccuccccgacguccacaagcagaucuccggcgucgaccucggccuccccaacuggggcaaguacguccucaucuccgccggcgcccucaccgcccucaugcucaccaucuuccucaugaugugcugccgcaagaccaaccgcgccgaguccauccagcacucccccggcgagaucggccgcaaggucuccgucaccucccacaacggccgcgucaucuccuccugggaguccuacaaguccggcuccgagaccaagcucuga

SEQ ID NO: 127005 - RNA, 1575 nt, Artificial Sequence
  derived and/or modified CDS sequence (opt2) from glycoprotein__RABV__FJ418885.1
auggucccccagguccuccucuucgucccccuccucgucuucuccuccugcuucggcaaguuccccaucuacaccauccccgacaagcucggccccuggucccccaucgacauccaccaccucuccugccccaacaaccucgucgucgaggacgagggcugcaccaaccucuccggcuucuccuacauggagcucaaggucggcuacaucuccgccaucaaggucaacggcuucaccugcaccggcgucgucaccgaggccgagaccuacaccaacuucgucggcuacgucaccaccaccuucaagcgcaagcacuuccgccccaugcccgacgccugccgcgccgccuacaacuggaagauggccggcgacccccgcuacgaggagucccuccacaaccccuaccccgacuaccacuggcuccgcaccgucaagaccaccaaggagucccucgucaucaucucccccuccgucgccgaccucgaccccuacgacaagucccuccacucccgcgucuuccccggcggcaagugcuccggcaucaccgucuccuccaccugcugcuccaccaaccacgacuacaccaucuggaugcccgagaacccccgccucggcaccuccugcgacaucuucaccaacucccgcggcaagcgcgccuccaagggcggcaagaccugcggcuucgucgacgagcgcggccucuacaagucccucaagggcgccugcaagaugaagcucugcggcguccucggccuccgccucauggacggcaccugggucgccauccagaccuccgacgagaucaaguggugcucccccgaccagcucgucaaccuccacgacuuccacuccgacgagaucgagcaccucgucgucgaggagcucgucaagaagcgcgaggagugccucgacgcccucgagaccaucaugaccaccaaguccgucuccuuccgccgccucucccaccuccgcaagcucguccccggcuucggcaaggccuacaccaucuucaacaagacccucauggaggccgacgcccacuacaaguccauccgcaccuggaacgagaucauccccuccaagggcugccuccgcgucggcggccgcugccacccccacgucaacggcgucuucuucaacggcaucauccucggccccgacggccacguccucauccccgagaugcaguccucccuccuccaccagcacauggagcuccucgaguccuccgucaucccccucaugcacccccucgccgaccccuccaccgucuucaaggacggcgacgaggccgaggacuucgucgagguccaccuccccgacguccacaagcagaucuccggcgucgaccucggccuccccaacuggggcaaguacguccucaucuccgccggcgcccucaccgcccucaugcucaugaucuuccucaugaccugcugccgcaaggccaaccgcgccgaguccauccagcacaaccccggcgagaccggccgcaaggucuccgucaccucccacaacggccgcgucaucuccuccugggaguccuacaaguccggcggcgagaccaagcucuga

SEQ ID NO: 127006 - RNA, 1575 nt, Artificial Sequence
  derived and/or modified CDS sequence (opt2) from glycoprotein__RABV__FJ418886.1
augaucccccagguccuccucuucgucccccuccucgucuucuccuccugcuucggcaaguuccccaucuacaccauccccgacaagcucggccccuggucccccaucgacauccaccaccucuccugccccaacaaccucgucgucgaggacgagggcugcaccaaccucuccggcuucuccuacauggagcucaaggucggcuacaucuccgccaucaaggucaacggcuucaccugcaccggcgucgucaccgaggccgagaccuacaccaacuucgucggcuacgucaccaccaccuucaagcgcaagcacuuccgccccaugcccgacgccugccgcgccgccuacaacuggaagauggccggcgacccccgcuacgaggagucccuccacaaccccuaccccgacuaccacuggcuccgcaccgucaagaccaccaaggagucccucgucaucaucucccccuccgucgccgaccucgaccccuacgacaagucccuccacucccgcgucuuccccggcggcaagugcuccggcaucaccgucuccuccaccugcugcuccaccaaccacgacuacaccaucuggaugcccgagaacccccgccucggcaccuccugcgacaucuucaccaacucccgcggcaagcgcgccuccaagggcggcaagaccugcggcuucgucgacgagcgcggccucuacaagucccucaagggcgccugcaagaugaagcucugcggcguccucggccuccgccucauggacggcaccugggucgccauccagaccuccgacgagaucaaguggugcucccccgaccagcucgucaaccuccacgacuuccacuccgacgagaucgagcaccucgucgucgaggagcucgucaagaagcgcgaggagugccucgacgcccucgagaccaucaugaccaccaaguccgucuccuuccgccgccucucccaccuccgcaagcucguccccggcuucggcaaggccuacaccaucuucaacaagacccucauggaggccgacgcccacuacaaguccauccgcaccuggaacgagaucauccccuccaagggcugccuccgcgucggcggccgcugccacccccacgucaacggcgucuucuucaacggcaucauccucggccccgacggccacguccucauccccgagaugcaguccucccuccuccaccagcacauggagcuccucgaguccuccgucaucccccucaugcacccccucgccgaccccuccaccgucuucaaggacggcgacgaggccgaggacuucgucgagguccaccuccccgacguccacaagcagaucuccggcgucgaccucggccuccccaacuggggcaaguacguccucaucuccgccggcgcccucaccgcccucaugcuccagaucuuccucaugaccugcugccgcaagaccauccgcgccgaguccauccagcacucccccggcgagaccggccgcaaggucuccgucaccuuccacaacggccgcgucaucuccuccugggaguccuacaaguccggcuccgagaccaagcucuga

SEQ ID NO: 127007 - RNA, 1575 nt, Artificial Sequence
  derived and/or modified CDS sequence (opt2) from glycoprotein__RABV__FJ418887.1
auggucccccagguccuccucuucgucccccuccucgucuucuccuccugcuucggcaaguuccccaucuacaccauccccgacaagcucggccccuggucccccaucgacauccaccaccucuccugccccaacaaccucgucgucgaggacgagggcugcaccaaccucuccggcuucuccuacauggagcucaaggucggcuacaucuccgccaucaaggucaacggcuucaccugcaccggcgucgucaccgaggccgagaccuacaccaacuucgucggcuacgucaccaccaccuucaagcgcaagcacuuccgccccaugcccgacgccugccgcgccgccuacaacuggaagauggccggcgacccccgcuacgaggagucccuccacaaccccuaccccgacuaccacuggcuccgcaccgucaagaccaccaaggagucccucgucaucaucucccccuccgucgccgaccucgaccccuacgacaagucccuccacucccgcgucuuccccggcggcaagugcuccggcaucaccgucuccuccaccugcugcuccaccaaccacgacuacaccaucuggaugcccgagaacccccgccucggcaccuccugcgacaucuucaccaacucccgcggcaagcgcgccuccaagggcggcaagaccugcggcuucgucgacgagcgcggccucuacaagucccucaagggcgccugcaagaugaagcucugcggcguccucggccuccgccucauggacggcaccugggucgccauccagaccuccgacgagaucaaguggugcucccccgaccagcucgucaaccuccacgacuuccacuccgacgagaucgagcaccucgucgucgaggagcucgucaagaagcgcgaggagugccucgacgcccucgagaccaucaugaccaccaaguccgucuccuuccgccgccucucccaccuccgcaagcucguccccggcuucggcaaggccuacaccaucuucaacaagacccucauggaggccgacgcccacuacaaguccauccgcaccuggaacgagaucauccccuccaagggcugccuccgcgucggcggccgcugccacccccacgucaacggcgucuucuucaacggcaucauccucggccccgacggccacguccucauccccgagaugcaguccucccuccuccaccagcacauggagcuccucgaguccuccgucaucccccucaugcacccccucgccgaccccuccaccgucuucaaggacggcgacgaggccgaggacuucgucgagguccaccuccccgacguccacaagcagaucuccggcgucgaccucggccuccccaacuggggcaaguacguccucaucuccgccggcgcccucaccgcccucaugcucaugaucuuccucaugaccugcugccgccgcgccaaccgcgccgaguccauccagcacaaccccggcgagaccggccgcaaggucuccgucaccucccacaacggccgcgucaucuccuccugggaguccuacaaguccggcggcgagaccaagcucuga

SEQ ID NO: 127008 - RNA, 1575 nt, Artificial Sequence
  derived and/or modified CDS sequence (opt2) from glycoprotein__RABV__FJ465384.1
auggucucccagucccuccucuucgucccccuccucggcuucucccucugcuucggcaaguuccccaucuacaccauccccgacaagcucggccccuggucccccaucgacauccaccaccucuccugccccaacaaccucgucgucgaggacgagggcugcaccaaccucuccggcuucuccuacauggagcucaaggucggcuacaucuccgccaucaaggucaacggcuucaccugcaccggcgucgucaccgaggccgagaccuacaccaacuucgucggcuacgucaccaccaccuuccgccgcaagcacuuccgccccacccccgacgccugccgcgccgccuaccacuggaagauggccggcgacccccgcuacgaggagucccuccacaaccccuaccccgacuaccacuggcuccgcaccgucaagaccaccaaggagucccucgucaucaucucccccuccgucgccgaccucgaccccuacgacaagucccuccacucccgcgucuuccccaacggcaagugcuccggccucaccgucuccuccaccuacugcuccaccaaccacgacuacaccauguggaugcccgagaacccccgccucggcaccuccugcgacaucuucaccaacucccgcggcaagcgcgccucccgcggcaacaagaccugcggcuucgucgacgagcgcggccucuacaagucccucaagggcgccugcaagcucaagcucugcggcguccucggccuccgccucaucgacggcaccugggucgccaugcagaccuccgacgagaccaaguggugcccccccgaccagcucgucaaccuccacgacuuccgcuccgacgagaucgagcaccucgucgucgaggagcucgucaagaagcgcgaggagugccucgacgcccucgaguccaucaugaccaccaaguccgucuccuuccgccgccucucccaccuccgcaagcucguccccggcuucggcaaggccuacaccaucuucaacaagacccucauggaggccgacgcccacuacaaguccauccgcaccugggacgagaucguccccuccaagggcugccuccgcgucggcggcaagugccacccccacaucaacggcgucuucuucaacggcaucauccucggcuccgacggccacguccucauccccgagaugcaguccucccuccuccagcagcacaucgagcuccucgaguccuccgucgucccccucaugcacccccucgccgaccccuccaccgucuucaaggacggcaacgaggccgaggacuucgucgagguccaccuccccgacguccacaagcaggucuccgagaucgaccucggccuccccaacuggggcaaguacauccucgucuccgccggcgcccucaucgcccucaugcucaccauccuccucaucaccugcugccgccgcguccaccgccccgagcccaagcagcaccgccuccgcggcaccgagcgcaaggucgccgucaccucccaguccggcaaggccaucuccuccugggaguccuacaagaacggcggcgagacccgcauguga

SEQ ID NO: 127009 - RNA, 1575 nt, Artificial Sequence
  derived and/or modified CDS sequence (opt2) from glycoprotein__RABV__FJ465385.1
auguucccccaggcccuccucuucgucccccuccucggccucucccucugcuccggccgcuuccccaucuacaccauccccgacaagcucggccccuggucccccaucgacauccaccaccucuccugccccaacaaccucgucgucgaggacgagggcugcaccaaccucuccggcuucuccuacauggagcucaaggucggcuacaucuccuccaucaaggucuccggcuucaccugcaccggcgucgucaccgaggccgagaccuacaccaacuucgucggcuacgucaccaccaccuuccgccgcaagcacuuccgccccacccccgacgccugccgcgccgcccacaacuggaagauggccggcgacccccgcuacgaggagucccuccacaaccccuaccccgacuaccacuggcuccgcaccgucaagaccaccaaggagucccucgucaucaucucccccuccgucgccgaccucgaccccuacgacaagucccuccacucccgcgucuuccccaacggcaagugcuccggccucaccgucuucuccaccuacugcuccaccaaccacgaguacaccgucuggaugcccgagaacccccgccucggcaccuccugcgacaucuucaccaacucccgcggcaagcgcgccuccaagggcaacaagaccugcggcuucgucgacgagcgcggccucuacaagucccucaagggcgccugcaagcucaagcucugcggcguccucggccuccgccucauggacggcaccugggucgccaugcagaccuccgacgagaccaaguggugcccccccgaccagcucgucaaccuccacgacuuccgcuccgacgagaucgagcaccucgucgucgaggagcucgucaagaagcgcgaggagugccucgacgcccucgaguccaucaugaccaccaaguccgucuccuuccgccgccucucccaccuccgcaagcucguccccggcuucggcaaggccuacaccaucuucaacaagacccucauggaggccgacgcccacuacaaguccguccgcaccuggaacgagaucauccccuccaagggcugccuccgcgucggcggccgcugccacccccacgucaacggcgucuucuucaacggcaucauccucggcuccgacggccacguccucauccccgagaugcaguccucccuccuccagcagcacgucgagcuccucgaguccuccgucaucccccucaugcacccccucgccgaccccuccaccgucuucaagggcggcgacgaggccgaggacuucgucgagguccaccuccccgacguccacaagcaggucuccggcgucgaccucggccuccccaacuggggcaaguacauccucgucuccgccggcgcccucaucgcccucauccucaucaucuuccucaugaccugcugccgccgcuuccgccgccccaagcccgcccagcacaaccucggcggcaccggccgcaaggucuccgucaccucccaguccggcaaggucgucuccuccugggaguccuacaagaacggcggcgagacccgccucuga

SEQ ID NO: 127010 - RNA, 1575 nt, Artificial Sequence
  derived and/or modified CDS sequence (opt2) from glycoprotein__RABV__FJ465386.1
auguucucccgcucccuccucuucgucucccuccucggcuucccccucugcuucggcaaguuccccaucuacaccauccccgacaagcucggccccuggucccccaucgacauccaccaccucuccugccccaacaaccucgucgucgaggacgagggcugcaccaaccucuccggcuucuccuacauggagcucaaggucggcuacaucuccgccaucaaggucaacggcuucaccugcaccggcgucgucaccgaggccgagaccuacaccaacuucgucggcuacgucaccaccaccuuccgccgcaagcaccuccgccccacccccgacgccugccgcuccgccuacaacuggaagauggccggcgacccccgcuacgaggagucccuccacaaccccuaccccgacuaccacuggcuccgcaccgucaagaccaccaaggagucccucgucaucaucucccccuccgucgccgaccucgaccccuacgacaagucccuccacucccgcgucuuccccaacggcaagugcuccggccucaccgucuccuccaccuacugcuccaccaaccacgacuacaccaucuggaugcccgagaacccccgccucggcaccuccugcgacaucuucaccaacuccaagggcaagcgcgccucccgcggcaacaagaccugcggcuucgucgacgagcgcggccucuacaagucccucaagggcgccugcaagcucaagcucugcggcguccucggccuccgccucaucgacggcaccugggucgccaugcacaccuccgacgagaccaaguggugcccccccgaccagcucgucaaccuccacgacuuccgcuccgacgagaucgagcaccucgucgucgaggagcucgucaagaagcgcgaggagugccucgacgcccucgaguccaucaugaccaccaaguccgucuccuuccgccgccucucccaccuccgcaagcucguccccggcuucggcaaggccuacaccaucuucaacaagacccucauggaggccgacgcccacuacaaguccauccgcaccugggacgagaucguccccuccaagggcugccuccgcgucggcggccgcugccacccccacgucaacggcgucuucuucaacggcaucauccucggcuccgacggccacguccucauccccgagaugcaguccucccuccuccagcagcacgucgagcuccucgaguccuccgucgucccccucaugcacccccucgccgaccccuccaccgucuucaaggacggcaacgaggccgaggacuucgucgagguccaccuccccgacguccacaagcaggucuccggcgucgaccucggccuccccgacuggggcaaguacauccucgucuccgccggcgcccucaucgcccucaugcucaucaucuuccucaugaccugcugccgccgcgucuaccgccgcgaguccaagcagcacucccuccgcggcaccgagcgcaaggucuccgucaccucccagaacggcaaggccaucuccuccugggaguccuacaagaacggcuccgagacccgcauguga

SEQ ID NO: 127011 - RNA, 1575 nt, Artificial Sequence
  derived and/or modified CDS sequence (opt2) from glycoprotein__RABV__FJ465387.1
auguucucccgcucccuccucuucgucucccuccucggcuucccccucugcuucggcaaguuccccaucuacaccauccccgacaagcucggccccuggucccccaucgacauccaccaccucuccugccccaacaaccucgucgucgaggacgagggcugcaccaaccucuccggcuucuccuacauggagcucaaggucggcuacaucuccgccaucaaggucaacggcuucaccugcaccggcgucgucaccgaggccgagaccuacaccaacuucgucggcuacgucaccaccaccuuccgccgcaagcaccuccgccccacccccgacgccugccgcuccgccuacaacuggaagauggccggcgacccccgcuacgaggagucccuccacaaccccuaccccgacuaccacuggcuccgcaccgucaagaccaccaaggagucccucgucaucaucucccccuccgucgccgaccucgaccccuacgacaagucccuccacucccgcgucuuccccaacggcaagugcuccggccucaccgucuccuccaccuacugcuccaccaaccacgacuacaccaucuggaugcccgagaacccccgccucggcaccuccugcgacaucuucaccaacuccaagggcaagcgcgccucccgcggcaacaagaccugcggcuucgucgacgagcgcggccucuacaagucccucaagggcgccugcaagcucaagcucugcggcguccucggccuccgccucaucgacggcaccugggucgccaugcacaccuccgacgagaccaaguggugcccccccgaccagcucgucaaccuccacgacuuccgcuccgacgagaucgagcaccucgucgucgaggagcucgucaagaagcgcgaggagugccucgacgcccucgaguccaucaugaccaccaaguccgucuccuuccgccgccucucccaccuccgcaagcucguccccggcuucggcaaggccuacaccaucuucaacaagacccucauggaggccgacgcccacuacaaguccauccgcaccugggacgagaucauccccuccaagggcugccuccgcgucggcggccgcugccacccccacgucaacggcgucuucuucaacggcaucauccucggcuccgacggccacguccucauccccgagaugcaguccucccuccuccagcagcacgucgagcuccucgaguccuccgucgucccccucaugcacccccucgccgaccccuccaccgucuucaaggacggcaacgaggccgaggacuucgucgagguccaccuccccgacguccacaagcaggucuccggcgucgaccucggccuccccgacuggggcaaguacauccucgucuccgccggcgcccucaucgcccucaugcucaucaucuuccucaugaccugcugccgccgcguccaccgccgcgaguccaagcagcacucccuccgcggcaccgagcgcaaggucuccgucaccucccagaacggcaaggccaucuccuccugggaguccuacaagaacggcuccgagacccgcauguga

SEQ ID NO: 127012 - RNA, 1575 nt, Artificial Sequence
  derived and/or modified CDS sequence (opt2) from glycoprotein__RABV__FJ465388.1
auguucucccagucccuccucuucgucccccuccucggcuucucccucugcuucggcaaguuccccaucuacaccauccccgacaagcucggccccuggucccccaucgacauccaccaccucuccugccccaacaaccucgucgucgaggacgagggcugcaccaaccucuccggcuucuccuacauggagcucaaggucggcuacaucuccgccauccgcgucuccggcuucaccugcaccggcgucgucaccgaggccgagaccuacaccaacuucgucggcuacgucaccaccaccuucaagcgcaagcacuuccgccccacccccgacgccugccgcgccgccuaccacuggaagauggccggcgacccccgcuacgaggagucccuccacaaccccuaccccgacuaccacuggcuccgcaccgucaagaccaccaaggagucccucgucaucaucucccccuccgucgccgaccucgaccccuacgacaagucccuccacucccgcgucuuccccaacggcaagugcuccggccucaccgucuccuccaccuacugccucaccaaccacgacuacaccaucuggaugcccgagaacccccgccucggcaccuccugcgacaucuucaccaacucccgcggcaagcgcgccucccgcggcaacaagaccugcggcuucgucgacgagcgcggccucuacaagucccucaagggcgccugcaagcucaagcucugcggcguccucggccuccgccucaucgacggcaccugggucgccaugcagaccuccgacgagaccaaguggugcccccccgaccagcucgucaaccuccacgacuuccgcuccgacgagaucgagcaccucgucgucgaggagcucgucaagaagcgcgaggagugccucgacgcccucgaguccaucaugaccaccaaguccgucuccuuccgccgccucucccaccuccgcaagcucguccccggcuucggcaaggccuacaccaucuucaacaagacccucauggaggccgacgcccacuacaaguccauccgcaccugggacgagaucguccccuccaagggcugccuccgcgucggcggccgcugccacccccacgucaacggcgucuucuucaacggcaucauccucggcuccgacggccacguccucauccccgagaugcaguccucccuccuccagcagcacgucgagcuccucgaguccuccgucgucccccucaugcacccccucgccgaccccuccaccgucuucaaggacggcaacgaggccgaggacuucgucgagguccaccuccccgacguccacaagcaggucuccggcgucgaccucggccuccccaacuggggcaaguacauccucgucuccgccggcgcccucaucgcccucaugcucaccaucuuccucaugaccugcugccgccgcguccgccgccccgagcccaagcagcaccgccuccgcggcaccgagaagaaggucgccgucaccccccaguccggcaaggccaucuccuccugggaguccuacaagaacggcgacgagacccgcauguga

SEQ ID NO: 127013 - RNA, 1575 nt, Artificial Sequence
  derived and/or modified CDS sequence (opt2) from glycoprotein__RABV__FJ465389.1
augcucucccagucccuccuccucgucucccuccucggcuucccccucugcuucggcaaguuccccaucuacaccauccccgacaagcucggccccuggucccccaucgacauccaccaccucuccugccccaacaaccucgucgucgaggacgagggcugcaccucccucuccggcuucuccuacauggagcucaaggucggcuacaucuccgccaucaaggucaacggcuucaccugcaccggcgucgucaccgaggccgagaccuacaccaacuucgucggcuacgucaccaccaccuuccgccgcaagcaccuccgccccacccccgacgccugccgcuccgccuacaacuggaagauggccggcgacccccgcuacgaggagucccuccacaaccccuaccccgacuaccacuggcuccgcaccgucaagaccaccaaggagucccucgucaucaucucccccuccgucgccgaccucgaccccuacgacaagucccuccacucccgcgucuuccccaacggcaagugcuccggccucaccgucuccuccaccuacugcuccaccaaccacgacuacaccaucuggaugcccgagaacccccgccucggcaccuccugcgacaucuucaccaacucccgcggcaagcgcgccucccgcggcaacaagaccugcggcuucgucgacgagcgcggccucuacaagucccucaagggcgccugcaagcucaagcucugcggcguccucggccuccgccucaucgacggcaccugggucgccaugcacaccuccgacgagaccaaguggugcccccccgaccagcucgucaaccuccacgacuuccgcuccgacgagaucgagcaccucgucgucgaggagcucgucaagaagcgcgaggagugccucgacgcccucgaguccaucaugaccaccaaguccgucuccuuccgccgccucucccaccuccgcaagcucguccccggcuucggcaaggccuacaccaucuucaacaagacccucauggaggccgacgcccacuacaaguccauccgcaccugggacgagaucguccccuccaagggcugccuccgcgucggcggccgcugccacccccacgucaacggcgucuucuucaacggcaucauccucggcuccgacggccacguccucauccccgagaugcaguccucccuccuccagcagcacgucgagcuccucgaguccuccgucgucccccucaugcacccccucgccgaccccuccaccgucuucaaggacggcaacgaggccgaggacuucgucgagguccaccuccccgacguccacaagcaggucuccggcgucgaccucggccuccccgacuggggcaaguacauccucgucuccgccggcgcccucaucgcccucaugcucaucaucuuccucaugaccugcugccgccgcguccaccgccgcgaguccaagcagcacucccuccgcggcaccgagcgcaaggucuccgucaucucccagaacggcaagaccaucuccuccugggaguccuacaagaacggcuccgacacccgcauguga

SEQ ID NO: 127014 - RNA, 1575 nt, Artificial Sequence
  derived and/or modified CDS sequence (opt2) from glycoprotein__RABV__FJ465390.1
auguucucccagacccuccucuucgucccccuccucggccucucccucugcuucggcaaguuccccaucuacaccauccccgacaagcucggccccuggucccccaucgacauccaccaccucuccugccccaacaaccucgucgucgaggacgagggcugcaccaaccucuccggcuucuccuacauggagcucaaggucggcuacaucuccgccaucaaggucaacggcuucaccugcaccggcgucgucaccgaggccgagaccuacaccaacuucgucggcuacgucaccaccaccuuccgccgcaagcacuuccgccccacccccgacgccugccgcgccgccuacaacuggaagauggccggcgacccccgcuacgaggagucccuccacaaccccuaccccgacuaccacuggcuccgcaccgucaagaccaccaaggagucccucgucaucaucucccccuccgucgccgaccucgaccccuacgacaagucccuccacucccgcgucuuccucaacggcaagugcuccggccucaccgucuccuccaccuacugcuccaccaaccacgacuacaccaucuggaugcccgaggacccccgccucggcaccuccugcgacaucuucaucaacucccgcggcaagcgcgccuccaagggcuccaagaccugcggcuucgucgacgagcgcggccucuacaagucccucaagggcgccugcaagcucaagcucugcggcguccucggccuccgccucaucgacggcaccugggucgccaugcagaccuccgaggagcccaaguggugcccccccgaccagcucgucaaccuccacaacuuccgcuccgacgagaucgagcaccucgucgucgaggagcucgucaagaagcgcgaggagugccucgacgcccucgaguccaucaucaccaccaaguccgucuccuuccgccgccucucccaccuccgcaagcucguccccggcuucggcaaggccuacaccaucuucaacaagacccucauggaggccgacgcccacuacaaguccauccgcaccugggacgagaucauccccuccaagggcugccuccgcgucggcggccgcugccacccccacgucaacggcgucuucuucaacggcaucauccucggcuccgacggccacguccucauccccgagaugcaguccucccuccuccagcagcacgucgagcuccucgaguccuccgucaucccccucaugcacccccucgccgaccccuccaccgucuucaagggcggcgacgaggccgaggacuucgucgagauccaccuccccgacguccacaagcagaucuccggcgucgaccucggccuccccaacuggggcaaguacauccucgucggcgccggcgcccucaucgcccucaugcucaucaucuuccucaucaccugcugccgcggcuuccaccgccccaaguccacccagcacucccucggcggcaccggccgcaaggucuccgucaccccccaguccggcaaggucaucuccuccugggaguccuacaagaagggcuccgagacccgccucuga

SEQ ID NO: 127015 - RNA, 1575 nt, Artificial Sequence
  derived and/or modified CDS sequence (opt2) from glycoprotein__RABV__FJ465391.1
augcccucccagucccuccucuucgucucccuccucggcuucucccucugcuucggcaaguuccccaucuacaccauccccgacaagcucggccccuggucccccaucgacauccaccaccucuccugccccaacaaccucgucgucgaggacgagggcugcaccaaccucuccggcuucuccuacauggagcucaaggucggcuacaucuccgccaucaaggucaacggcuucaccugcaccggcgucgucaccgaggccgagaccuacaccaacuucgucggcuacgucaccaccaccuuccgccgcaagcacuuccgccccacccccgacgccugccgcuccgccuacaacuggaagauggccggcgacccccgcuacgaggagucccuccacaaccccuaccccgacuaccacuggcuccgcaccgucaagaccaccaaggagucccucgucaucaucucccccuccgucgccgaccucgaccccuacgacaagucccuccacucccgcgucuuccccaacggcaagugcuccggccucaccgucuccuccaccuacugcuccaccaaccacgacuacaccaucuggaugcccgagaacccccgccucggcaccuccugcgacaucuucaccaacucccgcggcaagcgcgccucccgcggcaacaagaccugcggcuucgucgacgagcgcggccucuacaagucccucaagggcgccugcaagcucaagcucugcggcguccucggccuccgccucaucgacggcaccugggucgccaugcacaccuccgacgagaccaaguggugcccccccgaccagcucgucaaccuccacgacuuccgcuccgacgagaucgagcaccucgucgucgaggagcucgucaagaagcgcgaggagugccucgacgcccucgaguccaucaugaccaccaaguccgucuccuuccgccgccucucccaccuccgcaagcucguccccggcuucggcaaggccuacaccaucuucaacaagacccucauggaggccgacgcccacuacaaguccauccgcaccugggacgagaucguccccuccaagggcugccuccgcgucggcggccgcugccacccccacgucaacggcgucuucuucaacggcaucauccucggcuccgacggccacguccucauccccgagaugcaguccucccuccuccagcagcacgucgagcuccucgaguccuccgucgucccccucaugcacccccucgccgaccccuccaccgucuucaaggacggcaacgaggccgaggacuucgucgagguccaccuccccgacguccacaagcaggucuccggcgucgaccucggccuccccgacuggggccgcuacauccucgucuccgccggcgcccucaucacccucaugcucaucaucuuccucaugaccugcugccgccgcguccaccgccgcgaguccaagcagcacucccuccgcggcaccgagcgcaaggucuccgucaccucccaguccggcaaggccaucuccuccugggaguccuacaagaacggcuccgagacccgcauguga

SEQ ID NO: 127016 - RNA, 1575 nt, Artificial Sequence
  derived and/or modified CDS sequence (opt2) from glycoprotein__RABV__FJ465392.1
auguucccccagacccuccucuucgucccccuccucggccucucccucugcuucggcaaguuccccaucuacaccauccccgacaagcucggccccuggucccccaucgacauccaccaccucuccugccccaacaaccucgucgucgaggacgagggcugcaccaaccucuccggcuucuccuacauggagcucaaggucggcuacaucuccgccaucaaggucaacggcuucaccugcaccggcgucgucaccgaggccgagaccuacaccaacuucgucggcuacgucaccaccaccuuccgccgcaagcacuuccgccccacccccgacgccugccgcgccgccuacaacuggaagauggccggcgacccccgcuacgaggagucccuccacaaccccuaccccgacuaccacuggcuccgcaccgucaagaccaccaaggagucccucgucaucaucucccccuccgucgccgaccucgaccccuacgacaagucccuccacucccgcgucuuccucaacggcaagugcuccggccucaccgucuccuccaccuacugcuccaccaaccacgacuacaccaucuggaugcccgagaacccccgccucggcaccuccugcgacaucuucaucaacucccgcggcaagcgcgccuccaagggcaacaagaccugcggcuucgucgacgagcgcggccucuacaagucccucaagggcgccugcaagcucaagcucugcggcguccucggccuccgccucaucgacggcaccugggucgccaugcagaccuccgaggagcccaaguggugcccccccgaccagcucgucaaccuccacaacuuccgcuccgacgagaucgagcaccucgucgucgaggagcucgucaagaagcgcgaggagugccucgacgcccucgaguccaucaugaccaccaaguccgucuccuuccgccgccucucccaccuccgcaagcucguccccggcuucggcaaggccuacaccaucuucaacaagacccucauggaggccgacgcccacuacaaguccauccgcaccugggacgagaucauccccuccaagggcugccuccgcgucggcggccgcugccacccccacgucaacggcgucuucuucaacggcaucauccucggcuccgacggccacguccucauccccgagaugcaguccucccuccuccagcagcacgucgagcuccucgaguccuccgucaucccccucaugcacccccucgccgaccccuccaccgucuucaaggacggcgacgaggccgaggacuucgucgagauccaccuccccgacguccacaagcagaucuccggcgucgaccucggccuccccaacuggggcaaguacauccucgucuccgccggcgcccucaucacccucaugcucaccaucuuccucaucaccugcugccgcggcuuccgccgccccaaguccacccagcacucccucggcggcaccggcaugaaggucuccgucaccccccaguccggcaaggucaucuccuccugggaguccuacaagaagggcggcgagacccgccucuga

SEQ ID NO: 127017 - RNA, 1575 nt, Artificial Sequence
  derived and/or modified CDS sequence (opt2) from glycoprotein__RABV__FJ465393.1
auguucucccagucccuccucuucgucccccuccucggcuucucccucugcuccggcaaguuccccaucuacaccauccccgacaagcucggccccuggucccccaucgacauccaccaccucuccugccccaacaaccucgucgucgaggacgagggcugcaccaaccucuccggcuucuccuacauggagcucaaggucggcuacaucuccgccauccgcgucuccggcuucaccugcaccggcgucgucaccgaggccgagaccuacaccaacuucgucggcuacgucaccaccaccuucaagcgcaagcacuuccgccccacccccgacgccugccgcgccgccuaccacuggaagauggccggcgacccccgcuacgaggagucccuccacaaccccuaccccgacuaccacuggcuccgcaccgucaagaccaccaaggagucccucaucaucaucucccccuccgucgccgaccucgaccccuacgacaagucccuccacucccgcgucuuccccaacggcaagugcuccggccucaccgucuccuccaccuacugcuccaccaaccacgacuacaccaucuggaugcccgagaacccccgccucggcaccuccugcgacaucuucaccaacucccgcggcaagcgcgccucccgcggcaacaagaccugcggcuucgucgacgagcgcggccucuacaagucccucaagggcgccugcaagcucaagcucugcggcguccucggccuccgccucaucgacggcaccugggucgccaugcagaccuccgacgagaccaaguggugcccccccgaccagcucgucaaccuccacgacuuccgcuccgacgagaucgagcaccucgucgucgaggagcucgucaagaagcgcgaggagugccucgacgcccucgaguccaucaugaccaccaaguccgucuccuuccgccgccucucccaccuccgcaagcucguccccggcuucggcaaggccuacaccaucuucaacaagacccucauggaggccgacgcccacuacaaguccauccgcaccugggacgagaucguccccuccaagggcugccuccgcgucggcggccgcugccacccccacgucaacggcgucuucuucaacggcaucauccucggcuccgacggccacguccucauccccgagaugcaguccucccuccuccagcagcacgucgagcuccucgaguccuccgucgucccccucaugcacccccucgccgaccccuccaccgucuucaaggacggcaacgaggccgaggacuucgucgagguccaccuccccgacguccacaagcaggucuccggcgucgaccucggccuccccaacuggggccgcuacauccucgucggcgccggcgcccucaucgcccucaugcucaccaucuuccuccucaccugcugccgccgcguccaccagcccgagcccaagcagcaccgccuccgcgaggccgagcgcaaggucgccgucaccucccaguccggcaaggccaucuccuccugggaguccuacaagaacggcggcgagacccgcauguga

SEQ ID NO: 127018 - RNA, 1575 nt, Artificial Sequence
  derived and/or modified CDS sequence (opt2) from glycoprotein__RABV__FJ465394.1
auguucucccgcucccuccucuucgucucccuccucggcuucccccucugcuucggcaaguuccccaucuacaccauccccgacaagcucggccccuggucccccaucgacauccaccaccucuccugccccaacaaccucgucgucgaggacgagggcugcaccaaccucuccggcuucuccuacauggagcucaaggucggcuacaucuccgccaucaaggucaacggcuucaccugcaccggcgucgucaccgaggccgagaccuacaccaacuucgucggcuacgucaccaccaccuuccgccgcaagcaccuccgccccacccccgacgccugccgcuccgccuacaacuggaagauggccggcgacccccgcuacgaggagucccuccacaaccccuaccccgacuaccacuggcuccgcaccgucaagaccaccaaggagucccucgucaucaucucccccuccgucgccgaccucgaccccuacgacaagucccuccacucccgcgucuuccccaacggcaagugcuccggccucaccgucuccuccaccuacugcuccaccaaccacgacuacaccaucuggaugcccgagaacccccgccucggcaccuccugcgacaucuucaccaacuccaagggcaagcgcgccucccgcggcaacaagaccugcggcuucgucgacgagcgcggccucuacaagucccucaagggcgccugcaagcucaagcucugcggcguccucggccuccgccucaucgacggcaccugggucgccaugcacaccuccgacgagaccaaguggugcccccccgaccagcucgucaaccuccacgacuuccgcuccgacgagaucgagcaccucgucgucgaggagcucgucaagaagcgcgaggagugccucgacgcccucgaguccaucaugaccaccaaguccgucuccuuccgccgccucucccaccuccgcaagcucguccccggcuucggcaaggccuacaccaucuucaacaagacccucauggaggccgacgcccacuacaaguccauccgcaccugggacgagaucguccccuccaagggcugccuccgcgucggcggccgcugccacccccacgucaacggcgucuucuucaacggcaucauccucggcuccgacggccacguccucauccccgagaugcaguccucccuccuccagcagcacgucgagcuccucgaguccuccgucgucccccucaugcacccccucgccgaccccuccaccgucuucaaggacggcaacgaggccgaggacuucgucgagguccaccuccccgacguccacaagcaggucuccggcgucgaccucggccuccccgacuggggcaaguacauccucgucuccgccggcgcccucaucgcccucaugcucaucaucuuccucaugaccugcugccgccgcguccaccgccgcgaguccaagcagcacucccuccgcggcaccgagcgcaaggucuccgucaccucccagaacggcaaggccaucuccuccugggaguccuacaagaacggcuccgagacccgcauguga

SEQ ID NO: 127019 - RNA, 1575 nt, Artificial Sequence
  derived and/or modified CDS sequence (opt2) from glycoprotein__RABV__FJ465395.1
auguccucccagucccuccucuucgucucccuccucggcuucucccucugcuucggcaaguuccccaucuacaccauccccgacaagcucggccccuggucccccaucgacauccaccaccucuccugccccaacaaccucgucgucgaggacgagggcugcaccaaccucuccggcuucuccuacauggagcucaaggucggcuacaucuccgccaucaaggucaacggcuucaccugcaccggcgucgucaccgaggccgagaccuacaccaacuucgucggcuacgucaccaccaccuuccgccgcaagcacuuccgccccacccccgacgccugccgcuccgccuacaacuggaagauggccggcgacccccgcuacgaggagucccuccacaaccccuaccccgacuaccacuggcuccgcaccgucaagaccaccaaggagucccucgucaucaucucccccuccgucgccgaccucgaccccuacgacaagucccuccacucccgcgucuuccccaacggcaagugcuccggccucaccgucuucuccaccuacugcuccaccaaccacgacuacaccaucuggaugcccgagaacccccgccucggcaccuccugcgacaucuucaccaacucccgcggcaagcgcgccucccgcggcaacaagaccugcggcuucgucgacgagcgcggccucuacaagucccucaagggcgccugcaagcucaagcucugcggcguccucggccuccgccucaucgacggcaccugggucuccaugcacaccuccgacgagaccaaguggugcccccccgaccagcucgucaaccuccacgacuuccgcuccgacgagaucgagcaccucgucgucgaggagcucgucaagaagcgcgaggagugccucgacgcccucgaguccaucaugaccaccaaguccgucuccuuccgccgccucucccaccuccgcaagcucguccccggcuucggcaaggccuacaccaucuucaacaagacccucauggaggccgacgcccacuacaaguccauccgcaccugggacgagaucguccccuccaagggcugccuccgcgucggcggccgcugccacccccacgucaacggcgucuucuucaacggcaucauccucggcuccgacggccacguccucauccccgagaugcaguccucccuccuccagcagcacgucgagcuccucgaguccuccgucgucccccucaugcacccccucgccgaccccuccaccgucuucaaggacggcaacgaggccgaggacuucgucgagguccaccuccccgacguccacaagcaggucuccggcgucgaccucggccuccccgacuggggccgcuaccuccucgucuccgccggcgcccucaucacccucaugcucaucaucuuccucaugaccugcugccgccgcguccaccgccgcgaguccaagcagcacucccuccgcggcaccgagcgcaaggucuccgucaccucccaguccggcaaggccaucuccuccugggaguccuacaagaacggcuccgagacccgcauguga

SEQ ID NO: 127020 - RNA, 1575 nt, Artificial Sequence
  derived and/or modified CDS sequence (opt2) from glycoprotein__RABV__FJ465396.1
augcucucccagucccuccuccucgucucccuccucggcuucccccucugcuucggcaaguuccccaucuacaccauccccgacaagcucggccccuggucccccaucgacauccaccaccucuccugccccaacaaccucgucgucgaggacgagggcugcaccaaccucuccggcuucuccuacauggagcucaaggucggcuacaucuccgccaucaaggucaacggcuucaccugcaccggcgucgucaccgaggccgagaccuacaccaacuucgucggcuacgucaccaccaccuuccgccgcaagcaccuccgccccacccccgacgccugccgcuccgccuacaacuggaagauggccggcgacccccgcuacgaggagucccuccacaaccccuaccccgacuaccacuggcuccgcaccgucaagaccaccaaggagucccucgucaucaucucccccuccgucgccgaccucgaccccuacgacaagucccuccacucccgcgucuuccccaacggcaagugcuccggccucaccgucuccuccaccuacugcuccaccaaccacgacuacaccaucuggaugcccgagaacccccgccucggcaccuccugcgacaucuucaccaacucccgcggcaagcgcgccucccgcggcaacaagaccugcggcuucgucgacgagcgcggccucuacaagucccucaagggcgccugcaagcucaagcucugcggcguccucggccuccgccucaucgacggcaccugggucgccaugcacaccuccgacgagaccaaguggugcccccccgaccagcucgucaaccuccacgacuuccgcuccgacgagaucgagcaccucgucgucgaggagcucgucaagaagcgcgaggagugccucgacgcccucgaguccaucaugaccaccaaguccgucuccuuccgccgccucucccaccuccgcaagcucguccccggcuucggcaaggccuacaccaucuucaacaagacccucauggaggccgacgcccacuacaaguccauccgcaccugggacgagaucguccccuccaagggcugccuccgcgucggcggccgcugccacccccacgucaacggcgucuucuucaacggcaucauccucggcuccgacggccacguccucauccccgagaugcaguccucccuccuccagcagcacgucgagcuccucgaguccuccgucgucccccucaugcacccccucgccgaccccuccaccgucuucaaggacggcaacgaggccgaggacuucgucgagguccaccuccccgacguccacaagcaggucuccggcgucgaccucggccuccccgacuggggcaaguacauccucgucuccgccggcgcccucaucgcccucaugcucaucaucuuccucaugaccugcugccgccgcguccaccgccgcgaguccaagcagcacucccuccgcggcaccgagcgcaaggucuccgucaucucccagaacggcaaggccaucuccuccugggaguccuacaagaacggcuccgacacccgcauguga

SEQ ID NO: 127021 - RNA, 1575 nt, Artificial Sequence
  derived and/or modified CDS sequence (opt2) from glycoprotein__RABV__FJ465397.1
auggucucccagucccuccucuucgucccccuccucggcuucucccucugcuucggcaaguuccccaucuacaccauccccgacaagcucggccccuggucccccaucgacauccaccaccucuccugccccaacaaccucgucgucgaggacgagggcugcaccaaccucuccggcuucuccuacauggagcucaaggucggcuacaucuccgccaucaaggucaacggcuucaccugcaccggcgucgucaccgaggccgagaccuacaccaacuucgucggcuacgucaccaccaccuuccgccgcaagcacuuccgccccauccccgacgccugccgcgccgccuaccacuggaagauggccggcgacccccgcuacgaggagucccuccacaaccccuaccccgacuaccacuggcuccgcaccgucaagaccaccaaggagucccucgucaucaucucccccuccgucgccgaccucgaccccuacgacaagucccuccacucccgcgucuuccccaacggcaagugcuccggccucaccgucuccuccaccuacugcuccaccaaccacgacuacaccaucuggaugcccgagaacccccgccucggcaccuccugcgacaucuucaccaacucccgcggcaagcgcgccucccgcggcaacaagaccugcggcuucgucgacgagcgcggccucuacaagucccucaagggcgccugcaagcucaagcucugcggcguccucggccuccgccucaucgacggcaccugggucgccaugcagaccuccgacgagaccaaguggugcccccccgaccagcucgucaaccuccacgacuuccgcuccgacgagaucgagcaccucgucgucgaggagcucgucaagaagcgcgaggagugccucgacgcccucgaguccaucaugaccaccaaguccgucuccuuccgccgccucucccaccuccgcaagcucguccccggcuucggcaaggccuacaccaucuucaacaagacccucauggaggccgacgcccacuacaaguccauccgcaccugggacgagaucguccccuccaagggcugccuccgcgucggcggccgcugccacccccacaucaacggcgucuucuucaacggcaucauccucggcuccgacggccacguccucauccccgagaugcaguccucccuccuccagcagcacauggagcuccucgaguccuccgucgucccccucaugcacccccucgccgaccccuccaccgucuucaaggacggcaacgaggccgaggacuucgucgagguccaccuccccgacguccacaagcaggucuccgagaucgaccucggccuccccaacuggggcaaguacauccucgucuccgccggcgcccucaucgcccucaugcucaccauccuccucaucaccugcugccgcaagguccaccgccccaagcccaagcagcaccgccuccgcggcaccgagcgcaaggucgccgucaccucccaguccggcaaggccaucuccuccugggaguccuacaagaacggcggcgagacccgcauguga

SEQ ID NO: 127022 - RNA, 1575 nt, Artificial Sequence
  derived and/or modified CDS sequence (opt2) from glycoprotein__RABV__FJ465398.1
auguccucccagucccuccucuucgucucccuccucggcuucucccucugcuucggcaaguuccccaucuacaccauccccgacaagcucggccccuggucccccaucgacauccaccaccucuccugccccaacaaccucgucgucgaggacgagggcugcaccaaccucuccggcuucuccuacauggagcucaaggucggcuacaucuccgccaucaaggucaacggcuucaccugcaccggcgucgucaccgaggccgagaccuacaccaacuucgucggcuacgucaccaccaccuuccgccgcaagcacuuccgccccacccccgacgccugccgcuccgccuacaacuggaagauggccggcgacccccgcuacgaggagucccuccacaaccccuaccccgacuaccacuggcuccgcaccgucaagaccaccaaggagucccucgucaucaucucccccuccgucgccgaccucgaccccuacgacaagucccuccacucccgcgucuuccccaacggcaagugcuccggccucaccgucuccuccaccuacugcuccaccaaccacgacuacaccaucuggaugcccgagaacccccgccucggcaccuccugcgacaucuucaccaacucccgcggcaagcgcgccucccgcggcaacaagaccugcggcuucgucgacgagcgcggccucuacaagucccucaagggcgccugcaagcucaagcucugcggcguccucggccuccgccucaucgacggcaccugggucgccaugcacaccuccgacgagaccaaguggugcccccccgaccagcucgucaaccuccacgacuuccgcuccgacgagaucgagcaccucgucgucgaggagcucgucaagaagcgcgaggagugccucgacgcccucgaguccaucaugaccaccaaguccgucuccuuccgccgccucucccaccuccgcaagcucguccccggcuucggcaaggccuacaccaucuucaacaagacccucauggaggccgacgcccacuacaaguccauccgcaccugggacgagaucguccccuccaagggcugccuccgcgucggcggccgcugccacccccacgucaacggcgucuucuucaacggcaucauccucggcuccgacggccacguccucauccccgagaugcaguccucccuccuccagcagcacgucgagcuccucgaguccuccgucgucccccucaugcacccccucgccgaccccuccaccgucuucaaggacggcaacgaggccgaggacuucgucgagguccaccuccccgacguccacaagcaggucuccggcgucgaccucggccuccccgacuggggccgcuacauccucgucuccgccggcgcccucaucacccucaugcucaucaucuuccucaugaccugcugccgccgcguccaccuccgcgaguccaagcgccacucccuccgcggcaccgagcgcaaggucuccgucaccucccaguccggcaaggccaucuccuccugggaguccuacaagaacggcuccgagacccgcauguga

SEQ ID NO: 127023 - RNA, 1575 nt, Artificial Sequence
  derived and/or modified CDS sequence (opt2) from glycoprotein__RABV__FJ465399.1
auguccucccagucccuccucuucgucucccuccucggcuucucccucugcuucggcaaguuccccaucuacaccauccccgacaagcucggccccuggucccccaucgacauccaccaccucuccugccccaacaaccucgucgucgaggacgagggcugcaccaaccucuccggcuucuccuacauggagcucaaggucggcuacaucuccgccaucaaggucaacggcuucaccugcaccggcgucgucaccgaggccgagaccuacaccaacuucgucggcuacgucaccaccaccuuccgccgcaagcacuuccgccccacccccgacgccugccgcuccgccuacaacuggaagauggccggcgacccccgcuacgaggagucccuccacaaccccuaccccgacuaccacuggcuccgcaccgucaagaccaccaaggagucccucgucaucaucucccccuccgucgccgaccucgaccccuacgacaagucccuccacucccgcgucuuccccaacggcaagugcuccggccucaccgucuucuccaccuacugcuccaccaaccacgacuacaccaucuggaugcccgagaacccccgccucggcaccuccugcgacaucuucaccaacucccgcggcaagcgcgccucccgcggcaacaagaccugcggcuucgucgacgagcgcggcugguacaagucccucaagggcgccugcaagcucaagcucugcggcguccucggccuccgccucaucgacggcaccugggucgccaugcacaccuccgacgagaccaaguggugcccccccgaccagcucgucaaccuccacgacuuccgcuccgacgagaucgagcaccucgucgucgaggagcucgucaagaagcgcgaggagugccucgacgcccucgaguccaucaugaccaccaaguccgucuccuuccgccgccucucccaccuccgcaagcucguccccggcuucggcaaggccuacaccaucuucaacaagacccucauggaggccgacgcccacuacaaguccauccgcaccugggacgagaucguccccuccaagggcugccuccgcgucggcggccgcugccacccccacgucaacggcgucuucuucaacggcaucauccucggcuccgacggccacguccucauccccgagaugcaguccucccuccuccagcagcacgucgagcuccucgaguccuccgucgucccccucaugcacccccucgccgaccccuccgccgucuucaaggacggcaacgaggccgaggacuucgucgagguccaccuccccgacguccacaagcaggucuccggcgucgaccucggccuccccgacuggggccgcuacauccucgucuccgccggcgcccucaucacccucaugcucaucaucuuccucaugaccugcugccgccgcguccaccgccgcgaguccaagcagcacucccuccgcggcaccgagcgcaaggucuccgucaccucccaguccggcaaggccaucuccuccugggaguccuacaagaacggcuccgagacccgcauguga

SEQ ID NO: 127024 - RNA, 1575 nt, Artificial Sequence
  derived and/or modified CDS sequence (opt2) from glycoprotein__RABV__FJ465400.1
auguucccccagacccuccucuucgucccccuccucggccucucccucugcuucggcaaguuccccaucuacaccauccccgacaagcucggccccuggucccccaucgacauccaccaccucuccugccccaacaaccucgucgucgaggacgagggcugcaccaaccucuccggcuucuccuacauggagcucaaggucggcuacaucuccgccaucaaggucaacggcuucaccugcaccggcgucgucaccgaggccgagaccuacaccaacuucgucggcuacgucaccaccaccuuccgccgcaagcacuuccgccccacccccgacgccugccgcgccgccuacaacuggaagauggccggcgacccccgcuacgaggagucccuccacaaccccuaccccgacuaccacuggcuccgcaccgucaagaccaccaaggagucccucgucaucaucucccccuccgucgccgaccucgaccccuacgacaagucccuccacucccgcgucuuccucaacggcaagugcuccggccucaccgucuccuccaccuacugcuccaccaaccacgacuacuccaucuggaugcccgagaacccccgccucggcaccuccugcgacaucuucgucaacucccgcggcaagcgcgccuccaagggcaacaagaccugcggcuucgucgacgagcgcggccucuacaagucccucaagggcgccugcaagcucaagcucugcggcguccucggccuccgccucaucgacggcaccugggucgccaugcagaccuccgaggagcccaaguggugcccccccgaccagcucgucaaccuccacaacuuccgcuccgacgagaucgagcaccucgucgucgaggagcucgucaagaagcgcgaggagugccucgacgcccucgaguccaucaugaccaccaaguccgucuccuuccgccgccucucccaccuccgcaagcucguccccggcuucggcaaggccuacaccaucuucaacaagacccucauggaggccgacgcccacuacaaguccauccgcaccugggacgagaucauccccuccaagggcugccuccgcgucggcggccgcugccacccccacgucaacggcgucuucuucaacggcaucauccucggcuccgacggccacguccucauccccgagaugcaguccucccuccuccagcagcacgucgagcuccucgaguccuccgucaucccccucaugcacccccucgccgaccccuccaccgccuucaaggacggcgacgaggccgaggacuucgucgagauccaccuccccgacguccacaagcagaucuccggcgucgaccucggccuccccaacuggggcaaguacauccucgucuccgccggcgcccucaucgcccucaugcucaccaucuuccucaucaccugcugccgcggcuuccaccagcccaaguccacccagcacucccucggcggcaccgagcgcaaggucuccgucaccccccucuccggcaaggucaucuccuccugggaguccuacaagaagggcggcgagacccgccucuga

SEQ ID NO: 127025 - RNA, 1575 nt, Artificial Sequence
  derived and/or modified CDS sequence (opt2) from glycoprotein__RABV__FJ465401.1
auguccucccagucccuccucuucgccucccuccucggcuucucccucugcuucggcaaguuccccaucuacaccauccccgacaagcucggccccuggucccccaucgacauccaccaccucuccugccccaacaaccucgucgucgaggacgagggcugcaccaaccucuccggcuucuccuacauggagcucaaggucggcuacaucuccgccaucaaggucaacggcuucaccugcaccggcgucgucaccgaggccgagaccuacaccaacuucgucggcuacgucaccaccaccuuccgccgcaagcacuuccgccccacccccgacgccugccgcuccgccuacaacuggaagauggccggcgacccccgcuacgaggagucccuccacaaccccuaccccgacuaccacuggcuccgcaccgucaagaccaccaaggagucccucgucaucaucucccccuccgucgccgaccucgaccccuacgacaagucccuccacucccgcgucuuccccaacggcaagugcuccggccucaccgucuccuccaccuacugcuccaccaaccacgacuacaccaucuggaugcccgagaacccccgccucggcaccuccugcgacaucuucaccaacucccgcggcaagcgcgccucccgcggcaacaagaccugcggcuucgucgacgagcgcggccucuacaagucccucaagggcgccugcaagcucaagcucugcggcguccucggccuccgccucaucgacggcaccugggucgccaugcacaccuccgacgagaccaaguggugcccccccgaccagcucgucaaccuccacgacuuccgcuccgacgagaucgagcaccucgucgucgaggagcucgucaagaagcgcgaggagugccucgacgcccucgaguccaucaugaccaccaaguccgucuccuuccgccgccucucccaccuccgcaagcucguccccggcuucggcaaggccuacaccaucuucaacaagacccucauggaggccgacgcccacuacaaguccauccgcaccugggacgagaucguccccuccaagggcugccuccgcgucggcggccgcugccacccccacgucaacggcgucuucuucaacggcaucauccucggcuccgacggccacguccucauccccgagaugcaguccucccuccuccagcagcacgucgagcuccucgaguccuccgucgucccccucaugcacccccucgccgaccccuccaccgucuucaaggacggcaacgaggccgaggacuucgucgagguccaccuccccgacguccacaagcaggucuccggcgucgaccucggccuccccgacuggggccgcuaccuccucgucuccgccggcgcccucaucacccucaugcucaucaucuuccucaugaccugcugccgccgcguccaccgccgcgaguccaagcagcacucccuccgcggcaccgagcgcaaggucuccgucaccucccaguccggcaaggccaucuccuccugggaguccuacaagaacggcuccgagacccgcauguga

SEQ ID NO: 127026 - RNA, 1575 nt, Artificial Sequence
  derived and/or modified CDS sequence (opt2) from glycoprotein__RABV__FJ465402.1
auguucccccaggcccuccucuucgucccccuccucggcuucucccucugcuucggcaaguuccccaucuacaccauccccgacaagcucggccccuggucccccaucgacauccaccaccucuccugccccaacaaccucgucgucgaggacgagggcugcaccaaccucuccggcuucuccuacauggagcucaaggucggcuacaucuccgccaucaaggucaacggcuucaccugcaccggcgucgucaccgaggccgagaccuacaccaacuucgucggcuacgucaccaccaccuuccgccgcaagcacuuccgccccaccuccgacgccugccgcgccgccuacaacuggaagauggccggcgacccccgcuacgaggagucccuccacaaccccuaccccgacuaccacuggcuccgcaccgucaagaccaccaaggagucccucgucaucaucucccccuccgucgccgaccucgaccccuacgacaagucccuccacucccgcgucuuccccaacggccgcugcuccggccucaccgucuccuccaccuacugcuccaccaaccacgacuacaccaucuggaugcccgagaacccccgccucggcaccuccugcgacaucuucaccaacucccgcggcaagcgcgccuccaagggcaaccgcaccugcggcuucgucgacgagcgcggccucuacaagucccucaagggcgccugcaagcucaagcucugcggcguccucggccuccgccucauggacggcaccugggucgccaugcagaccuccgaggagaccaaguggugcccccccgaccagcucgucaaccuccacgacuuccgcuccgacgagaucgagcaccucgucgucgaggagcucgucaagaagcgcgaggagugccucgacgcccucgaguccaucaugaccaccaaguccgucuccuuccgccgccucucccaccuccgcaagcucguccccggcuucggcaaggccuacaccaucuucaacaagacccucauggaggccgacgcccacuacaaguccauccgcaccuggaacgagaucauccccuccaagggcugccuccgcgucggcggccgcugccacccccacgucaacggcgucuucuucaacggcaucauccucggcuccgacggccacguccucauccccgagaugcaguccucccuccuccagcagcacgucgagcuccucgaguccuccgucgucccccucaugcacccccucgccgaccccuccaccgucuucaaggacggcggcgaggccgaggacuucgucgagguccaccuccccgacguccacaagcaggucuccggcgucgaccucggccuccccuccuggggcaaguacauccucgucggcuccggcgcccucaucgcccucguccucaucaucuuccucaugaccugcugccgccgcgucucccgccccgaguccacccagcacucccuccgcggcaccggcaugaaggucuccaucaccucccaguccggcaaggccauccccuccugggaguccuacaaguccaagaacgagaccaagauguga

SEQ ID NO: 127027 - RNA, 1575 nt, Artificial Sequence
  derived and/or modified CDS sequence (opt2) from glycoprotein__RABV__FJ465403.1
auguucccccagacccuccucuucgucccccuccucggccucucccucugcuucggcaaguuccccaucuacaccauccccgacaagcucggccccuggucccccaucgacauccaccaccucuccugccccaacaaccucgucgucgaggacgagggcugcaccaaccucuccggcuucuccuacauggagcucaaggucggcuacaucuccgccaucaaggucaacggcuucaccugcaccggcgucgucaccgaggccgagaccuacaccaacuucgucggcuacgucaccaccaccuuccgccgcaagcacuuccgccccacccccgacgccugccgcgccgccuacaacuggaaggucgccggcgacccccgcuacgaggagucccuccacaaccccuaccccgacuaccacuggcuccgcaccgucaagaccaccaaggagucccucgucaucaucucccccuccgucgccgaccucgaccccuacgacaagucccuccacucccgcgucuuccucaacggcaagugcuccggccucaccgucuccuccaccuacugcuccaccaaccacgacuacaccaucuggaugcccgagaacccccgccucggcaccuccugcgacauccucuccaacucccgcggcaagcgcgccuccaagggcaacaagaccugcggcuucgucgacgagcgcggccucuacaagucccucaagggcgccugcaagcucaagcucugcggcguccucggccuccgccucaucgacggcaccugggucgccaugcagaccuccgaggagcccaaguggugcccccccgaccagcucgucaaccuccacaacuuccgcuccgacgagaucgagcaccucgucgucgaggagcucgucaagaagcgcgaggagugccucgacgcccucgaguccaucaugaccaccaaguccgucuccuuccgccgccucucccaccuccgcaagcucguccccggcuucggcaaggccuacaccaucuucaacaagacccucauggaggccgacgcccacuacaaguccauccgcaccugggacgagaucauccccuccaagggcugccuccgcgucggcggccgcugccacccccacgucaacggcgucuucuucaacggcaucauccucggcuccgacggccacguccucauccccgagaugcaguccucccuccuccagcagcacgucgagcuccucgaguccuccgucaucccccucaugcacccccucgccgaccccuccaccgucuucaaggacggcgacgaggccgaggacuucgucgagauccaccuccccgacguccacaagcagaucuccggcgucgaccucggccuccccaacuggggcaaguacauccucauguccgccggcgcccucaucacccucaugcucaccaucuuccucaucaccugcugccgcggcuuccgccgccccaaguccacccagcacucccucggcggcaccggcaugaaggucuccgucaccccccaguccggcaaggucaucuccuccugggaguccuacaagaagggcggcgagacccgccucuga

SEQ ID NO: 127028 - RNA, 1575 nt, Artificial Sequence
  derived and/or modified CDS sequence (opt2) from glycoprotein__RABV__FJ465404.1
auguucccccaggcccuccucuucgucccccuccucggcuucucccucugcuucggcaaguuccccaucuacaccauccccgacaagcucggccccuggucccccaucgacauccaccaccucuccugccccaacaaccucgucgucgaggacgagggcugcaccaaccucuccggcuucuccuacauggagcucaaggucggcuacaucuccgccaucaaggucaacggcuucaccugcaccggcgucgucaccgaggccgagaccuacaccaacuucgucggcuacgucaccaccaccuuccgccgcaagcacuuccgccccaccuccgacgccugccgcgccgccuacaacuggaagauggccggcgacccccgcuacgaggagucccuccacaaccccuaccccgacuaccacuggcuccgcaccgucaagaccaccaaggagucccucgucaucaucucccccuccgucgccgaccucgaccccuacgacaagucccuccacucccgcgucuuccccaacggccgcugcuccggccucaccgucuccuccaccuucugcuccaccaaccacgacuacaccaucuggaugcccgagaacccccgccucggcaccuccugcgacaucuucaccaacucccgcggcaagcgcgccuccaagggcaaccgcaccugcggcuucgucgacgagcgcggccucuacaagucccucaagggcgccugcaagcucaagcucugcggcguccucggccuccgccucauggacggcaccugggucgccaugcagaccuccgaggagaccaaguggugcccccccgaccagcucgucaaccuccacgacuuccgcuccgacgagaucgagcaccucgucgucgaggagcucgucaagaagcgcgaggagugccucgacgcccucgaguccaucaugaccaccaaguccgucuccuuccgccgccucucccaccuccgcaagcucguccccggcuucggcaaggccuacaccaucuucaacaagacccucauggaggccgacgcccacuacaaguccauccgcaccuggaacgagaucauccccuccaagggcugccuccgcgucggcggccgcugccacccccacgucaacggcgucuucuucaacggcaucauccucggcuccgacggccacguccucauccccgagaugcaguccucccuccuccagcagcacgucgagcuccucgaguccuccgucgucccccucaugcacccccucgccgaccccuccaccgucuucaagaacggcggcgaggccgaggacuucgucgagguccaccuccccgacguccacaagcaggucuccggcgucgaccucggccuccccuccuggggcaaguacauccucgucuccuccggcgcccucaucgcccucguccucgucaucuuccucaugaccugcugccgcaaggucaaccgccccgaguccacccagcacucccuccgcggcaccggcaugaaggucuccaucaccucccaguccggcaaggccauccccuccugggaguccuacaaguccgagaacgagaccaagauguga

SEQ ID NO: 127029 - RNA, 1575 nt, Artificial Sequence
  derived and/or modified CDS sequence (opt2) from glycoprotein__RABV__FJ465405.1
auguucucccagucccuccuccucgucucccuccucggcuucccccucuccuucggcaaguuccccaucuacaccauccccgacaagcucggccccuggucccccaucgacauccaccaccucuccugccccaacaaccucgucgucgaggacgagggcugcaccaaccucuccggcuucuccuacauggagcucaaggucggcuacaucuccgccaucaaggucaacggcuucaccugcaccggcgucgucaccgaggccgagaccuacaccaacuucgucggcuacgucaccaccaccuuccgccgcaagcaccuccgccccacccccgacgccugccgcuccgccuacaacuggaaggucgccggcgacccccgcuacgaggagucccuccacaaccccuaccccgacuaccacuggcuccgcaccgucaagaccaccaaggagucccucgucaucaucucccccuccgucgccgaccucgaccccuacgacaagucccuccacucccgcgucuuccccaacggcaagugcuccggccucaccgucuccuccaccuacugcuccaccaaccacgacuacaccaucuggaugcccgagaacccccgccucggcaccuccugcgacaucuucaccaacucccgcggcaagcgcgccuccaagggcaacaagaccugcggcuucgucgacgagcgcggccucuacaagucccucaagggcgccugcaagcucaagcucugcggcguccucggccuccgccucaucgacggcaccugggucgccaugcacaccuccgacgagaccaaguggugcccccccgaccagcucgucaaccuccacgacuuccgcuccgacgagaucgagcaccucgucgucgaggagcucgucaagaagcgcgaggagugccucgacgcccucgaguccaucaugaccaccaaguccgucuccuuccgccgccucucccaccuccgcaagcucguccccggcuucggcaaggccuacaccaucuucaacaagacccucauggaggccgacgcccacuacaaguccauccgcaccugggacgagaucauccccuccaagggcugccuccgcgucggcggccgcugccacccccacgucaacggcgucuucuucaacggcaucauccucggcuccgacggccacguccucauccccgagaugcaguccucccuccuccagcagcacaucgagcuccucgaguccuccgucgucccccucaugcacccccucgccgaccccuccaccgucuucaaggacggcgacgaggccgaggacuucgucgagguccaccuccccgacguccacaagcaggucuccggcgucgaccucggccuccccgacuggggcaaguacauccucgucuccgccggcgcccucaucgcccucaugcucaucaucuuccucaugaccugcugccgccgcguccaccgccgcgaguccaagcagcacuccuuccgcggcaccgagcgcaaggucuccgucaccucccagaacggcaaggccaucuccuccugggaguccuacaagaacggcuccgacacccgcauguga

SEQ ID NO: 127030 - RNA, 1575 nt, Artificial Sequence
  derived and/or modified CDS sequence (opt2) from glycoprotein__RABV__FJ465406.1
auguucucccagucccuccuccucgucucccuccucggcuucccccucugcuucggcaaguuccccaucuacaccauccccgacaagcucggccccuggucccccaucgacauccaccaccucuccugccccaacaaccucgucgucgaggacgagggcugcaccaaccucuccggcuucuccuacauggagcucaaggucggcuacaucuccgccaucaaggucaacggcuucaccugcaccggcgucgucaccgaggccgagaccuacaccaacuucgucggcuacgucaccaccaccuuccgccgcaagcaccuccgccccacccccgacgccugccgcuccgccuacaacuggaagauggccggcgacccccgcuacgaggagucccuccacaaccccuaccccgacuaccacuggcuccgcaccgucaagaccaccaaggagucccucgucaucaucucccccuccgucgccgaccucgaccccuacgacaagucccuccacucccgcgucuuccccaacggcaagugcuccggccucaccgucuccuccaccuacugcuccaccaaccacgacuacaccaucuggaugcccgagaacccccgccucggcaccuccugcgacaucuucaccaacucccgcggcaagcgcgccucccgcggcaacaagaccugcggcuucgucgacgagcgcggccucuacaagucccucaagggcgccugcaagcucaagcucugcggcguccucggccuccgccucaucgacggcaccugggucgccaugcacaccuccgacgagaccaaguggugcccccccgaccagcucgucaaccuccacgacuuccgcuccgacgagaucgagcaccucgucgucgaggagcucgucaagaagcgcgaggagugccucgacgcccucgaguccaucaugaccaccaaguccgucuccuuccgccgccucucccaccuccgcaagcucguccccggcuucggcaaggccuacaccaucuucaacaagacccucauggaggccgacgcccacuacaaguccauccgcaccugggacgagaucguccccuccaagggcugccuccgcgucggcggccgcugccacccccacgucaacggcgucuucuucaacggcaucauccucggcuccgacggccacguccucauccccgagaugcaguccucccuccuccagcagcacgucgagcuccucgaguccuccgucgucccccucaugcacccccucgccgaccccuccaccgucuucaaggagggcaacgaggccgaggacuucgucgagguccaccuccccgacguccacaagcaggucuccggcgucgaccucggccuccccgacuggggcaaguacauccucgucuccgccggcgcccucaucgcccucaugcucaucauccuccucaugaccugcugccgccgcguccaccgccgcgaguccaagcagcacucccuccgcggcaccgagcgcaaggucuccgucaccucccagaacggcaaggccaucuccuccugggaguccuacaagaaccgcuccgacacccgcauguga

SEQ ID NO: 127031 - RNA, 1575 nt, Artificial Sequence
  derived and/or modified CDS sequence (opt2) from glycoprotein__RABV__FJ465407.1
auguucccccaggcccuccucuucgucccccuccucggcuucucccucugcuucggcaaguuccccaucuacaccauccccgacaagcucggccccuggucccccaucgacauccaccaccucuccugccccaacaaccucgucgucgaggacgagggcugcaccaaccucuccggcuucuccuacauggagcucaaggucggcuacaucuccgccaucaaggucaacggcuucaccugcaccggcgucgucaccgaggccgagaccuacaccaacuucgucggcuacgucaccaccaccuuccgccgcaagcacuuccgccccaccuccgacgccugccgcgccgccuacaacuggaagauggccggcgacccccgcuacgaggagucccuccacaaccccuaccccgacuaccacuggcuccgcaccgucaagaccaccaaggagucccucgucaucaucucccccuccgucgccgaccucgaccccuacgacaagucccuccacucccgcgucuuccccaacggccgcugcuccggccucaccgucuccuccaccuucugcuccaccaaccacgacuacaccaucuggaugcccgagaacccccgccucggcaccuccugcgacaucuucaccaacucccgcggcaagcgcgccuccaagggcaaccgcaccugcggcuucgucgacgagcgcggccucuacaagucccucaagggcgccugcaagcucaagcucugcggcguccucggccuccgccucauggacggcaccugggucgccaugcagaccuccgaggagaccaaguggugcccccccgaccagcucgucaaccuccacgacuuccgcuccgacgagaucgagcaccucgucgucgaggagcucgucaagaagcgcgaggagugccucgacgcccucgaguccaucaugaccaccaaguccgucuccuuccgccgccucucccaccuccgcaagcucguccccggcuucggcaaggccuacaccaucuucaacaagacccucauggaggccgacgcccacuacaaguccauccgcaccuggaacgagaucauccccuccaagggcugccuccgcgucggcggccgcugccacccccacgucaacggcgucuucuucaacggcaucauccucggcuccgacggccacguccucauccccgagaugcaguccucccuccuccagcagcacgucgagcuccucgaguccuccgucgucccccucaugcacccccucgccgaccccuccaccgucuucaaggacggcggcgaggccgaggacuucgucgagguccaccuccccgacguccacaagcaggucuccggcgucgaccucggccuccccuccuggggcaaguacauccucgucggcuccggcgcccucaucgcccucguccucgucaucuuccucaugaccugcugccgcaaggucaaccgccccgaguccacccagcacucccuccgcggcaccggcaugaaggucuccaucaccucccaguccggcaaggccauccccuccugggaguccuacaaguccgagaacgagaccaagauguga

SEQ ID NO: 127032 - RNA, 1575 nt, Artificial Sequence
  derived and/or modified CDS sequence (opt2) from glycoprotein__RABV__FJ465409.1
auguucccccagacccuccucuucgucccccuccucggccucucccucugcuucggcaaguuccccaucuacaccauccccgacaagcucggccccuggucccccaucgacauccaccaccucuccugccccaacaaccucgucgucgaggacgagggcugcaccaaccucuccggcuucuccuacauggagcucaaggucggcuacaucuccgccaucaaggucaacggcuucaccugcaccggcgucgucaccgaggccgagaccuacaccaacuucgucggcuacgucaccaccaccuuccgccgcaagcacuuccgccccacccccgacgccugccgcgccgccuacaacuggaagauggccggcgacccccgcuacgaggagucccuccacaaccccuaccccgacuaccacuggcuccgcaccgucaagaccaccaaggagucccucgucaucaucucccccuccgucgccgaccucgaccccuacgacaagucccuccacucccgcgucuuccucaacggcaagugcuccggccucaccgucuccuccaccuacugcuccaccaaccacgacuacuccaucuggaugcccgagaacccccgccucggcaccuccugcgacaucuucgucaccucccgcggcaagcgcgccuccaagggcuccaagaccugcggcuucgucgacgagcgcggccucuacaagucccucaagggcgccugcaagcucaagcucugcggcguccucggccuccgccucaucgacggcaccugggucgccaugcagaccuccgaggagcccaaguggugcccccccgaccagcucgucaaccuccacaacuuccgcuccgacgagaucgagcaccucgucgucgaggagcucgucaagaagcgcgaggagugccucgacgcccucgaguccaucaugaccaccaaguccgucuccuuccgccgccucucccaccuccgcaagcucguccccggcuucggcaaggccuacaccaucuucaacaagacccucauggaggccgacgcccacuacaaguccauccgcaccugggacgagaucauccccuccaagggcugccuccgcgucggcggccgcugccacccccacgucaacggcgucuucuucaacggcaucauccucggcuccgacggccacguccucauccccgagaugcaguccucccuccuccagcagcacgucgagcuccucgaguccuccgucaucccccucaugcacccccucgccgaccccuccaccgccuucaaggacggcgacgaggccgaggacuucgucgagauccaccuccccgacguccacaagcagaucuccggcgucgaccucggccuccccaacuggggcaaguacauccucgucuccgccggcgcccucaucgcccucaugcucaccaucuuccucaucaccugcugccgcggcuuccaccagcccaaguccacccagcacucccucggcggcaccggccgcaaggucuccgucaccccccucuccggcaaggucaucuccuccugggaguccuacaagaagggcggcgagacccgccucuga

SEQ ID NO: 127033 - RNA, 1575 nt, Artificial Sequence
  derived and/or modified CDS sequence (opt2) from glycoprotein__RABV__FJ602447.1
augaucccccaggucuuccucuucgucccccuccucgucuucuccuccugcuucggcaaguuccccaucuacaccauccccgacaagcucggccccuggucccccaucgacauccaccaccucuccugccccaacaaccucgucgucgaggacgagggcugcaccaaccucuccggcuucuccuacauggagcucaaggucggcuacaucuccgccaucaaggucaacggcuucaccugcaccggcgucgucaccgaggccgagaccuacaccaacuucgucggcuacgucaccaccaccuucaagcgcaagcacuuccgccccaugcccgacgccugccgcgccgccuacaacuggaagauggccggcgacccccgcuacgaggagucccuccacaaccccuaccccgacuaccacuggcuccgcaccgucaagaccaccaaggagucccucgucaucaucucccccuccgucgccgaccucgaccccuacgacaagucccuccacucccgcgucuuccccggcggcaagugcuccggcaucaccgucuccuccaccugcugcuccaccaaccacgacuacaccaucuggaugcccgagaacccccgccucggcaccuccugcgacaucuucaccaacucccgcggcaagcgcgccuccaagggcggcaagaccugcggcuucgucgacgagcgcggccucuacaagucccucaagggcgccugcaagcucaagcucugcggcguccucggccuccgccucauggacggcaccugggucgccauccagaccuccgacgagaucaaguggugcucccccgaccagcucgucaaccuccacgacuuccacuccgacgagaucgagcaccucgucgucgaggagcucgucaagaagcgcgaggagugccucgacgcccucgagaccaucaugaccaccaaguccgucuccuuccgccgccucucccaccuccgcaagcucguccccggcuucggcaaggccuacaccaucuucaacaagacccucauggaggccgacgcccacuacaaguccauccgcaccuggaacgagaucauccccuccaagggcugccuccgcgucggcggccgcugccacccccacgucaacggcgucuucuucaacggcaucauccucggccccgacggccacguccucauccccgagaugcaguccucccuccuccaccagcacauggagcuccucgaguccuccgucaucccccucaugcacccccucgccgaccccuccaccgucuucaaggacggcgacgaggccgaggacuucgucgagguccaccuccccgacguccacaagcagaucuccggcgucgaccucggccuccccaacuggggcaaguacguccucaucuccgccggcgcccucaccgcccucaugcucaccaucuuccucaugaccugcugccgcaagaccaaccgcgccgaguccauccagcacucccccggcgagaccggccgcaaggucuccgucaccucccacaacggccgcgucaucuccuccugggaguccuacaaguccggcuccgagaccaagcucuga

SEQ ID NO: 127034 - RNA, 1575 nt, Artificial Sequence; identical to SEQ ID NO: 126881
  derived and/or modified CDS sequence (opt2) from glycoprotein__RABV__FJ602448.1

SEQ ID NO: 127035 - RNA, 1575 nt, Artificial Sequence
  derived and/or modified CDS sequence (opt2) from glycoprotein__RABV__FJ602449.1
augaucccccagguccuccucuucgucccccuccucgucuucuccuccugcuucggcaaguuccccaucuacaccauccccgacaagcucggccccuggucccccaucgacauccaccaccucuccugccccaacaaccucgucgucgaggacgagggcugcaccaaccucuccggcuucuccuacauggagcucaaggucggcuacaucuccgccaucaaggucaacggcuucaccugcaccggcgucgucaccgaggccgagaccuacaccaacuucgucggcuacgucaccaccaccuucaagcgcaagcacuuccgccccaugcccgacgccugccgcgccgccuacaacuggaagauggccggcgacccccgcuacgaggagucccuccacaaccccuaccccgacuaccacuggcuccgcaccgucaagaccaccaaggagucccucgucaucaucucccccuccgucgccgaccucgaccccuacgacaagucccuccacucccgcgucuuccccggcggcaagugcuccggcaucaccgucuccuccaccugcugcuccaccaaccacgacuacaccaucuggaugcccgagaacccccgccucggcaccuccugcgacaucuucaccaacucccgcggcaagcgcgccuccaagggcggcaagaccugcggcuucgucgacgagcgcggccucuacaagucccucaagggcgccugcaagcucaagcucugcggcguccucggccuccgccucauggacggcaccugggucgccauccagaccuccgacgagaucaaguggugcucccccgaccagcucgucaaccuccacgacuuccacuccgacgagaucgagcaccucgucgucgaggagcucgucaagaagcgcgaggagugccucgacgcccucgagaccaucaugaccaccaaguccgucuccuuccgccgccucucccaccuccgcaagcucguccccggcuucggcaaggccuacaccaucuucaacaagacccucauggaggccgacgcccacuacaaguccauccgcaccuggaacgagaucauccccuccaagggcugccuccgcgucggcggccgcugccacccccacgucaacggcgucuucuucaacggcaucauccucggccccgacggccacguccucauccccgagaugcaguccucccuccuccaccagcacauggagcuccucgaguccuccgucaucccccucaugcacccccucgccgaccccuccaccgucuucaaggacggcgacgacgccgaggacuucgucgagguccaccuccccgacguccacaagcagaucuccggcgucgaccucggccuccccaacuggggcaaguacgucaugaucuccgccggcgcccucaccgcccucaugcucaugaucuuccucaugaccugcugccgcaagaccaaccgcgccgaguccauccagcacucccccggcgagaccggccgcaaggucuccgucaccucccacaacggccgcgucaucuccuccugggaguccuacaaguccggcggcgagaccaagcucuga

SEQ ID NO: 127036 - RNA, 1575 nt, Artificial Sequence
  derived and/or modified CDS sequence (opt2) from glycoprotein__RABV__FJ602450.1
augaucccccagguccuccucuucgucccccuccucaucuucuccuccugccucggcaaguuccccaucuacaccauccccgacaagcucggccccuggucccccaucgacauccaccaccucuccugccccaacaaccucgucgucgaggacgagggcugcaccaaccucuccggcuucuccuacauggagcucaaggucggcuacaucuccgccaucaaggucaacggcuucaccugcaccggcgucgucaccgaggccgagaccuacaccaacuucgucggcuacgucaccaccaccuucaagcgcaagcacuuccgccccaugcccgacgccugccgcgccgccuacaacuggaagauggccggcgacccccgcuacgaggagucccuccacaaccccuaccccgacuaccacuggcuccgcaccgucaagaccuccaaggagucccucgucaucaucucccccuccgucgccgaccucgaccccuacgacaagucccuccacucccgcgucuuccccggcggcaagugcuccggcaucaccgucuccuccaccugcugcuccaccaaccacgacuacaccaucuggaugcccgagaacccccgccucggcaccuccugcgacaucuucaccaacucccgcggcaagcgcgccuccaagggcggcaagaccugcggcuucgucgacgagcgcggccucuacaagucccucaagggcgccugcaagcucaagcucugcggcguccucggccuccgccucauggacggcaccugggucgccauccagaccuccgacgagaucaaguggugcucccccgaccagcucgucaaccuccacgacuuccacuccgacgagaucgagcaccucgucgucgaggagcucgucaagaagcgcgaggagugccucgacgcccucgagaccaucaugaccaccaaguccgucuccuuccgccgccucucccaccuccgcaagcucguccccggcuucggcaaggccuacaccaucuucaacaagacccucauggaggccgacgcccacuacaaguccauccgcaccuggaacgagaucauccccuccaagggcugccuccgcgucggcggccgcugccacccccacgucaacggcgucuucuucaacggcaucauccucggccccgacggccacguccucauccccgagaugcaguccucccuccuccaccagcacauggagcuccucgaguccuccgucaucccccucaugcacccccucgccgaccccuccaccgucuucaaggacggcgacgaggccgaggacuucgucgagguccaccuccccgacguccacaagcagaucuccggcgucgaccucggccuccccaacuggggcaaguacguccucaucuccgccggcgcccucaccgccuccaugcucaugaucuuccucaugaccugcugccgcaagaccaaccgcgccgaguccauccagcacucccccggcgagaccggccgcaaggucuccgucaccucccacaacggccgcgucaucuccuccugggaguccuacaaguccggcggcgagaccaagcucuga

SEQ ID NO: 127037 - RNA, 1575 nt, Artificial Sequence; identical to SEQ ID NO: 126879
  derived and/or modified CDS sequence (opt2) from glycoprotein__RABV__FJ602451.1

SEQ ID NO: 127038 - RNA, 1575 nt, Artificial Sequence; identical to SEQ ID NO: 126563
  derived and/or modified CDS sequence (opt2) from glycoprotein__RABV__FJ602452.1

SEQ ID NO: 127039 - RNA, 1575 nt, Artificial Sequence; identical to SEQ ID NO: 126863
  derived and/or modified CDS sequence (opt2) from glycoprotein__RABV__FJ602453.1

SEQ ID NO: 127040 - RNA, 1575 nt, Artificial Sequence; identical to SEQ ID NO: 126879
  derived and/or modified CDS sequence (opt2) from glycoprotein__RABV__FJ602454.1

SEQ ID NO: 127041 - RNA, 1575 nt, Artificial Sequence; identical to SEQ ID NO: 126879
  derived and/or modified CDS sequence (opt2) from glycoprotein__RABV__FJ602455.1

SEQ ID NO: 127042 - RNA, 1575 nt, Artificial Sequence; identical to SEQ ID NO: 126879
  derived and/or modified CDS sequence (opt2) from glycoprotein__RABV__FJ602456.1

SEQ ID NO: 127043 - RNA, 1575 nt, Artificial Sequence; identical to SEQ ID NO: 126881
  derived and/or modified CDS sequence (opt2) from glycoprotein__RABV__FJ602457.1

SEQ ID NO: 127044 - RNA, 1575 nt, Artificial Sequence; identical to SEQ ID NO: 126881
  derived and/or modified CDS sequence (opt2) from glycoprotein__RABV__FJ602458.1

SEQ ID NO: 127045 - RNA, 1575 nt, Artificial Sequence
  derived and/or modified CDS sequence (opt2) from glycoprotein__RABV__FJ602459.1
augaucccccagguccuccucuucgucccccuccucgucuucuccuccugccucggcaaguuccccaucuacaccauccccgacaagcucggccccuggucccccaucgacauccaccaccucuccugccccaacaaccucgucgucgaggacgagggcugcaccaaccucuccggcuucuccuacauggagcucaaggucggcuacaucuccgccaucaaggucaacggcuucaccugcaccggcgucgucaccgaggccgagaccuacaccaacuucgucggcuacgucaccaccaccuucaagcgcaagcacuuccgccccaugcucgacgccugccgcgccgccuacaacuggaagauggccggcgacccccgcuacgaggagucccuccacaaccccuaccccgacuaccacuggcuccgcaccgucaagaccuccaaggagucccucgucaucaucucccccuccgucgccgaccucgaccccuacgacaagucccuccacucccgcgucuuccccggcggcaagugcuccggcaucaccgucuccuccaccugcugcuccaccaaccacgacuacaccaucuggaugcccgagaacccccgccucggcaccuccugcgacaucuucaccaacucccgcggcaagcgcgccuccaagggcggcaagaccugcggcuucgucgacgagcgcggccucuacaagucccucaagggcgccugcaagcucaagcucugcggcguccucggccuccgccucauggacggcaccugggucgccauccagaccuccgacgagaucaaguggugcucccccgaccagcucgucaaccuccacgacuuccacuccgacgagaucgagcaccucgucgucgaggagcucgucaagaagcgcgaggagugccucgacgcccucgagaccaucaugaccaccaaguccgucuccuuccgccgccucucccaccuccgcaagcucguccccggcuucggcaaggccuacaccaucuucaacaagacccucauggaggccgacgcccacuacaaguccauccgcaccuggaacgagaucauccccuccaagggcugccuccgcgucggcggccgcugccacccccacgucaacggcgucuucuucaacggcaucauccucggccccgacggccacguccucauccccgagaugcaguccucccuccuccaccagcacauggagcuccucgaguccuccgucaucccccucaugcacccccucgccgaccccuccaccgucuucaaggacggcgacgaggccgaggacuucgucgagguccaccuccccgacguccacaagcagaucuccggcgucgaccucggccuccccaacuggggcaaguacguccucaucuccgccggcgcccucaccgccuccaugcucaugaucuuccucaugaccugcugccgcaagaccaaccgcgccgaguccauccagcacucccccggcgagaccggccgcaaggucuccgucaccucccacaacggccgcgucaucuccuccugggaguccuacaaguccggcggcgagaccaagcucuga

SEQ ID NO: 127046 - RNA, 1575 nt, Artificial Sequence
  derived and/or modified CDS sequence (opt2) from glycoprotein__RABV__FJ712193.1
augaucccccagguccuccucuucgucccccuccucgucuucuccuccugcuucggcaaguuccccaucuacaccauccccgacaagcucggccccuggucccccaucgacauccaccaccucuccugccccaacaaccucgucgucgaggacgagggcugcaccaaccucuccggcuucuccuacauggagcucaaggucggcuacaucuccgccaucaaggucaacggcuucaccugcaccggcgucgucaccgaggccgagaccuacaccaacuucgucggcuacgucaccaccaccuucaagcgcaagcacuuccgccccaugcccgacgccugccgcgccgccuacaacuggaagauggccggcgacccccgcuacgaggagucccuccacaaccccuaccccgacuaccacuggcuccgcaccgucaagaccaccaaggagucccucgucaucaucucccccuccgucgccgaccucgaccccuacgacaagucccuccacucccgcgucuuccccggcggcaagugcuccggcaucaccgucuccuccaccugcugcuccaccaaccacgacuacaccaucuggaugcccgagaacccccgccucggcaccuccugcgacaucuucaccaacucccgcggcaagcgcgccuccaagggcggcaagaccugcggcuucgucgacgagcgcggccucuacaagucccucaagggcgccugcaagcucaagcucugcggcguccucggccuccgccucauggacggcaccugggucgccauccagaccuccgacgagaucaaguggugcucccccgaccagcucgucaaccuccacgacuuccacuccgacgagaucgagcaccucgucgucgaggagcucgucaagaagcgcgaggagugccucgacgcccucgagaccaucaugaccaccaaguccgucuccuuccgccgccucucccaccuccgcaagcucguccccggcuucggcaaggccuacaccaucuucaacaagacccucauggaggccgacgcccacuacaaguccauccgcaccuggaacgagaucauccccuccaagggcugccuccgcgucggcggccgcugccacccccacgucaacggcgucuucuucaacggcaucauccucggccccgacggccacguccucauccccgagaugcaguccucccuccuccaccagcacauggagcuccucgaguccuccgucaucccccucaugcacccccucgccgaccccuccaccgucuucaaggacggcgacgaggccgaggacuucgucgagguccaccuccccgacguccacaagcagaucuccggcaucgaccucggccuccccaacuggggcaaguacguccucaucuccgccggcgcccucaccgcccucaugcucaccaucuuccucaugaccugcugccgcaagaccaaccgcgccgaguccauccagcacucccccggcgagaccggccgcaaggucuccgucaccucccacaacggccgcgucaucuccuccugggaguccuacaaguccggcuccgagaccaagcucuga

SEQ ID NO: 127047 - RNA, 1575 nt, Artificial Sequence; identical to SEQ ID NO: 126881
  derived and/or modified CDS sequence (opt2) from glycoprotein__RABV__FJ712194.1

SEQ ID NO: 127048 - RNA, 1575 nt, Artificial Sequence
  derived and/or modified CDS sequence (opt2) from glycoprotein__RABV__FJ712195.1
augaucccccaggcccuccucuucgucccccuccucgucgucccccucugcuucggcaaguuccccaucuacaccauccccgacaagcucggccccuggucccccaucgacauccaccaccucuccugccccaacaaccucgucgucgaggacgagggcugcaccaaccucuccggcuucuccuacauggagcucaaggucggcuacaucuccgccaucaaggucaacggcuucaccugcaccggcgucgucaccgaggccgagaccuacaccaacuucgucggcuacgucaccaccaccuucaagcgcaagcacuuccgccccacccccgacgccugccgcuccgccuacaacuggaagauggccggcgacccccgcuacgaggagucccuccacaaccccuaccccgacuaccacuggcuccgcaccgucaagaccaccaaggaguccuucgucaucaucucccccuccgucgccgaccucgaccccuacgacaagucccuccacucccgcgucuucccccgcggcaagugcuccggcaucaccgucuccuccaccuacugcuccaccaaccacgacuacaccaucuggaugcccgagaacccccgccucggcaccuccugcgacaucuucaccaacucccgcggcaagcgcgccuucaagggcuccaagaccugcggcuucgucgacgagcgcggccucuacaagucccucaagggcgccugcaagcucaagcucugcggcguccucggccuccgccucauggacggcaccugggucgccauccagaccuccgacgagaccaaguggugcccccccgaccagcucgucaaccuccacgacuuccacuccgacgagaucgagcaccucgucgucgaggagcucgucaagaagcgcgaggagugccucgacgcccucgaguccaucaugaccaccaaguccgucuccuuccgccgccucucccaccuccgcaagcucguccccggcuucggcaaggccuacaccaucuucaacaagacccucauggaggccgacgcccacuacaaguccguccgcaccuggaacgagaucauccccuccaagggcugccuccgcgucggcggccgcugccacccccacgucaacggcgucuucuucaacggcaucauccucggccccgacggccacguccucauccccgagaugcaguccucccuccuccagcagcacauggagcuccucgaguccuccgucaucccccucaugcacccccucgccgaccccuccaccgucuucaagaacggcgacgaggccgaggacuucgucgagguccaccuccccgacguccacaagcaggucuccggcgucgaccucggccuccccuccuggggcaaguacguccucauguccgccggcauccucaccgcccucaugcucaugaucuuccucaugaccugcugccgccgcaccaaccgccccgaguccauccagcacucccucggcgagaccggccgcaaggucuccgucaccucccaguccggccgcgucaucuccuccugggaguccuacaaguccggcggcgagaccaagcucuga

SEQ ID NO: 127049 - RNA, 1575 nt, Artificial Sequence
  derived and/or modified CDS sequence (opt2) from glycoprotein__RABV__FJ712196.1
augaucccccaggcccuccucuucgucccccuccucgucgucccccucugcuucggcaaguuccccaucuacaccauccccgacaagcucggccccuggucccccaucgacauccaccaccucuccugccccaacaaccucgucgucgaggacgagggcugcaccaaccucuccggcuucuccuacauggagcucaaggucggcuacaucuccgccaucaaggucaacggcuucaccugcaccggcgucgucaccgaggccgagaccuacaccaacuucgucggcuacgucaccaccaccuucaagcgcaagcacuuccgccccacccccgacgccugccgcuccgccuacaacuggaagauggccggcgacccccgcuacgaggagucccuccacaaccccuaccccgacuaccacuggcuccgcaccgucaagaccaccaaggaguccuucgucaucaucucccccuccgucgccgaccucgaccccuacgacaagucccuccacucccgcgucuucccccgcggcaagugcuccggcaucaccgucuccuccaccuacugcuccaccaaccacgacuacaccaucuggaugcccgagaacccccgccucggcaccuccugcgacaucuucaccaacucccgcggcaagcgcgccuucaagggcuccaagaccugcggcuucgucgacgagcgcggccucuacaagucccucaagggcgccugcaagcucaagcucugcggcguccucggccuccgccucauggacggcaccugggucgccauccagaccucccgcgagaccaaguggcgcccccccgaccagcucgucaaccuccacgacuuccacuccgacgagaucgagcaccucgucgucgaggagcucgucaagaagcgcgaggagugccucgacgcccucgaguccaucaugaccaccaaguccgucuccuuccgccgccucucccaccuccgcaagcucguccccggcuucggcaaggccuacaccaucuucaacaagacccucauggaggccgacgcccacuacaaguccguccgcaccuggaacgagaucauccccuccaagggcugccuccgcgucggcggccgcugccacccccacgucaacggcgucuucuucaacggcaucauccucggccccgacggccacguccucauccccgagaugcaguccucccuccuccagcagcacauggagcuccucgaguccuccgucaucccccucaugcacccccucgccgaccccuccaccgucuucaagaacggcgacgaggccgaggacuucgucgagguccaccuccccgacguccacaagcaggucuccggcgucgaccucggccuccccuccuggggcaaguacguccucauguccgccggcauccucaccgcccucaugcucaugaucuuccucaugaccugcugccgccgcaccaaccgccccgaguccauccagcacucccucggcgagaccggccgcaaggucuccgucaccucccaguccggccgcgucaucuccuccugggaguccuacaaguccggcggcgagaccaagcucuga

SEQ ID NO: 127050 - RNA, 1575 nt, Artificial Sequence
  derived and/or modified CDS sequence (opt2) from glycoprotein__RABV__FJ719749.1
augaucccccaggcccuccucuucgucccccuccucgucgucccccucugcuucggcaaguuccccaucuacaccauccccgacaagcucggccccugguccuccaucgacauccaccaccucuccugccccaacaaccucgucgucgaggacgagggcugcaccaaccucuccggcuucuccuacauggagcucaaggucggcuacaucuccgccaucaaggucaacggcuucaccugcaccggcgucgucaccgaggccgagaccuacaccaacuucgucggcuacgucaccaccaccuucaagcgcaagcacuuccgccccacccccgacgccugccgcuccgccuacaacuggaagauggccggcgacccccgcuacgaggagucccuccacaaccccuaccccgacuaccacuggcuccgcaccgucaagaccaccaaggaguccuucgucaucaucucccccuccgucgccgaccucgaccccuacgacaagucccuccacucccgcgucuucccccgcggcaagugcuccggcaucaccgucuccuccaccuacugccccaccaaccacgacuacaccaucuggaugcccgagaacccccgccucggcaccuccugcgacaucuucaccaacucccgcggcaagcgcgcccucaagggcuccaagaccugcggcuucgucgacgagcgcggccucuacaagucccucaagggcgccugcaagcucaagcucugcggcguccccggccuccgccucauggacggcaccugggucgccauccagaccuccgacgagaccaaguggugcccccccgaccagcucgucaaccuccacgacuuccacuccgacgagaucgagcaccucgucgucgaggagcucgucaagaagcgcgaggagugccucgacgcccucgaguccaucaugaccaccaaguccgucuccuuccgccgccucucccaccuccgcaagcucguccccggcuucggcaaggccuacaccaucuucaacaagacccucauggaggccgacgcccacuacaaguccguccgcaccuggaacgagaucauccccuccaagggcugccuccgcgucggcggccgcugccacccccacgucaacggcgucuucuucaacggcaucauccucggccccgacggccacguccucauccccgagaugcaguccucccuccuccagcagcacauggagcuccucgaguccuccgucaucccccucaugcacccccucgccgaccccuccaccgucuucaagaacggcgacgaggucgaggacuucgucgagguccaccuccccgacguccacaagcaggucuccggcgucgacuucggccuccccuccuggggcaaguacguccucauguccgccggcauccucaccgcccucaugcucgucaucuuccucaugaccugcugccgccgcaccaaccgcuccgaguccauccagcacucccucggcgagaccggccgcaaggucuccgucaccucccaguccggccgcgucaucuccuccugggaguccuacaaguccggcggcgagaccaagcucuga

SEQ ID NO: 127051 - RNA, 1575 nt, Artificial Sequence
  derived and/or modified CDS sequence (opt2) from glycoprotein__RABV__FJ719752.1
augaucccccaggcccuccucuucgucccccuccucgucgucccccucugcuucggcaaguuccccaucuacaccauccccgacaagcucggccccuggucccccaucgacauccaccaccucuccugccccaacaaccucgucgucgaggacgagggcugcaccaaccucuccggcuucuccuacauggagcucaaggucggcuacaucuccgccaucaaggucaacggcuucaccugcaccggcgucgucaccgaggccgagaccuacaccaacuucgucggcuacgucaccaccaccuucaagcgcaagcacuuccgccccacccccgacgccugccgcuccgccuacaacuggaagauggccggcgacccccgcuacgaggagucccuccacaaccccuaccccgacuaccacuggcuccgcaccgucaagaccaccaaggaguccuucgucaucaucucccccuccgucgccgaccucgaccccuacgacaagucccuccacucccgcgucuucccccgcggcaagugcuccggcaucaccgucuccuccaccuacugccccaccaaccacgacuacaccaucuggaugcccgagaacccccgccucggcaccuccugcgacaucuucaccaacucccgcggcaagcgcgccuucaagggcuccaagaccugcggcuucgucgacgagcgcggccucuacaagucccucaagggcgccugcaagcucaagcucugcggcguccucggccuccgccucauggacggcaccugggucgccauccagaccuccgacgagaccaaguggugcccccccgaccagcucgucaaccuccacgacuuccacuccgacgagaucgagcaccucgucgucgaggagcucgucaagaagcgcgaggagugccucgacgcccucgaguccaucaugaccaccaaguccgucuccuuccgccgccucucccaccuccgcaagcucguccccggcuucggcaaggccuacaccaucuucaacaagacccucauggaggccgacgcccacuacaaguccguccgcaccuggaacgagaucauccccuccaagggcugccuccgcgucggcggccgcugccacccccacgucaacggcgucuucuucaacggcaucauccucggccccgacggccacguccucauccccgagaugcaguccucccuccuccagcagcacauggagcuccucgaguccuccgucaucccccucaugcacccccucgccgaccccuccaccgucuucaagaacggcgacgaggccgaggacuucgucgagguccaccuccccgacguccacaagcaggucuccggcgucgaccucggccuccccuccuggggcaaguacguccucauguccgccggcauccucaccgcccucaugcucaugaucuuccucaugaccugcugccgccgcaccaaccgccccgaguccauccagcacucccucggcgagaccggccgcaaggucuccgucaccucccaguccggccgcgucaucuccuccugggaguccuacaaguccggcggcgagaccaagcucuga

SEQ ID NO: 127052 - RNA, 1575 nt, Artificial Sequence; identical to SEQ ID NO: 127048
  derived and/or modified CDS sequence (opt2) from glycoprotein__RABV__FJ719756.1

SEQ ID NO: 127053 - RNA, 1575 nt, Artificial Sequence
  derived and/or modified CDS sequence (opt2) from glycoprotein__RABV__FJ825129.1
augaucccccagguccuccucuucgucccccuccucgucuucuccuccugcuucggcaaguuccccaucuacaccauccccgacaagcucggccccuggucccccaucgacauccaccaccucuccugccccaacaaccucgucgucgaggacgagggcugcaccaaccucuccggcuucuccuacauggagcucaaggucggcuacaucuccgccaucaaggucaacggcuucaccugcaccggcgucgucaccgaggccgagaccuacaccaacuucgucggcuacgucaccaccaccuucaagcgcaagcacuuccgccccaugcccgacgccugccgcgccgccuacaacuggaagauggccggcgacccccgcuacgaggagucccuccacaaccccuaccccgacuaccacuggcuccgcaccgucaagaccaccaaggagucccucgucaucaucucccccuccgucgccgaccucgaccccuacgacaagucccuccacucccgcgucuuccccggcggcaagugcucccgcaucaccgucuccuccaccugcugcuccaccaaccacgacuacaccaucuggaugcccgagaacccccgccuccgcaccuccugcgacaucuucaccaacucccgcggcaagcgcgccuccaagcgcggcaagaccugcggcuucgucgacgagcgcggccucuacaagucccucaagggcgccugcaagcucaagcucugcggcguccucggccuccgccucauggacggcaccugggucgccauccagaccuccgacgagaucaaguggugcucccccgaccagcucgucaaccuccacgacuuccacuccgacgagaucgagcaccucgucgucgaggagcucgucaagaagcgcgaggagugccucgacgcccucgagaccaucaugaccaccaaguccgucuccuuccgccgccucucccaccuccgcaagcucguccccggcuucggcaaggccuacaccaucuucaacaagacccucauggaggccgacgcccacuacaaguccauccgcaccuggaacgagaucauccccuccaagggcugccuccgcgucggcggccgcugccacccccacgucaacggcgucuucuucaacggcaucauccucggccccgacggccacguccucauccccgagaugcaguccucccuccuccaccagcacauggagcuccucgaguccuccgucaucccccucaugcacccccucgccgaccccuccaccgucuucaaggacggcgacgaggccgaggacuucgucgagguccaccuccccgacguccacaagcagaucuccggcaucgaccucggccuccccaacuggggcaaguacguccucaucuccgccggcgcccucaccgcccucaugcucaccaucuuccucaugaccugcugccgcaagaccaaccgcgccgaguccauccagcacucccccggcgagaccggccgcaaggucuccgucaccucccacaacggccgcgucaucuccuccugggaguccuacaaguccggcuccgagaccaagcucuga

SEQ ID NO: 127054 - RNA, 1575 nt, Artificial Sequence; identical to SEQ ID NO: 126881
  derived and/or modified CDS sequence (opt2) from glycoprotein__RABV__FJ825130.1

SEQ ID NO: 127055 - RNA, 1575 nt, Artificial Sequence
  derived and/or modified CDS sequence (opt2) from glycoprotein__RABV__FJ825131.1
augaucccccagguccuccucuucgucccccuccucgucuucuccuccugcuucggcaaguuccccaucuacaccauccccgacaagcucggccccuggucccccaucgacauccaccaccucuccugccccaacaaccucgucgucgaggacgagggcugcaccaaccucuccggcuucuccuacauggagcucaaggucggcuacaucuccgccaucaaggucaacggcuucaccugcaccggcgucgucaccgaggccgagaccuacaccaacuucgucggcuacgucaccaccaccuucaagcgcaagcacuuccgccccaugcccgacgccugccgcgccgccuacaacuggaagauggccggcgacccccgcuacgaggagucccuccacaaccccuaccccgacuaccacuggcuccgcaccgucaagaccaccaaggagucccucgucaucaucucccccuccgucgccgaccucgaccccuacgacaagucccuccacucccgcgucuuccccggcggcaagugcuccggcaucaccgucuccuccaccugcugcuccaccaaccacgacuacaccaucuggaugcccgagaacccccgccucggcaccuccugcgacaucuucaccaacucccgcggcaagcgcgccuccaagggcggcaagaccugcggcuucguccacgagcgcggccucuacaagucccucaagggcgccugcaagcucaagcucugcggcguccucggccuccgccucauggacggcaccugggucgccauccagaccuccgacgagaucaaguggugcucccccgaccagcucgucaaccuccacgacuuccacuccgacgagaucgagcaccucgucgucgaggagcucgucaagaagcgcgaggagugccucgacgcccucgagaccaucaugaccaccaaguccgucuccuuccgccgccucucccaccuccgcaagcucguccccggcuucggcaaggccuacaccaucuucaacaagacccucauggaggccgacgcccacuacaaguccauccgcaccuggaacgagaucauccccuccaagggcugccuccgcgucggcggccgcugccacccccacgucaacggcgucuucuucaacggcaucauccucggccccgacggccacguccucauccccgagaugcaguccucccuccuccaccagcacauggagcuccucgaguccuccgucaucccccucaugcacccccucgccgaccccuccaccgucuucaaggacggcgacgaggccgaggacuucgucgagguccaccuccccgacguccacaagcagaucuccggcgucgaccucggccuccccaacuggggcaaguacguccucaucuccgccggcgcccucaccgcccucaugcucaccaucuuccucaugaccugcugccgcaagaccaaccgcgccgaguccauccagcacucccccggcgagaccggccgcaaggucuccgucaccucccacaacggccgcgucaucuccuccugggaguccuacaaguccggcuccgagaccaagcucuga

SEQ ID NO: 127056 - RNA, 1575 nt, Artificial Sequence
  derived and/or modified CDS sequence (opt2) from glycoprotein__RABV__FJ825132.1
augaucccccagguccuccucuucgucccccuccucgucuucuccuccugcuucggcaaguuccccaucuacaccauccccgacaagcucggccccuggucccccaucgacauccaccaccucuccugccccaacaaccucgucgucgaggacgagggcugcaccaaccucuccggcuucuccuacauggagcucaaggucggcuacaucuccgccaucaaggucaacggcuucaccugcaccggcgucgucaccgaggccgagaccuacaccaacuucgucggcuacgucaccaccaccuucaagcgcaagcacuuccgccccaugcccgacgccugccgcgccgccuacaacuggaagauggccggcgacccccgcuacgaggagucccuccacaaccccuaccccgacuaccacuggcuccgcaccgucaagaccaccaaggagucccucgucaucaucucccccuccgucgccgaccucgaccccuacgacaagucccuccacucccgcgucuuccccggcggcaagugcuccggcaucaccgucuccuccaccugcugcuccaccaaccacgacuacaccaucuggaugcccgagaacccccgccucggcaccuccugcgacaucuucaccaacucccgcggcaagcgcgccuccaagggcggcaagaccugcggcuucgucgacgagcgcggccucuacaagucccuccgcggcgccugcaagcucaagcucugcggcguccucggccuccgccucauggacggcaccugggucgccauccagaccuccgacgagaucaaguggugcucccccgaccagcucgucaaccuccacgacuuccacuccgacgagaucgagcaccucgucgucgaggagcucgucaagaagcgcgaggagugccucgacgcccucgagaccaucaugaccaccaaguccgucuccuuccgccgccucucccaccuccgcaagcucguccccggcuucggcaaggccuacaccaucuucaacaagacccucauggaggccgacgcccacuacaaguccauccgcaccuggaacgagaucauccccuccaagggcugccuccgcgucggcggccgcugccacccccacgucaacggcgucuucuucaacggcaucauccucggccccgacggccacguccucauccccgagaugcaguccucccuccuccaccagcacauggagcuccucgaguccuccgucaucccccucaugcacccccucgccgaccccuccaccgucuucaaggacggcgacgaggccgaggacuucgucgagguccaccuccccgacguccacaagcagaucuccggcgucgaccucggccuccccaacuggggcaaguacguccucaucuccgccggcgcccucaccgcccucaugcucaugaucuuccucaugaccugcugccgcaagaccaaccgcgccgaguccauccagcacucccccggcgagaccggcuggaaggucuccgucaccucccacaacggccgcgucaucuccuccugggaguccuacaaguccggcuccgagaccaagcucuga

SEQ ID NO: 127057 - RNA, 1575 nt, Artificial Sequence
  derived and/or modified CDS sequence (opt2) from glycoprotein__RABV__FJ825133.1
augaucccccagguccuccucuucgucccccuccucgucuucuccuccugcuucggcaaguuccccaucuacaccauccccgacaagcucggccccuggucccccaucgacauccaccaccucuccugccccaacaaccucgucgucgaggacgagggcugcaccaaccucuccggcuucuccuacauggagcucaaggucggcuacaucuccgccaucaaggucaacggcuucaccugcaccggcgucgucaccgaggccgagaccuacaccaacuucgucggcuacgucaccaccaccuucaagcgcaagcacuuccgccccaugcccgacgccugccgcgccgccuacaacuggaagauggccggcgacccccgcuacgaggagucccuccacaaccccuaccccgacuaccacuggcuccgcaccgucaagaccaccaaggagucccucgucaucaucucccccuccgucgccgaccucgaccccuacgacaagucccuccacucccgcgucuuccccggcggcaagugcucccgcaucaccgucuccuccaccugcugcuccaccaaccacgacuacaccaucuggaugcccgagaacccccgccucggcaccuccugcgacaucuucaccaacucccgcggcaagcgcgccuccaagggcggcaagaccugcggcuucgucgacgagcgcggccucuacaagucccuccgcggcgccugcaagcucaagcucugcggcguccucggccuccgccucauggacggcaccugggucgccauccagaccuccgacgagaucaaguggugcucccccgaccagcucgucaaccuccacgacuuccacuccgacgagaucgagcaccucgucgucgaggagcucgucaagaagcgcgaggagugccucgacgcccucgagaccaucaugaccaccaaguccgucuccuuccgccgccucucccaccuccgcaagcucguccccggcuucggcaaggccuacaccaucuucaacaagacccucauggaggccgacgcccacuacaaguccauccgcaccuggaacgagaucauccccuccaagggcugccuccgcgucggcggccgcugccacccccacgucaacggcgucuucuucaacggcaucauccucggccccgacggccacguccucauccccgagaugcaguccucccuccuccaccagcacauggagcuccucgaguccuccgucaucccccucaugcacccccucgccgaccccuccaccgucuucaaggacggcgacgaggccgaggacuucgucgagguccaccuccccgacguccacaagcagaucuccggcgucgaccucggccuccccaacuggggcaaguacguccucaucuccgccggcgcccucaccgcccucaugcucaugaucuuccucaugaccugcugccgcaagaccaaccgcgccgaguccauccagcacucccccggcgagaccggccgcaaggucuccgucaccucccacaacggccgcgucaucuccuccugggaguccuacaaguccggcuccgagaccaagcucuga

SEQ ID NO: 127058 - RNA, 1575 nt, Artificial Sequence; identical to SEQ ID NO: 127048
  derived and/or modified CDS sequence (opt2) from glycoprotein__RABV__FJ825134.1

SEQ ID NO: 127059 - RNA, 1575 nt, Artificial Sequence
  derived and/or modified CDS sequence (opt2) from glycoprotein__RABV__FJ866832.1
augaucccccagguccuccucuucgucccccuccucgucuucuccuccugcuucggcaaguuccccaucuacaccauccccgacaagcucggccccuggucccccaucgacauccaccaccucuccugccccaacaaccucgucgucgaggacgagggcugcaccaaccucuccggcuucuccuacauggagcucaaggucggcuacaucuccgccaucaaggucaacggcuucaccugcaccggcgucgucaccgaggccgagaccuacaccaacuucgucggcuacgucaccaccaccuucaagcgcaagcacuuccgccccaugcccgacgccugccgcgccgccuacaacuggaagauggccggcgacccccgcuacgaggagucccuccacaaccccuaccccgacuaccacuggcuccgcaccgucaagaccaccaaggagucccucgucaucaucucccccuccgucgccgaccucgaccccuacgacaagucccuccacucccgcgucuuccccggcggcaagugcuccggcaucaccgucuccuccaccugcugcuccaccaaccacgacuacaccaucuggaugcccgagaacccccgccucggcaccuccugcgacaucuucgccaacucccgcggcaagcgcgccuccaagggcggcaagaccugcggcuucgucgacgagcgcggccucuacaagucccucaagggcgccugcaagcucaagcucugcggcguccucggccuccgccucauggacggcaccugggucgccauccagaccuccgacgagaucaaguggugcucccccgaccagcucgucaaccuccacgacuuccacuccgacgagaucgagcaccucgucgucgaggagcucgucaagaagcgcgaggagugccucgacgcccucgagaccaucaugaccaccaaguccgucuccuuccgccgccucucccaccuccgcaagcucguccccggcuucggcaaggccuacaccaucuucaacaagacccucauggaggccgacgcccacuacaaguccauccgcaccuggaacgagaucauccccuccaagggcugccuccgcgucggcggccgcugccacccccacgucaacggcgucuucuucaacggcaucauccucggccccgacggccacguccucauccccgagaugcaguccucccuccuccaccagcacauggagcuccucgaguccuccgucaucccccucaugcacccccucgccgaccccuccaccgucuucaaggacggcgacgaggccgaggacuucgucgagguccaccuccccgacguccacaagcagaucuccggcgucgaccucggccuccccaacuggggcaaguacguccucaucuccgccggcgcccucaccgcccucaugcucaccaucuuccucaugaccugcugccgcaagaccaaccgcgccgaguccauccagcacucccccggcgagaccggccgcaaggucuccgucaccucccacaacggccgcgucaucuccuccugggaguccuacaaguccggcuccgagaccaagcucuga

SEQ ID NO: 127060 - RNA, 1575 nt, Artificial Sequence
  derived and/or modified CDS sequence (opt2) from glycoprotein__RABV__FJ866834.1
augaucccccagguccuccucuucgucccccuccucgucuucuccuccugcuucggcaaguuccccaucuacaccauccccgacaagcucggccccuggucccccaucgacauccaccaccucuccugccccaacaaccucgucgucgaggacgagggcugcaccaaccucuccggcuucuccuacauggagcucaaggucggcuacaucuccgccaucaaggucaacggcuucaccugcaccggcgucgucaccgaggccgagaccuacaccaacuucgucggcuacgucgccaccaccuucaagcgcaagcacuuccgccccaugcccgacgccugccgcgccgccuacaacuggaagauggccggcgacccccgcuacgaggagucccuccacaaccccuaccccgacuaccacuggcuccgcaccgucaagaccaccaaggagucccucgucaucaucucccccuccgucgccgaccucgaccccuacgacaagucccuccacucccgcgucuuccccggcggcaagugcuccggcaucaccgucuccuccaccugcugcuccaccaaccacgacuacaccaucuggaugcccgagaacccccgccucggcaccuccugcgacaucuucaccaacucccgcggcaagcgcgccuccaagggcggcaagaccugcggcuucgucgacgagcgcggccucuacaagucccucaagggcgccugcaagcucaagcucugcggcguccucggccuccgccucauggacggcaccugggucgccauccagaccuccgacgagaucaaguggugcucccccgaccagcucgucaaccuccacgacuuccacuccgacgagaucgagcaccucgucgucgaggagcucgucaagaagcgcgaggagugccucgacgcccucgagaccaucaugaccaccaaguccgucuccuuccgccgccucucccaccuccgcaagcucguccccggcuucggcaaggccugcaccaucuucaacaagacccucauggaggccgacgcccacuacaaguccauccgcaccuggaacgagaucauccccuccaagggcugccuccgcgucggcggccgcugccacccccacgucaacggcgucuucuucaacggcaucauccucggccccgacggccacguccucauccccgagaugcaguccucccuccuccaccagcacauggagcuccucgaguccuccgucaucccccucaugcacccccucgccgaccccuccaccgucuucaaggacggcgacgaggccgaggacuucgucgagguccaccuccccgacguccacaagcagaucuccggcgucgaccucggccuccccaacuggggcaaguacguccucaucuccgccggcgcccucaccgcccucaugcucaccaucuuccucaugaccugcugccgcaagaccaaccgcgccgaguccauccagcacucccccggcgagaccggccgcaaggucuccgucaccucccacaacggccgcgucaucuccuccugggaguccuacaaguccggcuccgagaccaagcucuga

SEQ ID NO: 127061 - RNA, 1575 nt, Artificial Sequence
  derived and/or modified CDS sequence (opt2) from glycoprotein__RABV__FJ866835.1
augaucccccagguccuccucuucgucccccuccucgucuucuccuccugcuucggcaaguuccccaucuacaccauccccgacaagcucggccccuggucccccaucgacauccaccaccucuccugccccaacaaccucgucgucgaggacgagggcugcaccaaccucuccggcuucuccuacauggagcucaaggucggcuacaucuccgccaucaaggucaacggcuucaccugcaccggcgucgucaccgaggccgagaccuacaccaacuucgucggcuacgucaccaccaccuucaagcgcaagcacuuccgccccaugcccgacgccugccgcgccgccuacaacuggaagauggccggcgacccccgcuacgaggagucccuccacaaccccuaccccgacuaccacuggcuccgcaccgucaagaccaccaaggagucccucgucaucaucucccccuccgucgccgaccucgaccccuacgacaagucccuccacucccgcgucuuccccggcggcaagugcuccggcaucaccgucuccuccaccugcugcuccaccaaccacgacuacaccaucuggaugcccgagaacccccgccucggcaccuccugcgacaucuucaccaacucccgcggcaagggcgccuccaagggcggcaagaccugcggcuucgucgacgagcgcggccucuacaagucccucaagggcgccugcaagcucaagcucugcggcguccucggccuccgccucauggacggcaccugggucgccauccagaccuccgccgagaucaaguggugcucccccgaccagcucgucaaccuccacgacuuccacuccgacgagaucgagcaccucgucgucgaggagcucgucaagaagcgcgaggagugccucgacgcccucgagaccaucaugaccaccaaguccgucuccuuccgccgccucucccaccuccgcaagcucguccccggcuucggcaaggccuacaccaucuucaacaagacccucauggaggccgacgcccacuacaaguccauccgcaccuggaacgagaucauccccuccaagggcugccuccgcgucggcggccgcugccacccccacgucaacggcgucuucuucaacggcaucauccucggccccgacggccacguccucauccccgagaugcaguccucccuccuccaccagcacauggagcuccucgaguccuccgucaucccccucaugcacccccucgccgaccccuccaccgucuucaaggacggcgacgaggccgaggacuucgucgagguccaccuccccgacguccacaagcagaucuccggcgucgaccucggccuccccaacuggggcaaguacguccucaucuccgccggcgcccucaccgcccucaugcucaccaucuuccucaugaccugcugccgcaagaccaaccgcgccgaguccauccagcacucccccggcgagaccggccgcaaggucuccgucaccucccacaacggccgcgucaucuccuccugggaguccuacaaguccggcuccgagaccaagcucuga

SEQ ID NO: 127062 - RNA, 1575 nt, Artificial Sequence
  derived and/or modified CDS sequence (opt2) from glycoprotein__RABV__FJ959397.1
augaucccccaggcccuccucuucgucccccuccucgucuucccccucugcuucggcaaguuccccaucuacaccauccccgacaagcucggccccuggucccccaucgacauccaccaccucuccugccccaacaaccucgucgucgaggacgagggcugcaccaaccucuccggcuucuccuacauggagcucaaggucggcuacaucuccgccaucaaggucaacggcuucaccugcaccggcgucgucaccgaggccgagaccuacaccaacuucgucggcuacgucaccaccaccuucaagcgcaagcacuuccgccccacccccgacgccugccgcuccgccuacaacuggaagauggccggcgacccccgcuacgaggagucccuccacaaccccuaccccgacuaccacuggcuccgcaccgucaagaccaccaaggaguccgucgucaucaucucccccuccgucgccgaccucgaccccuacgacaagucccuccacucccgcgucuucccccgcggcaagugcuccggcaucaccgucuccuccgccuacugcuccaccaaccacgacuacaccaucuggaugcccgagaacccccgccucggcaccuccugcgacaucuucaccaacucccgcggcaagcgcgccuccaagggcuccaagaccugcggcuucgucgacgagcgcggccucuacaagucccucaagggcgccugcaagcucaagcucugcggcguccucggccuccgccucauggacggcaccugggucgccauccagaccuccaacgagaccaaguggugcccccccgaccagcucgucaaccuccacgacuuccacuccgacgagaucgagcaccucgucgucgaggagcucgucaagaagcgcgaggagugccucgacgcccucgaguccaucaugaccaccaaguccgucuccuuccgccgccucucccaccuccgcaagcucguccccggcuucggcaaggccuacaccaucuucaacaagacccucauggaggccgacgcccacuacaaguccguccgcaccuggaacgagaucauccccuccaagggcugccuccgcgucggcggccgcugccacccccacgucaacggcgucuucuucaacggcaucauccucggccccgacggccacguccucauccccgagaugcaguccucccuccuccagcagcacauggagcuccucgaguccuccgucaucccccucaugcacccccucgccgaccccuccaccgucuucaaggacggcgacgaggucgaggacuucgucgagguccaccuccccgacguccacaagcaggucuccggcgucgaccucggccuccccaacuggggcaaggacguccucaugggcgccggcguccucaccgcccucaugcucaugaucuuccucaugaccugcugccgccgcaccaaccgcgccgaguccauccagcacucccucggcgagaccggccgcaaggucuccgucaccucccaguccggccgcgucaucuccuccugggaguccuacaaguccggcggcgagaccaagcucuga

SEQ ID NO: 127063 - RNA, 1575 nt, Artificial Sequence
  derived and/or modified CDS sequence (opt2) from glycoprotein__RABV__FJ979833.1
auggucccccaggcccuccucuucgucccccuccucggcuucucccucugcuucggcaaguuccccaucuacaccauccccgacgagcucggccccuggucccccaucgacauccaccaccucuccugccccaacaaccucgucgucgaggacgagggcugcaccaaccucuccgaguucuccuacauggagcucaaggucggcuacaucuccgccaucaaggucaacggcuucaccugcaccggcgucgucaccgaggccgaggccuacaccaacuucgucggcuacgucaccaccaccuucaagcgcaagcacuuccgccccacccccgacgccugccgcgccgccuacaacuggaagauggccggcgacccccgcuacgaggagucccuccacaaccccuaccccgacuaccacuggcuccgcaccguccgcaccaccaaggagucccucaucaucaucucccccuccgucaccgaccucgaccccuacgacaagucccuccacucccgcgucuuccccggcggcaagugcuccggcaucaccgucuccuccaccuacugcuccaccaaccacgacuacaccaucuggaugcccgaggacccccgcccccgcacccccugcgacaucuucaccaacucccgcggcaagcgcgccuccaagggcaacaagaccugcggcuucgucgacgagcgcggccucuacaagucccucaagggcgccugccgccucaagcucugcggcguccucggccuccgccucauggacggcaccugggucgccaugcagaccuccgacgagaccaaguggugcccccccgaccagcucgucaaccuccacgacuuccaguccgacgagaucgagcaccucgucgucgaggagcucgucaagaagcgcgagggcugccucgacgcccucgaguccaucaugaccaccaaguccgucuccuuccgccgcuucucccaccuccgcaagcucguccccggcuucggcaaggccuacaccaucuucaacaagacccucauggaggccgacgcccacuacaaguccguccgcaccuggaacgagaucauccccuccaagggcugccucaaggucggcggccgcugccacccccacgucaacggcgucuucuucaacggcaucauccucggccccgacggccacguccucauccccgagaugcaguccucccuccuccagcagcacauggagcuccucaaguccuccgucaucccccucaugcacccccucgccgaccccuccaccgucuucaaggagggcgacgaggccgaggacuucgucgagguccaccuccccgacgucuacaagcgcaucuccggcgucgaccucggccuccccaacuggggcaaguacguccucaugaccgccggcgccaugaucggccucguccucaucuucucccucaugaccuggugccgccgcgccaaccgccccgaguccaagcagcgcuccuucggcggcaccggccgcaacgucuccgucaccucccaguccggcaaggucauccccuccugggaguccuacaaguccggcggcgagaccggccucuga

SEQ ID NO: 127064 - RNA, 1575 nt, Artificial Sequence
  derived and/or modified CDS sequence (opt2) from glycoprotein__RABV__GQ303557.1
augaucccccaggcccuccucuucgucccccuccucgucuucuccuccugcuucggcaaguuccccaucuacaccauccccgacaagcucggccccuggucccccaucgacauccaccaccucuccugccccaacaaccucgucgucgaggacgagggcugcaccaaccucuccggcuucuccuacauggagcucaaggucggcuacaucuccgccaucaaggucaacggcuucaccugcaccggcgucgucaccgaggccgagaccuacaccaacuucgucggcuacgucaccaccaccuucaagcgcaagcacuuccgccccacccccgacgccugccgcgccgccuacaacuggaagauggccggcgacccccgcuacgaggagucccuccacaaccccuaccccgacuaccacuggcuccgcaccgucaagaccaccaaggagucccucgucaucaucucccccuccgucuccgaccucgaccccuacgacaagucccuccacucccgcgucuuccccuccggcaagugcuccggcaucaccgucuccuccaccuacugccccaccaaccacgacuacaccaucuggaugcccgagaacccccgccucggcaccuccugcgacaucuucaccaacucccgcggcaagcgcgccuccaagggcggcaagaccugcggcuucgucgacgagcgcggccucuacaagucccucaagggcgccugcaagcucaagcucugcggcguccucggccuccgccucauggacggcaccugggucgccauccagaccuccgacgaggccaaguggugcccccccgaccagcucgucaacauccacgacuuccgcuccgacgagaucgagcaccucgucgucgaggagcucgucaagaagcgcgaggagugccucgacgcccucgaguccaucaugaccaccaaguccgucuccuuccgccgccucucccaccuccgcaagcucguccccggcuucggcaaggccuacaccaucuucaacaagacccucauggaggccgacgcccacuacaaguccguccgcaccuggaacgagaucauccccuccaagggcugccuccgcgucggcggccgcugccacccccacgucaacggcgucuucuucaacggcaucauccucggccccgacggccacguccucauccccgagaugcaguccucccuccuccagcagcacauggagcuccucgaguccuccgucaucccccucaugcacccccucgccgaccccuccaccgucuucaaggacggcgacgaggccgaggacuucgucgagguccaccuccccgacguccacaagcaggucuccggcgucgaccucggccuccccuccuggggcaaguacguccucauguccgucggcgccaugaucgcccucaugcucaugaucuuccucaugaccugcugccgcaaggccaacggcgccgagaccauccagcaccgccucggcgagaccggccgcaaggucuccgucaccucccaguccggccgcgucaucuccuccugggaguccuacaaguccggcggcgagaccaagcucuga

SEQ ID NO: 127065 - RNA, 1575 nt, Artificial Sequence; identical to SEQ ID NO: 126893
  derived and/or modified CDS sequence (opt2) from glycoprotein__RABV__GQ406342.1

SEQ ID NO: 127066 - RNA, 1575 nt, Artificial Sequence
  derived and/or modified CDS sequence (opt2) from glycoprotein__RABV__GQ412744.1
auggucccccaggcccuccuccucgucccccuccucggcuucucccucugcuucggcaaguuccccaucuacaccauccccgacacccucggccccuggucccccaucgacauccaccaccucuccugccccaacaaccucgucgucgaggacgagggcugcaccaaccucuccggcuucuccuacauggagcucaaggucggccacaucuccgccaucaaggucaacggcuucaccugcaccggcgucgucaccgaggccgagaccuacaccaacuucgucggcuacgucaccaccaccuucaagcgcaagcacuuccgccccacccccgacgccugccgcgccgccuacaacuggaagauggccggcgacccccgcuacgaggagucccuccacucccccuaccccgacuaccacuggcuccgcaccgucaagaccaccaaggagucccucgucaucaucucccccuccgucgccaaccucgaccccuacgacaacucccuccacucccgcgucuuccccuccggcaagugcuccggcaucaccguccccuccgucuacugcuccaccaaccacgacuacaccgucuggaugcccgagauccuccgccucggcaccuccugcgacaucuucaccaacucccgcggcaagcgcgccuccaagggcuccaagaccugcggcuucgucgacgagcgcggccucuacaagucccucaagggcgccugcaagcucaagcucugcggcguccccggccuccgccucauggacggcaccugggucgccaugcagaccuccaacgagaccaaguggugcccccccggccagcucgucaaccuccacgaccuccacuccgacgagaucgagcaccucgucgucgaggagcucgucaagaagcgcgaggagugccucgacgcccucgaguccaucaucaccaccaaguccgucuccuuccgccgccucucccaccuccgcaagcucguccccggcuucggcaaggccuacaccaucuucaacaagacccucauggaggccgaggcccacuacaaguccguccgcaccuggaacgagaucauccccuccaagggcugccuccgcgucggcggccgcugccacccccacgucaacggcgucuucuucaacggcaucauccucggccccgacggccacguccucauccccgagaugcaguccucccuccuccagcagcacaucgagcuccucgaguccuccgucaucccccucaugcacccccucgccgaccccuucaccgucuucaaggacggcgacgagaucgaggacuucgucgagguccaccuccccgacguccacgagcaggucuccggcgucgaccucggccuccccaacuggggcgaguacguccuccucuccgccggcacccucaucgcccucaugcucaucaucuuccucaucaccugcugcaagcgcgucgaccgccccgaguccacccagcgcucccuccgcggcaccggccgcaacgucuccgucaccucccaguccggcaaguucauccccuccugggaguccuacaaguccggcggcgagaccggccucuga

SEQ ID NO: 127067 - RNA, 1575 nt, Artificial Sequence
  derived and/or modified CDS sequence (opt2) from glycoprotein__RABV__GQ472535.1
auggucccccaggcccuccucuucgucccccuccucgccgucccccucugcuucggcaaguuccccaucuacaccauccccgacaagcucggccccuggucccccaucgacauccaccaccucuccugccccaacaaccucgucgucgaggacgagggcugcaccaaccucuccggcuucuccuacauggagcucaaggucggcuacaucuccgccaucaaggucaacggcuucaccugcaccggcgucgucaccgaggccgagaccuacaccaacuucgucggcuacgucaccaccaccuucaagcgcaagcacuuccgccccacccccgacgccugccgcuccaccuacaacuggaagauggccggcgacccccgccacgaggagucccuccacaaccccuaccccgacuaccacuggcuccgcaccgucaagaccaccaaggaguccuucgucaucaucucccccuccgucgccgaccucgaccccuacgacaagucccuccacucccgcgucuucccccgcggcaagugcuccggcaucaccgucuccuccaccuacugcuccaccaaccacgacuacaccaucuggaugcccgagaacccccgccucggcaccuccugcgacaucuucaccaacucccgcggcaagcgcgccuccaagggcuccaagaccugcggcuucgucgacgagcgcggccucuacaagucccucaagggcgccugcaagcucaagcucugcggcguccucggccuccgccucauggacggcaccugggucgccauccagaccuccgacgagaccaaguggugcccccccgaccagcucgucaaccuccacgacuuccacuccgacgagaucgagcaccucgucgucgaggagcucgucaagaagcgcgaggagugccucgacgcccucgaguccaucaugaccaccaaguccgucuccuuccgccgccucucccaccuccgcaagcucguccccggcuucggcaaggccuacaccaucuucaacaagacccucauggaggccgacgcccacuacaaguccguccgcaccuggaacgagaucauccccuccaagggcugccuccgcgucggcggccgcugccacccccacgucaacggcgucuucuucaacggcaucauccucggccccgacggccacguccucauccccgagaugcaguccucccuccuccagcagcacauggagcuccucgaguccuccgucaucccccucaugcacccccucgccgaccccuccaccgucuucaaggacggcgacgaggccgaggacuucgucgagguccaccuccccgacguccacaagcaggucuccggcgucgaccucggccuccccuccuggggcaaguacgcccucauguccgccggcauccucaccgcccucaugcucaugaucuuccucaugaccugcugccgccgcaccaaccgcgccgaguccauccagcacucccucggcgagaccggccgcaaggucuccgucaccucccagaacggccgcgucaucuccuccugggaguccuacaaguccggcggcgagaccaagcucuga

SEQ ID NO: 127068 - RNA, 1575 nt, Artificial Sequence
  derived and/or modified CDS sequence (opt2) from glycoprotein__RABV__GQ472536.1
auggucccccaggcccuccucuucgucccccuccucgccaucccccucugcuucggcaaguuccccaucuacaccauccccgacaagcucggccccuggucccccaucgacauccaccaccucuccugccccaacaaccucgucgucgaggacgagggcugcaccaaccucuccggcuucuccuacauggagcucaaggucggcuacaucuccgccaucaaggucaacggcuucaccugcaccggcgucgucaccgaggccgagaccuacaccaacuucgucggcuacgucaccaccaccuucaagcgcaagcacuuccgccccacccccgacgccugccgcuccgccuacaacuggaagauggccggcgacccccgcuacgaggagucccuccacaaccccuaccccgacuaccacuggcuccgcaccgucaagaccaccaaggaguccuucgucaucaucucccccuccgucgccgaccucgaccccuacgacaagucccuccucucccgcgucuucccccgcggcaagugcuccggcaucaccgucuccuccaccuacugcuccaccaaccacgacuacaccaucuggaugcccgagaacccccgccucggcaccuccugcgacaucuucaccaacucccgcggcaagcgcgccuccaagggcuccaagaccugcggcuucgucgacgagcgcggccucuacaagucccucaagggcgccugcaagcucaagcucugcggcguccucggccuccgccucauggacggcaccugggucgccauccagaccuccgacgagaccaaguggugcccccccgaccagcucgucaaccuccacgacuuccacuccgacgagaucgagcaccucgucgucgaggagcucgucaagaagcgcgaggagugccucgacgcccucgaguccaucaugaccaccaaguccgucuccuuccgccgccucucccaccuccgcaagcucguccccggcuucggcaaggccuacaccaucuucaacaagacccucauggaggccgacgcccacuacaaguccguccgcaccuggaacgagaucauccccuccaagggcugccuccgcgucggcggccgcugccacccccacgucaacggcgucuucuucaacggcaucauccucggccccgacggccacguccucauccccgagaugcaguccucccuccuccagcagcacauggagcuccucgaguccuccgucaucccccucaugcacccccucgccgaccccuccaccgucuucaaggacggcgacgaggccgaggacuucgucgagguccaccuccccgacguccacaagcaggucuccggcgucgaccucggccuccccuccuggggcaaguacguccucauguccgccggcauccucaccgcccucaugcucaugaucuuccucaugaccugcugccgccgcaccaaccgcgccgaguccauccagcacucccucggcgagaccggccgcaaggucuccgucaccucccaguccggccgcgucaucuccuccugggaguccuacaaguccggcggcgagaccaagcucuga

SEQ ID NO: 127069 - RNA, 1575 nt, Artificial Sequence; identical to SEQ ID NO: 126563
  derived and/or modified CDS sequence (opt2) from glycoprotein__RABV__GQ472537.1

SEQ ID NO: 127070 - RNA, 1575 nt, Artificial Sequence
  derived and/or modified CDS sequence (opt2) from glycoprotein__RABV__GQ472539.1
augaucccccagguccuccucuucgucccccuccucgucuucuccuccugcuucggcaaguuccccaucuacaccauccccgacaagcucggccccuggucccccaucgacauccaccaccucuccugccccaacaaccucgucgucgaggacgagggcugcaccaaccucuccggcuucuccuacauggagcucaaggucggcuacaucuccgccaucaaggucaacggcuucaccugcaccggcgucgucaccgaggccgagaccuacaccaacuucgucggcuacgucaccaccaccuucaagcgcaagcacuuccgccccaugcccgacgccugccgcgccgccuacaacuggaagauggccggcgacccccgcuacgaggagucccuccacaaccccuaccccgacuaccacuggcuccgcaccgucaagaccaccaaggagucccucgucaucaucucccccuccgucgccgaccucgaccccuacgacaagucccuccacucccgcgucuuccccggcggcaagugcuccggcaucaccgucuccuccaccugcugcuccaccaaccacgacuacaccaucuggaugcccgagaacccccgccucggcaccuccugcgacaucuucaccaacucccgcggcaagcgcgccuccaagggcggcaagaccugcggcuucgucgacgagcgcggccucuacaagucccucaagggcgccugcaagcucaagcucugcggcguccucggccuccgccucauggacggcaccugggucgccauccagaccuccgacgagaucaaguggugcucccccgaccagcucgucaaccuccacgacuuccacuccgacgagaucgagcaccucgucgucgaggagcucgucaagaagcgcgaggagugccucgacgcccucgagaccaucaugaccaccaaguccgucuccuuccgccgccucucccaccuccgcaagcucguccccggcuucggcaaggccuacaccaucuucaacaagacccucauggaggccgacgcccacuacaaguccauccgcaccuggaacgagaucauccccuccaagggcugccuccgcgucggcggccgcugccacccccacgucaacggcgucuucuucaacggcaucauccucggccucgacggccacguccucauccccgagaugcaguccucccuccuccaccagcacauggagcuccucgaguccuccgucaucccccucaugcacccccucgccgaccccuccaccgucuucaaggacggcgacgaggccgaggacuucgucgagguccaccuccccgacguccacaagcagaucuccggcgucgaccucggccuccccaacuggggcaaguacguccucaccuccgccggcgcccucaccgcccucaugcucaugaucuuccucaugaccugcugccgcaagaccaaccgcgccgaguccauccagcgcucccccggcgagaccgagcgcaaggucuccgucaccucccacaacggccgcgucaucuccuccugggaguccuacaaguccggcggcgagaccaagcucuga

SEQ ID NO: 127071 - RNA, 1575 nt, Artificial Sequence
  derived and/or modified CDS sequence (opt2) from glycoprotein__RABV__GQ472540.1
auggucccccaggcccuccucuucgucccccuccucgccgucccccucugcuucggcaaguuccccaucuacaccauccccgacaagcucggccccuggucccccaucgacauccaccaccucuccugccccaacaaccucgucgucgaggacgagggcugcaccaaccucuccggcuucuccuacauggagcucaaggucggcuacaucuccgccaucaaggucaacggcuucaccugcaccggcgucgucaccgaggccgagaccuacaccaacuucgucggcuacgucaccaccaccuucaagcgcaagcacuuccgccccacccccgacgccugccgcuccgccuacaacuggaagauggccggcgacccccgcuacgaggagucccuccacaaccccuaccccgacuaccacuggcuccgcaccgucaagaccaccaaggaguccuucgucaucaucucccccuccgucgccgaccucgaccccuacgacaagucccuccacucccgcgucuucccccgcggcaagugcuccggcaucaccgucuccuccaccuacugcuccaccaaccacgacuacaccaucuggaugcccgagaacccccgccucggcaccuccugcgacaucuucaccaacucccgcggcaagcgcgccuccaagggcuccaagaccugcggcuucgucgacgagggcggccucuacaagucccucaagggcgccugcaagcucaagcucugcggcguccucggccuccgccucauggacggcaccugggucgccauccagaccuccgacgagaccaaguggugcccccccgaccagcucgucaaccuccacgacuuccacuccgacgagaucgagcaccucgucgucgaggagcucgucaagaagcgcgaggagugccucgacgcccucgaguccaucaugaccaccaaguccgucuccuuccgccgccucucccaccuccgcaagcucguccccggcuucggcaaggccuacaccaucuucaacaagacccucauggaggccgacgcccacuacaaguccguccgcaccuggaacgagaucauccccuccaagggcugccuccgcgucggcggccgcugccacccccacgucaacggcgucuucuucaacggcaucauccucggccccgacggccacguccucauccccgagaugcaguccucccuccuccagcagcacauggagcuccucgaguccuccgucaucccccucaugcacccccucgccgaccccuccaccgucuucaaggacggcgacgaggccgaggacuucgucgagguccaccuccccgacguccacaagcaggucuccggcgucgaccucggccuccccuccuggggcaaguacguccucauguccgccggcauccucaccgcccucaugcucaccaucuuccucaugaccugcugccgccgcaccaaccgcgccgaguccauccagcacucccucggcgagaccggccgcaaggucuccgucaccucccaguccggccgcgucaucuccuccugggaguccuacaaguccggcggcgagaccaagcucuga

SEQ ID NO: 127072 - RNA, 1575 nt, Artificial Sequence
  derived and/or modified CDS sequence (opt2) from glycoprotein__RABV__GQ472541.1
auggucccccaggcccuccucuucgucccccuccucgccaucccccucugcuucggcaaguuccccaucuacaccauccccgacaagcucggccccuggucccccaucgacauccaccaccucuccugccccaacaaccucgucgucgaggacgagggcugcaccaaccucuccggcuucuccuacauggagcucaaggucggcuacaucuccgccaucaaggucaacggcuucaccugcaccggcgucgucaccgaggccgagaccuacaccaacuucgucggcuacgucaccaccaccuucaagcgcaagcacuuccgccccacccccgacgccugccgcuccgccuacaacuggaagauggccggcgacccccgcuacgaggagucccuccacaaccccuaccccgacuaccacuggcuccgcaccgucaagaccaccaaggaguccuucgucaucaucucccccuccgucgccgaccucgaccccuacgacaagucccuccacucccgcgucuucccccgcggcaagugcuccggcaucaccgucuccuccaccuacugcuccaccaaccacgacuacaccaucuggaugcccgagaacccccgccucggcaccuccugcgacaucuucaccaacucccgcggcaagcgcgccuccaagggcuccaagaccugcggcuucgucgacgagcgcggccucuacaagucccucaagggcgccugcaagcucaagcucugcggcguccucggccuccgccucauggacggcaccugggucgccauccagaccuccgacgagaccaaguggugcccccccgaccagcucgucaaccuccacgacuuccacuccgacgagaucgagcaccucgucgucgaggagcucgucaagaagcgcgaggagugccucgacgcccucgaguccaucaugaccaccaaguccgucuccuuccgccgccucucccaccuccgcaagcucguccccggcuucggcaaggccuacaccaucuucaacaagacccucauggaggccgacgcccacuacaaguccguccgcaccuggaacgagaucauccccuccaagggcugccuccgcgucggcggccgcugccacccccacgucaacggcgucuucuucaacggcaucauccucggccccgacggccacguccucauccccgagaugcaguccucccuccuccagcagcacauggagcuccucgaguccuccgucaucccccucaugcacccccucgccgaccccuccaccgucuucaaggacggcgacgaggccgaggacuucgacgagguccaccuccccgacguccacaagcaggucuccggcgucgaccucggccuccccuccuggggcaaguacguccucauguccgccggcauccucaccgcccucaugcucaugaucuuccucaugaccugcugccgccgcaccaaccgcgccgaguccauccagcacucccucggcgagaccggccgcaaggucuccgucaccucccaguccggccgcgucaucuccuccugggaguccuacaaguccggcggcgagaccaagcucuga

SEQ ID NO: 127073 - RNA, 1575 nt, Artificial Sequence
  derived and/or modified CDS sequence (opt2) from glycoprotein__RABV__GQ472542.1
augaucccccagguccuccucuucgucccccuccucgucuucuccuccugcuucggcaaguuccccaucuacaccauccccgacaagcucggccccuggucccccaucgacauccaccaccucuccugccccaacaaccucgucgucgaggacgagggcugcaccaaccucuccggcuucuccuacauggagcucaaggucggcuacaucuccgccaucaaggucaacggcuucaccugcaccggcgucgucaccgaggccgagaccuacaccaacuucgucggcuacgucaccaccaccuucaagcgcaagcacuuccgccccaugcccgacgccugccgcgccgccuacaacuggaagauggccggcgacccccgcuacgaggagucccuccacaaccccuaccccgacuaccacuggcuccgcaccgucaagaccaccaaggagucccucgucaucaucucccccuccgucgccgaccucgaccccuacgacaagucccuccacucccgcgucuuccccggcggcaagugcuccggcaucaccgucuccuccaccugcugcuccaccaaccacgacuacaccaucuggaugcccgagaacccccgccucggcaccuccugcgacaucuucaccaacucccgcggcaagcgcgccuccaagggcggcaagaccugcggcuucgucgacgagcgcggccucuacaagucccucaagggcgccugcaagcucaagcucugcggcguccucggccuccgccucauggacggcaccugggucgccauccagaccuccgacgagaucaaguggugcucccccgaccagcucgucaaccuccacgacuuccacuccgacgagaucgagcaccucgucgucgaggagcucgucaagaagggcgaggagugccucgacgcccucgagaccaucaugaccaccaaguccgucuccuuccgccgccucucccaccuccgcaagcucguccccggcuucggcaaggccuacaccaucuucaacaagacccucauggaggccgacgcccacuacaaguccauccgcaccuggaacgagaucauccccuccaagggcugccuccgcgucggcggccgcugccacccccacgucaacggcgucuucuucaacggcaucauccucggccccgacggccacguccucauccccgagaugcaguccucccuccuccaccagcacauggagcuccucgaguccuccgucaucccccucaugcacccccucgccgaccccuccaccgucuucaaggacggcgacgaggccgaggacuucgucgagguccaccuccccgacguccacaagcagaucuccggcgucgaccucggccuccccaacuggggcaaguacguccucaucuccgccggcgcccucaccgccuccaugcucaugaucuuccucaugaccugcugccgcaaggccaaccgcgccgaguccauccagcacaaccccggcgagaccggccgcaaggucuccgucaccucccacaacggccgcgucaucuccuccugggaguccuacaaguccggcggcgagaccaagcucuga

SEQ ID NO: 127074 - RNA, 1575 nt, Artificial Sequence; identical to SEQ ID NO: 126563
  derived and/or modified CDS sequence (opt2) from glycoprotein__RABV__GQ472543.1

SEQ ID NO: 127075 - RNA, 1575 nt, Artificial Sequence
  derived and/or modified CDS sequence (opt2) from glycoprotein__RABV__GQ472544.1
augaucccccagguccuccucuucgucccccuccucgucuucuccuccugcuucggcaaguuccccaucuacaccauccccgacaagcucggccccuggucccccaucgacauccaccaccucuccugccccaacaaccucgucgucgaggacgagggcugcaccaaccucuccggcuucuccuacauggagcucaaggucggcuacaucuccgccaucaaggucaacggcuucaccugcaccggcgucgucaccgaggccgagaccuacaccaacuucgucggcuacgucaccaccaccuucaagcgcaagcacuuccgccccaugcccgacgccugccgcgccgccuacaacuggaagauggccggcgacccccgcuacgaggagucccuccacaaccccuaccccgacuaccacuggcuccgcaccgucaagaccaccaaggagucccucgucaucaucucccccuccgucgccgaccucgaccccuacgacaagucccuccacucccgcgucuuccccggcggcaagugcuccggcaucaccgucuccuccaccugcugcuccaccaaccacgacuacaccaucuggaugcccgagaacccccgccucggcaccuccugcgacaucuucaccaacucccgcggcaagcgcgccuccaagggcggcaagaccugcggcuucgucgacgagcgcggccucuacaagucccucaagggcgccugcaagcucaagcucugcggcguccucggccuccgccucauggacggcaccugggucgccauccagaccuccgacgagaucaaguggugcucccccgaccagcucgucaaccuccacgacuuccacuccgacgagaucgagcaccucgucgucgaggagcucgucaagaagcgcgaggagugccucgacgcccucgagaccaucaugaccaccaaguccgucuccuuccgccgccucucccaccuccgcaagcucguccccggcuucggcaaggccuacaccaucuucaacaagacccucauggaggccgacgcccacuacaaguccauccgcaccuggaacgagaucauccccuccaagggcugccuccgcgucggcggccgcugccacccccacgucaacggcgucuucuucaacggcaucauccucggccccgacggccacguccucauccccgagaugcaguccucccuccuccaccagcacauggagcuccucggcuccuccgucaucccccucaugcacccccucgccgaccccuccaccgucuucaaggacggcgacgaggccgaggacuucgucgagguccaccuccccgacguccacaagcagaucuccggcgucgaccucggccuccccaacuggggcaaguacguccucaucuccgccggcgcccucaccgccuccaugcucaugaucuuccucaugaccugcugccgcaaggccaaccgcgccgaguccauccagcacaaccccggcgagaccggccgcaaggucuccgucaccucccacaacggccgcgucaucuccuccugggaguccuacaaguccggcggcgagaccaagcucuga

SEQ ID NO: 127076 - RNA, 1575 nt, Artificial Sequence
  derived and/or modified CDS sequence (opt2) from glycoprotein__RABV__GQ472545.1
auggucccccagguccuccucuucgucccccuccucgucuucuccuccugcuucggcaaguuccccaucuacaccauccccgacaagcucggccccuggucccccaucgacauccaccaccucuccugccccaacaaccucgucgucgaggacgagggcugcaccaaccucuccggcuucuccuacauggagcucaaggucggcuacaucuccgccaucaaggucaacggcuucaccugcaccggcgucgucaccgaggccgagaccuacaccaacuucgucggcuacgucaccaccaccuucaagcgcaagcacuuccgccccaugcccgacgccugccgcgccgccuacaacuggaagauggccggcgacccccgcuacgaggagucccuccacaaccccuaccccgacuaccacuggcuccgcaccgucaagaccaccaaggagucccucgucaucaucucccccuccgucgccgaccucgaccccuacgacaagucccuccacucccgcgucuuccccggcggcaagugcuccggcaucaccgucuccuccaccugcugcuccaccaaccacgacuacaccaucuggaugcccgagaacccccgccucggcaccuccugcgacaucuucaccaacucccgcggcaagcgcgccuccaagggcggcaagaccugcggcuucgucgacgagcgcggccucuacaagucccucaagggcgccugcaagcucaagcucugcggcguccucggccuccgccucauggacggcaccugggucgccauccagaccuccgacgagaucaaguggugcucccccgaccagcucgucaaccuccacgacuuccacuccgacgagaucgagcacuucgucgucgaggagcucgucaagaagcgcgaggagugccucgacgcccucgagaccaucaugaccaccaaguccgucuccuuccgccgccucucccaccuccgcaagcucguccccggcuucggcaaggccuacaccaucuucaacaagacccucauggaggccgacgcccacuacaaguccauccgcaccuggaacgagaucauccccuccaagggcugccuccgcgucggcggccgcugccacccccacgucaacggcgucuucuucaacggcaucauccucggccccgacggccacguccucauccccgagaugcaguccucccuccuccaccagcacauggagcuccucgaguccuccgucaucccccucaugcacccccucgccgaccccuccaccgucuucaaggacggcgacgaggccgaggacuucgucgagguccaccuccccgacguccacaagcagaucuccggcgucgaccucggccuccccaacuggggcaaguacguccucaucuccgccggcgcccucaccgcccucaugcucaugaucuuccucaugaccugcugccgcaaggccaaccgcgccgaguccauccagcacaaccccggcgagaccggccgcaaggucuccgucaccucccacaacggccgcgucaucuccuccugggaguccuacaaguccggcggcgagaccaagcucuga

SEQ ID NO: 127077 - RNA, 1575 nt, Artificial Sequence; identical to SEQ ID NO: 126563
  derived and/or modified CDS sequence (opt2) from glycoprotein__RABV__GQ472546.1

SEQ ID NO: 127078 - RNA, 1575 nt, Artificial Sequence
  derived and/or modified CDS sequence (opt2) from glycoprotein__RABV__GQ472547.1
auggucccccaggcccuccucuucgucccccuccucgccaucccccucugcuucggcaaguuccccaucuacaccauccccgacaagcucggccccuggucccccaucgacauccaccaccucuccugccccaacaaccucgucgucgaggacgagggcugcaccaaccucuccggcuucuccuacauggagcucaaggucggcuacaucuccgccaucaaggucaacggcuucaccugcaccggcgucgucaccgaggccgagaccuacaccaacuucgucggcuacgucaccaccaccuucaagcgcaagcacuuccgccccacccccgacgccugccgcuccgccuacaacuggaagauggccggcgacccccgcuacgaggagucccuccacaaccccuaccccgacuaccacuggcuccgcaccgucaagaccaccaaggaguccuucgucaucaucucccccuccgucgccgaccucgaccccuacgacaagucccuccacucccgcgucuucccccgcggcaagugcuccggcaucaccgucuccuccaccuacugcuccaccaaccacgacuacaccaucuggaugcccgagaacccccgccucggcaccuccugcgacaucuucaccaacucccgcggcaagcgcgccuccaagggcuccaagaccugcggcuucgucgacgagcgcggccucuacaagucccucaagggcgccugcaagcucaagcucugcggcguccucggccuccgccucauggacggcaccugggucgccauccagaccuccgacgagaccaaguggugcccccccgaccagcucgucaaccuccacgacuuccacuccgacgagaucgagcaccucgucgucgaggagcucgucaagaagcgcgaggagugccucgacgcccucgaguccaucaugaccaccaaguccgucuccuuccgccgccucucccaccuccgcaagcucguccccggcuucggcaaggccuacaccaucuucaacaagacccucauggaggccgacgcccacuacaaguccguccgcaccuggaacgagaucauccccuccaagggcugccuccgcgucggcggccgcugccacccccacgucaacggcgucuucuucaacggcaucauccucggccccgacggccacguccucauccccgagaugcaguccucccuccuccagcagcacauggagcuccucgaguccuccgucaucccccucaugcacccccucgccgaccccuccaccgucuucaaggacggcgacgaggccgaggacuucgucgagguccaccuccccgacguccacaagcaggucuccggcgucgaccucggccuccccuccuggggcaaguacguccucauguccgccggcauccucaccgcccucaugcucaugaucuuccucaugaccugcugccgccgcaccaaccgcgccgaguccauccagcacucccucggcgagaccggccgcaaggucuccgucaccucccaguccggccgcgucaucuccuccugggaguccuacaaguccgagggcgagaccaagcucuga

SEQ ID NO: 127079 - RNA, 1575 nt, Artificial Sequence
  derived and/or modified CDS sequence (opt2) from glycoprotein__RABV__GQ472548.1
augaucccccagguccuccucuucgucccccuccucgucuucuccuccugcuucggcaaguuccccaucuacaccauccccgacaagcucggccccuggucccccaucgacauccaccaccucuccugccccaacaaccucgucgucgaggacgagggcugcaccaaccucuccggcuucuccuacauggagcucaaggucggcuacaucuccgccaucaaggucaacggcuucaccugcaccggcgucgucaccgaggccgagaccuacaccaacuucgucggcuacgucaccaccaccuucaagcgcaagcacuuccgccccaugcccgacgccugccgcgccgccuacaacuggaagauggccggcgacccccgcuacgaggagucccuccacaaccccuaccccgacuaccacuggcuccgcaccgucaagaccaccaaggagucccucgucaucaucucccccuccgucgccgaccucgaccccuacgacaagucccuccacucccgcgucuuccccggcggcaagugcuccggcaucaccgucuccuccaccugcugcuccaccaaccacgacuacaccaucuggaugcccgagaacccccgccucggcaccuccugcgacaucuucaccaacucccgcggcaagcgcgccuccaagggcggcaagaccugcggcuucgucgacgagcgcggccucuacaagucccucaagggcgccugcaagcucaagcucugcggcguccucggccuccgccucauggacggcaccugggucgccauccagaccuccgacgagaucaaguggugcucccccgaccagcucgucaaccuccacgacuuccacuccgacgagaucgagcaccucgucgucgaggagcucgucaagaagcgcgaggagugccucgacgcccucgagaccaucaugaccaccaaguccgucuccuuccgccgccucucccaccuccgcaagcucguccccggcuucggcaaggccuacaccaucuucaacaagacccucauggaggccgacgcccacuacaaguccauccgcaccuggaacgagaucauccccuccaagggcugccuccgcgucggcggccgcugccacccccacgucaacggcgucuucuucaacggcaucauccucggccccgacggccacguccucauccccgagaugcaguccucccuccuccaccagcacauggagcuccucgaguccuccgucaucccccucaugcacccccucgccgaccccuccaccgucuucaaggacggcgacgaggccgaggacuucgucgagguccaccuccccgacguccacaagcagaucuccggcgucgaccucggccuccccaacuggggcaaguacguccucaccuccgccggcgcccucaccgcccucaugcucaugaucuuccucaugaccugcugccgcgagaccaaccgcgccgaguccauccagcgcucccccggcgagaccgagcgcaaggucuccgucaccucccacaacggccgcgucaucuccuccugggaguccuacaaguccggcggcgagaccaagcucuga

SEQ ID NO: 127080 - RNA, 1575 nt, Artificial Sequence
  derived and/or modified CDS sequence (opt2) from glycoprotein__RABV__GQ472549.1
auggucccccaggcccuccucuucgucccccuccucgccgucccccucugccucggcaaguuccccaucuacaccauccccgacaagcucggccccuggucccccaucgacauccaccaccucuccugccccaacaaccucgucgucgaggacgagggcugcaccaaccucuccggcuucuccuacauggagcucaaggucggcuacaucuccgccaucaaggucaacggcuucaccugcaccggcgucgucaccgaggccgagaccuacaccaacuucgucggcuacgucaccaccaccuucaagcgcaagcacuuccgccccacccccgacgccugccgcuccgccuacaacuggaagauggccggcgacccccgcuacgaggagucccuccacaaccccuaccccgacuaccacuggcuccgcaccgucaagaccaccaaggaguccuucgucaucaucucccccuccgucgccgaccucgaccccuacgacaagucccuccacucccgcgucuucccccgcggcaagugcuccggcaucaccgucuccuccaccuacugcuccaccaaccacgacuacaccaucuggaugcccgagaacccccgccucggcaccuccugcgacaucuucaccaacucccgcggcaagcgcgccuccaagggcuccaagaccugcggcuucgucgacgagcgcggccucuacaagucccucaagggcgccugcaagcucaagcucugcggcguccucggccuccgccucauggacggcaccugggucgccauccagaccuccgacgagaccaaguggugcccccccgaccagcucgucaaccuccacgacuuccacuccgacgagaucgagcaccucgucgucgaggagcucgucaagaagcgcgaggagugccucgacgcccucgaguccaucaugaccaccaaguccgucuccuuccgccgccucucccaccuccgcaagcucguccccggcuucggcaaggccuacaccaucuucaacaagacccucauggaggccgacgcccacuacaaguccguccgcaccuggaacgagaucauccccuccaagggcugccuccgcgucggcggccgcugccacccccacgucaacggcgucuucuucaacggcaucauccucggccccgacggccacguccucauccccgagaugcaguccucccuccuccagcagcacauggagcuccucgaguccuccgucaucccccucaugcacccccucgccgaccccuccaccgucuucaaggacggcgacgaggccgaggacuucgucgagguccaccuccccgacguccacaagcacgucuccggcgucgaccucggccuccccuccuggggcaaguacguccucgucuccgccggcauccucaccgcccucaugcucaccaucuuccucaugaccugcugccgccgcaccaaccgcgccgaguccauccagcacucccucggcgagaccggccgcaaggucuccgucaccucccaguccggccgcgucaucuccuccugggaguccuacaaguccggcggcgagaccaagcucuga

SEQ ID NO: 127081 - RNA, 1575 nt, Artificial Sequence
  derived and/or modified CDS sequence (opt2) from glycoprotein__RABV__GQ472550.1
auggucccccaggcccuccucuucgucccccuccucgccaucccccucugcuucggcaaguuccccaucuacaccauccccgacaagcucggccccuggucccccaucgacauccaccaccucuccugccccaacaaccucgucgucgaggacgagggcugcaccaaccucuccggcuucuccuacauggagcucaaggucggcuacaucuccgccaucaaggucaacggcuucaccugcaccggcgucgucaccgaggccgagaccuacaccaacuucgucggcuacgucaccaccaccuucaagcgcaagcacuuccgccccacccccgacgccugccgcuccgccuacaacuggaagauggccggcgacccccgcuacgaggagucccuccacaaccccuaccccgacuaccacuggcuccgcaccgucaagaccaccaaggaguccuucgucaucaucucccccuccgucgccgaccucgaccccuacgacaagucccuccacucccgcgucuucccccgcggcaagugcuccggcaucaccgucuccuccaccuacugcuccaccaaccacgacuacaccaucuggaugcccgagaacccccgccucggcaccuccugcgacaucuucaccaacucccgcggcaagcgcgccuccaagggcuccaagaccugcggcuucgucgacgagcgcggccucuacaagucccucaagggcgccugcaagcucaagcucugcggcguccucggccuccgccucauggacggcaccugggucgccauccagaccuccgacgagaccaaguggugcccccccgaccagcucgucaaccuccacgacuuccacuccgacgagaucgagcaccucgucgucgaggagcucgucaagaagcgcggcgagugccucgacgcccucgaguccaucaugaccaccaaguccgucuccuuccgccgccucucccaccuccgcaagcucguccccggcuucggcaaggccuacaccaucuucaacaagacccucauggaggccgacgcccacuacaaguccguccgcaccuggaacgagaucauccccuccaagggcugccuccgcgucggcggccgcugccacccccacgucaacggcgucuucuucaacggcaucauccucggccccgacggccacguccucauccccgagaugcaguccucccuccuccagcagcacauggagcuccucgaguccuccgucaucccccucaugcacccccucgccgaccccuccaccgucuucaaggacggcgacgaggccgaggacuucgucgagguccaccuccccgacguccacaagcaggucuccggcgucgaccucggccuccccuccuggggcaaguacguccucauguccgccggcauccucaccgcccucaugcucaugaucuuccucaugaccugcugccgccgcaccaaccgcgccgaguccauccagcacucccucggcgagaccggccgcaaggucuccgucaccucccaguccggccgcgucaucuccuccugggaguccuacaaguccggcggcgagaccaagcucuga

SEQ ID NO: 127082 - RNA, 1575 nt, Artificial Sequence
  derived and/or modified CDS sequence (opt2) from glycoprotein__RABV__GQ472551.1
auggucccccagguccuccucuucgucccccuccucgucuucuccuccugcuucggcaaguuccccaucuacaccauccccgacaagcucggccccuggucccccaucgacauccaccaccucuccugccccaacaaccucgucgucgaggacgagggcugcaccaaccucuccggcuucuccuacauggagcucaaggucggcuacaucuccgccaucaaggucaacggcuucaccugcaccggcgucgucaccgaggccgagaccuacaccaacuucgucggcuacgucaccaccaccuucaagcgcaagcacuuccgccccaugcccgacgccugccgcgccgccuacaacuggaagauggccggcgacccccgcuacgaggagucccuccacaaccccuaccccgacuaccacuggcuccgcaccgucaagaccaccaaggagucccucgucaucaucucccccuccgucgccgaccucgaccccuacgacaagucccuccacucccgcgucuuccccggcggcaagugcuccggcaucaccgucuccuccaccugcugcuccaccaaccacgacuacaccaucuggaugcccgagaacccccgccucggcaccuccugcgacaucuucaccaacucccgcggcaagcgcgccuccaagggcggcaagaccugcggcuucgucgacgagcgcggccucuacaagucccucaagggcgccugcaagcucaagcucugcggcguccucggccuccgccucauggacggcaccugggucgccauccagaccuccgacgagaucaaguggugcucccccgaccagcucgucaaccuccacgacuuccacuccgacgagaucgagcaccucgucgucgaggagcucgucaagaagcgcgaggagugccucgacgcccucgagaccaucaugaccaccaaguccgucuccuuccgccgccucucccaccuccgcaagcucguccccggcuucggcaaggccuacaccaucuucaacaagacccucauggaggccgacgcccacuacaaguccauccgcaccuggaacgagaucauccccuccaagggcugccuccgcgucggcggccgcugccacccccacgucaacggcgucuucuucaacggcaucauccucggccccgacggccacguccucauccccgagaugcaguccucccuccuccaccagcacauggagcuccucgaguccuccgucaucccccucaugcacccccucgccgaccccuccaccgucuucaaggacggcgacgaggccgaggacuucgucgagguccaccuccccgacguccacaagcagaucuccggcgucgaccucggccuccccaacuggggcaaguacguccucaucuccgccggcgcccucaccgcccucaugcucaugaucuuccucaugaccugcugccgcaaggccaaccgcgccgaguccaugcagcacaaccccggcgagaccggccgcaaggucuccgucaccucccacaacggccgcgucaucuccuccugggaguccuacaaguccggcggcgagaccaagcucuga

SEQ ID NO: 127083 - RNA, 1575 nt, Artificial Sequence
  derived and/or modified CDS sequence (opt2) from glycoprotein__RABV__GQ472552.1
augaucccccaggcccuccucuucgucccccuccucgucuucucccucugcuucggcaaguuccccaucuacaccauccccgacaagcucggccccuggucccccaucgacauccaccaccucuccugccccaacaaccucgucgucgaggacgagggcugcaccaaccucuccggcuucuccuacauggagcucaaggucggcuacaucuccgccaucaaggucaacggcuucaccugcaccggcgucgucaccgaggccgagaccuacaccaacuucgucggcuacgucaccaccaccuucaagcgcaagcacuuccgccccacccccgacgccugccgcgccgccuacaacuggaagauggccggcgacccccgcuacgaggagucccuccacaaccccuaccccgacuaccacuggcuccgcaccgucaagaccaccaaggagucccucgucaucaucucccccuccgucuccgaccucgaccccuacgacaagucccuccacucccgcgucuuccccuccggcaagugcuccggcaucaccgucuccuccaccuacugccccaccaaccacgacuacaccaucuggaugcccgagaacccccgccucggcaccuccugcgacaucuucaccaacucccgcggcaagcgcgccuccaagggcuccaagaccugcggcuucgucgacgagcgcggccucuacaagucccucaagggcgccugcaagcucaagcucugcggcguccucggccuccgccucauggacggcaccugggccgccauccaggccuccgacgaggccaaguggugcccccccgaccagcucgucaacauccacgacuuccgcuccgacgagaucgagcaccucgucgucgaggagcucgucaagaagcgcgaggagugccucgacgcccucgaguccaucaugaccaccaaguccgucuccuuccgccgccucucccaccuccgcaagcucguccccggcuucggcaaggccuacaccaucuucaacaagacccucauggaggccgacgcccacuacaaguccguccgcaccuggaacgagaucauccccuccaagggcugccuccgcgucggcggccgcugccacccccacgucaacggcgucuucuucaacggcaucauccucggccccgacggccacguccucauccccgagaugcaguccucccuccuccagcagcacauggagcuccucgaguccuccgucaucccccucaugcacccccucgccgaccccuccaccgucuucaaggacggcgacgaggccgaggacuucgucgagguccaccuccccgacguccacaagcaggucuccggcgucgaccucggccuccccuccuggggcaaguacguccucauguccgucggcgccaugaucgcccucaugcucaugaucuuccucaccaccugcugccgcaaggccaacggcgccgaguccauccagcaccgccucggcgagaccggccgcaaggucuccgucaccucccaguccggccgcgucaucuccuccugggaguccuacaaguccggcggcgagaccaagcucuga

SEQ ID NO: 127084 - RNA, 1575 nt, Artificial Sequence; identical to SEQ ID NO: 127079
  derived and/or modified CDS sequence (opt2) from glycoprotein__RABV__GQ472553.1

SEQ ID NO: 127085 - RNA, 1575 nt, Artificial Sequence; identical to SEQ ID NO: 126563
  derived and/or modified CDS sequence (opt2) from glycoprotein__RABV__GQ472554.1

SEQ ID NO: 127086 - RNA, 1575 nt, Artificial Sequence
  derived and/or modified CDS sequence (opt2) from glycoprotein__RABV__GQ472555.1
auggucccccagguccuccucuucgucccccuccucgucuucuccuccugcuucggcaaguuccccaucuacaccauccccgacaagcucggccccuggucccccaucgacauccaccaccucuccugccccaacaaccucgucgucgaggacgagggcugcaccaaccucuccggcuucuccuacauggagcucaaggucggcuacaucuccgccaucaaggucaacggcuucaccugcaccggcgucgucaccgaggccgagaccuacaccaacuucgucggcuacgucaccaccaccuucaagcgcaagcacuuccgccccaugcccgacgccugccgcgccgccuacaacuggaagauggccggcgacccccgcuacgaggagucccuccacaaccccuaccccgacuaccacuggcuccgcaccgucaagaccaccaaggagucccucgucaucaucucccccuccgucgccgaccucgaccccuacgacaagucccuccacucccgcgucuuccccggcggcaagugcuccggcaucaccgucuccuccaccugcugcuccaccaaccacgacuacacccucuggaugcccgagaacccccgccucggcaccuccugcgacaucuucaccaacucccgcggcaagcgcgccuccaagggcggcaagaccugcggcuucgucgacgagcgcggccucuacaagucccucaagggcgccugcaagcucaagcucugcggcguccucggccuccgccucauggacggcaccugggucgccauccagaccuccgacgagaucaaguggugcccccccgaccagcucgucaaccuccacgacuuccacuccgacgagaucgagcaccucgucgucgaggagcucgucaagaagcgcgaggagugccucgacgcccucgagaccaucaugaccaccaaguccgucuccuuccgccgccucucccaccuccgcaagcucguccccggcuucggcaaggccuacaccaucuucaacaagacccucauggaggccgacgcccacuacaaguccauccgcaccuggaacgagaucauccccuccaagggcugccuccgcgucggcggccgcugccacccccacgucaacggcgucuucuucaacggcaucauccucggccccgacggccacguccucauccccgagaugcaguccucccuccuccaccagcacauggagcuccucgaguccuccgucaucccccucaugcacccccucgccgaccccuccaccgucuucaaggacggcgacgaggccgaggacuucgucgagguccaccuccccgacgagcacaagcagaucuccggcgucgaccucggccuccccaacuggcgcaaguacguccucaucuccgccggcgcccucaccgcccucaugcucaugaucuuccucaugaccugcugccgcaaggccaaccgcgccgaguccauccagcacaaccccggcgagaccggccgcaaggucuccgucaccucccccaacggccgcgucaucuccuccugggaguccuacaaguccggcggcgagaccaagcucuga

SEQ ID NO: 127087 - RNA, 1575 nt, Artificial Sequence
  derived and/or modified CDS sequence (opt2) from glycoprotein__RABV__GQ472556.1
auggucccccagguccuccucuucgucccccuccucgucuucuccuccugcuucggcaaguuccccaucuacaccauccccgacaagcucggccccuggucccccaucgacauccaccaccucuccugccccaacaaccucgucgucgaggacgagggcugcaccaaccucuccggcuucuccuacauggagcucaaggucggcuacaucuccgccaucaaggucaacggcuucaccugcaccggcgucgucaccgaggccgagaccuacaccaacuucgucggcuacgucaccaccaccuucaagcgcaagcacuuccgccccaugcccgacgccugccgcaccgccuacaacuggaagauggccggcgacccccgcuacgaggagucccuccacaaccccuaccccgacuaccacuggcuccgcaccgucaagaccaccaaggagucccucgucaucaucucccccuccgucgccgaccucgaccccuacgacaagucccuccacucccgcgucuuccccggcggcaagugcuccggcaucaccgucuccuccaccugcugcuccaccaaccacgacuacaccaucuggaugcccgagaacccccgccucggcaccuccugcgacaucuucaccaacucccgcggcaagcgcgccuccaagggcggcaagaccugcggcuucgucgacgagcgcggcuccuacaagucccucaagggcgccugcaagcucaagcucugcggcguccucggccuccgccucauggacggcaccugggucgccauccagaccuccgacgagaucaaguggugcucccccgaccagcucgucaaccuccacgacuuccacuccgacgagaucgagcaccucgucgucgaggagcucgucaagaagcgcgaggagugccucgacgcccucgagaccaucaugaccaccaaguccgucuccuuccgccgccucucccaccuccgcaagcucguccccggcuucggcaaggccuacaccaucuucaacaagacccucauggaggccgacgcccacuacaaguccauccgcaccuggaacgagaucauccccuccaagggcugccuccgcgucggcggccgcugccacccccacgucaacggcgucuucuucaacggcaucauccucggccccgacggccacguccucauccccgagaugcaguccucccuccuccaccagcacauggagcuccucgaguccuccgucaucccccucaugcacccccucgccgaccccuccaccgucuucaaggacggcgacgaggccgaggacuucgucgagguccaccuccccgacguccacaagcagaucuccggcgucgaccucggccuccccaacuggggcaagcacguccucaucuccgccggcgcccucaccgcccucaugcucaugaucuuccucaugaccugcugccgcaaggccaaccgcgccgaguccauccagcacaaccccggcgagaccggccgcaaggucuccgucaccucccacaacggccgcgucaucuccuccugggaguccuacaaguccggcggcgagaccaagcucuga

SEQ ID NO: 127088 - RNA, 1575 nt, Artificial Sequence; identical to SEQ ID NO: 126563
  derived and/or modified CDS sequence (opt2) from glycoprotein__RABV__GQ472557.1

SEQ ID NO: 127089 - RNA, 1575 nt, Artificial Sequence
  derived and/or modified CDS sequence (opt2) from glycoprotein__RABV__GQ472558.1
auggccccccaggcccuccucuucgucccccuccucgccgucccccucugccucggcaaguuccccaucuacaccauccccgacaagcucggccccuggucccccaucgacauccaccaccucuccugccccaacaaccucgucgucgaggacgagggcugcaccaaccucuccggcuucuccuacauggagcucaaggucggcuacaucuccgccaucaaggucaacggcuucaccugcaccggcgucgucaccgaggccgagaccuacaccaacuucgucggcuacgucaccaccaccuucaagcgcaagcacuuccgccccacccccgacgccugccgcuccgccuacaacuggaagauggccggcgacccccgcuacgaggagucccuccacaaccccuaccccgacuaccacuggcuccgcaccgucaagaccaccaaggaguccuucgucaucaucucccccuccgucgccgaccucgaccccuacgacaagucccuccacucccgcgucuucccccgcggcaagugcuccggcaucaccgucuccuccaccuacugcuccaccaaccacgacuacaccaucuggaugcccgagaacccccgccucggcaccuccugcgacaucuucaccaacucccgcggcaagcgcgccuccaagggcuccaagaccugcggcuucgucgacgagcgcggccucuacaagucccucaagggcgccugcaagcucaagcucugcggcguccucggccuccgccucauggacggcaccugggucgccauccagaccuccgacgagaccaaguggugcccccccgaccagcucgucaaccuccacgacuuccacuccgacgagaucgagcaccucgucgucgaggagcucgucaagaagcgcgaggagugccucgacgcccucgaguccaucaugaccaccaaguccgucuccuuccgccgccucucccaccuccgcaagcucguccccggcuucggcaaggccuacaccaucuucaacaagacccucauggaggccgacgcccacuacaaguccguccgcaccuggaacgagaucauccccuccaagggcugccuccgcgucggcggccgcugccacccccacgucaacggcgucuucuucaacggcaucauccucggccccgacggccacguccucauccccgagaugcaguccucccuccuccagcagcacauggagcuccucgaguccuccgucaucccccucaugcacccccucgccgaccccuccaccgucuucaaggacggcgacgaggccgaggacuucgucgagguccaccuccccgacguccacaagcaggucuccggcgucgaccucggccuccccuccuggggcaaguacguccucauguccgccggcauccucaccgcccucaugcucaccaucuuccucaugaccugcugccgccgcaccaaccgcgccgaguccauccagcacucccucggcgagaccggccgcaaggucuccgucaccucccaguccggccgcgucaucuccuccugggaguccuacaaguccggcggcgagaccaagcucuga

SEQ ID NO: 127090 - RNA, 1575 nt, Artificial Sequence
  derived and/or modified CDS sequence (opt2) from glycoprotein__RABV__GQ472559.1
auggccucccaggcccuccucuucgucccccuccucgccaucccccucugcuucggcaaguuccccaucuacaccauccccgacaagcucggccccuggucccccaucgacauccaccaccucuccugccccaacaaccucgucgucgaggacgagggcugcaccaaccucuccggcuucuccuacauggagcucaaggucggcuacaucuccgccaucaaggucaacggcuucaccugcaccggcgucgucaccgaggccgagaccuacaccaacuucgucggcuacgucaccaccaccuucaagcgcaagcacuuccgccccacccccgacgccugccgcuccgccuacaacuggaagauggccggcgacccccgcuacgaggagucccuccacaaccccuaccccgacuaccacuggcuccgcaccgucaagaccaccaaggagucccucgucaucaucucccccuccgucgccgaccucgaccccuacgacaagucccuccacucccgcgucuucccccgcggcaagugcuccggcaucaccgucuccuccaccuacugcuccaccaaccacgacuacaccaucuggaugcccgagaacccccgccucggcaccuccugcgacaucuucaccaacucccgcggcaagcgcgccuccaagggcuccaagaccugcggcuucgucgacgagcgcggccucuacaagucccucaagggcgccugcaagcucaagcucugcggcguccucggccuccgccucauggacggcaccugggucgccauccagaccuccgacgagaccaaguggugcccccccgaccagcucgucaaccuccacgacuuccacuccgacgagaucgagcaccucgucgucgaggagcucgucaagaagcgcgaggagugccucgacgcccucgaguccaucaugaccaccaaguccgucuccuuccgccgccucucccaccuccgcaagcucguccccggcuucggcaaggccuacaccaucuucaacaagacccucauggaggccgacgcccacuacaaguccguccgcaccuggaacgagaucauccccuccaagggcugccuccgcgucggcggccgcugccacccccacgucaacggcgucuucuucaacggcaucauccucggccccgacggccacguccucauccccgagaugcaguccucccuccuccagcagcacauggagcuccucgaguccuccgucaucccccucaugcacccccucgccgaccccuccaccgucuucaaggacggcgacgaggccgaggacuucgucgagguccaccuccccgacguccacaagcaggucuccggcgucgaccucggccuccccuccuggggcaaguacguccucauguccgccggcauccucaccgcccucaugcucaugaucuuccucaugaccugcugccgccgcaccaaccgcgccgaguccauccagcacucccucggcgagaccggccgcaaggucuccgucaccucccaguccggccgcgucaucuccuccugggaguccuacaaguccggcggcgagaccaagcucuga

SEQ ID NO: 127091 - RNA, 1575 nt, Artificial Sequence
  derived and/or modified CDS sequence (opt2) from glycoprotein__RABV__GQ472560.1
auggucccccagguccuccucuucgucccccuccucgucuucuccuccugcuucggcaaguuccccaucuacaccauccccgacaagcucggccccuggucccccaucgacauccaccaccucuccugccccaacaaccucgucgucgaggacgagggcugcaccaaccucuccggcuucuccuacauggagcucaaggucggcuacaucuccgccaucaaggucaacggcuucaccugcaccggcgucgucaccgaggccgagaccuacaccaacuucgucggcuacgucaccaccaccuucaagcgcaagcacuuccgccccacccccgacgccugccgcgccgccuacaacuggaagauggccggcgacccccgcuacgaggagucccuccacaaccccuaccccgacuaccacuggcuccgcaccgucaagaccaccaaggagucccucgucaucaucucccccuccgucgccgaccucgaccccuacgacaagucccuccacuccggcgucuuccccggcggcaagugcuccggcaucaccgucuccuccaccugcugcuccaccaaccacgacuacaccaucuggaugcccgagaacccccgccucggcaccuccugcgacaucuucaccaacucccgcggcaagcgcgccuccaagggcggcaagaccugcggcuucgucgacgagcgcggccucuacaagucccucaagggcgccugcaagcucaagcucugcggcguccucggccuccgccucauggacggcaccugggucgccauccagaccuccgacgagaucaaguggugcucccccgaccagcucgucaaccuccacgacuuccacuccgacgagaucgagcaccucgucgucgaggagcucgucaagaagcgcaaggagugccucgacgcccucgagaccaucaugaccaccaaguccgucuccuuccgccgccucucccaccuccgcaagcucguccccggcuucggcaaggccuacaccaucuucaacaagacccucauggaggccgacgcccacuacaaguccauccgcaccuggaacgagaucauccccuccaagggcugccuccgcgucggcggccgcugccacccccacgucaacggcgucuucuucaacggcaucauccucggccccgacggccacguccucauccccgagaugcaguccucccuccuccaccagcacauggagcuccucgaguccuccgucaucccccucaugcacccccucgccgaccccuccaccgucuucaaggacggcgacgaggccgaggacuucgucgagguccaccuccccgacguccacaagcagaucuccggcgucgaccucggccuccccaacuggggcaaguacguccucaucuccgccggcgcccucaccgcccucaugcucaugaucuuccucaugaccuucugccgcaaggccaaccgcgccgaguccauccagcacaaccccggcgagaccggccgcaaggucuccgucaccucccacaacggccgcgucaucuccuccugggaguccuacaaguccggcggcgagaccaagcucuga

SEQ ID NO: 127092 - RNA, 1575 nt, Artificial Sequence; identical to SEQ ID NO: 126863
  derived and/or modified CDS sequence (opt2) from glycoprotein__RABV__GQ857450.1

SEQ ID NO: 127093 - RNA, 1575 nt, Artificial Sequence
  derived and/or modified CDS sequence (opt2) from glycoprotein__RABV__GQ857451.1
augaucccccagguccuccucuucgucccccuccucgucuucuccuccugcuucggcaaguuccccaucuacaccauccccgacaagcucggccccuggucccccaucgacauccaccaccucuccugccccaacaaccucgucgucgaggacgagggcugcaccaaccucuccggcuucuccuacauggagcucaaggucggcuacaucuccgccaucaaggucaacggcuucaccugcaccggcgucgucaccgaggccgagaccuacaccaacuucgucggcuacgucaccaccaccuucaagcgcaagcacuuccgccccacccccgacgccugccgcgccgccuacaacuggaagauggccggcgacccccgcuacgaggagucccuccacaaccccuaccccgacuaccacuggcuccgcaccgucaagaccuccaaggagucccucgucaucaucucccccuccgucgccgaccucgaccccuacgacaagucccuccacucccgcgucuuccccggcggcaagugcuccggcaucaccgucuccuccaccugcugcuccaccaaccacgacuacaccaucuggaugcccgagaacccccgccuccgcaccuccugcgacaucuucaccaacucccgcggcaagcgcgccuccaagggcggcaagaccugcggcuucgucgacgagcgcggccucuacaagucccucaagggcgccugcaagcucaagcucugcggcguccucggccuccgccucauggacggcaccugggucgccauccagaccuccgacgagaucaaguggugcucccccgaccagcucgucaaccuccacgacuuccacuccgacgagaucgagcaccucgucgucgaggagcucgucaagaagcgcgaggagugccucgacgcccucgagaccaucaugaccaccaaguccgucuccuuccgccgccucucccaccuccgcaagcucguccccggcuucggcaaggccuacaccaucuucaacaagacccucauggaggccgacgcccacuacaaguccauccgcaccuggaacgagaucauccccuccaagggcugccuccgcgucggcggccgcugccacccccacgucaacggcgucuucuucaacggcaucauccucggccccgacggccacguccucauccccgagaugcaguccucccuccuccaccagcacauggagcuccucgaguccuccgucaucccccucaugcacccccucgccgaccccuccaccgucuucaaggacggcgacgaggccgaggacuucgucgagguccaccuccccgacguccacaagcagaucuccggcgucgaccucggccuccccaacuggggcaaguacguccucgucuccgccggcgcccucaccgcccucaugcucaugaucuuccucaugaccugcugccgcaagaccaaccgcgccgaguccauccagcacucccccggcgagaccggccgcaaggucuccgucaccucccacaacggccgcgucaucuccuccugggaguccuacaagucccgcggcgagaccaagcucuga

SEQ ID NO: 127094 - RNA, 1575 nt, Artificial Sequence; identical to SEQ ID NO: 126863
  derived and/or modified CDS sequence (opt2) from glycoprotein__RABV__GQ857452.1

SEQ ID NO: 127095 - RNA, 1575 nt, Artificial Sequence
  derived and/or modified CDS sequence (opt2) from glycoprotein__RABV__GQ857453.1
augaucccccagguccuccucuucgucccccuccucgucuucuccuccugcuucggcaaguuccccaucuacaccauccccgacaagcucggccccuggucccccaucgacauccaccaccucuccugccccaacaaccucgucgucgaggacgagggcugcaccaaccucuccggcuucuccuacauggagcucaaggucggcuacaucuccgccaucaaggucaacggcuucaccugcaccggcgucgucaccgaggccgagaccuacaccaacuucgucggcuacgucaccaccaccuucaagcgcaagcacuuccgccccacccccgacgccugccgcgccgccuacaacuggaagauggccggcgacccccgcuacgaggagucccuccacaaccccuaccccgacuaccacuggcuccgcaccgucaagaccuccaaggagucccucgucaucaucucccccuccgucgccgaccucgaccccuacgacaagucccuccacucccgcgucuuccccggcggcaagugcuccggcaucaccgucuccuccaccugcugcuccaccaaccacgacuacaccaucuggaugcccgagaacccccgccucggcaccuccugcgacaucuucaccaacucccgcggcaagcgcgccuccaagggcggcaagaccugcggcuucgucgacgagcgcggccucuacaagucccucaagggcgccugcaagcucaagcucugcggcguccucggccuccgccucauggacggcaccugggucgccauccagaccuccgacgagaucaaguggugcucccccgaccagcucgucaaccuccacgacuuccacuccgacgagaucgagcaccucgucgucgaggagcucgucaagaagcgcgaggagugccucgacgcccucgagaccaucaugaccaccaaguccgucuccuuccgccgccucucccaccuccgcaagcucguccccggcuucggcaaggccuacaccaucuucaacaagacccucauggaggccgacgcccacuacaaguccauccgcaccuggaacgagaucauccccuccaagggcugccuccgcgucggcggccgcugccacccccacgucaacggcgucuucuucaacggcaucauccucggccccgacggccacguccucauccccgagaugcaguccucccuccuccaccagcacauggagcuccucgaguccuccgucaucccccucaugcacccccucgccgaccccuccaccgucuucaaggacggcgacgaggccgaggacuucgucgagguccaccuccccgacguccacaagcagaucuccggcgucgaccucggccuccccaacuggggcaaguacguccucgucuccgccggcgcccucaccgcccucaugcucaugaucuuccucaugaccugcugccgcaagaccaaccgcgucgaguccauccagcacucccccggcgagaccggccgcaaggucuccgucaccucccacaacggccgcgucaucuccuccugggaguccuacaaguccggcggcgagaccaagcucuga

SEQ ID NO: 127096 - RNA, 1575 nt, Artificial Sequence; identical to SEQ ID NO: 126863
  derived and/or modified CDS sequence (opt2) from glycoprotein__RABV__GQ857454.1

SEQ ID NO: 127097 - RNA, 1575 nt, Artificial Sequence
  derived and/or modified CDS sequence (opt2) from glycoprotein__RABV__GQ857455.1
augaucccccagguccuccucuucgucccccuccucgucuucuccuccugcuucggcaaguuccccaucuacaccauccccgacaagcucggccccuggucccccaucgacauccaccaccucuccugccccaacaaccucgucgucgaggacgagggcugcaccaaccucuccggcuucuccuacauggagcucaaggucggcuacaucuccgccaucaaggucaacggcuucaccugcaccggcgucgucaccgaggccgagaccuacaccaacuucgucggcuacgucaccaccaccuucaagcgcaagcacuuccgccccacccccgacgccugccgcgccgccuacaacuggaagauggccggcgacccccgcuacgaggagucccuccacaaccccuaccccgacuaccacuggcuccgcaccgucaagaccuccaaggagucccucgucaucaucucccccuccgucgccgaccucgaccccuacgacaagucccuccacucccgcgucuuccccggcggcaagugcuccggcaucaccgucuccuccaccugcugcuccaccaaccacgacuacaccaucuggaugcccgagaacccccgccucggcaccuccugcgacaucuucaccaacucccgcggcaagcgcgccuccaagggcggcaagaccugcggcuucgucgacgagcgcggccucuacaagucccucaagggcgccugcaagcucaagcucugcggcguccucggccuccgccucauggacggcaccugggucgccauccagaccuccgacgagaucaaguggugcucccccgaccagcucgucaaccuccacgacuuccacuccgacgagaucgagcaccucgucgucgaggagcucgucaagaagcgcgaggagugccucgacgcccucgagaccaucaugaccaccaaguccgucuccuuccgccgccucucccaccuccgcaagcucguccccggcuucggcaaggccuacaccaucuucaacaagacccucauggaggccgacgcccacuacaaguccauccgcaccuggaacgagaucauccccuccaagggcugccuccgcgucggcggccgcugccacccccacgucaacggcgucuucuucaacggcaucauccucggccccgacggccacguccucauccccgagaugcaguccucccuccuccaccagcacauggagcuccucgaguccuccgucaucccccucaugcacccccucgccgaccccuccaccgucuucaaggacggcgacgaggccgaggacuucgucgagguccaccuccccgacguccacaagcagaucuccggcgucgaccucggccuccccaacuggggcaaguacguccucgucuccgccggcgcccucaccgcccucguccucaugaucuuccucaugaccugcugccgcaagaccaaccgcgccgaguccauccagcacucccccggcgagaccggccgcaaggucuccgucaccucccacaacggccgcgucaucuccuccugggaguccuacaaguccggcggcgagaccaagcucuga

SEQ ID NO: 127098 - RNA, 1575 nt, Artificial Sequence; identical to SEQ ID NO: 126863
  derived and/or modified CDS sequence (opt2) from glycoprotein__RABV__GQ857459.1

SEQ ID NO: 127099 - RNA, 1575 nt, Artificial Sequence; identical to SEQ ID NO: 126863
  derived and/or modified CDS sequence (opt2) from glycoprotein__RABV__GQ857460.1

SEQ ID NO: 127100 - RNA, 1575 nt, Artificial Sequence
  derived and/or modified CDS sequence (opt2) from glycoprotein__RABV__GQ857461.1
augaucccccagguccuccucuucgucccccuccucgucuucuccuccugcuucggcaaguuccccaucuacaccauccccgacaagcucggccccuggucccccaucgacauccaccaccucuccugccccaacaaccucgucgucgaggacgagggcugcaccaaccucuccggcuucuccuacauggagcucaaggucggcuacaucuccgccaucaaggucaacggcuucaccugcaccggcgucgucaccgaggccgagaccuacaccaacuucgucggcuacgucaccaccaccuucaagcgcaagcacuuccgccccacccccgacgccugccgcgccgccuacaacuggaagauggccggcgacccccgcuacgaggagucccuccacaaccccuaccccgacuaccacuggcuccgcaccgucaagaccuccaaggagucccucgucaucaucucccccuccgucgccgaccucgaccccuacgacaagucccuccacucccgcgucuuccccggcggcaagugcuccggcaucaccgucuccuccaccugcugcuccaccaaccacgacuacaccaucuggaugcccgagaacccccgccucggcaccuccugcgacaucuucaccaacucccgcggcaagcgcgccuccaagggcggcaagaccugcggcuucgucgacgagcgcggccucuacaagucccucaagggcgccugcaagcucaagcucugcggcguccucggccuccgccucauggacggcaccugggucgccauccagaccuccgacgagaucaaguggugcucccccgaccagcucgucaaccuccacgacuuccacuccgacgagaucgagcaccucgucgucgaggagcucgucaagaagcgcgaggagugccucgacgcccucgaggccaucaugaccaccaaguccgucuccuuccgccgccucucccaccuccgcaagcucguccccggcuucggcaaggccuacaccaucuucaacaagacccucauggaggccgacgcccacuacaaguccauccgcaccuggaacgagaucauccccuccaagggcugccuccgcgucggcggccgcugccacccccacgucaacggcgucuucuucaacggcaucauccucggccccgacggccacguccucauccccgagaugcaguccucccuccuccaccagcacauggagcuccucgaguccuccgucaucccccucaugcacccccucgccgaccccuccaccgucuucaaggacggcgacgaggccgaggacuucgucgagguccaccuccccgacguccacaagcagaucuccggcgucgaccucggccuccccaacuggggcaaguacguccucgucuccgccggcgcccucaccgcccucaugcucaugaucuuccucaugaccugcugccgcaagaccaaccgcgccgaguccauccagcacucccccggcgagaccggccgcaaggucuccgucaccucccacaacggccgcgucaucuccuccugggaguccuacaaguccggcggcgagaccaagcucuga

SEQ ID NO: 127101 - RNA, 1575 nt, Artificial Sequence; identical to SEQ ID NO: 126863
  derived and/or modified CDS sequence (opt2) from glycoprotein__RABV__GQ857463.1

SEQ ID NO: 127102 - RNA, 1575 nt, Artificial Sequence; identical to SEQ ID NO: 126863
  derived and/or modified CDS sequence (opt2) from glycoprotein__RABV__GQ857464.1

SEQ ID NO: 127103 - RNA, 1575 nt, Artificial Sequence
  derived and/or modified CDS sequence (opt2) from glycoprotein__RABV__GQ857465.1
augaucccccagguccuccucuucgucccccuccucgucuucuccuccugcuucggcaaguuccccaucuacaccauccccgacaagcucggccccuggucccccaucgacauccaccaccucuccugccccaacaaccucgucgucgaggacgagggcugcaccaaccucuccggcuucuccuacauggagcucaaggucggcuacaucuccgccaucaaggucaacggcuucaccugcaccggcgucgucaccgaggccgagaccuacaccaacuucgucggcuacgucaccaccaccuucaagcgcaagcacuuccgccccaugcccgacgccugccgcgccgccuacaacuggaagauggccggcgacccccgcuacgaggagucccuccacaaccccuaccccgacuaccacuggcuccgcaccgucaagaccaccaaggagucccucgucaucaucucccccuccgucgccgaccucgaccccuacgacaagucccuccacucccgcgucuuccccggcggcaagugcuccggcaucaccgucuccuccaccugcugcuccaccaaccacgacuacaccaucuggaugcccgagaacccccgccucggcaccuccugcgacaucuucaccaacucccgcggcaagcgcgccuccaagggcggcaagaccugcggcuucgucgacgagcgcggccucuacaagucccuccgcggcgccugcaagcucaagcucugcggcguccucggccuccgccucauggacggcaccugggucgccauccagaccuccgacgagaucaaguggugcucccccgaccagcucgucaaccuccacgacuuccacuccgacgagaucgagcaccucgucgucgaggagcucgucaagaagcgcgaggagugccucgacgcccucgagaccaucaugaccaccaaguccgucuccuuccgccgccucucccaccuccgcaagcucguccccggcuucggcaaggccuacaccaucuucaacaagacccucauggaggccgacgcccacuacaaguccauccgcaccuggaacgagaucauccccuccaagggcugccuccgcgucggcggccgcugccacccccacgucaacggcgucuucuucaacggcaucauccucggccccgacggccacguccucauccccgagaugcaguccucccuccuccaccagcacauggagcuccucgaguccuccgucaucccccucaugcacccccucgccgaccccuccaccgucuucaaggacggcgacgaggccgaggacuucgucgagguccaccuccccgacguccacaagcagaucuccggcgucgaccucggccuccccaacuggggcaaguacguccucaucuccgccggcgcccucaccgcccucaugcucaccaucuuccucaugaccugcugccgcaagaccaaccgcgccgaguccauccagcacucccccggcgagaccggccgcaaggucuccgucaccucccacaacggccgcgucaucuccuccugggaguccuacaaguccggcuccgagaccaagcucuga

SEQ ID NO: 127104 - RNA, 1575 nt, Artificial Sequence
  derived and/or modified CDS sequence (opt2) from glycoprotein__RABV__GQ857466.1
augaucccccagguccuccucuucgucccccuccucgucuucuccuccugcuucggcaaguuccccaucuacaccauccccgacaagcucggccccuggucccccaucgacauccaccaccucuccugccccaacaaccucgucgucgaggacgagggcugcaccaaccucuccggcuucuccuacauggagcucaaggucggcuacaucuccgccaucaaggucaacggcuucaccugcaccggcgucgucaccgaggccgagaccuacaccaacuucgucggcuacgucaccaccaccuucaagcgcaagcacuuccgccccaugcccgacgccugccgcgccgccuacaacuggaagauggccggcgacccccgcuacgaggagucccuccacaaccccuaccccgacuaccacuggcuccgcaccgucaagaccaccaaggagucccucgucaucaucucccccuccgucgccgaccucgaccccuacgacaagucccuccacucccgcgucuuccccggcggcaagugcuccggcaucaccgucuccuccaccugcugcuccaccaaccacgacuacaccaucuggaugcccgagaacccccgccucggcaccuccugcgacaucuucaccaacucccgcggcaagcgcgccuccaacggcggcaagaccugcggcuucgucgacgagcgcggccucuacaagucccucaagggcgccugcaagcucaagcucugcggcguccucggccuccgccucauggacggcaccugggucgccauccagaccuccgacgagaucaaguggugcucccccgaccagcucgucaaccuccacgacuuccacuccgacgagaucgagcaccucgucgucgaggagcucgucaagaagcgcgaggagugccucgacgcccucgagaccaucaugaccaccaaguccgucuccuuccgccgccucucccaccuccgcaagcucguccccggcuucggcaaggccuacaccaucuucaacaagacccucauggaggccgacgcccacuacaaguccauccgcaccuggaacgagaucauccccuccaagggcugccuccgcgucggcggccgcugccacccccacgucaacggcgucuucuucaacggcaucauccucggccccgacggccacguccucauccccgagaugcaguccucccuccuccaccagcacauggagcuccucgaguccuccgucaucccccucaugcacccccucgccgaccccuccaccgucuucaaggacggcgacgaggccgaggacuucgucgagguccaccuccccgacguccacaagcagaucuccggcaucgaccucggccuccccaacuggggcaaguacguccucaucuccgccggcgcccucaccgcccucaugcucaccaucuuccucaugaccugcugccgcaagaccaaccgcgccgaguccauccagcacucccccggcgagaccggccgcaaggucuccgucaccucccacaacggccgcgucaucuccuccugggaguccuacaaguccggcuccgagaccaagcucuga

SEQ ID NO: 127105 - RNA, 1575 nt, Artificial Sequence
  derived and/or modified CDS sequence (opt2) from glycoprotein__RABV__GQ857467.1
augaucccccagguccuccucuucgucccccuccucgucuucuccuccugcuucggcaaguuccccaucuacaccauccccgacaagcucggccccuggucccccaucgacauccaccaccucuccugccccaacaaccucgucgucgaggacgagggcugcaccaaccucuccggcuucuccuacauggagcucaaggucggcuacaucuccgccaucaaggucaacggcuucaccugcaccggcgucgucaccgaggccgagaccuacaccaacuucgucggcuacgucaccaccaccuucaagcgcaagcacuuccgccccaugcccgacgccugccgcgccgccuacaacuggaagauggccggcgacccccgcuacgaggagucccuccacaaccccuaccccgacuaccacuggcuccgcaccgucaagaccaccaaggagucccucgucaucaucucccccuccgucgccgaccucgaccccuacgacaagucccuccacucccgcgucuuccccggcggcaagugcuccggcaucaccgucuccuccaccugcugcuccaccaaccacgacuacaccaucuggaugcccgagaacccccgccucggcaccuccugcgacaucuucaccaacucccgcggcaagcgcgccuccaaguggggcaagaccugcggcuucgucgacgagcgcggccucuacaagucccucaagggcgccugcaagcucaagcucugcggcguccucggccuccgccucauggacggcaccugggucgccauccagaccuccgacgagaucaaguggugcucccccgaccagcucgucaaccuccacgacuuccacuccgacgagaucgagcaccucgucgucgaggagcucgucaagaagcgcgaggagugccucgacgcccucgagaccaucaugaccaccaaguccgucuccuuccgccgccucucccaccuccgcaagcucguccccggcuucggcaaggccuacaccaucuucaacaagacccucauggaggccgacgcccacuacaaguccauccgcaccuggaacgagaucauccccuccaagggcugccuccgcgucggcggccgcugccacccccacgucaacggcgucuucuucaacggcaucauccucggccccgacggccacguccucauccccgagaugcaguccucccuccuccaccagcacauggagcuccucgaguccuccgucaucccccucaugcacccccucgccgaccccuccaccgucuucaaggacggcgacgaggccgaggacuucgucgagguccaccuccccgacguccacaagcagaucuccggcgucgaccucggccuccccaacuggggcaaguacguccucaucuccgccggcgcccucaccgcccucaugcucaccaucuuccucaugaccugcugccgcaagaccaaccgcgccgaguccauccagcacucccccggcgagaccggccgcaaggucuccgucaccucccacaacggccgcgucaucuccuccugggaguccuacaaguccggcuccgagaccaagcucuga

SEQ ID NO: 127106 - RNA, 1575 nt, Artificial Sequence
  derived and/or modified CDS sequence (opt2) from glycoprotein__RABV__GQ857470.1
augaucccccagguccuccucuucgucccccuccucgucuucuccuccugcuucggcaaguuccccaucuacaccauccccgacaagcucggccccuggucccccaucgacauccaccaccucuccugccccaacaaccucgucgucgaggacgagggcugcaccaaccucuccggcuucuccuacauggagcucaaggucggcuacaucuccgccaucaaggucaacggcuucaccugcaccggcgucgucaccgaggccgagaccuacaccaacuucgucggcuacgucaccaccaccuucaagcgcaagcacuuccgccccaugcccgacgccugccgcgccgccuacaacuggaagauggccggcgacccccgcuacgaggagucccuccacaaccccuaccccgacuaccacuggcuccgcaccgucaagaccaccaaggagucccucgucaucaucucccccuccgucgccgaccucgaccccuacgacaagucccuccacucccgcgucuuccccggcggcaagugcuccggcaucaccgucuccuccaccugcugcuccaccaaccacgacuacaccaucuggaugcccgagaacccccgccucggcaccuccugcgacaucuucaccaacucccgcggcaagcgcgccuccaagggcggcaagaccugcggcuucgucgacgagcgcggccucuacaagucccucaagggcgccugcaagaugaagcucugcggcguccucggccuccgccucauggacggcaccugggucgccauccagaccuccgacgagaucaaguggugcucccccgaccagcucgucaaccuccacgacuuccacuccgacgagaucgagcaccucgucgucgaggagcucgucaagaagcgcgaggagugccucgacgcccucgagaccaucaugaccaccaaguccgucuccuuccgccgccucucccaccuccgcaagcucguccccggcuucggcaaggccuacaccaucuucaacaagacccucauggaggccgacgcccacuacaaguccauccgcaccuggaacgagaucauccccuccaagggcugccuccgcgucggcggccgcugccacccccacgucaacggcgucuucuucaacggcaucauccucggccccgacggccacguccucauccccgagaugcaguccucccuccuccaccagcacauggagcuccucgaguccuccgucaucccccucaugcacccccucgccgaccccuccaccgucuucaaggacggcgacgaggccgaggacuucgucgagguccaccuccccgacguccacaagcagaucuccggcgucgaccucggccuccccaacuggggcaaguacguccucaucuccgccggcgcccucaccgcccucaugcucaccaucuuccucaugaccugcugccgcaagaccaacaaggccgaguccauccagcacucccccggcgagaccggccgcaaggucuccgucaccucccacaacggccgcgucaucuccuccugggaguccuacaaguccggcuccgagaccaagcucuga

SEQ ID NO: 127107 - RNA, 1575 nt, Artificial Sequence
  derived and/or modified CDS sequence (opt2) from glycoprotein__RABV__GQ857471.1
augaucccccagguccuccucuucgucccccuccucgucuucuccuccugcuucggcaaguuccccaucuacaccauccccgacaagcucggccccuggucccccaucgacauccaccaccucuccugccccaacaaccucgucgucgaggacgagggcugcaccaaccucuccggcuucuccuacauggagcucaaggucggcuacaucuccgccaucaaggucaacggcuucaccugcaccggcgucgucaccgaggccgagaccuacaccaacuucgucggcuacgucaccaccaccuucaagcgcaagcacuuccgccccaugcccgacgccugccgcgccgccuacaacuggaagauggccggcgacccccgcuacgaggagucccuccacaaccccuaccccgacuaccacuggcuccgcaccgucaagaccuccaaggagucccucgucaucaucucccccuccgucgccgaccucgaccccuacgacaagucccuccacucccgcgucuuccccggcggcaagugcuccggcaucaccgucuccuccaccugcugcuccaccaaccacgacuacaccaucuggaugcccgagaacccccgccucggcaccuccugcgacaucuucaccaacucccgcggcaagcgcgccuccaagggcggcaagaccugcggcuucgucgacgagcgcggccucuacaagucccucaagggcgccugcaagcucaagcucugcggcguccucggccuccgccucauggacggcaccugggucgccauccagaccuccgacgagaucaaguggugcucccccgaccagcucgucaaccuccacgacuuccacuccgacgagaucgagcaccucgucgucgaggagcucgucaagaagcgcgaggagugccucgacgcccucgagaccaucaugaccaccaaguccgucuccuuccgccgccucucccaccuccgcaagcucguccccggcuucggcaaggccuacaccaucuucaacaagacccucauggaggccgacgcccacuacaaguccauccgcaccuggaacgagaucauccccuccaagggcugccuccgcgucggcggccgcugccacccccacgucaacggcgucuucuucaacggcaucauccucggccccgacggccacguccucauccccgagaugcaguccucccuccuccaccagcacauggagcuccucgaguccuccgucaucccccucaugcacccccucgccgaccccuccaccgucuucaaggacggcgacgaggccgaggacuucgucgagguccaccuccccgacguccacaagcagaucuccggcgucgaccucggccuccccaacuggggcaaguacguccucaucuccgccggcgcccucaccgcccucaugcucaugaucuuccucaugaccugcugccgcaagaccaaccgcgccgaguccauccagcacucccccggcgagaccggccgcaaggucuccgucaccucccacuccggccgcgucaucuccuccugggaguccuacaaguccggcggcgagaccaagcucuga

SEQ ID NO: 127108 - RNA, 1575 nt, Artificial Sequence
  derived and/or modified CDS sequence (opt2) from glycoprotein__RABV__GQ857472.1
augaucccccagguccuccucuucgucccccuccucgucuucuccuccugcuucggcaaguuccccaucuacaccauccccgacaagcucggccccuggucccccaucgacauccaccaccucuccugccccaacaaccucgucgucgaggacgagggcugcaccaaccucuccggcuucuccuacauggagcucaaggucggcuacaucuccgccaucaaggucaacggcuucaccugcaccggcgucgucaccgaggccgagaccuacaccaacuucgucggcuacgucaccaccaccuucaagcgcaagcacuuccgccccaugcccgacgccugccgcgccgccuacaacuggaagauggccggcgacccccgcuacgaggagucccuccacaaccccuaccccgacuaccacuggcuccgcaccgucaagaccuccaaggagucccucgucaucaucucccccuccgucgccgaccucgaccccuacgacaagucccuccacucccgcgucuuccccggcggcaagugcuccggcaucaccgucuccuccaccugcugcuccaccaaccacgacuacaccaucuggaugcccgagaacccccgccucggcaccuccugcgacaucuucaccaacucccgcggcaagcgcgccuccaagggcggcaagaccugcggcuucgucgacgagcgcggccucuacaagucccucaagggcgccugcaagaugaagcucugcggcguccucggccuccgccucauggacggcaccugggucgccauccagaccuccgacgagaucaaguggugcucccccgaccagcucgucaaccuccacgacuuccacuccgacgagaucgagcaccucgucgucgaggagcucgucaagaagcgcgaggagugccucgacgcccucgagaccaucaugaccaccaaguccgucuccuuccgccgccucucccaccuccgcaagcucguccccggcuucggcaaggccuacaccaucuucaacaagacccucauggaggccgacgcccacuacaaguccauccgcaccuggaacgagaucauccccuccaagggcugccuccgcgucggcggccgcugccacccccacgucaacggcgucuucuucaacggcaucauccucggccccgacggccacguccucauccccgagaugcaguccucccuccuccaccagcacauggagcuccucgaguccuccgucaucccccucaugcacccccucgccgaccccuccaccgucuucaaggacggcgacgaggccgaggacuucgucgagguccaccuccccgacguccacaagcagaucuccggcgucgaccucggccuccccaacuggggcaaguacguccucaucuccgccggcgcccucaccgcccucaugcucaugaucuuccucaugaccugcugccgcaagaccaaccgcgccgaguccauccagcacucccccggcgagaccggccgcaaggucuccgucaccucccacaacggccgcgucaucuccuccugggaguccuacaaguccggcggcgagaccaagcucuga

SEQ ID NO: 127109 - RNA, 1575 nt, Artificial Sequence
  derived and/or modified CDS sequence (opt2) from glycoprotein__RABV__GQ918139.1
auggucccccagguccuccucuucguccuccuccucggcuucucccucugcuucggcaaguuccccaucuacaccauccccgacgagcucggccccuggucccccaucgacauccaccaccucuccugccccaacaaccucgucgucgaggacgagggcugcaccaaccucuccgaguucuccuacauggagcucaaggucggcuacaucuccgccaucaaggucaacggcuucaccugcaccggcgucgucaccgaggccgagaccuacaccaacuucgucggcuacgucaccaccaccuucaagcgcaagcacuuccgccccacccccgacgccugccgcgccgccuacaacuggaagauggccggcgacccccgcuacgaggagucccuccacaaccccuaccccgacuaccacuggcuccgcaccguccgcaccaccaaggagucccucaucaucaucucccccuccgucaccgaccucgaccccuacgacaagucccuccacucccgcgucuuccccggcggcaagugcuccggcaucaccgucuccuccaccuacugcuccaccaaccacgacuacaccaucuggaugcccgagaacccccgcccccgcacccccugcgacaucuucaccaacucccgcggcaagcgcgccuccaacggcaacaagaccugcggcuucgucgacgagcgcggccucuacaagucccucaagggcgccugccgccucaagcucugcggcguccucggccuccgccucauggacggcaccugggucgccaugcagaccuccgacgagaccaaguggugcccccccgaccagcucgucaaccuccacgacuuccgcuccgacgagaucgagcaccucgucgucgaggagcucgucaagaagcgcgaggagugccucgacgcccucgaguccaucaugaccaccaaguccgucuccuuccgccgccucucccaccuccgcaagcucguccccggcuucggcaaggccuacaccaucuucaacaagacccucauggaggccgacgcccacuacaaguccguccgcaccuggaacgagaucauccccuccaagggcugccucaaggucggcggccgcugccacccccacgucaacggcgucuucuucaacggcaucauccucggccccgacgaccacguccucauccccgagaugcaguccucccuccuccagcagcacauggagcuccucaaguccuccgucaucccccucaugcacccccucgccgaccccuccaccgucuucaaggagggcgacgaggccgaggacuucgucgagguccaccuccccgacgucuacaagcagaucuccggcgucgaccucggccuccccaacuggggcaaguacguccucaugaccgccggcgccaugaucggccucguccucaucuucucccucaugaccuggugccgccgcgccaaccgccccgaguccaagcagcgcuccuucggcggcaccggcggcaacgucuccgucaccucccaguccggcaaggucauccccuccugggaguccuaccgcuccggcggcgagauccgccucuga

SEQ ID NO: 127110 - RNA, 1575 nt, Artificial Sequence
  derived and/or modified CDS sequence (opt2) from glycoprotein__RABV__GU186379.1
auggucccccaggcccuccucuucgucccccuccucgccgucccccucugcuucggcaaguuccccaucuacaccauccccgacaagcucggccccuggucccccaucgacauccaccaccucuccugccccaacaaccucgucgucgaggacgagggcugcaccaaccucuccggcuucuccuacauggagcucaaggucggcuacaucuccgccaucaaggucaacggcuucaccugcaccggcgucgucaccgaggccgagaccuacaccaacuucgucggcuacgucaccaccaccuucaagcgcaagcacuuccgccccacccccgacgccugccgcuccgccuacaacuggaagauggccggcggcccccgcuacgaggagucccuccacaaccccuaccccgacuaccacuggcuccgcaccgucaagaccaccaaggaguccuucgucaucaucucccccuccauggccgaccucgaccccuacgacaagucccuccacucccgcgucuucccccgcggcaagugcuccggcaucaccgucuccuccaccuacugcuccaccaaccacgacuacaccaucuggaugcucgagaacccccgccucggcaccuccugcgacaucuucaccaacucccgcggcaagcgcgccuccaagggcuccaagaccugcggcuucgucgacgagcgcggccucuacaagucccucaagggcgccugcaagcucaagcucugcggcguccucggccuccgccucauggacggcaccugggucgccauccagaccuccgacgagaccaaguggugcccccccgaccagcucgucaaccuccacgacuuccacuccgacgagaucgagcaccucgucgucgaggagcucgucaagaagcgcgaggagugccucggcgcccucgaguccaucaugaccaccaaguccgucuccuuccgccgccucucccaccuccgcaagcucguccccggcuucggcaaggccuacaccaucuucaacaagacccucauggaggccgacgcccacuacaaguccguccgcaccuggaacgagaucauccccuccaagggcugccuccgcgucggcggccgcugccacccccacgucaacggcgucuucuucaacggcaucauccucggccccgacggccacguccucauccccgagaugcaguccucccuccuccagcagcacauggagcuccucgaguccuccgucaucccccucaugcacccccucgccgaccccuccaccgucuucaaggacggcgacgaggccgaggacuucgucgagguccaccuccccgacguccacaagcaggucuccggcgucgaccucggccuccccuccuggggcaaguacguccucauguccgccggcauccucaccgcccucaugcucaugaucuuccucaugaccugcugccgccgcaccaaccgcgccgaguccauccagcacucccucggcgagaccggccgcaaggucuccgucaccucccagaacggccgcgucaucuccuccugggaguccuacaaguccggcggcgagaccaagcucuga

SEQ ID NO: 127111 - RNA, 1575 nt, Artificial Sequence
  derived and/or modified CDS sequence (opt2) from glycoprotein__RABV__GU186380.1
auggucccccaggcccuccucuucgucccccuccucgccgucccccucugcuucggcaaguuccccaucuacaccauccccgacaagcucggccccuggucccccaucgacauccaccaccucuccugccccaacaaccucgucgucgaggacgagggcugcaccaaccucuccggcuucuccuacauggagcucaaggucggcuacaucuccgccaucaaggucaacggcuucaccugcaccggcgucgucaccgaggccgagaccuacaccaacuucgucggcuacgucaccaccaccuucaagcgcaagcacuuccgccccacccccgacgccugccgcuccgccuacaacuggaagauggccggcgacccccgcuacgaggagucccuccacaaccccuaccccgacuaccacuggcuccgcaccgucaagaccaccaaggaguccuucgucaucaucucccccuccgucgccgaccucgaccccuacgacgagucccuccacucccgcgucuucccccgcggcaagugcuccggcaucaccgucuccuccaccuacugcuccaccaaccacgacuacaccaucuggaugcccgagaacccccgccucggcaccuccugcgacaucuucaccaacucccgcggcaagcgcgccuccaagggcuccaagaccugcggcuucgucgacgagcgcggccucuacaagucccucaagggcgccugcaagcucaagcucugcggcguccucggccuccgccucauggacggcaccugggucgccauccagaccuccgacgagaccaaguggugcccccccgaccagcucgccaaccuccacgacuuccacuccgacgagaucgagcaccucgucgucgaggagcucguccgcaagcgcgaggagugccucgacgcccucgaguccaucaugaccaccaaguccgucuccuuccgccgccucucccaccuccgcaagcucguccccggcuucggcaaggccuacaccaucuucaacaagacccucauggaggccgacgcccacuacaaguccguccgcaccuggaacgagaucauccccuccaagggcugccuccgcgucggcggccgcugccacccccacgucaacggcgucuucuucaacggcaucauccucggccccgacggccacguccucauccccgagaugcaguccucccuccuccagcagcacauggagcuccucgaguccuccgucaucccccucaugcacccccucgccgaccccuccaccgucuucaaggacggcgacgaggccgaggacuucgucgagguccaccuccccgacguccacaagcaggucuccggcgucgaccucggccuccccuccuggggccgcuacguccucauguccgccggcauccucaccgcccucaugcucaugaucuuccucaugaccugcugccgccgcaccaaccgcgccaaguccauccagcacucccucggcgagaccggccgcaaggucuccgucaccucccagaacggccgcgucaucuccuccugggaguccuacaaguccggcggcgagaccaagcucuga

SEQ ID NO: 127112 - RNA, 1575 nt, Artificial Sequence; identical to SEQ ID NO: 126875
  derived and/or modified CDS sequence (opt2) from glycoprotein__RABV__GU186381.1

SEQ ID NO: 127113 - RNA, 1575 nt, Artificial Sequence
  derived and/or modified CDS sequence (opt2) from glycoprotein__RABV__GU186382.1
augaucccccagguccuccucuucgucccccuccucgucuucuccuccugcuucggcaaguuccccaucuacaccauccccgacaagcucggccccuggucccccaucgacauccaccaccucuccugccccaacaaccucgucgucgaggacgagggcugcaccaaccucuccggcuucuccuacauggagcucaaggucggcuacaucuccgccaucaaggucaacggcuucaccugcaccggcgucgucaccgaggccgagaccuacaccaacuucgucggcuacgucaccaccaccuucaagcgcaagcacuuccgccccaugcccgacgccugccgcgccgccuacaacuggaagauggccggcgacccccgcuacgaggagucccuccacaaccccuaccccgacuaccacuggcuccgcaccgucaagaccaccaaggagucccucgucaucaucucccccuccgucgccgaccucgaccccuacgacaagucccuccacucccgcgucuuccccggcggcaagugcuccggcaucaccgucuccuccaccugcugcuccaccaaccacgacuacaccaucuggaugcccgagaacccccgccucggcaccuccugcgacaucuccaccaacucccgcggcaagcgcgccuccaagggcggcaagaccugcggcuucgucgacgagcgcggccucuacaagucccucaagggcgccugcaagcucaagcucugcggcguccucggccuccgccucauggacggcaccugggucgccauccagaccuccgacgagaucaaguggugcucccccgaccagcucgucaaccuccacgacuuccacuccgacgagaucgagcaccucgucgucgaggagcucgucaagaagcgcgaggagugccucgacgcccucgagaccaucaugaccaccaaguccgucuccuuccgccgccucucccaccuccgcaagcucguccccggcuucggcaaggccuacaccaucuucaacaagacccucauggaggccgacgcccacuacaaguccauccgcaccuggaacgagaucauccccuccaagggcugccuccgcgucggcggccgcugccacccccacgucaacggcgucuucuucaacggcaucauccucggccccgacggccacguccucauccccgagaugcaguccucccuccuccaccagcacauggagcuccucgaguccuccgucaucccccucaugcacccccucgccgaccccuccaccgucuucaaggacggcgacgaggccgaggacuucgucgagguccaccuccccgacguccacaagcagaucuccggcgucgaccucggcccccccaacuggggcaaguacguccucaucuccgccggcgcccucaccgcccucauguccaugaucuuccucaugaccugcugccgcaagaccaaccgcgccgaguccauccagcacucccccggcgagaccggccgcaaggucuccgucaccucccacaacggccgcgucaucuccuccugggaguccuacaaguccggcggcgagaccaagcucuga

SEQ ID NO: 127114 - RNA, 1575 nt, Artificial Sequence
  derived and/or modified CDS sequence (opt2) from glycoprotein__RABV__GU186383.1
augaucccccagguccuccucuucgucccccuccucgucuucuccuccugcuucggcaaguuccccaucuacaccauccccgacaagcucggccccuggucccccaucgacauccaccaccucuccugccccaacaaccucgucgucgaggacgagggcugcaccaaccucuccggcuucuccuacauggagcucaaggucggcuacaucuccgccaucaaggucaacggcuucaccugcaccggcgucgucaccgaggccgagaccuacaccaacuucgucggcuacgucaccaccaccuucaagcgcaagcacuuccgccccaugcccgacgccugccgcgccgccuacaacuggaagauggccggcgacccccgcuacgaggagucccuccacaaccccuaccccgacuaccacuggcuccgcaccgucaagaccaccaaggagucccucgucaucaucucccccuccgucgccgaccucgaccccuacgacaagucccuccacucccgcgucuuccccggcggcaagugcuccggcaucaccgucuccuccaccugcugcuccaccaaccacgacuacaccaucuggaugcccgagaacccccgccucggcaccuccugcgacaucuucaccaacucccgcggcaagcgcgccuccaagggcggcaagaccugcggcuucgucgacgagcgcggccucuacaagucccucaagggcgccugcaagcucaagcucugcggcguccucggccuccgccucauggacggcaccugggucgccauccagaccuccgacgagaucaaguggugcucccccgaccagcucgucaaccuccacgacuuccacuccgacgagaucgagcaccucgucgucgaggagcucgucaagaagcgcgaggagugccucgacgcccucgagaccaucaugaccaccaaguccgucuccuuccgccgccucucccaccuccgcgagcucguccccggcuucggcaaggccuacaccaucuucaacaagacccucauggaggccgacgcccacuacaaguccauccgcaccuggaacgagaucauccccuccaagggcugccuccgcgucggcggccgcugccacccccacgucaacggcgucuucuucaacggcaucauccucggccccgacggccacguccucauccccgagaugcaguccucccuccuccaccagcacauggagcuccucgaguccuccgucaucccccucaugcacccccucgccgaccccuccaccgucuucaaggacggcgacgaggccgaggacuucgucgagguccaccuccccgacguccacaagcagaucuccggcgucgaccucggccuccccaacuggggcaaguacguccucaucuccgccggcgcccucaccgcccucaucuccaugaucuuccucaugaccugcugccgcaagaccaaccgcgccgaguccauccagcacucccccggcgagaccggccgcaaggucuccgucaccucccacaacggccgcgucaucuccuccugggaguccuacaaguccggcggcgagaccaagcucuga

SEQ ID NO: 127115 - RNA, 1575 nt, Artificial Sequence
  derived and/or modified CDS sequence (opt2) from glycoprotein__RABV__GU186384.1
augaucccccagguccuccucuucgucccccuccucgucuucuccuccugcuucggcaaguuccccaucuacaccauccccgacaagcucggccccuggucccccaucgacauccaccaccucuccugccccaacaaccucgucgucgaggacgagggcugcaccaaccucuccggcuucuccuacauggagcucaaggucggcuacaucuccgccaucaaggucaacggcuucaccugcaccggcgucgucaccgaggccgagaccuacaccaacuucgucggcuacgucaccaccaccuucaagcgcaagcacuuccgccccaugcccgacgccugccgcgccgccuacaacuggaagauggccggcgacccccgcuacgaggagucccuccacaaccccuaccccgacuaccacuggcuccgcaccgucaagaccaccaaggagucccucgucaucaucucccccuccgucgccgaccucgaccccuacgacaagucccuccacucccgcgucuuccccggcggcaagugcuccggcaucaccgucuccuccaccugcugcuccaccaaccacgacuacaccaucuggaugcccgagaacccccgccucggcaccuccugcgacaucuucaccaacucccgcggcaagcgcgccuccaagggcggcaagaccugcggcuucgucgacgagcgcggccucuacaagucccucaagggcgccugcaagcucaagcucugcggcguccucggccuccgccucauggacggcaccugggucgccauccagaccuccgacgagaucaaguggugcucccccgaccagcucgucaaccuccacgacuuccacuccgacgagaucgagcaccucgucgucgaggagcucgucaagaagcgcgaggagugccucgacgcccucgagaccaucaugaccaccaaguccgucuccuuccgccgccucucccaccuccgcaagcucguccccggcuucggcaaggccuacaccaucuucaacaagacccucauggaggccgacgcccacuacaaguccauccgcaccuggaacgagaucauccccuccaagggcugccuccgcgucggcggccgcugccacccccacgucaacggcgucuucuucaacggcaucauccucggccccgacggccacguccucauccccgagaugcaguccucccuccuccaccagcacauggagcuccucgaguccuccgucaucccccucaugcacccccucgccgaccccuccaccgucuucaaggacggcgacgaggccgaggacuucgucgacguccaccuccccgacguccacaagcagaucuccggcgucgaccucggccuccccaacuggggcaaguacguccucaucuccgccggcgcccucaccgcccucaugcucaugaucuuccucaugaccugcugccgcaaggccaaccgcgccgaguccauccagcacaaccccggcggcaccggccgcaaggucuccgucaccucccacaacggccgcgucaucuccuccugggaguccuacaaguccggcggcgagaccaagcucuga

SEQ ID NO: 127116 - RNA, 1575 nt, Artificial Sequence
  derived and/or modified CDS sequence (opt2) from glycoprotein__RABV__GU186385.1
augaucccccagguccuccucuucgucccccuccucgucuucuccuccugcuucggcaaguuccccaucuacaccauccccgacaagcucggccccuggucccccaucgacauccaccaccucuccugccccaacaacauggucgucgaggacgagggcugcaccaaccucuccggcuucuccuacauggagcucaaggucggcuacaucuccgccaucaaggucaacggcuucaccugcaccggcgucgucaccgaggccgagaccuacaccaacuucgucggcuacgucaccaccaccuucaagcgcaagcacuuccgccccaugcccgacgccugccgcgccgccuacaacuggaagauggccggcgacccccgcuacgaggagucccuccacaaccccuaccccgacuaccacuggcuccgcaccgucaagaccaccaaggagucccucgucaucaucucccccuccgucgccgaccucgaccccuacgacaagucccuccacucccgcgucuuccccggcggcaagugcuccggcaucaccgucuccuccaccugcugcuccaccaaccacgacuacaccaucuggaugcccgagaacccccgccucggcaccuccugcgacaucuucaccaacucccgcggcaagcgcgccuccaagggcggcaagaccugcggcuucgucgacgagcgcggccucuacaagucccucaagggcgccugcaagcucaagcucugcggcguccucggccuccgccucauggacggcaccugggucgccauccagaccuccgacgagaucaaguggugcucccccgaccagcucgucaaccuccacgacuuccacuccgacgagaucgagcaccucgucgucgaggagcucgucaagaagcgcgaggagugccucgacgcccucgagaccaucaugaccaccaaguccgucuccuuccgccgccucucccaccuccgcaagcucguccccggcuucggcaaggccuacaccaucuucaacaagacccucauggaggccgacgcccacuacaaguccauccgcaccuggaacgagaucauccccuccaagggcugccuccgcgucggcggccgcugccacccccacgucaacggcgucuucuucaacggcaucauccucggccccgacggccacguccucauccccgagaugcaguccucccuccuccaccagcacauggagcuccucgaguccuccgucaucccccucaugcacccccucgccgaccccuccaccgucuucaaggacggcgacgaggccgaggacuucgucgagguccaccuccccgacguccacaagcagaucuccggcgucgaccucggccuccccaacuggggcaaguacguccucaucuccgccggcgcccucaccgcccucaugcucaccaucuuccucaugaccugcugccgcaagaccucccgcgccgaguccauccagcacucccccggcgagaccggccgcaaggucuccgucaccucccacaacggccgcgucaucuccuccugggaguccuacaaguccggcggcgagaccaagcucuga

SEQ ID NO: 127117 - RNA, 1575 nt, Artificial Sequence
  derived and/or modified CDS sequence (opt2) from glycoprotein__RABV__GU186386.1
auggucccccaggcccuccucuucgucccccuccucgccgucccccucugcuucggcaaguuccccaucuacaccauccccgacaagcucggccccuggucccccaucgacauccaccaccucuccugccccaacaaccucgucgucgaggacgagggcugcaccaaccucuccggcuucuccuacauggagcucaaggucggcuacaucuccgccaucaaggucaacggcuucaccugcaccggcgucgucaccgaggccgagaccuacaccaacuucgucggcuacgucaccaccaccuucaagcgcaagcacuuccgccccacccccgacgccugccgcuccgccuacaacuggaagauggccggcgacccccgcuacgaggagucccuccacaaccccuaccccgacuaccacuggcuccgcaccgucaagaccaccaaggaguccuucgucaucaucucccccuccgucgccgaccucgaccccuacgacaagucccuccacucccgcgucuucccccgcggcaagugcuccggcaucaccgucuccuccaccuacugcuccaccaaccacgacuacaccaucuggaugcccgagaacccccgccucggcaccuccugcgacaucuucaccaacucccgcggcaagcgcgccuccaagggcuccaagaccugcggcuucgucgacgagcgcggccucuacaagucccucaagggcgccugcaagcucaagcucugcggcguccucggccuccgccucauggacggcaccugggucgccauccagaccuccgacgagaccaaguggugcccccccgaccagcucgucaaccuccacgacuuccacuccgacgagaucgagcaccucgucgucgaggagcucgucaagaagcgcgaggagugccucgacgcccucgaguccaucaugaccaccaaguccgucuccuuccgccgccucucccaccuccgcaagcucguccccggcuucggcaaggccuacaccaucuucaacaagacccucauggaggccgacgcccacuacaaguccguccgcaccuggaacgagaucauccccuccaagggcugccuccgcgucggcggccgcugccacccccacgucaacggcgucuucuucaacggcaucauccucggccccgacggccacguccucauccccgagaugcaguccucccuccuccagcagcacauggagcuccucgaguccuccgucaucccccucaugcacccccucgccgaccccuccaccgucuucaaggacggcgacgaggccgaggacuucgucgagguccaccuccccgacguccacaagcaggucuccggcgucgaccucggccuccccuccuggggcaaguacguccucauguccgccggcauccucaccgcccucaugcucaugaucuuccucaccaccugcugccgccgcaccaaccgcgccgaguccauccagcacucccucggcgagaccggccgcaaggucuccgucaccucccagaacggccgcgucaucuccuccugggaguccuacaaguccggcggcgagaccaagcucuga

SEQ ID NO: 127118 - RNA, 1575 nt, Artificial Sequence
  derived and/or modified CDS sequence (opt2) from glycoprotein__RABV__GU186387.1
augaucccccaggcccuccucuucgucccccuccucgucuucucccucugcuucggcaaguuccccgucuacgccauccccgacaagcucggccccuggucccccaucgacauccaccaccucuccugccccaacaaccucgucgucgaggacgagggcugcaccaaccucuccggcuucuccuacauggagcucaaggucggcuacaucuccgccaucaaggucaacggcuucaccugcaccggcgucgucaccgaggccgagaccuacaccaacuucaucggcuacgucaccaccaccuucaagcgcaagcacuuccgccccacccccgacgccugccgcgccgccuacaacuggaagauggccggcgacccccgcuacgaggagucccuccacaaccccuaccccgacuaccacuggcuccgcaccgucaagaccaccaaggagucccucgucgucaucucccccuccgucgccgaccucgaccccuacgacaagucccuccacucccgcgucuuccccuccggcaagugcuccggcaucaccgucuccuccaccugcugcuccaccaaccacgacuacaccaucuggaugcccgagaacccccgccucggcaccuccugcgacaucuucgucaacucccgcggcaagcgcgccuccaagggcuccaagaccugcggcuucgucgacgagcgcggccucuacaagucccucaagggcgccugcaagcucaagcucugcggcguccucggccuccgccucauggacggcaccugggucgccauccagaccuccgacgagaccaaguggugcccccccgaccagcucgucaaccuccacgacuuccgcuccgacgagaucgagcaccucgucgucgaggagcucgucaagaagcgcgaggagugccucgacgcccucgaguccaucaugaccaccaaguccgucuccuuccgccgccucucccaccuccgcaagcucguccccggcuucggcaaggccuacaccaucuucaacaagacccucauggaggccgacgcccacuacaaguccguccgcaccuggaacgagaucauccccuccaagggcugccuccgcgucggcggccgcugccacccccacgucaacggcgucuucuucaacggcaucauccucggccccgacggccacguccucauccccgagaugcaguccucccuccuccagcagcacauggagcuccucgaguccuccgucaucccccucaugcacccccucgccgaccccuccaccaucuucaagaacggcgacgaggccgaggacuucgucgagguccaccuccccgacguccacaagcaggucuccggcgucgaccucggccuccccaacuggggcaaguacguccucauguccgccggcgcccucaucgcccucaugcucaugaucuuccucaugaccugcugccgcaagaccgaccgcaccggcuccacccaccacucccccggcgagaccggccgcaaggucuccgucaccucccagaacggccgcgucaucgccuccugggaguccuacaaguccggcggcgagaccaagcucuga

SEQ ID NO: 127119 - RNA, 1575 nt, Artificial Sequence; identical to SEQ ID NO: 126875
  derived and/or modified CDS sequence (opt2) from glycoprotein__RABV__GU186388.1

SEQ ID NO: 127120 - RNA, 1575 nt, Artificial Sequence
  derived and/or modified CDS sequence (opt2) from glycoprotein__RABV__GU186389.1
augaucccccagguccuccucuucgucccccuccucgucuucuccuccugcuucggcaaguuccccaucuacaccauccccgacaagcucggccccuggucccccaucgacauccaccaccucuccugccccaacaaccucgucgucgaggacgagggcugcaccaaccucuccggcuucuccuacauggagcucaaggucggcuacaucuccgccaucaaggucaacggcuucaccugcaccggcgucgucaccgaggccgagaccuacaccaacuucgucggcuacgucaccaccaccuucaagcgcaagcacuuccgccccaugcccgacgccugccgcgccgccuacaacuggaagauggccggcgacccccgcuacgaggagucccuccacaaccccuaccccgacuaccacuggcuccgcaccgucaagaccaccaaggagucccucgucaucaucucccccuccgucgccgaccucgaccccuacgacaagucccuccacucccgcgucuuccccggcggcaagugcuccggcaucaccgucuccuccaccugcugcuccaccaaccacgacuacaccaucuggaugcccgagaacccccgccucggcaccuccugcgacaucuucaccaacucccgcggcaagcgcgccuccaagggcggcaagaccugcggcuucgucgacgagcgcggccucuacaagucccuccgcggcgccugcaagcucaagcucugcggcguccucggccuccgccucauggacggcaccugggucgccauccagaccuccgacgagaucaaguggugcucccccgaccagcucgucaaccuccacgacuuccacuccgacgagaucgagcaccucgucgucgaggagcucgucaagaagcgcgaggagugccucgacgcccucgagaccaucaugaccaccaaguccgucuccuuccgccgccucucccaccuccgcaagcucguccccggcuucggcaaggccuacaccaucuucaacaagacccucauggaggccgacgcccacuacaaguccauccgcaccuggaacgagaucauccccuccaagggcugccuccgcgucggcggccgcugccacccccacgucaacggcgucuucuucaacggcaucauccucggccccgacggccacguccucauccccgagaugcaguccucccuccuccaccagcacauggagcuccucgaguccuccgucaucccccucaugcacccccucgccgaccccuccaccgucuucaaggacggcgacgaggccgaggacuucgucgagguccaccuccccgacguccacaagcagaucuccggcgucgaccucggccuccccaacuggggcaaguacguccucaucuccgccggcgcccucaccgcccucaugcucaugaucuuccucaugaccugcugccgcaagaccaaccgcgccgaguccauccagcacucccccggcgagaccggccgcaaggucuccgucaccucccacaacggccgcgucaucuccuccugggaguccuacaaguccggcuccgagaccaagcucuga

SEQ ID NO: 127121 - RNA, 1575 nt, Artificial Sequence; identical to SEQ ID NO: 126863
  derived and/or modified CDS sequence (opt2) from glycoprotein__RABV__GU186390.1

SEQ ID NO: 127122 - RNA, 1575 nt, Artificial Sequence
  derived and/or modified CDS sequence (opt2) from glycoprotein__RABV__GU186392.1
augaucccccagguccuccucuucgucccccuccucgucuucuccuccugcuucggcaaguuccccaucuacaccauccccgacaagcucggccccuggucccccaucgacauccaccaccucuccugccccaacaaccucgucgucgaggacgagggcugcaccaaccucuccggcuucuccuacauggagcucaaggucggcuacaucuccgccaucaaggucaacggcuucaccugcaccggcgucgucaccgaggccgagaccuacaccaacuucgucggcuacgucaccaccaccuucaagcgcaagcacuuccgccccacccccgacgccugccgcgccgccuacaacuggaagauggccggcgacccccgcuacgaggagucccuccacaaccccuaccccgacuaccacuggcuccgcaccgucaagaccuccaaggagucccucgucaucaucucccccuccgucgccgaccucgaccccuacgacaagucccuccacucccgcgucuuccccggcggcaagugcuccggcaucaccgucuccuccaccugcugcuccaccaaccacgacuacaccaucuggaugcccgagaacccccgccucggcaccuccugcgacaucuucaccaacucccgcggcaagcgcgccuccaagggcggcaagaccugcggcuucgucgacgagcgcggccucuacaagucccucaagggcgccugcaagcucaagcucugcggcguccucggccuccgccucauggacggcaccugggucgccauccagaccuccgacgagaucaaguggugcucccccgaccagcucgucaaccuccacgacuuccacuccgacgagaucgagcaccucgucgucgaggagcucgucaagaagcgcgaggagugccucgacgcccucgagaccaucaugaccaccaaguccgucuccuuccgccgccucucccaccuccgcaagcucguccccggcuucggcaaggccuacaccaucuucaacaagacccucauggaggccgacgcccacuacaaguccauccgcaccuggaacgagaucauccccuccaagggcugccuccgcgucggcggccgcugccacccccacgucaacggcgucuucuucaacggcaucauccucggccccgacggccacguccucauccccgagaugcaguccucccuccuccaccagcacauggagcuccucgaguccuccgucaucccccucaugcacccccucgccgaccccuccaccgucuucaaggacggcgacgaggccgaggacuucgucgagguccaccuccccgacguccacaagcagaucuccgaggucgaccucggccuccccaacuggggcaaguacguccucgucuccgccggcgcccucaccgcccucaugcucaugaucuuccucaugaccugcugccgcaagaccaaccgcgccgaguccauccagcacucccccggcgagaccggccgcaaggucuccgucaccucccacaacggccgcgucaucuccuccugggaguccuacaaguccggcggcgagaccaagcucuga

SEQ ID NO: 127123 - RNA, 1575 nt, Artificial Sequence
  derived and/or modified CDS sequence (opt2) from glycoprotein__RABV__GU186396.1
augaucccccaggcccuccucuucgucccccuccucgucuucucccucugcuucggcaaguuccccaucuacaccauccccgacaagcucggccccuggucccccaucgacauccaccaccucuccugccccaacaaccucgucgucgaggacgagggcugcaccaaccucuccggcuucuccuacauggagcucaaggucggcuacaucuccgccaucaaggucaacggcuucaccugcaccggcgucgucaccgaggccgagaccuacaccaacuucgucggcuacgucaccaccaccuucaagcgcaagcacuuccgccccacccccgacgccugccgcgccgccuacaacuggaagauggccggcgacccccgcuacgaggagucccucaacaaccccuaccccgacuaccacuggcuccgcaccgucaagaccaccaaggagucccucgucgucaucucccccuccgucgccgaccucgaccccuacgacgagucccuccacucccgcgucuuccccuccggcaagugcuccggcaucaccgucuccuccaccugcugcuccaccaaccacgacuacaccaucuggaugcccgagaacccccgccucggcaccuccugcgacaucuucgucaacucccgcggcaagcgcgccuccaagggcuccaagaccugcggcuucgucgacgagcgcggccucuacaagucccucaagggcgccugcaagcucaagcucugcggcguccucggccuccgccucauggacggcaccugggucgccauccagaccuccgacgagaccaaguggugcccccccgaccagcucgucaaccuccacgacuuccgcuccgacgagaucgagcaccucgucgucgaggagcucgucaagaagcgcgaggagugccucgacgcccucgaguccaucaugaccaccaaguccgucuccuuccgccgccucucccaccuccgcaagcucguccccggcuucggcaaggccuacaccaucuucaacaagacccucauggaggccgacgcccacuacaaguccguccgcaccuggaacgagaucauccccuccaagggcugccuccgcgucggcggccgcugccacccccacgucaacggcgucuucuucaacggcaucauccucggccccgacggccacguccucauccccgagaugcaguccucccuccuccagcagcacauggagcuccucgaguccuccgucaucccccucaugcacccccucgccgaccccuccaccaucuucaaggacggcgacgaggccgaggacuucgucgagguccaccuccccgacguccacaagcaggucuccggcgucgaccucggccuccccaacuggggcaaguacguccucauguccgccggcgcccucaucgcccucaugcucaugaucuucuccaugaccugcugccgcaagaccgaccgcaucggcuccacccaccacggccccggcgagaccggccgcaaggucuccgucaccucccagaacggccgcgucaucgccuccugggaguccuacaaguccggcggcgagaccaagcucuga

SEQ ID NO: 127124 - RNA, 1575 nt, Artificial Sequence
  derived and/or modified CDS sequence (opt2) from glycoprotein__RABV__GU186397.1
augaucccccaggcccuccucuucgucccccuccucgucuucucccucugcuucggcaaguuccccaucuacaccauccccgacaagcucggccccuggucccccaucgacauccaccaccucuccugccccaacaaccucgucgucgaggacgagggcugcaccaaccucuccggcuucuccuacauggagcucaaggucggcuacaucuccgccaucaaggccaacggcuucaccugcaccggcgucgucaccgaggccgagaccuacaccaacuucgucggcuacgucaccaccaccuucaagcgcaagcacuuccgccccacccccgacgccugccgcgccgcccacaacuggaagauggccggcgagccccgcuacgaggagucccuccacaaccccuaccccgacuaccacuggcuccgcaccgucaagaccaccaaggagucccucgucaucaucucccccuccgucgccgaccucgaccccuacgacaagucccuccacucccgcgucuuccccuccggcaagugcuccggcaucaccgucuccuccaccuacugcuccaccaaccacgacuacaccauccgcaugcccgagaacccccgccucggcaccuccugcgacaucuucgucaacucccgcggcaagcgcgccuccaagggcuccaagaccugcggcuucgucgacgagcgcggccucuacaagucccucaagggcgccugcaagcucaagcucugcggcguccucggccuccgccucauggacggcaccugggucgccauccagaccuccgacgagaccaaguggugcccccccgaccagcucgucaaccuccacgacuuccgcuccgacgagaucgagcaccucgucgucgaggagcucgucaagaagcgcgaggagugccucgacgcccucgaguccaucaugaccaccaaguccgucuccuuccgccgccucucccaccuccgcaagcucguccccggcuucggcaaggccuacaccaucuucaacaagacccucauggaggccgacgcccacuacaaguccguccgcaccuggaacgagaucauccccuccaagggcugccuccgcgucggcggccgcugccacccccacgucaacggcgucuucuucaacggcaucauccucggccccgacggccacguccucauccccgagaugcaguccucccuccuccagcagcacauggagcuccucgaguccuccgucaucccccucaugcacccccucgccgaccccuccaccaucuucaaggacggcgacgaggccgaggacuucgucgagguccaccuccccgacguccaccgccaggucuccggcgucgaccucggccuccccaacuggggcaaguacguccucauguccgccggcgcccucgucgcccucaugcucaugaucuuccucaugaccugcugcgucaagaccgaccgcaccggcuccacccaccacucccccggcgagaccggccgcaaggucuccgucaccucccagaacggccgcgucaucgccuccugggaguccuacaaguccggcggcgagaccaagcucuga

SEQ ID NO: 127125 - RNA, 1575 nt, Artificial Sequence; identical to SEQ ID NO: 126563
  derived and/or modified CDS sequence (opt2) from glycoprotein__RABV__GU186398.1

SEQ ID NO: 127126 - RNA, 1575 nt, Artificial Sequence
  derived and/or modified CDS sequence (opt2) from glycoprotein__RABV__GU186400.1
auggucccccaggcccuccucuucgucccccuccucgccgucccccucugcuucggcaaguuccccaucuacaccauccccgacaagcucggccccuggucccccaucgacauccaccaccucuccugccccaacaaccucgucgucgaggacgagggcugcaccaaccucuccggcuucuccuacauggagcucaaggucggcuacaucuccgccaucaaggucaacggcuucaccugcaccggcgucgucaccgaggccgagaccuacaccaacuucgucggcuacgucaccaccaccuucaagcgcaagcacuuccgccccaccuccgacgccugccgcuccgccuacaacuggaagauggccggcgacccccgcuacgaggagucccuccacaaccccuaccccgacuaccacuggcuccgcaccgucaagaccaccaaggaguccuucgucaucaucucccccuccgucgccgaccucgaccccuacgacaaguccccccacucccgcgucuucccccgcggcaagugcuccggcaucaccgucuccuccaccuacugcuccaccaaccacgacuacaccaucuggaugcccgagaacccccgccucggcaccuccugcgacaucuucaccaacucccgcggcaagcgcgccuccaagggcuccaagaccugcggcuucgucgacgagcgcggccucuacaagucccucaagggcgccugcaagcucaagcucugcggcguccucggccuccgccucauggacggcaccugggucgccauccagaccuccgacgagaccaaguggugcccccccgaccagcucgucaaccuccacgacuuccacuccgacgagaucgagcaccucgucgucgaggagcucgucaagaagcgcgaggagugccucgacgcccucgaguccaucaugaccaccaaguccgucuccuuccgccgccucucccaccuccgcaagcucguccccggcuucggcaaggccuacaccaucuucaacaagacccucauggaggccgacgcccacuacaaguccguccgcaccuggaacgagaucauccccuccaagggcugccuccgcgucggcggccgcugccacccccacgucaacggcgucuucuucaacggcaucauccucggccccgacggccacguccucauccccgagaugcaguccucccuccuccagcagcacauggagcuccucgaguccuccgucaucccccucaugcacccccucgccgaccccuccaccgucuucaaggacggcgacgaggccgaggacuucgucgagguccaccuccccgacguccacaagcaggucuccggcgucgaccucggccuccccuccuggggcaaguacguccucauguccgccggcauccucaccgcccucaugcucaccaucuuccucaugaccugcugccgccgcaccaaccgcgccaaguccauccagcacucccucggcgagaccggccgcaaggucuccgucaccucccaguccggccgcgucaucuccuccugggaguccuacaaguccggcggcgagaccaagcucuga

SEQ ID NO: 127127 - RNA, 1575 nt, Artificial Sequence
  derived and/or modified CDS sequence (opt2) from glycoprotein__RABV__GU186401.1
auggucccccaggcccuccucuucgucccccuccucgccgucccccucugcuucggcaaguuccccaucuacaccauccccgacaagcucggccccuggucccccaucgacauccaccaccucuccugccccaacaaccucgucgucgaggacgagggcugcaccaaccucuccggcuucuccuacauggagcucaaggucggcuacaccuccgccaucaaggucaacggcuucaccugcaccggcgucgucaccgaggccgagaccuacaccaacuucgucggcuacgucaccaccaccuucaagcgcaagcacuuccgccccaccuccgacgccugccgcuccgccuacaacuggaagauggccggcgacccccgcuacgaggagucccuccacaaccccuaccccgacuaccacuggcuccgcaccgucaagaccaccaaggaguccuucgucaucaucucccccuccgucgccgaccucgaccccuacgacaagucccuccacucccgcgucuucccccgcggcaagugcuccggcaucaccgucuccuccaccuacugcuccaccaaccacgacuacaccaucuggaugcccgagaacccccgccucggcaccuccugcgacaucuucaccaacucccgcggcaagcgcgccuccaagggcuccaagaccugcggcuucgucgacgagcgcggccucuacaagucccucaagggcgccugcaagcucaagcucugcggcguccucggccuccgccucauggacggcaccugggucgccauccagaccuccgacgagaccaaguggugcccccccgaccagcucgucaaccuccacgacuuccacuccgacgagaucgagcaccucgucgucgaggagcucgucaagaagcgcgaggagugccucgacgcccucgaguccaucaugaccaccaaguccgucuccuuccgccgccucucccaccuccgcaagcucguccccggcuucggcaaggccuacaccaucuucaacaagacccucauggaggccgacgcccacuacaaguccguccgcaccuggaacgagaucauccccuccaagggcugccuccgcgucggcggccgcugccacccccacgucaacggcgucuucuucaacggcaucauccucggccccgacggccacguccucauccccgagaugcaguccucccuccuccagcagcacauggagcuccucgaguccuccgucaucccccucaugcacccccucgccgaccccuccaccgucuucaaggacggcgacgaggccgaggacuucgucgagguccaccuccccgacguccacaagcaggucuccggcgucgaccucggccuccccuccuggggcaaguacguccucauguccgccggcauccucaccgcccucaugcucaccaucuuccucaugaccugcugccgccgcaccaaccgcgccaaguccauccagcacucccucggcgagaccggccgcaaggucuccgucaccucccaguccggccgcgucaucuccuccugggaguccuacaaguccggcggcgagaccaagcucuga

SEQ ID NO: 127128 - RNA, 1575 nt, Artificial Sequence
  derived and/or modified CDS sequence (opt2) from glycoprotein__RABV__GU186402.1
auggccccccaggcccuccucuucgucccccuccucgccgucccccucugccucggcaaguuccccaucuacaccauccccgacaagcucggccccuggucccccaucgacauccaccaccucuccugccccaacaaccucgucgucgaggacgagggcugcaccaaccucuccggcuucuccuacauggagcucaaggucggcuacaucuccgccaucaaggucaacggcuucaccugcaccggcgucgucaccgaggccgagaccuacaccaacuucgucggcuacgucaccaccaccuucaagcgcaagcacuuccgccccacccccgacgccugccgcuccgccuacaacuggaagauggccggcgacccccgcuacgaggagucccuccacaaccccuaccccgacuaccacuggcuccgcaccgucaagaccaccaaggaguccuucgucaucaucucccccuccgucgccgaccucgaccccuacgacaagucccuccacucccgcgucuucccccgcggcaagugcuccggcaucaccgucuccuccaccuacugcuccaccaaccacgacuacaccaucuggaugcccgagaacccccgccucggcaccuccugcgacaucuucaccaacucccgcggcaagcgcgccuccaagggcuccaagaccugcggcuucgucgacgagcgcggccucuacaagucccucaagggcgccugcaagcucaagcucugcggcguccucggccuccgccucauggacggcaccugggucgccauccagaccuccgacgagaccaaguggugcccccccgaccagcucgucaaccuccacgacuuccacuccgacgagaucgagcaccucgucgucgaggagcucgucaagaagcgcgaggagugccucgacgcccucgaguccaucaugaccaccaaguccgucuccuuccgccgccucucccaccuccgcaagcucguccccggcuucggcaaggccuacaccaucuucaacaagacccucauggaggccgacgcccacuacaaguccguccgcaccuggaacgagaucauccccuccaagggcugccuccgcgucggcggccgcugccacccccacgucaacggcgucuucuucaacggcaucauccucggccccgacggccacguccucauccccgagaugcaguccucccuccuccagcagcacauggagcuccucgaguccuccgucaucccccucaugcacccccucgccgaccccuccaccgucuucaaggacggcgacgaggccgaggacuucgucgagguccaccuccccgacguccacaagcacgucuccggcgucgaccucggccuccccuccuggggcaaguacguccucgucuccgccggcauccucaccgcccucaugcucaccaucuuccucaugaccugcugccgccgcaccaaccgcgccgaguccauccagcacucccucggcgagaccggccgcaaggucuccgucaccucccaguccggccgcgucaucuccuccugggaguccuacaaguccggcggcgagaccaagcucuga

SEQ ID NO: 127129 - RNA, 1575 nt, Artificial Sequence
  derived and/or modified CDS sequence (opt2) from glycoprotein__RABV__GU186403.1
augaucccccagguccuccucuucgucccccuccucgucuucuccuccugcuucggcaaguuccccaucuacaccauccccgacaagcucggccccuggucccccaucgacauccaccaccucuccugccccaacaaccucgucgucgaggacgagggcugcaccaaccucuccggcuucuccuacauggagcucaaggucggcuacaucuccgccaucaaggucaacggcuucaccugcaccggcgucgucaccgaggccgagaccuacaccaacuucgucggcuacgucaccaccaccuucaagcgcaagcacuuccgccccaugcccgacgccugccgcgccgccuacaacuggaagauggccggcgacccccgcuacgaggagucccuccacaaccccuaccccgacuaccacuggcuccgcaccgucaagaccaccaaggagucccucgucgucaucucccccuccgucgccgaccucgaccccuacgacaagucccuccacucccgcgucuuccccggcggcaagugcuccggcaucaccgucuccuccaccugcugcuccaccaaccacgacuacaccaucuggaugcccgagaacccccgccucggcaccuccugcgacaucuucaccaacucccgcggcaagcgcgccuccaagggcggcaagaccugcggcuucgucgacgagcgcggccucuacaagucccucaagggcgccugcaagcucaagcucugcggcguccucggccuccgccucauggacggcaccugggucgccauccagaccuccgacgagaucaaguggugcucccccgaccagcucgucaaccuccacgacuuccacuccgacgagaucgagcaccucgucgucgaggagcucgucaagaagcgcgaggagugccucgacgcccucgagaccaucaugaccaccaaguccgucuccuuccgccgccucucccaccuccgcaagcucguccccggcuucggcaaggccuacaccaucuucaacaagacccucauggaggccgacgcccacuacaaguccauccgcaccuggaacgagaucauccccuccaagggcugccuccgcgucggcggccgcugccacccccacgucaacggcgucuucuucaacggcaucauccucggccccgacggccacguccucauccccgagaugcaguccucccuccuccaccagcacauggagcuccucgaguccuccgucaucccccucaugcacccccucgccgaccccuccaccgucuucaaggacggcgacgaggccgaggacuucgucgagguccaccuccccgacguccacaagcagaucuccggcgucgaccucggccuccccaacuggggcaaguacguccucaucuccgccggcgcccucaccgcccucaugcucaccaucuuccucaugaccugcugccgcaagaccaaccgcgccggcuccauccagcacucccccggcgagaccggccgcaaggucuccgucaccucccacaacggccgcgucaucuccuccugggaguccuacaaguccggcuccgagaccaagcucuga

SEQ ID NO: 127130 - RNA, 1575 nt, Artificial Sequence; identical to SEQ ID NO: 126881
  derived and/or modified CDS sequence (opt2) from glycoprotein__RABV__GU186404.1

SEQ ID NO: 127131 - RNA, 1575 nt, Artificial Sequence
  derived and/or modified CDS sequence (opt2) from glycoprotein__RABV__GU186406.1
augaucccccagguccuccucuucguccccccccucgucuucuccuccugcuucggcaaguuccccaucuacaccauccccgacaagcucggccccuggucccccaucgacauccaccaccucuccugccccaacaaccucgucgucgaggacgagggcugcaccaaccucuccggcuucuccuacauggagcucaaggucggcuacaucuccgccaucaaggucaacggcuucaccugcaccggcgucgucaccgaggccgagaccuacaccaacuucgucggcuacgucaccaccaccuucaagcgcaagcacuuccgccccaugcccgacgccugccgcgccgccuacaacuggaagauggccggcgacccccgcuacgaggagucccuccacaaccccuaccccgacuaccacuggcuccgcaccgucaagaccaccaaggagucccucgucaucaucucccccuccgucgccgaccucgaccccuacgacaagucccuccacucccgcgucuuccccggcggcaagugcuccggcaucaccgucuccuccaccugcugcuccaccaaccacgacuacaccaucuggaugcccgagaacccccgccucggcaccuccugcgacaucuucaccaacucccgcggcaagcgcgccuccaagggcggcaagaccugcggcuucgucgacgagcgcggccucuacaagucccucaagggcgccugcaagcucaagcucugcggcguccucggccuccgccucauggacggcaccugggucgccauccagaccuccgacgagaucaaguggugcucccccgaccagcucgucaaccuccacgacuuccacuccgacgagaucgagcaccucgucgucgaggagcucgucaagaagcgcgaggagugccucgacgcccucgagaccaucaugaccaccaaguccgucuccuuccgccgccucucccaccuccgcaagcucguccccggcuucggcaaggccuacaccaucuucaacaagacccucauggaggccgacgcccacuacaaguccauccgcaccuggaacgagaucauccccuccaagggcugccuccgcgucggcggccgcugccacccccacgucaacggcgucuucuucaacggcaucauccucggccccgacggccacguccucauccccgagaugcaguccucccuccuccaccagcacauggagcuccucgaguccuccgucaucccccucaugcacccccucgccgaccccuccaccgucuucaaggacggcgacgaggccgaggacuucgucgagguccaccuccccgacguccacaagcagaucuccggcgucgaccucggccuccccaacuggggcaaguacguccucaucuccgccggcgcccucaccgcccucaugcucaugaccuuccucaugaccugcugccgcaagaccaaccgcgccgaguccauccagcacucccccggcgagaccggccgcaaggucuccgucaccucccacaacggccgcgucaucuccuccugggaguccuacaaguccggcggcgagaccaagcucuga

SEQ ID NO: 127132 - RNA, 1575 nt, Artificial Sequence
  derived and/or modified CDS sequence (opt2) from glycoprotein__RABV__GU186407.1
augaucccccagguccuccucuucgucccccuccucgucuucuccuccugcuucggcaaguuccccaucuacaccauccccgacaagcucggccccuggucccccaucgacauccaccaccucuccugccccaacaaccucgucgucgaggacgagggcugcaccaaccucuccggcuucuccuacauggagcucaaggucggcuacaucuccgccaucaaggucaacggcuucaccugcaccggcgucgucaccgaggccgagaccuacaccaacuucgucggcuacgucaccaccaccuucaagcgcaagcacuuccgccccaugcccgacgccugccgcgccgccuacaacuggaagauggccggcgacccccgcuacgaggagucccuccacaaccccuaccccgacuaccacuggcuccgcaccgucaagaccaccaaggagucccucgucaucaucucccccuccgucgccgaccucgaccccuacgacaagucccuccacucccgcgucuuccccggcggcaagugcuccggcaucaccgucuccuccaccugcugcuccaccaaccacgacuacaccaucuggaugcccgagaacccccgccucggcaccuccugcgacaucuucaccaacucccgcggcaagcgcgccuccaagggcggcaagaccugcggcuucgucgacgagcgcggccucuacaagucccucaagggcgccugcaagcucaagcucugcggcguccucggccuccgccucauggacggcaccugggucgccauccagaccuccgacgagaucaaguggugcucccccgaccagcucgucaaccuccacgacuuccacuccgacgagaucgagcaccucgucgucgaggagcucgucaagaagcgcgaggagugccucgacgcccucgagaccaucaugaccaccaaguccgucuccuuccgccgccucucccaccuccgcaagcucguccccggcuucggcaaggccuacaccaucuucaacaagacccucauggaggccgacgcccacuacaaguccauccgcaccuggaacgagaucauccccuccaagggcugccuccgcgucggcggccgcugccacccccacgucaacggcgucuucuucaacggcaucauccucggccccgacggccacguccucauccccgagaugcaguccucccuccuccaccagcacauggagcuccucgaguccuccgucaucccccucaugcacccccucgccgaccccuccaccgucuucaaggacggcgacgaggccgaggacuucgucgagguccaccuccccgacguccacaagcagaucuccggcgucgaccucggccuccccaacuggggcaaguacguccucaucuccgccggcgcccucaccgcccucaugcucaugaccuuccucaugaccugcugccgcaagaccaaccgcgccgaguccauccagcacucccccggcgagaccggccgcaaggucuccgucaccucccacaacggccgcgucaucuccuccugggaguccuacaaguccggcggcgagaccaagcucuga

SEQ ID NO: 127133 - RNA, 1575 nt, Artificial Sequence; identical to SEQ ID NO: 127132
  derived and/or modified CDS sequence (opt2) from glycoprotein__RABV__GU186408.1

SEQ ID NO: 127134 - RNA, 1575 nt, Artificial Sequence
  derived and/or modified CDS sequence (opt2) from glycoprotein__RABV__GU186409.1
augaucccccagguccuccucuucgucccccuccucgucuucuccuccugcuucggcaaguuccccaucuacaccauccccgacaagcucggccccuggucccccaucgacauccaccaccucuccugccccaacaaccucgucgucgaggacgagggcugcaccaaccucuccggcuucuccuacauggagcucaaggucggcuacaucuccgccaucaaggucaacggcuucaccugcaccggcgccgucaccgaggccgagaccuacaccaacuucgucggcuacgucaccaccaccuucaagcgcaagcacuuccgccccaugcccgacgccugccgcgccgccuacaacuggaagauggccggcgacccccgcuacgaggagucccuccacaaccccuaccccgacuaccacuggcuccgcaccgucaagaccaccaaggagucccucgucaucaucucccccuccgucgccgaccucgaccccuacgacaagucccuccacucccgcgucuuccccggcggcaagugcuccggcaucaccgucuccuccaccugcugcuccaccaaccacgacuacaccaucuggaugcccgagaacccccgccucggcaccuccugcgacaucuucaccaacucccgcggcaagcgcgccuccaagggcggcaagaccugcggcuucgucgacgagcgcggccucuacaagucccucaagggcgccugcaagcucaagcucugcggcguccucggccuccgccucauggacggcaccugggucgccauccagaccuccgacgagaucaaguggugcccccccgaccagcucgucaaccuccacgacuuccacuccgacgagaucgagcaccucgucgucgaggagcucgucaagaagcgcgaggagugccucgacgcccucgagaccaucaugaccaccaaguccgucuccuuccgccgccucucccaccuccgcaagcucguccccggcuucggcaaggccuacaccaucuucaacaagacccucauggaggccgacgcccacuacaaguccauccgcaccuggaacgagaucauccccuccaagggcugccuccgcgucggcggccgcugccacccccacgucaacggcgucuucuucaacggcaucauccucggccccgacggccacguccucauccccgagaugcaguccucccuccuccaccagcacauggagcuccucgaguccuccgucaucccccucaugcacccccucgccgaccccuccaccgucuucaaggacggcgacgaggccgaggacuucgucgagguccaccuccccgacguccacaagcagaucuccggcgucgaccucggccuccccaacuggggcaaguacguccucaucuccgccggcgcccucaccgcccucaugcucaccaucuuccucaugaccugcugccgcaagaccaaccgcgccggcuccauccagcacucccccggcgagaccggccgcaaggucuccgucaccucccacaacggccgcgucaucuccuccugggaguccuacaaguccggcuccgagaccaagcucuga

SEQ ID NO: 127135 - RNA, 1575 nt, Artificial Sequence
  derived and/or modified CDS sequence (opt2) from glycoprotein__RABV__GU186410.1
augaucccccagguccuccucuucgucccccuccucgucuucuccuccggcuucggcaaguuccccaucuacaccauccccgacaagcucggccccuggucccccaucgacauccaccaccucuccugccccaacaaccucgucgucgaggacgagggcugcaccaaccucuccggcuucuccuacauggagcucaaggucggcuacaucuccgccaucaaggucaacggcuucaccugcaccggcgucgucaccgaggccgagaccuacaccaacuucgucggcuacgucaccaccaccuucaagcgcaagcacuuccgccccaugcccgacgccugccgcgccgccuacaacuggaagauggccggcgacccccgcuacgaggagucccuccacaaccccuaccccgacuaccacuggcuccgcaccgucaagaccaccaaggagucccucgucaucaucucccccuccgucgccgaccucgaccccuacgacaagucccuccacucccgcgucuuccccggcggcaagugcuccggcaucaccgucuccuccaccugcugcuccaccaaccacgacuacaccaucuggaugcccgagaacccccgccucggcaccuccugcgacaucuucaccaacucccgcggcaagcgcgccuccaagggcggcaagaccugcggcuucgucgacgagcgcggccucuacaagucccucaagggcgccugcaagcucaagcucugcggcguccucggccuccgccucauggacggcaccugggucgccauccagaccuccgacgagaucaaguggugcucccccgaccagcucgucaaccuccacgacuuccacuccgacgagaucgagcaccucgucgucgaggagcucgucaagaagcgcgaggagugccucgacgcccucgagaccaucaugaccaccaaguccgucuccuuccgccgccucucccaccuccgcaagcucguccccggcuucggcaaggccuacaccaucuucaacaagacccucauggaggccgacgcccacuacaaguccauccgcaccuggaacgagaucauccccuccaagggcugccuccgcgucggcggccgcugccacccccacgucaacggcgucuucuucaacggcaucauccucggccccgacggccacguccucauccccgagaugcaguccucccuccuccaccagcacauggagcuccucgaguccuccgucaucccccucaugcacccccucgccgaccccuccaccgucuucaaggacggcgacgaggccgaggacuucgucgagguccaccuccccgacguccacaagcagaucuccggcgucgaccucggccuccccaacuggggcaaguacguccucaucuccgccggcgcccucaccgcccucaugcucaccaucuuccucaugaccugcugccgcaagaccaaccgcgccggcuccauccagcacucccccggcgagaccggccgcaaggucuccgucaccucccacaacggccgcgucaucuccuccugggaguccuacaaguccggcuccgagaccaagcucuga

SEQ ID NO: 127136 - RNA, 1575 nt, Artificial Sequence; identical to SEQ ID NO: 126888
  derived and/or modified CDS sequence (opt2) from glycoprotein__RABV__GU345746.1

SEQ ID NO: 127137 - RNA, 1575 nt, Artificial Sequence
  derived and/or modified CDS sequence (opt2) from glycoprotein__RABV__GU345747.1
augaucccccaggcccuccucuucgucccccuccucgucuucucccucugcuucggcaaguuccccaucuacaccauccccgacaagcucggccccuggucccccaucgacauccaccaccucuccugccccaacaaccucgucgucgaggacgagggcugcaccaaccucuccggcuucuccuacauggagcucaaggucggcuacaucuccgccaucaaggucaacggcuucaccugcaccggcgucgucaccgaggccgagaccuacaccaacuucgucggcuacgucaccaccaccuucaagcgcaagcacuuccgccccacccccgacgccugccgcgccgccuacaacuggaagauggccggcgacccccgcuacgaggagucccuccacaaccccuaccccgacuaccacuggcuccgcaccgucaagaccaccaaggagucccucgucaucaucucccccuccgucgccgaccucgaccccuacgacaagucccuccacucccgcgucuuccccuccggcaagugcuccggcaucaccgucuccuccaccuacugcuccaccaaccacgacuacaccaucuggaugcccgagaacccccgccucggcaccuccugcgacaucuucgucaacucccgcggcaagcgcgccuccaagggcuccaagaccugcggcuucgucgacgagcgcggccucuacaagucccucaagggcgccugcaagcucaagcucugcggcguccucggccuccgccucauggacggcaccugggucgccauccagaccuccgacgagaccaaguggugcccccccgaccagcucgucaaccuccacgacuuccgcuccgacgagaucgagcaccucgucgucgaggagcucgucaagaagcgcgaggagugccucgacgcccucgaguccaucaugaccaccaaguccgucuccuuccgccgccucucccaccuccgcaagcucguccccggcuucggcaaggccuacaccaucuucaacaagacccucauggaggccgacgcccacuacaaguccguccgcaccuggaacgagaucauccccuccaagggcugccuccgcgucggcggccgcugccacccccacgucaacggcgucuucuucaacggcaucauccucggccccgacggccacguccucauccccgagaugcaguccucccuccuccagcagcacauggagcuccucgaguccuccgucaucccccucaugcacccccucgccgaccccuccaccaucuucaaggacggcgacgaggccgaggacuucgucgagguccaccuccccgacguccacaagcaggucuccggcgucgaccucggccuccccaacuggggcaaguacguccucauguccgccggcgcccucaucgcccucaugcucaugaucuuccucaugaccugcugccgcaagaccgaccgcaccggcuccacccaccacucccccggcgagaccggccgcaaggucuccgucaccucccagaacggccgcgucaucgccuccugggaguccuacaaguccggcggcgagacccgccucuga

SEQ ID NO: 127138 - RNA, 1575 nt, Artificial Sequence
  derived and/or modified CDS sequence (opt2) from glycoprotein__RABV__GU565703.1
auggucccccagguccuccucuucgucccccuccucggcuucucccucugcuucggcaaguuccccaucuacaccauccccgacaagcucggccccuggucccccaucgacauccaccaccucuccugccccaacaaccucgucgucgaggacgagggcugcaccaaccucuccgaguucuccuacauggagcucaaggucggcuacaucuccgccaucaaggucaacggcuucaccugcaccggcgucgucaccgaggccgagaccuacaccaacuucgucggcuacgucaccaccaccuucaagcgcaagcacuuccgccccacccccgacgccugccgcgccgccuacaacuggaagauggccggcgacccccgcuacgaggagucccuccacaaccccuaccccgacuaccacuggcuccgcaccgucaagaccaccaaggagucccucgucaucaucucccccuccgucaccgaccucgaccccuacgacaagucccuccacucccgcgucuuccccggcggcaacugcuccggcaucaccgucuccuccaccuacugcuccaccaaccacgacuacaccaucuggaugcccgagaaccuccgccucggcaccuccugcgacaucuucaccaacucccgcggcaagcgcgccuccaagggcggcaagaccugcggcuucgucgacgagcgcggccucuacaagucccucaagggcgccugcaagcucaagcucugcggcguccucggccuccgccucauggacggcaccugggucgccaugcagaccuccgacgagaccaaguggugcccccccggccagcucgucaaccuccacgacuuccgcuccgacgagaucgagcaccucgucgucgaggagcucgucaagaagcgcgaggagugccucgacgcccucgaguccaucaugaccaccaaguccgucuccuuccgccgccucucccaccuccgcaagcucguccccggcuucggcaaggccuacaccaucuucaacaagacccucauggaggccgacgcccacuacaaguccguccgcaccuggaacgagaucauccccuccaagggcugccuccgcgucggcggccgcugccacccccacgucaacggcgucuucuucaacggcaucauccucggcuccgacggccacguccucauccccgagaugcaguccucccuccuccagcagcacauggagcuccucgaguccuccgucaucccccucaugcacccccucgccgaccccuccaccgucuucaaggacggcgacgaggucgaggacuucgucgagguccaccuccccgacguccacgagcaggucuccggcgucgagcucggccuccccaacuggggcaaguacguccucaugaucgccggcgcccucaucgcccucaugcucaucaucuuccucaugaccugcugccgccgcgucaaccgccccgaguccacccaguccucccucggcgagaccggccgcaacgucuccgucaccucccaguccggcaaggucaucuccuccugggaguccuacaaguccggcggcgagacccgccucuga

SEQ ID NO: 127139 - RNA, 1575 nt, Artificial Sequence
  derived and/or modified CDS sequence (opt2) from glycoprotein__RABV__GU565704.1
auggucccccagguccuccucuucgccccccuccucgucuucucccucugcuucggcaaguuccccaucuacaccauccccgacaagcucggccccuggucccccaucgaccuccaccaccucuccugccccaacaaccucgucgucgaggacgagggcugcaccaaccucuccggcuucuccuacauggagcucaaggucggcuacaucuccgccaucaaggucaacggcuucaccugcaccggcgucgucaccgaggccgagaccuacaccaacuucgucggcuacgucaccaccaccuucaagcgcaagcacuuccgccccacccccgacgccugccgcgccgccuacaacuggaagauggccggcgacccccgcuacgaggagucccuccacaaccccuaccccgacuaccacuggcuccgcaccgucaagaccaccaaggagucccucgucaucaucucccccuccgucaccgaccucgaccccuacgacaagucccuccacucccgcgucuuccccggcggcaacugcuccggcaucaccgucuccuccaccuacugcuccaccaaccacgacuacaccaucuggaugcccgagaaccuccgccucggcaccuccugcgacaucuucacccacucccgcggcaagcgcgccuccaagggcgacaagaccugcggcuucgucgacgagcgcggccucuacaagucccucaagggcgccugcaagcucaagcucugcggcguccucggccuccgccucauggacggcaccugggucgccaugcagaccuccgacgagaccaaguggugcccccccggccagcucgucaaccuccacgacuuccgcuccgacgagaucgagcaccucgucgucgaggagcucgucaagaagcgcgaggagugccucgacgcccucgaguccaucaugaccaccaaguccgucuccuuccgccgccucucccaccuccgcaagcucguccccggcuucggcaaggccuacaccaucuucaacaagacccucauggaggccgacgcccacuacaaguccguccagaccuggaacgagaucauccccuccaagggcugccuccgcgucggcgagcgcugccacccccacgucaacggcgucuucuucaacggcaucauccucggcuccgacggccacguccucauccccgagaugcaguccucccuccuccagcagcacauggagcuccucgaguccuccgucaucccccucaugcacccccucgccgaccccuccaccgucuucaaggacggcgacgaggucgaggacuucgucgagguccaccuccccgacguccacaagcaggucuccggcgucgaccucggccuccccaaguggggcaaguacguccucaugaucgccggcgcccucaucgcccucaugcucaucaucuuccucaugaccugcugccgccgcgucaaccgccccgaguccacccaguccaaccucggcggcaccggccgcaacgucuccgucaccucccaguccggcaaggucaucuccuccugggaguccuacaaguccggcggcgagacccgccucuga

SEQ ID NO: 127140 - RNA, 1575 nt, Artificial Sequence; identical to SEQ ID NO: 127120
  derived and/or modified CDS sequence (opt2) from glycoprotein__RABV__GU591789.1

SEQ ID NO: 127141 - RNA, 1575 nt, Artificial Sequence; identical to SEQ ID NO: 127120
  derived and/or modified CDS sequence (opt2) from glycoprotein__RABV__GU591791.1

SEQ ID NO: 127142 - RNA, 1575 nt, Artificial Sequence
  derived and/or modified CDS sequence (opt2) from glycoprotein__RABV__GU647092.1
augaucccccaggcccuccucuucgucccccuccucgucgucccccucugcuucggcaaguuccccaucuacaccauccccgacaagcucggccccuggucccccaucgacauccaccaccucuccugccccaacaaccucgucauggaggacgagggcugcaccaaccucuccggcuucuccuacauggagcucaaggucggcuacaucuccgccaucaaggucaacggcuucaccugcaccggcgucgucaccgaggccgagaccuacaccaacuucgucggcuacgucaccaccaccuucaagcgcaagcacuuccgccccacccccgacgccugccgcuccgccuacaacuggaagauggccggcgacccccgcuacgaggagucccuccacaaccccuaccccgacuaccacuggcuccgcaccgucaagaccaccaaggagcccuucgucaucaucucccccuccgucgccgaccucgaccccuacgacaagucccuccacucccgcgucuucccccgcggcaagugcuccggcaucaccgucuccuccaccuacugccccaccaaccacgacuacaccaucuggaugcccgagaacccccgcuccggcaccuccugcgacaucuucaccaacucccgcggcaagcgcgccuucaagggcuccaagaccugcggcuucgucgacgagcgcggccucuacaagucccucaagggcgccugcaagcucaagcucugcggcguccucggccuccgccucauggacggcaccugggucgccauccagaccuccgacgagaccaaguggugcccccccgaccagcucgucaaccuccacgacuuccacuccgacgagaucgagcaccucgucgucgaggagcucgucaagaagcgcgaggagugccucgacgcccucgaguccaucaugaccaccaaguccgucuccuuccgccgccucucccaccuccgcaagcucguccccggcuucggcaaggccuacaccaucuucaacaagacccucauggaggccgacgcccacuacaaguccguccgcaccuggaacgagaucauccccuccaagggcugccuccgcgucggcggccgcugccacccccacgucaacggcgucuucuucaacggcaucauccucggccccgacggccacguccucauccccgagaugcaguccucccuccuccagcagcacauggagcuccucgaguccuccgucaucccccucaugcacccccucgccgaccccuccaccgucuucaagaacggcgacgaggccgaggacuucgucgagguccaccuccccgacguccacaagcaggucuccggcgucgaccucggccuccccuccuggggcaaguacguccucauguccgccggcauccucaccgcccucaugcucaugaucuuccucaugaccugcugccgccgcaccaaccgccccgaguccauccagcacucccucggcgagaccggccgcaaggucuccgucaccucccaguccggccgcgucaucuccuccugggaguccuacaaguccggcggcgagaccaagcucuga

SEQ ID NO: 127143 - RNA, 1575 nt, Artificial Sequence
  derived and/or modified CDS sequence (opt2) from glycoprotein__RABV__GU937024.1
auggucccccaggcccuccucuucgucccccuccucgucuucuccaugugcuucggcaaguuccccaucuacaccauccccgacaagcucggccccuggucccccaucgacauccaccaccucuccugccccaacaaccucgucgucgaggacgagggcugcaccaaccucuccggcuucuccuacauggagcucaaggucggcuacaucuccgccaucaaggucaacggcuucaccugcaccggcgucgucaccgaggccgagaccuacaccaacuucgucggcuacgucaccaccaccuucaagcgcaagcacuuccgccccacccccgacgccugccgcgccgccuacaacuggaagauggccggcgacccccgcuacgaggagucccuccacaaccccuaccccgacuaccacuggcuccgcaccgucaagaccaccaaggagucccucgucaucaucucccccuccgucgccgaccucgaccccuacgacaagucccuccacucccgcgucuuccccaacggcaagugcuccggcaucaccaucuccuccaccuacugccccaccaaccacgacuacaccaucuggcuccccgagaacccccgccucggcaccuccugcgacaucuucaccaacucccgcggcaagcgcgccuccaagggcuccaagaccugcggcuucgucgacgagcgcggccucuacaagucccucaagggcgccugcaagcucaagcucugcggcguccucggccuccgccucauggacggcaccugggucgccaugcaggccuccgacgagaccaaguggugcccccccgaccagcucgucaaccuccacgacuuccgcuccgacgagaucgagcaccucgucgucgaggagcucgucaagaagcgcgaggagugccucgacgcccucgaguccaucaugaccaccaaguccgucuccuuccgccgccucucccaccuccgcaagcucguccccggcuucggcaaggccuacaccaucuucaacaagacccucauggaggccgacgcccacuacaaguccguccgcaccuggaacgagaucauccccuccaagggcugccuccgcgucggcggccgcugccacccccacgucaacggcgucuucuucaacggcaucauccucggccccgacggccacguccucauccccgagaugcaguccucccuccuccagcagcacauggagcuccucgaguccuccgucaucccccucaugcacccccucgccgaccccuccaccgucuucaaggacggcgacgaggccgagaacuucgucgagguccaccuccccgacguccacaagcagaucuccggcgucgaccucggccuccccaacuggggcaaguacguccucgucuccgccggcguccucaucgcccucaugcucaucaucuuccucaugaccugcugcggccgcgucaaccgccccaaguccacccagcacaaccucggcggcaccggccgcgaggucuccgucaccccccaguccggcaaggucaucuccuccugggaguccuacaaguccggcggcgagacccgccucuga

SEQ ID NO: 127144 - RNA, 1575 nt, Artificial Sequence
  derived and/or modified CDS sequence (opt2) from glycoprotein__RABV__GU937025.1
auggucccccaggcccuccucuucgucccccuccucgucuucuccaugugcuucggcaaguuccccaucuacaccauccccgacaagcucggccccuggucccccaucgacauccaccaccucuccugccccaacaaccucgucgucgaggacgagggcugcaccaaccucuccggcuucuccuacauggagcucaaggucggcuacaucuccgccaucaaggucaacggcuucaccugcaccggcgucgucaccgaggccgagaccuacaccaacuucgucggcuacgucaccaccaccuucaagcgcaagcacuuccgccccacccccgacgccugccgcgccgccuacaacuggaagauggccggcgacccccgcuacgaggagucccuccacaaccccuaccccgacuaccacuggcuccgcaccgucaagaccaccaaggagucccucgucaucaucucccccuccgucgccgaccucgaccccuacgacaagucccuccacucccgcgucuuccccaacggcaagugcuccggcaucaccaucuccuccaccuacugccccaccaaccacuacuacaccaucuggcuccccgagaacccccgccaggagaccuccugcgacaucuucaccaacucccgcggcaagcgcgccuccaagggcuccaagaccugcggcuucgucgacgagcgcggccucuacaagucccucaagggcgccugcaagcucaagcucugcggcguccucggccuccgccucauggacggcaccugggucgccaugcaggccuccgacgagaccaaguggugcccccccgaccagcucgucaaccuccacgacuuccgcuccgacgagaucgagcaccucgucgucgaggagcucgucaagaagcgcgaggagugccucgacgcccucgaguccaucaugaccaccaaguccgucggcuuccgccgccucucccaccuccgcaagcucguccccggcuuccgcaaggccuacaccaucuucaacaagacccucauggaggccgacgcccacuacaaguccguccgcaccuggaacgagaucauccccuccaagggcugccuccgcgucggcggccgcugccacccccacgucaacggcgucuucuucaacggcaucauccucggccccgacggccacguccucauccccgagaugcaguccucccuccuccagcagcacaugggccuccucgaguccuccgucaucccccucaugcacccccucgccgaccccuccaccgucuucaaggacggcgacgaggccgagaacuucgucgagguccaccuccccgacguccacaagcagaucuccggcgucgaccucggccuccccaacuggggcaaguacguccucgucuccgccggcguccucaucgcccucaugcucaucaucuuccucaugaccugcugcggccgcgucaaccgccccaaguccacccagcacaaccucggcggcaccggccgcgaggucuccgucaccccccaguccggcaaggucaucuccuccugggaguccuacaaguccggcggcgagacccgccucuga

SEQ ID NO: 127145 - RNA, 1575 nt, Artificial Sequence
  derived and/or modified CDS sequence (opt2) from glycoprotein__RABV__GU937026.1
auggucccccaggcccuccucuucgucccccuccucgucuucuccaugugcuucggcaaguuccccaucuacaccauccccgacaagcucggccccuggucccccaucgacauccaccaccucuccugccccaacaaccucgucgucgaggacgagggcugcaccaaccucuccggcuucuccuacauggagcucaaggucggcuacaucuccgccaucaaggucaacggcuucaccugcaccggcgucgucaccgaggccgagaccuacaccaacuucgucggcuacgucaccaccaccuucaagcgcaagcacuuccgccccacccccgacgccugccgcgccgccuacaacuggaagauggccggcgacccccgcuacgaggagucccuccacaaccccuaccccgacuaccacuggcuccgcaccgucaagaccaccaaggagucccucgucaucaucucccccuccgucgccgaccucgaccccuacgacaagucccuccacucccgcgucuuccccaacggcaagugcuccggcaucaccaucuccuccaccuacugccccaccaaccacgacuacaccaucuggcuccccgagaacccccgccucggcaccuccugcgacaucuucaccaacucccgcggcaagcgcgccuccaagggcuccaagaccugcggcuucgucgacgagcgcggccucuacaagucccucaagggcgccugcaagcucaagcucugcggcguccucggccuccgccucauggacggcaccugggucgccaugcaggccuccgacgagaccaaguggugcccccccgaccagcucgucaaccuccacgacuuccgcuccgacgagaucgagcaccucgucgucgaggagcucgucaagaagcgcgaggagugccucgacgcccucgaguccaucaugaccaccaaguccgucuccuuccgccgccucucccaccuccgcaagcucguccccggcuucggcaaggccuacaccaucuucaacaagacccucauggaggccgacgcccacuacaaguccguccgcaccuggaacgagaucauccccuccaagggcugccuccgcgucggcggccgcugccacccccacgucaacggcgucuucuucaacggcaucauccucggccccgacggccacguccucauccccgagaugcaguccucccuccuccagcagcacauggagcuccucgaguccuccgucgucccccucaugcacccccucgccgaccccuccaccguccucaaggacggcgacgaggccgagaacuucgucgagguccaccuccccgacguccacaagcagaucuccggcgucgaccucggccuccccaacuggggcaaguacguccucgucuccgccggcguccucaucgcccucaugcucaucaucuuccucaugaccugcugcggccgcgucaaccgccccaaguccacccagcacaaccucggcggcaccggccgcaaggucuccgucaccccccaguccggcaaggucaucuccuccugggaguccuacaaguccggcggcgagacccgccucuga

SEQ ID NO: 127146 - RNA, 1575 nt, Artificial Sequence
  derived and/or modified CDS sequence (opt2) from glycoprotein__RABV__GU937027.1
auggucccccaggcccuccucuucgucccccuccucgucuucuccaugugcuucggcaaguuccccaucuacaccauccccgacaagcucggccccuggucccccaucgacauccaccaccucuccugccccaacaaccucgucgucgaggacgagggcugcaccaaccucuccggcuucuccuacauggagcucaaggucggcuacaucuccgccaucaaggucaacggcuucaccugcaccggcgucgucaccgaggccgagaccuacaccaacuucgucggcuacgucaccaccaccuucaagcgcaagcacuuccgccccacccccgacgccugccgcgccgccuacaacuggaagauggccggcgacccccgcuacgaggagucccuccacaaccccuaccccgacuaccacuggcuccgcaccgucaagaccaccaaggagucccucgucaucaucucccccuccgucgccgaccucgaccccuacgacaagucccuccacucccgcgucuuccccaacggcaagugcuccggcaucaccaucuccuccaccuacugccccaccaaccacuacuacaccaucuggcuccccgagaacccccgccucggcaccuccugcgacaucuucaccaacucccgcggcaagcgcgccuccaagggcuccaagaccugcggcuucgucgacgagcgcggccucuacaagucccucaagggcgccugcaagcucaagcucugcggcguccucggccuccgccucauggacggcaccugggucgccaugcaggccuccgacgagaccaaguggugcccccccgaccagcucgucaaccuccacgacuuccgcuccgacgagaucgagcaccucgucgucgaggagcucgucaagaagcgcgaggagugccucgacgcccucgaguccaucaugaccaccaaguccgucuccuuccgccgccucucccaccuccgcaagcucguccccggcuucggcaaggccuacaccaucuucaacaagacccucauggaggccgacgcccacuacaaguccguccgcaccuggaacgagaucauccccuccaagggcugccuccgcgucggcggccgcugccacccccacgucaacggcgucuucuucaacggcaucauccucggccccgacggccgcguccucauccccgagaugcaguccucccuccuccagcagcacauggagcuccucgaguccuccgucaucccccucaugcacccccucgccgaccccuccaccgucuucaaggacggcgacgaggccgagaacuucgucgagguccaccuccccgacguccacaagcagaucuccggcgucgaccucggccuccccaacuggggcaaguacguccucgucuccgccggcguccucaucgcccucaugcucaucaucuuccucaugaccugcugcggccgcgucaaccgccccaaguccacccagcacaaccucggcggcaccggccgcgaggucuccgucaccccccaguccggcaaggucaucuccuccugggaguccuacaaguccggcggcgagacccgccucuga

SEQ ID NO: 127147 - RNA, 1575 nt, Artificial Sequence
  derived and/or modified CDS sequence (opt2) from glycoprotein__RABV__GU937028.1
auggucccccaggcccuccucuucgucccccuccucgucuucuccaugugcuucggcaaguuccccaucuacaccauccccgacaagcucggccccuggucccccaucgacauccaccaccucuccugccccaacaaccucgucgucgaggacgagggcugcaccaaccucuccggcuucuccuacauggagcucaaggucggcuacaucuccgccaucaaggucaacggcuucaccugcaccggcgucgucaccgaggccgagaccuacaccaaccucgucggcuacgucaccaccaccuucaagcgcaagcacuuccgccccacccccgacgccugccgcgccgccuacaacuggaagauggccggcgacccccgcuacgaggagucccuccacaaccccuaccccgacuaccacuggcuccgcaccgucaagaccaccaaggagucccucgucaucaucucccccuccgucgccgaccucgaccccuacgacaagucccuccacucccgcgucuuccccaacggcaagugcuccggcaucaccaucuccuccaccuacugccccaccaaccacgacuacaccaucuggcuccccgagaacccccgccucggcaccuccugcgacaucuucaccaacucccgcggcaagcgcgccuccaagggcuccaagaccugcggcuucgucgacgagcgcggccucuacaagucccucaagggcgccugcaagcucaagcucugcggcguccucggccuccgccucauggacggcaccugggucgccaugcaggccuccgacgagaccaaguggugcccccccgaccagcucgucaaccuccacgacuuccgcuccgacgagaucgagcaccucgucgucgaggagcucgucaagaagcgcgaggagugccucgacgcccucgaguccaucaugaccaccaaguccgucuccuuccgccgccucucccaccuccgcaagcucguccccggcuucggcaaggccuacaccaucuucaacaagacccucauggaggccgacgcccacuacaaguccguccgcaccuggaacgagaucauccccuccaagggcugccuccgcgucggcggccgcugccacccccacgucaacggcgucuucuucaacggcaucauccucggccccgacggccacguccucauccccgagaugcaguccucccuccuccagcagcacauggagcuccucgaguccuccgucaucccccucaugcacccccucgccgaccccuccaccgucuucaaggacggcgacgaggccgagaacuucgucgagguccaccuccccgacguccacaagcagaucuccggcgucgaccucggccuccccaacuggggcaaguacguccucgucuccgccggcguccucaucgcccucaugcucaucaucuuccucaugaccugcugcggccgcgucaaccgccccaaguccacccagcacaaccucggcggcaccggccgcgaggucuccgucaccccccaguccggcaaggucaucuccucccgcgaguccuacaaguccggcggcgagacccgccucuga

SEQ ID NO: 127148 - RNA, 1575 nt, Artificial Sequence
  derived and/or modified CDS sequence (opt2) from glycoprotein__RABV__GU937029.1
auggucccccaggcccuccucuucgucccccuccucgucuucuccaugugcuucggcaaguuccccaucuacaccauccccgacaagcucggccccuggucccccaucgacauccaccaccucuccugccccaacaaccucgucgucgaggacgagggcugcaccaaccucuccggcuucuccuacauggagcucaaggucggcuacaucuccgccaucaaggucaacggcuucaccugcaccggcgucgucaccgaggccgagaccuacaccaaccucgucggcuacgucaccaccaccuucaagcgcaagcacuuccgccccacccccgacgccugccgcgccgccuacaacuggaagauggccggcgacccccgcuacgaggagucccuccacaaccccuaccccgacuaccacuggcuccgcaccgucaagaccaccaaggagucccucgucaucaucucccccuccgucgccgaccucgaccccuacgacaagucccuccacucccgcgucuuccccaacggcaagugcuccggcaucaccaucuccuccaccuacugccccaccaaccacgacuacaccaucuggcuccccgagaacccccgccucggcaccuccugcgacaucuucaccaacucccgcggcaagcgcgccuccaagggcuccaagaccugcggcuucgucgacgagcgcggccucuacaagucccucaagggcgccugcaagcucaagcucugcggcguccucggccuccgccucauggacggcaccugggucgccaugcaggccuccgacgagaccaaguggugcccccccgaccagcucgucaaccuccacgacuuccgcuccgacgagaucgagcaccucgucgucgaggagcucgucaagaagcgcgaggagugccucgacgcccucgaguccaucaugaccaccaaguccgucuccuuccgccgccucucccaccuccgcaagcucguccccggcuucggcaaggccuacaccaucuucaacaagacccucauggaggccgacgcccacuacaaguccguccgcaccugggacgagaucauccccuccaagggcugccuccgcgucggcggccgcugccacccccacgucaacggcgucuucuucaacggcaucauccucggccccgacggccacguccucauccccgagaugcaguccucccuccuccagcagcacauggagcuccucgaguccuccgucaucccccucaugcacccccucgccgaccccuccaccgucuucaaggacggcgacgaggccgagaacuucgucgagguccaccuccccgacguccacaagcagaucuccggcgucgaccucggccuccccaacuggggcaaguacguccucgucuccgccggcguccucaucgcccucaugcucaucauccuccucaugaccugcugcggccgcgucaaccgccccaaguccacccagcacaaccucggcggcaccggccgcgaggucuccgucaccccccaguccggcaaggucaucuccuccugggaguccuacaaguccggcggcgagacccgccucuga

SEQ ID NO: 127149 - RNA, 1575 nt, Artificial Sequence
  derived and/or modified CDS sequence (opt2) from glycoprotein__RABV__GU937030.1
auggucccccaggcccuccucuucgucccccuccucgucuucuccaugugcuucggcaaguuccccaucuacaccauccccgacaagcucggccccuggucccccaucgacauccaccaccucuccugccccaacaaccucgucgucgaggacgagggcugcaccaaccucuccggcuucuccuacauggagcucaaggucggcuacaucuccgccaucaaggucaacggcuucaccugcaccggcgucgucaccgaggccgagaccuacaccaacuucgucggcuacgucaccaccaccuucaagcgcaagcacuuccgccccacccccgacgccugccgcgccgccuacaacuggaagauggccggcgacccccgcuacgaggagucccuccacaaccccuaccccgacuaccacuggcuccgcaccgucaagaccaccaaggagucccucgucaucaucucccccuccgucgccgaccucgaccccuacgacaagucccuccacucccgcgucuuccccaacggcaagugcuccggcaucaccaucuccuccaccuacugccccaccaaccacgacuacaccaucuggcuccccgagaacccccgccucggcaccuccugcgacaucuucaccaacucccgcggcaagcgcgccuccaagggcuccaagaccugcggcuucgucgacgagcgcggccucuacaagucccucaagggcgccugcaagcucaagcucugcggcguccucggccuccgccucauggacggcaccugggucgccaugcaggccuccgacgagaccaaguggugcccccccgaccagcucgucaaccuccacgacuuccgcuccgacgagaucgagcaccucgucgucgaggagcucgucaagaagcgcgaggagugccucgacgcccucgaguccaucaugaccaccaaguccgucuccuuccgccgccucucccaccuccgcaagcccguccccggcuucggcaaggccuacaccaucuucaacaagacccucauggaggccgacgcccacuacaaguccguccgcaccuggaacgagaucauccccuccaagggcugccuccgcgucggcggccgcugccacccccacgucaacggcgucuucuucaacggcaucauccucggccccgacggccacguccucauccccgagaugcaguccucccuccuccagcagcacauggagcuccucgaguccuccgucaucccccucaugcacccccucgccgaccccuccaccgucuucaaggacggcgacgaggccgagaacuucgucgagguccaccuccccgacguccacaagcagaucuccggcgucgaccucggccuccccaacuggggcgaguacguccucgucuccgccggcguccucaucgcccucaugcucaucaucuuccucaugaccugcugcggccgcgucaaccgccccaaguccacccagcacaaccucggcggcaccggccgcgaggucuccgucaccccccaguccggcaaggucaucuccuccugggaguccuacaaguccggcggcgagacccgccucuga

SEQ ID NO: 127150 - RNA, 1575 nt, Artificial Sequence
  derived and/or modified CDS sequence (opt2) from glycoprotein__RABV__GU937031.1
auggucccccaggcccuccucuucgucccccuccucgucuucuccaugugcuucggcaaguuccccaucuacaccauccccgacaagcucggccccuggucccccaucgacauccaccaccucuccugccccaacaaccucgucgucgaggacgagggcugcaccaaccucuccggcuucuccuacauggagcucaaggucggcuacaucuccgccaucaaggucaacggcuucaccugcaccggcgucgucaccgaggccgagaccuacaccaacuucgucggcuacgucaccaccaccuucaagcgcaagcacuuccgccccacccccgacgccugccgcgccgccuacaacuggaagauggccggcgacccccgcuacgaggagucccuccacaaccccuaccccgacuaccacuggcuccgcaccgucaagaccaccaaggagucccucgucaucaucucccccuccgucgccgaccucgaccccuacgacaagucccuccacucccgcgucuuccccaacggccgcugcuccggcaucaccaucuccuccaccuacugccccaccaaccacgacuacaccaucuggcuccccgagaacccccgccucggcaccuccugcgacaucuucaccaacucccgcggcaagcgcgccuccaagggcuccaagaccugcggcuucgucgacgagcgcggccucuacaagucccucaagggcgccugcaagcucaagcucugcggcguccucggccuccgccucauggacggcaccugggucgccaugcaggccuccgacgagaccaaguggugcccccccgaccagcucgucaaccuccacgacuuccgcuccgacgagaucgagcaccucgucgucgaggagcucgucaagaagcgcgaggagugccucgacgcccucgaguccaucaugaccaccaaguccgucuccuuccgccgccucucccaccuccgcaagcucguccccggcuucggcaaggccuacaccaucuucaacaagacccucauggaggccgacgcccacuacaaguccguccgcaccuggaacgagaucauccccuccaagggcugccuccgcgucggcggccgcugccacccccacgucaacggcgucuucuucaacggcaucauccucggccccgacggccacguccucauccccgagaugcaguccucccuccuccagcagcacauggagcuccucgaguccuccgucaucccccucaugcacccccucgccgaccccuccaccgucuucaaggacggcgacgaggccgagaacuucgucgagguccaccuccccgacguccacaagcagaucuccggcgucgaccucggccuccccaacuggggcaaguacguccucgucuccgccggcguccucaucgcccucaugcucaucaucuuccucaugaccugcugcggccgcgucaaccgccccaaguccacccagcacaaccucggcggcaccggccgcgaggucuccgucaccccccaguccggcaaggucaucuccuccugggaguccuacaaguccggcggcgagacccgccucuga

SEQ ID NO: 127151 - RNA, 1575 nt, Artificial Sequence
  derived and/or modified CDS sequence (opt2) from glycoprotein__RABV__GU937032.1
auggucccccaggcccuccucuucgucccccuccucgccuucuccaugugcuucggcaaguuccccaucuacaccauccccgacaagcucggccccuggucccccaucgacauccaccaccucuccugccccaacaaccucgucgucgaggacgagggcugcaccaaccucuccggcuucuccuacauggagcucaaggucggcuacaucuccgccaucaaggucaacggcuucaccugcaccggcgucgucaccgaggccgagaccuacaccaacuucgucggcuacgucaccaccaccuucaagcgcaagcacuuccgccccacccccgacgccugccgcgccgccuacaacuggaagauggccggcgacccccgcuacgaggagucccuccacaaccccuaccccgacuaccacuggcuccgcaccgucaagaccaccaaggagucccucgucaucaucucccccuccgucgccgaccucgaccccuacgacaagucccuccacucccgcgucuuccccaacggcaagugcuccggcaucaccaucuccuccaccuacugccccaccaaccacgacuacaccaucuggcuccccgagaacccccgccucggcaccuccugcgacaucuucaccaacucccgcggcaagcgcgccuccaagggcuccaagaccugcggcuucgucgacgagcgcggccucuacaagucccucaagggcgccugcaagcucaagcucugcggcguccucggccuccgccucauggacgagaccugggucgccaugcaggccuccgacgagaccaaguggugcccccccgaccagcucgucaaccuccacgacuuccgcuccgacgagaucgagcaccucgucgucgaggagcucgucaagaagcgcgaggagugccucgacgcccucgaguccaucaugaccaccaaguccgucuccuuccgccgccucucccaccuccgcaagcucguccccggcuucggcaaggccuacaccaucuucaacaagacccucauggaggccgacgcccacuacaaguccguccgcaccuggaacgagaucauccccuccaagggcugccuccgcgucggcggccgcugccacccccacgucaacggcgucuucuucaacggcaucauccucggccccgacggccacguccucauccccgagaugcaguccucccuccuccagcagcacauggagcuccucgaguccuccgucaucccccucaugcacccccucgccgaccccuccaccgucuucaaggacggcgacgaggccgagaacuucgucgagguccaccuccccgacguccacaagcagaucuccggcgucgaccucggccuccccaacuggggcaaguacguccucgucuccgccggcguccucaucgcccucaugcucaucaucuuccucaugaccugcugcggccgcgucaaccgccccaaguccacccagcacaaccucggcggcaccggccgcgaggucuccgucaccccccaguccggcaaggucaucuccuccugggaguccuacaaguccggcggcgagacccgccucuga

SEQ ID NO: 127152 - RNA, 1575 nt, Artificial Sequence
  derived and/or modified CDS sequence (opt2) from glycoprotein__RABV__GU937033.1
auggucccccaggcccuccucuucgucccccuccucgucuucuccaugugcuucggcaaguuccccaucuacaccauccccgacaagcucggccccuggucccccaucgacauccaccaccucuccugccccaacaaccucgucgucgaggacgagggcugcaccaaccucuccggcuucuccuacauggagcucaaggucggcuacaucuccgccaucaaggucaacggcuucaccugcaccggcgucgucaccgaggccgagaccuacaccaacuucgucggcuacgucaccaccaccuucaagcgcaagcacuuccgccccacccccgacgccugccgcgccgccuacaacuggaagauggccggcgacccccgcuacgaggagucccuccacaaccccuaccccgacuaccacuggcuccgcaccgucaagaccaccaaggagucccucgucaucaucucccccuccgucgccgaccucgaccccuacgacaagucccuccacucccgcgucuuccccaacggcaagugcuccggcaucaccaucuccuccaccuacugccccaccaaccacgacuacaccaucuggcuccccgagaacccccgccucggcaccuccugcgacaucuucaccaacucccgcggcaagcgcgccuccaagggcuccaagaccugcggcuucgucgacgagcgcggccucuacaagucccucaagggcgccugcaagcucaagcucugcggcguccucggccuccgccucauggacggcaccugggucgccaugcaggccuccgacgagaccaaguggugcccccccgaccagcucgucaaccuccacgacuuccgcuccgacgagaucgagcaccucgucgucgaggagcucgucaagaagcgcgaggagugccucgacgcccucgaguccaucaugaccaccaaguccgucuccuuccgccgccucucccaccuccgcaagcucguccccggcuucggcaaggccuacaccaucuucaacaagacccucauggaggccgacgcccaccacaaguccguccgcaccuggaacgagaucauccccuccaagggcugccuccgcgucggcggccgcugccacccccacgucaacggcgucuucuucaacggcaucauccucggccccgacggccacguccucauccccgagaugcaguccucccuccuccagcagcacauggagcuccucgaguccuccgucgucccccucaugcacccccucgccgaccccuccaccguccucaaggacggcgacgaggccgagaacuucgucgagguccaccuccccgacguccacaagcagaucuccggcgucgaccucggccuccccaacuggggcaaguacguccucgucuccgccggcguccucaucgcccucaugcucaucaucuuccucaugaccugcugcggccgcgucaaccgccccaaguccacccagcacaaccucggcggcaccggccgcaaggucuccgucaccccccaguccggcaaggucaucuccuccugggaguccuacaaguccggcggcgagacccgccucuga

SEQ ID NO: 127153 - RNA, 1575 nt, Artificial Sequence
  derived and/or modified CDS sequence (opt2) from glycoprotein__RABV__GU937034.1
auggucccccaggcccuccucuucgucccccuccucgucuucuccaugugcuucggcaaguuccccaucuacaccauccccgacaagcucggccccuggucccccaucgacauccaccaccucuccugccccaacaaccucgucgucgaggacgagggcugcaccaaccucuccggcuucuccuacauggagcucaaggucggcuacaucuccgccaucaaggucaacggcuucaccugcaccggcgucgucaccgaggccgagaccuacaccaacuucgucggcuacgucaccaccaccuucaagcgcaagcacuuccgccccacccccgacgucugccgcgccgccuacaacuggaagauggccggcgacccccgcuacgaggagucccuccacaaccccuaccccgacuaccacuggcuccgcaccgucaagaccaccaaggagucccucgucaucaucucccccuccgucgccgaccucgaccccuacgacaagucccuccacucccgcgucuuccccaacggcaagugcuccggcaucaccaucuccuccaccuacugccccaccaaccacgacuacaccaucuggcuccccgagaacccccgccucggcacccccugcgacaucuucaccaacucccgcggcaagcgcgccuccaagggcuccaagaccugcggcuucgucgacgagcgcggccucuacaagucccucaagggcgccugcaagcucaagcucugcggcguccucggccuccgccucauggacggcaccugggucgccaugcaggccuccgacgagaccaaguggugcccccccgaccagcucgucaaccuccacgacuuccgcuccgacgagaucgagcaccucgucgucgaggagcucgucaagaagcgcgaggagugccucgacgcccucgaguccaucaugaccaccaaguccgucuccuuccgccgccucucccaccuccgcaagcucguccccggcuucggcaaggccuacaccaucuucaacaagacccucauggaggccgacgcccacuacaaguccguccgcaccuggaacgagaucauccccuccaagggcugccuccgcgucggcggccgcugccacccccacgucaacggcgucuucuucaacggcaucauccucggccccgacggccacguccucauccccgagaugcaguccucccuccuccagcagcacauggagcuccucgaguccuccgucaucccccucaugcacccccucgccgaccccuccaccgucuucaaggacggcgacgaggccgagaacuucgucgagguccaccuccccgacguccacaagcagaucuccggcgucgaccucggccuccccaacuggggcaaguacguccucgucuccgccggcguccucaucgcccucaugcucaucaucuuccucaugaccugcugcggccgcgucaaccagcccaaguccacccagcacaaccucggcggcaccggccgcgaggucuccgucaccccccaguccggcaaggucaucuccuccugggaguccuacaaguccggcggcgagacccgccucuga

SEQ ID NO: 127154 - RNA, 1575 nt, Artificial Sequence
  derived and/or modified CDS sequence (opt2) from glycoprotein__RABV__HE801606.1
auggucccccagguccuccucuucgucccccuccucgucuucuccaugugcuucggcaaguuccccaucuacaccauccccgacaagcucggccccuggucccccaucgacauccaccaccucuccugccccaacaaccucgucgucgaggacgagggcugcaccaaccucuccggcuucuccuacauggagcucaaggucggcuacaucuccgccaucaaggucaacggcuucaccugcaccggcgucgucaccgaggccgagaccuacaccaacuucgucggcuacgucaccaccaccuucaagcgcaagcacuuccgccccacccccgacgccugccgcgccgccuacaacuggaagcucgccggcgacccccgcuacgaggagucccuccacaaccccuaccccgacuaccacuggcuccgcaccgucaagaccaccaaggagucccucgucaucaucucccccuccgucgccgaccucgaccccuacgacaagucccuccacucccgcgucuuccccuccggcaagugccucggcaucaccaucuccuccaccuacugcuccaccaaccacgacuacaccaucuggaugcccgagaacccccgccucggcaccuccugcgacaucuucaccaacucccgcggcaagcgcgccuccaagggcuccaagaccugcggcuucgucgacgagcgcggccucuacaagucccucaagggcgccugcaagcucaagcucugcggcguccucggccuccgccucauggacggcaccugggucgccaugcagaccuccgacgagaccaaguggugcccccccgaccagcucgucaaccuccacgacuuccgcuccgacgagaucgagcaccucgucgucgaggagcucgucaagaagcgcgaggagugccucgacgcccucgaguccaucaugaccaccaaguccgucuccuuccgccgcuucucccaccuccgcaagcucguccccggcuucggcaaggccuaccccaucuucaacaagacccucauggaggccgacgcccacuacaaguccguccgcaccuggaacgagaucauccccuccaagggcugccuccgcgucggcggccgcugccacccccacgucaacggcgucuucuucaacggcaucauccucggccccgacggccacguccucauccccgagaugcaguccucccuccuccagcagcacauggagcuccucgaguccuccgucaucccccucaugcacccccucgccgaccccuccaccgucuucaaggacggcgacgaggccgaggacuucgucgagguccaccuccccgacguccacaagcagaucuccggcgucgaccucggccuccccuccuggggcaaguacguccucgucuccgccggcguccucgucguccucaugcucaccaucuucaccaugaccugcugcggccgcguccaccgccccaaguccacccagcacucccucggcggcaccggccgcaaggucuccgucaccucccaguccggcaaggucaucuccuccugggaguccuacaaguccggcggcgagacccgccucuga

SEQ ID NO: 127155 - RNA, 1575 nt, Artificial Sequence
  derived and/or modified CDS sequence (opt2) from glycoprotein__RABV__HE801607.1
auggucccccagguccacauguucgucccccuccucgucuacgccaugugcuucggcaaguuccccaucuacaccauccccgacaagcucggccccuggucccccaucgacauccaccaccucuccugccccaacaaccucgucgucgaggacgagggcugcaccaaccucuccggcuucuccuacauggagcucaaggucggcuacaucuccgccaucaaggucuccggcuucaccugcaccggcgucgucaccgaggccgagaccuacaccaacuucgucggcuacgucaccaccaccuucaagcgcaagcacuuccgccccacccccgacgccugccgcgccgccuacaacuggaagcucgccggcgacccccgcuacgaggagucccuccacaaccccuaccccgacuaccacuggcuccgcaccgucaagaccaccaaggagucccucgucaucaucucccccuccgucgccgaccucgaccccuacgacaagucccuccacucccgcgucuuccccuccggcaagugccucggcaucaccaucuccuccaccuacugcuccaccaaccacgacuacaccaucuggaugcccgagaacccccgccucggcaccuccugcgacaucuucaccaacucccgcggcaagcgcgccuccaagggcuccaagaccugcggcuucgucgacgagcgcggccucuacaagucccucaagggcgccugcaagcucaagcucugcggcguccucggccuccgccucauggacggcaccugggucgccaugcagaccuccgacgagaccaaguggugcccccccgaccagcucgucaaccuccacgacuuccgcuccgacgagaucgagcaccucgucgucgaggagcucgucaagaagcgcgaggagugccucgacgcccucgaguccaucaugaccaccaaguccgucuccuuccgccgccucucccaccuccgcaagcucguccccggcuucggcaaggccuacaccaucuucaacaagacccucauggaggccgacgcccacuacaaguccguccgcaccuggaacgagaucauccccuccaagggcugccuccgcgucggcggccgcugccacccccacgucaacggcgucuucuucaacggcaucauccucggccccgacggccacguccucauccccgagaugcaguccucccuccuccagcagcacauggagcuccucgaguccuccgucaucccccucaugcacccccucgccgaccccuccaccgucuucaaggacggcgacgaggccgaggacuucgucgagguccaccuccccgacguccacaagcagaucuccggcgucgaccucggccuccccuccuggggcaaguacguccucgucuccgccggcguccucgucguccucaugcucgccaucuucaucaugaccugcugcggccgcguccaccgccccaaguccacccagcacucccucggcggcaccggccgcaaggccuccgucaccucccaguccggcaaggucaucuccuccugggaguccuacaaguccggcggcgagacccgccucuga

SEQ ID NO: 127156 - RNA, 1575 nt, Artificial Sequence
  derived and/or modified CDS sequence (opt2) from glycoprotein__RABV__HE801608.1
auggucccccagguccuccucuucgucccccuccucgucuucuccaugugcuucggcaaguuccccaucuacaccauccccgacaagcucggccccuggucccccaucgacauccaccaccucuccugccccaacaaccucgucgucgaggacgagggcugcaccaaccucuccggcuucuccuacauggagcucaaggucggcuacaucuccgccaucaaggucaacggcuucaccugcaccggcgucgucaccgaggccgagaccuacaccaacuucgucggcuacgucaccaccaccuucaagcgcaagcacuuccgccccacccccgacgccugccgcaccgccuacaacuggaagcucgccggcgacccccgcuacgaggagucccuccacaaccccuaccccgacuaccacuggcuccgcaccgucaagaccaccaaggagucccucgucaucaucucccccuccgucgccgaccucgaccccuacgacaagucccuccacucccgcgucuuccccuccggcaagugccucggcaucaccaucuccuccaccuacugcuccaccaaccacgacuacaccaucuggaugcccgagaacccccgccucggcaccuccugcgacaucuucaccaacucccgcggcaagcgcgccuccaagggcuccaagaccugcggcuucgucgacgagcgcggccucuacaagucccucaagggcgccugcaagcucaagcucugcggcguccucggccuccgccucauggacggcaccugggucgccaugcagaccuccgacgagaccaaguggugcccccccgaccagcucgucaaccuccacgacuuccgcuccgacgagaucgagcaccucgucgucgaggagcucgucaagaagcgcgaggagugccucgacgcccucgaguccaucaugaccaccaaguccgucuccuuccgccgccucucccaccuccgcaagcucguccccggcuucggcaaggccuacaccaucuucaacaagacccucauggaggccgacgcccacuacaaguccguccgcaccuggaacgagaucauccccuccaagggcugccuccgcgucggcggccgcugccacccccacgucaacggcgucuucuucaacggcaucauccucggccccgacggccacguccucauccccgagaugcaguccucccuccuccagcagcacauggagcuccucgaguccuccgucaucccccucaugcacccccucgccgaccccuccaccgucuucaaggacggcgacgaggccgaggacuucgucgagguccaccuccccgacguccacaagcagaucuccggcgucgaccucggccuccccuccuggggcaaguacguccucgucuccgccggcguccucgucguccucaugcucaccaucuucaucaugaccugcugcggccgcguccaccgccccaaguccacccagcacucccucggcggcaccggccgcaaggucuccgucaccucccaguccggcaaggucaucuccuccugggaguccuacaaguccggcggcgagacccgccucuga

SEQ ID NO: 127157 - RNA, 1575 nt, Artificial Sequence
  derived and/or modified CDS sequence (opt2) from glycoprotein__RABV__HE801609.1
auggucccccagguccuccucuucgucccccuccucgucuucuccaugugcuucggcaaguuccccaucuacaccauccccgacaagcucggccccuggucccccaucgacauccaccaccucuccugccccaacaaccucgucgucgaggacgagggcugcaccaaccucuccggcuucuccuacauggagcucaaggucggcuacaucuccgccaucaaggucaacggccucaccugcaccggcgucgucaccgaggccgagaccuacaccaacuucgucggcuacgucaccaccaccuucaagcgcaagcacuuccgccccacccccgacgccugccgcgccgccuacaacuggaagcucgccggcgacccccgcuacgaggagucccuccacaaccccuaccccgacuaccacuggcuccgcaccgucaagaccaccaaggagucccucgucaucaucucccccuccgucgccgaccucgaccccuacgacaagucccuccacucccgcgucuuccccuccggcaagugccucggcaucaccaucuccuccaccuacugcuccaccaaccacgacuacaccaucuggaugcccgagaacccccgccucggcaccuccugcgacaucuucaccaacucccgcggcaagcgcgccuccaagggcuccaagaccugcggcuucgucgacgagcgcggccucuacaagucccucaagggcgccugcaagcucaagcucugcggcguccucggcccccgccucauggacggcaccugggucgccaugcagaccuccgacgagaccaaguggugcccccccgaccagcucgucaaccuccacgacuuccgcuccgacgagaucgagcaccucgucgucgaggagcucgucaagaagcgcgaggagugccucgacgcccucgaguccaucaugaccaccaagucccucuccuuccgccgccucucccaccuccgcaagcucguccccggcuucggcaaggccuacaccaucuucaacaagacccucauggaggccgacgcccacuacaaguccguccgcaccuggaacgagaucauccccuccaagggcugccuccgcgucggcggccgcugccacccccacgucaacggcgucuucuucaacggcaucauccucggccccgacggccacguccucauccccgagaugcaguccucccuccuccagcagcacauggagcuccucgaguccuccgucaucccccucaugcacccccucgccgaccccuccaccgucuucaaggacggcgacgaggccgaggacuucgucgagguccaccuccccgacguccacaagcagaucuccggcgucgaccucggccuccccuccuggggcaaguacguccucgucuccgccggcguccucgucguccucaugcucaccaucuucaucaugaccugcugcggccgcguccaccgccccaaguccacccagcacucccucggcggcaucggccgcaaggucuccgucaccucccaguccggcaaggucaucuccuccugggaguccuacaaguccggcggcgagacccgccucuga

SEQ ID NO: 127158 - RNA, 1575 nt, Artificial Sequence
  derived and/or modified CDS sequence (opt2) from glycoprotein__RABV__HE801610.1
auggucccccagguccuccucuucgucccccuccucgucuucuccaugugcuucggcaaguuccccaucuacaccauccccgacaagcucggccccuggucccccaucgacauccaccaccucuccugccccaacaaccucgucgucgaggacgagggcugcaccaaccucuccggcuucuccuacauggagcucaaggucggcuacaucuccgccaucaaggucaacggcuucaccugcaccggcgucgucaccgaggccgagaccuacaccaacuucgucggcuacgucaccaccaccuucaagcgcaagcacuuccgccccacccccgacgccugccgcgccgccuacaacuggaagcucgccggcgacccccgcuacgaggagucccuccucaaccccuaccccgacuaccacuggcuccgcaccgucaagaccaccaaggagucccucgucaucaucucccccuccgucgccgaccucgaccccuacgacaagucccuccacuccaaggucuuccccuccggcaagugccucggcaucaccaucuccuccaccuacugcuccaccaaccacgacuacaccaucuggaugcccgagaacccccgccucggcaccuccugcgacaucuucaccaacucccgcggcaagcgcgccuccaagggcuccaagaccugcggcuucgucgacgagcgcggccucuacaagucccucaagggcgccugcaagcucaagcucugcggcguccucggccuccgccucauggacggcaccugggucgccaugcagaccuccgacgagaccaaguggugcccccccgaccagcucgucaaccuccacgacuuccgcuccgacgagaucgagcaccucgucgucgaggagcucgucaagaagcgcgaggagugccucgacgcccucgaguccaucaugaccaccaaguccgucuccuuccgccgccucucccaccuccgcaagcucguccccggcuucggcaaggccuacaccaucuucaacaagacccucauggaggccgacgcccacuacaaguccguccgcaccuggaacgagaucauccccuccaagggcugccuccgcgucggcggccgcugccacccccacgucaacggcgucuucuucaacggcaucauccucggccccgacggccacguccucauccccgagaugcaguccucccuccuccagcagcacauggagcuccucgaguccuccgucaucccccucaugcacccccucgccgaccccuccaccgucuucaaggacggcgacgaggccgaggacuucgucgagguccaccuccccgacguccacaagcagaucuccggcgucgaccucggccuccccuccuggggcaaguacguccucgucuccgccggcguccucgucguccucaugcucgccaucuucaucaugaccugcugcggccgcguccaccagcccaaguccacccagcacucccucggcggcaccggccgcaaggucuccgucaccucccaguccggcaaggucaucuccuccugggaguccuacaaguccggcggcgagacccgccucuga

SEQ ID NO: 127159 - RNA, 1575 nt, Artificial Sequence
  derived and/or modified CDS sequence (opt2) from glycoprotein__RABV__HE801611.1
auggucccccagguccuccucuucgucccccuccucgucuucuccaugugcuucggcaaguuccccaucuacaccauccccgacaagcucggccccuggucccccaucgacauccaccaccucuccugccccaacaaccucgucgucgaggacgagggcugcaccaaccucuccggcuucuccuacauggagcucaaggucggcuacaucuccgccaucaaggucaacggcuucaccugcaccggcgucgucaccgaggccgagaccuacaccaacuucgucggcuacgucaccaccaccuucaagcgcaagcacuuccgccccacccccgacgccugccgcgccgccuacaacuggaagcucgccggcgacccccgcuacgaggagucccuccacaaccccuaccccgacuaccacuggcuccgcaccgucaagaccaccaaggagucccucgucaucaucucccccuccgucgccgaccucgaccccuacgacaagucccuccacucccgcgucuuccccuccggcaagugccucggcaucaccaucuccuccaccuacugcuccaccaaccacgacuacaccaucuggaugcccgagaacccccgccucggcaccuccugcgacaucuucaccaacucccgcggcaagcgcgccuccaagggcuccaagaccugcggcuucgucgacgagcgcggccucuacaagucccucaagggcgccugcaagcucaagcucugcggcguccucggccuccgccucauggacggcaccugggucgccaugcagaccuccgacgagaccaaguggugcccccccgaccagcucgucaaccuccacgacuuccgcuccgacgagaucgagcaccucgucgucgaggagcucgucaagaagcgcgaggagugccucgacgcccucgaguccaucaugaccaccaaguccgucuccuuccgccgccucucccaccuccgcaagcucguccccggcuucggcaaggccuacaccaucuucaacaagacccucauggaggccgacgcccacuacaaguccauccgcaccuggaacgagaucauccccuccaagggcugccuccgcgucggcggccgcugccacccccacgucaacggcgucuucuucaacggcaucauccucggccccgacggccacguccucauccccgagaugcaguccucccuccuccagcagcacauggagcuccucgaguccuccgucaucccccucaugcacccccucgccgaccccuccaccgucuucaaggacggcgacgaggccgaggacuucgucgagguccaccuccccgacguccacaagcagaucuccggcgucgaccucggccuccccuccuggggcaaguacguccucgucuccgccggcguccucgucguccucaugcucaccaucuucaucaugaccugcugcggccgcguccaccgccccaaguccaugcagcacucccucggcggcaccggccgcaaggucuccgucaccucccaguccggcaaggucaucuccuccugggaguccuacaaguccggcggcgagacccgccucuga

SEQ ID NO: 127160 - RNA, 1575 nt, Artificial Sequence
  derived and/or modified CDS sequence (opt2) from glycoprotein__RABV__HE801612.1
auggucccccagguccuccucuucgucccccuccucgucuucuccaugugcuucggcaaguuccccaucuacaccauccccgacaagcucggccccuggucccccaucgacauccaccaccucuccugccccaacaaccucgucgucgaggacgagggcugcaccaaccucuccggcuucuccuacauggagcucaaggucggcuacaucuccgccaucaaggucaacggcuucaccugcaccggcgucgucaccgaggccgagaccuacaccaacuucgucggcuacgucaccaccaccuucaagcgcaagcacuuccgccccacccccgacgccugccgcgccgccuacaacuggaagcucgccggcgacccccgcuacgaggagucccuccacaaccccuaccccgacuaccacuggcuccgcaccgucaagaccaccaaggagucccucgucaucaucucccccuccgucgccgaccucgaccccuacgacaagucccuccacucccgcgucuuccccuccggcaagugccucggcaucaccaucuccuccaccuacugcuccaccaaccacgacuacaccaucuggaugcccgagaacccccgccucggcaccuccugcgacaucuucaccaacucccgcggcaagcgcgccuccaagggcuccaagaccugcggcuucgucgacgagcgcggccucuacaagucccucaagggcgccugcaagcucaagcucugcggcguccucggccuccgccucauggacggcaccugggucgccaugcagaccuccgacgagaccaaguggugcccccccgaccagcucgucaaccuccacgacuuccgcuccgacgagaucgagcaccucgucgucgaggagcucgucaagaagcgcgaggagugccucgacgcccucgaguccaucaugaccaccaaguccgucuccuuccgccgccucucccaccuccgcaagcucguccccggcuucggcaaggccuacaccaucuucaacaagacccucauggaggccgacgcccacuacaaguccguccgcaccuggaacgagaucauccccuccaagggcugccuccgcgucggcggccgcugccacccccacgucaacggcgucuucuucaacggcaucauccucggccccgacggccacguccucauccccgagaugcaguccucccuccuccagcagcacauggagcuccucgaguccuccgucaucccccucaugcacccccucgccgaccccuccaccgucuucaaggacggcgacgaggccgaggacuucgucgagguccaccuccccgacguccacaagcagaucuccggcgucgaccucggccuccccuccuggggcaaguacguccucgucuccgccggcguccucgucguccucaugcucaccaucuucaucaugaccugcugcggccgcguccaccgccccaaguccacccagcacucccucggcggcaccggccgcaaggucuccgucaccucccaguccggcaaggucaucuccuccugggaguccuacaaguccggcggcgagacccgccucuga

SEQ ID NO: 127161 - RNA, 1575 nt, Artificial Sequence
  derived and/or modified CDS sequence (opt2) from glycoprotein__RABV__HE801613.1
auggucccccagguccuccucuucgucccccuccucgucuucuccaugugcuucggcaaguuccccaucuacaccauccccgacaagcucggccccuggucccccaucgacauccaccaccucuccugccccaacaaccucgucgucgaggacgagggcugcaccaaccucuccggcuucuccuacauggagcucaaggucggcuacaucuccgccaucaaggucaacggcuucaccugcaccggcgucgucaccgaggccgagaccuacaccaacuucgucggcuacgucaccaccaccuucaagcgcaagcacuuccgccccacccccgacgccugccgcgccgccuacaacuggaagcucgccggcgacccccgcuacgaggagucccuccacaaccccuaccccgacuaccacuggcuccgcaccgucaagaccaccaaggagucccucgucaucaucucccccuccgucgccgaccucgaccccuacgacaagucccuccacuccaaggucuuccccuccggcaagugccucggcaucaccaucuccuccaccuacugcuccaccaaccacgacuacaccaucuggaugcccgagaacccccgccucggcaccuccugcgacaucuucaccaacucccgcggcaagcgcgccuccaagggcuccaagaccugcggcuucgucgacgagcgcggccucuacaagucccucaagggcgccugcaagcucaagcucugcggcguccucggccuccgccucauggacggcaccugggucgccaugcagaccuccgacgagaccaaguggugcccccccgaccagcucgucaaccuccacgacuuccgcuccgacgagaucgagcaccucgucgucgaggagcucgucaagaagcgcgaggagugccucgacgcccucgaguccaucaugaccaccaaguccgucuccuuccgccgccucucccaccuccgcaagcucguccccggcuucggcaaggccuacaccaucuucaacaagacccucauggaggccgacgcccacuacaaguccguccgcaccuggaacgagaucauccccuccaagggcugccuccgcgucggcggccgcugccacccccacgucaacggcgucuucuucaacggcaucauccucggccccgacggccacguccucauccccgagaugcaguccucccuccuccagcagcacauggagcuccucgaguccuccgucaucccccucaugcacccccucgccgaccccuccaccgucuucaaggacggcgacgaggccgaggacuucgucgagguccaccuccccgacguccacaagcagaucuccggcgucgaccucggccuccccuccuggggcaaguacguccucgucuccgccggcguccucgucguccucaugcucgccaucuucaucaugaccugcugcggccgcguccaccagcccaaguccacccagcacucccucggcggcaccggccgcaaggucuccgucaccucccaguccggcaaggucaucuccuccugggaguccuacaaguccggcggcgagacccgccucuga

SEQ ID NO: 127162 - RNA, 1575 nt, Artificial Sequence
  derived and/or modified CDS sequence (opt2) from glycoprotein__RABV__HE801614.1
auggucccccagguccuccucuucgucccccuccucgucuucuccaugugcuucggcaaguuccccaucuacaccauccccgacaagcucggccccuggucccccaucgacauccaccaccucuccugccccaacaaccucgucgucgaggacgagggcugcaccaaccucuccggcuucuccuacauggagcucaaggucggcuacaucuccgccaucaaggucaacggcuucaccugcaccggcgucgucaccgaggccgagaccuacaccaacuucgucggcuacgucaccaccaccuucaagcgcaagcacuuccgccccacccccgacgccugccgcgccgccuacaacuggaagauggccggcgacccccgcuacgaggagucccuccacaaccccuaccccgacuaccacuggcuccgcaccgucaagaccaccaaggagucccucgucaucaucucccccuccgucgccgaccucgaccccuacgacaagucccuccacucccgcgucuuccccuccggcaagugccucggcaucaccaucuccuccaccuacugcuccaccaaccacgacuacaccaucuggaugcccgagaacccccgccucggcaccuccugcgacaucuucaccaacucccgcggcaagcgcgccuccaagggcuccaagaccugcggcuucgucgacgagcgcggccucuacaagucccucaagggcgccugcaagcucaagcucugcggcguccucggccuccgccucauggacggcaccugggucgccaugcagaccuccgacgagaccaaguggugcccccccgaccagcucgucaaccuccacgacuuccgcuccgacgagaucgagcaccucgucgucgaggagcucgucaagaagcgcgaggagugccucgacgcccucgaguccaucaugaccaccaaguccgucuccuuccgccgccucucccaccuccgcaagcucguccccggcuucggcaaggccuacaccaucuucaacaagacccucauggaggccgacgcccacuacaaguccguccgcaccuggaacgagaucauccccuccaagggcugccuccgcgucggcggccgcugccacccccacgucaacggcgucuucuucaacggcaucauccucggccccgacggccacguccucauccccgagaugcaguccucccuccuccagcagcacauggagcuccucgaguccuccgucaucccccucaugcacccccucgccgaccccuccaccgucuucaaggacggcgacgaggccgaggacuucgucgagguccaccuccccgacguccacaagcagaucuccggcgucgaccucggccuccccuccuggggcaaguacguccucgucuccgccggcguccucgucguccucaugcucaccaucuucaucaugaccugcugcggccgcguccgccgccccaaguccacccagcacucccucggcggcaccggccgcaaggucuccgucaccucccaguccggcaaggucaucuccuccugggaguccuacaaguccggcggcgagacccgccucuga

SEQ ID NO: 127163 - RNA, 1575 nt, Artificial Sequence
  derived and/or modified CDS sequence (opt2) from glycoprotein__RABV__HE801615.1
auggucccccagguccuccucuucgucccccuccucgucuucuccaugugcuucggcaaguuccccaucuacaccauccccgacaagcucggccccuggucccccaucgacauccaccaccucuccugccccaacaaccucgucgucgaggacgagggcugcaccaaccucuccggcuucuccuacauggagcucaaggucggcuacaucuccgccaucaaggucaacggcuucaccugcaccggcgucgucaccgaggccgagaccuacaccaacuucgucggcuacgucaccaccaccuucaagcgcaagcacuuccgccccacccccgacgccugccgcaccgccuacaacuggaagcucgccggcgacccccgcuacgaggagucccuccacaaccccuaccccgacuaccacuggcuccgcaccgucaagaccaccaaggagucccucgucaucaucucccccuccgucgccgaccucgaccccuacgacaagucccuccacucccgcgucuuccccuccggcaagugccucggcaucaccaucuccuccaccuacugcuccaccaaccacgacuacaccaucuggaugcccgagaacccccgccucggcaccuccugcgacaucuucaccaacucccgcggcaagcgcgccuccaagggcuccaagaccugcggcuucgucgacgagcgcggccucuacaagucccucaagggcgccugcaagcucaagcucugcggcguccucggccuccgccucauggacggcaccugggucgccaugcagaccuccgacgagaccaaguggugcccccccgaccagcucgucaaccuccacgacuuccgcuccgacgagaucgagcaccucgucgucgaggagcucgucaagaagcgcgaggagugccucgacgcccucgaguccaucaugaccaccaaguccgucuccuuccgccgccucucccaccuccgcaagcucguccccggcuucggcaaggccuacaccaucuucaacaagacccucauggaggccgacgcccacuacaaguccguccgcaccuggaacgagaucauccccuccaagggcugccuccgcgucggcggccgcugccaccaccacgucaacggcgucuucuucaacggcaucauccucggccccgacggccacguccucauccccgagaugcaguccucccuccuccagcagcacauggagcuccucgaguccuccgucaucccccucaugcacccccucgccgaccccuccaccgucuucaaggacggcgacgaggccgaggacuucgucgagguccaccuccccgacguccacaagcagaucuccggcgucgaccucggccuccccuccuggggcaaguacguccucgucuccgccggcguccucgucguccucaugcucaccaucuucaucaugaccugcugcggccgcguccaccgccccaaguccacccagcacucccucggcggcaccggccgcaaggucuccgucaccucccaguccggcaaggucaucuccuccugggaguccuacaaguccggcggcgagacccgccucuga

SEQ ID NO: 127164 - RNA, 1575 nt, Artificial Sequence
  derived and/or modified CDS sequence (opt2) from glycoprotein__RABV__HE801616.1
auggucccccagguccuccucuucgucccccuccucgucuucuccaugugcuucggcaaguuccccaucuacaccauccccgacaagcucggccccuggucccccaucgacauccaccaccucuccugccccaacaaccucgucgucgaggacgagggcugcaccaaccucuccggcuucuccuacauggagcucaaggucggcuacaucuccgccaucaaggucaacggcuucaccugcaccggcgucgucaccgaggccgagaccuacaccaacuucgucggcuacgucaccaccaccuucaagcgcaagcacuuccgccccacccccgacgccugccgcgccgccuacaacuggaagauggccggcgacccccgcuacgaggagucccuccacaaccccuaccccgacuaccacuggcuccgcaccgucaagaccaccaaggagucccucgucaucaucucccccuccgucgccgaccucgaccccuacgacaagucccuccacucccgcgucuuccccuccggcaagugccucggcaucaccaucuccuccaccuacugcuccaccaaccacgacuacaccaucuggaugcccgagaacccccgccucggcaccuccugcgacaucuucaccaacucccgcggcaagcgcgccuccaagggcuccaagaccugcggcuucgucgacgagcgcggccucuacaagucccucaagggcgccugcaagcucaagcucugcggcguccucggccuccgccucauggacggcaccugggucgccaugcagaccuccgacgagaccaaguggugcccccccgaccagcucgucaaccuccacgacuuccgcuccgacgagaucgagcaccucgucgucgaggagcucgucaagaagcgcgaggagugccucgacgcccucgagcccaucaugaccaccaaguccgucuccuuccgccgccucucccaccuccgcaagcucguccccggcuucggcaaggccuacaccaucuucaacaagacccucauggaggccgacgcccacuacaaguccguccgcaccuggaacgagaucauccccuccaagggcugccuccgcgucggcggccgcugccacccccacgucaacggcgucuucuucaacggcaucauccucggccccgacggccacguccucauccccgagaugcaguccucccuccuccagcagcacauggagcuccucgaguccuccgucaucccccucaugcacccccucgccgaccccuccaccgucuucaaggacggcgacgaggccgaggacuucgucgagguccaccuccccgacguccacaagcagaucuccggcgucgaccucggccuccccuccuggggcaaguacguccucgucuccgccggcguccucgucguccucaugcucaccaucuucaucaugaccugcugcggccgcguccgccgccccaaguccacccagcacucccucggcggcaccggccgcaaggucuccgucaccucccaguccggcaaggucaucuccuccugggaguccuacaaguccggcggcgagacccgccucuga

SEQ ID NO: 127165 - RNA, 1575 nt, Artificial Sequence
  derived and/or modified CDS sequence (opt2) from glycoprotein__RABV__HE801617.1
auggucccccagguccuccucuucgucccccuccucgucuucuccaugugcuucggcaaguuccccaucuacaccauccccgacaagcucggccccuggucccccaucgacauccaccaccucuccugccccaacaaccucgucgucgaggacgagggcugcaccaaccucuccggcuucuccuacauggagcucaaggucggcuacaucuccgccaucaaggucaacggcuucaccugcaccggcgucgucaccgaggccgagaccuacaccaacuucgucggcuacgucaccaccaccuucaagcgcaagcacuuccgccccacccccgacgccugccgcgccgccuacaacuggaagauggccggcgacccccgcuacgaggagucccuccacaaccccuaccccgacuaccacuggcuccgcaccgucaagaccaccaaggagucccucgucaucaucucccccuccgucgccgaccucgaccccuacgacaagucccuccacucccgcgucuuccccuccggcaagugccucggcaucaccaucuccuccaccuacugcuccaccaaccacgacuacaccaucuggaugcccgagaacccccgccucggcaccuccugcgacaucuucgccaacucccgcggcaagcgcgccuccaagggcuccaagaccugcggcuucgucgacgagcgcggccucuacaagucccucaagggcgccugcaagcucaagcucugcggcguccucggccuccgccucauggacggcaccugggucgccaugcagaccuccgacgagaccaaguggugcccccccgaccagcucgucaaccuccacgacuuccgcuccgacgagaucgagcaccucgucgucgaggagcucgucaagaagcgcgaggagugccucgacgcccucgaguccaucaugaccaccaaguccgucuccuuccgccgccucucccaccuccgcaagcucguccccggcuucggcaaggccuacaccaucuucaacaagacccucauggaggccgacgcccacuacaaguccguccgcaccuggaacgagaucauccccuccaagggcugccuccgcgucggcggccgcugccacccccacgucaacggcgucuucuucaacggcaucauccucggccccgacggccacguccucauccccgagaugcaguccucccuccuccagcagcacauggagcuccucgaguccuccgucaucccccucaugcacccccucgccgaccccuccaccgucuucaaggacggcgacgaggccgaggacuucgucgagguccaccuccccgacguccacaagcagaucuccggcgucgaccucggccuccccuccuggggcaaguacguccucgucuccgccggcguccucgucguccucaugcucaccaucuucaucaucaccugcugcggccgcguccaccgccccaaguccauccagcacucccucggcggcaccggccgcaaggucuccgucaccucccaguccggcaaggucaucuccuccugggaguccuacaaguccggcggcgagacccgccucuga

SEQ ID NO: 127166 - RNA, 1575 nt, Artificial Sequence
  derived and/or modified CDS sequence (opt2) from glycoprotein__RABV__HE802675.1
auggucccccagguccuccucuucgucccccuccucgucuucuccaugugcuucggcaaguuccccaucuacaccauccccgacaagcucggccccuggucccccaucgacauccaccaccucuccugccccaacaaccucgucgucgaggacgagggcugcaccaaccucuccggcuucuccuacauggagcucaaggucggcuacaucuccgccaucaaggucaacggcuucaccugcaccggcgucgucaccgaggccgagaccuacaccaacuucgucggcuacgucaccaccaccuucaagcgcaagcacuuccgccccacccccgacgccugccgcgccgccuacaacuggaagauggccggcgacccccgcuacgaggagucccuccacaaccccuaccccgacuaccacuggcuccgcaccgucaagaccaccaaggagucccucgucaucaucucccccuccgucgccgaccucgaccccuacgacaagucccuccacucccgcgucuuccccuccggcaagugcuccggcaucaccaucuccuccaccuacugcuccaccaaccacgacuacaccaucuggaugcccgagaacccccgccucggcaccuccugcgacaucuucaccaacucccgcggcaagcgcgccuccaagggcggcaagaccugcggcuucgucgacgagcgcggccucuacaagucccucaagggcgccugcaagcucaagcucugcggcguccucggccuccgccucauggacggcaccugggucgccaugcagaccuccgacgagaccaaguggugcccccccgaccagcucgucaaccuccacgacuuccgcuccgacgagaucgagcaccucgucgucgaggagcucgucaagaagcgcgaggagugccucgacgcccucgaguccaucaugaccaccaaguccgucuccuuccgccgccucucccaccuccgcaagcucguccccggcuucggcaaggccuacaccaucuucaacaagacccucauggaggccgacgcccacuacaaguccguccgcaccuggaacgagaucauccccuccaagggcugccuccgcgucggcggccgcugccacccccacgucaagggcgucuucuucaacggcaucauccucggccccgacggccacguccucauccccgagaugcaguccucccuccuccagcagcacauggagcuccucgaguccuccgucaucccccucaugcacccccucgccgaccccuccaccgucuucaaggacggcgacgaggccgaggacuucgucgagguccaccuccccgacguccacaagcagaucuccggcgucgaccucggccuccccuccuggggcaaguacguccucgucuccgccggcguccucgucguccucaugcucaccaucuucaucaucaccugcugcggccgcauccaccgccccaaguccacccagcacggccucggcggcaccggccgcaaggucuccgucaccucccaguccggcaaggucaucuccuccugggaguccuacaaguccggcggcgagacccgccucuga

SEQ ID NO: 127167 - RNA, 1575 nt, Artificial Sequence
  derived and/or modified CDS sequence (opt2) from glycoprotein__RABV__HM535790.1
auggucccccagguccuccucuucguccuccuccucggcuucucccucugcuucggcaaguuccccaucuacaccauccccgacgagcucggccccuggucccccaucgacauccaccaccucuccugccccaacaaccucgucgucgaggacgagggcugcaccaaccucuccgaguucuccuacauggagcucaaggucggcuacaucuccgccaucaaggucaacggcuucaccugcaccggcgucgucaccgaggccgagaccuacaccaacuucgucggcuacgucaccaccaccuucaagcgcaagcacuuccgccccacccccgacgccugccgcgccgccuacaacuggaagauggccggcgacccccgcuacgaggagucccuccacaaccccuaccccgacuaccacuggcuccgcaccguccgcaccaccaaggagucccucaucaucaucucccccuccgucaccgaccucgaccccuacgacaagucccuccacucccgcgucuuccccggcggcaagugcuccggcaucaccgucuccuccaccuacugcuccaccaaccacgacuacaccaucuggaugcccgagaacccccgcccccgcacccccugcgacaucuucaccaacucccgcggcaagcgcgccuccaacggcaacaagaccugcggcuucgucgacgagcgcggccucuacaagucccucaagggcgccugccgccucaagcucugcggcguccucggccuccgccucauggacggcaccugggucgccaugcagaccuccgacgagaccaaguggugcccccccgaccagcucgucaaccuccacgacuuccgcuccgacgagaucgagcaccucgucgucgaggagcucgucaagaagcgcgaggagugccucgacgcccucgaguccaucaugaccaccaaguccgucuccuuccgccgccucucccaccuccgcaagcucguccccggcuucggcaaggccuacaccaucuucaacaagacccucauggaggccgacgcccacuacaaguccguccgcaccuggaacgagaucauccccuccaagggcugccucaaggucggcggccgcugccacccccacgucaacggcgucuucuucaacggcaucauccucggccccgacgaccacguccucauccccgagaugcaguccucccuccuccagcagcacauggagcuccucgaguccuccgucaucccccucaugcacccccucgccgaccccuccaccgucuucaaggagggcgacgaggccgaggacuucgucgagguccaccuccccgacgucuacaagcagaucuccggcgucgaccucggccuccccaacuggggcaaguacguccucaugaccgccggcgccaugaucggccucguccucaucuucucccucaugaccuggugccgccgcgccaaccgccccgaguccaagcagcgcuccuucggcggcaccggcggcaacgucuccgucaccucccaguccggcaaggucauccccuccugggaguccuacaaguccggcggcgagauccgccucuga

SEQ ID NO: 127168 - RNA, 1575 nt, Artificial Sequence; identical to SEQ ID NO: 127064
  derived and/or modified CDS sequence (opt2) from glycoprotein__RABV__HQ166186.1

SEQ ID NO: 127169 - RNA, 1575 nt, Artificial Sequence
  derived and/or modified CDS sequence (opt2) from glycoprotein__RABV__HQ232301.1
augaucccccaggcccuccucuucguccccuuccucgucuucccccucugcuucggcaaguuccccaucuacaccauccccgacaagcucggccccuggucccccaucgacauccaccaccucuccugccccaacaaccucgucgucgaggacgagggcugcaccaaccucuccggcuucuccuacauggagcucaaggucggcuacaucuccgccaucaaggucaacggcuucaccugcaccggcgucgucaccgaggccgagaccuacaccaacuucgucggcuacgucaccaccaccuucaagcgcaagcacuuccgccccacccccgacgccugccgcgccgccuacaacuggaagauggccggcgacccccgcuacgaggagucccuccacaaccccuaccccgacuaccacuggcuccgcaccgucaagaccaccaaggagucccucgucaucaucucccccuccgucuccgaccucgaccccuacgacaagucccuccacucccgcgucuuccccuccggcaagugcuccggcaucaccgucuccuccaccuacugccccaccucccacgacuacaccaucuggaugcccgagaacccccgccucggcaccuccugcgacaucuucaucaacucccgcggcaagcgcgccuccaagggcuccaagaccugcggcuucgucgacgagcgcggccucuacaagucccucaagggcgccugcaagcucaagcucugcggcguccucggccuccgccucauggacggcaccugggccgccauccagaccuccgacgaggccaaguggugcccccccgaccagcucgucaacauccacgacuuccacuccgacgagaucgagcaccucgucgucgaggagcucgucaagaagcgcgaggagugccucgacgcccucgaguccaucaugaccaccaaguccgucuccuuccgccgccucucccaccuccgcaagcucguccccggcuucggcaaggccuacaccaucuucaacaagacccucauggaggccgacgcccacuacaaguccguccgcaccuggaacgagaucauccccuccaagggcugccuccgcgucggcggccgcugccacccccacgucaacggcgucuucuucaacggcaucauccucggccccgacggccacguccucauccccgagaugcaguccucccuccuccagcagcacauggagcuccucgaguccuccgucaucccccucaugcacccccucgccgaccccuccaccgucuucaaggacggcgacgaggccgaggacuucgucgagguccaccuccccgacguccacaagcaggucuccggcgucgaccucggccuccccuccuggggcaaguacguccucauguccgucggcgcccucaucgcccucaugcucaugaucuuccucaugaccugcugccgcaaggccaacggcgucgaguccaugcagcaccgccucggcgagaccggccgcaaggucuccgucaccucccaguccggccgcgucaucuccuccugggaguccuacaaguccggcggcgagaccaagcucuga

SEQ ID NO: 127170 - RNA, 1575 nt, Artificial Sequence
  derived and/or modified CDS sequence (opt2) from glycoprotein__RABV__HQ266618.1
auggucccccaggcccuccucuucgucccccuccucgucuucucccucugcuucggcaaguuccccaucuacaccauccccgacaagcucggccccuggucccccaucgacauccaccaccucuccugccccaacaaccucgucgucgaggacgagggcugcaccaaccucuccggcuucuccuacauggagcucaaggucggcuacaucuccgccaucaaggucaacggcuucaccugcaccggcgucgucaccgaggccgagaccuacaccaacuucgucggcuacgucaccaccaccuucaagcgcaagcacuuccgcccccuccccgacgccugccgcgccgccuacaacuggaagauggccggcgacccccgcuacgaggagucccuccacaaccccuaccccgacuaccacuggcuccgcaccgucaagaccaccaaggagucccucgucaucaucucccccuccgucgccgaccucgaccccuacgacaagucccuccacucccgcgucuuccccuccggcaagugcuccggcaucaccgucuccuccaccuucugcuccaccaaccacgacuacaccaucuggaugcccgagaacccccgccucggcaccuccugcgacaucuucgccaacucccgcggcaagcgcgccuccaagggcggcaagaccugcggcuucgucgacgagcgcggccucuacaagucccucaagggcgccugcaagcucaagcucugcggcguccucggccuccgccucauggacggcaccugggucgccaugcagaccuccgacgagaccaaguggugcccccccgaccagcucgucaacaugcacgacuuccgcuccgacgagaucgagcaccucgucgucgaggagcucgucaagaagcgcgaggagugccucgacgcccucgaguccaucaugaccaccaaguccgucuccuuccgccgccucucccaccuccgcaagcucguccccggcuucggcaaggccuacaccaucuucaacaagacccucauggaggccgacgcccacuacaaguccguccgcaccuggaacgagaucauccccuccaagggcugccuccgcgucggcggccgcugccacccccacgucaacggcgucuucuucaacggcaucauccucggccccgacggccacguccucauccccgagaugcaguccucccuccuccagcagcacauggagcuccucgaguccuccgucaucccccucaugcacccccucgccgaccccuccaccgucuucaaggacggcgacgaggccgaggacuucgucgagguccaccuccccgacguccacaagcaggucuccggcgucgaccucggccuccccaacuggggcaaguacguccuccucuccgccggcacccucaucgcccucaugcucaucaucuuccucaugaccugcugcaagcgcgucaaccagcccgaguccaccaagcgcucccucggcggcaccggccgcaaggucuccgucaccucccaguccggcaaggucaucuccuccugggaguccuacaaguccggcggcgagacccgccucuga

SEQ ID NO: 127171 - RNA, 1575 nt, Artificial Sequence
  derived and/or modified CDS sequence (opt2) from glycoprotein__RABV__HQ266620.1
auggucccccaggcccuccucuuccucccccuccucgucuucccccucugcuucggccgcuuccccaucuacaccauccccgacaagcucggccccuggucccccaucgacauccaccaccucuccugccccaacaaccucgucgucgaggacgagggcugcaccaaccucuccggcuucuccuacauggagcucaaggucggcuacaucuccgccaucaaggucaacggcuucaccugcaccggcgucgucaccgaggccgagaccuacaccaacuucgucggcuacgucaccaccaccuucaagcgcaagcacuuccgccccauccccgacgccugccgcgccgccuacaacuggaagauggccggcgacccccgcuacgaggagucccuccacaaccccuaccccgacuaccacuggcuccgcaccgucaagaccaccaaggagucccucgucaucaucucccccuccgucgccgaccucgaccccuacgacaagucccuccacucccgcgucuuccccuccggcaagugcuccggcaucaccgucuccuccaccuucugcuccaccaaccacgacuacaccaucuggaugcccgagaacccccgccucggcaccuccugcgacaucuucgccaacucccgcggcaagcgcgccuccaagggcggcaagaccugcggcuucgucgacgagcgcggccucuacaagucccucaagggcgccugcaagcucaagcucugcggcguccucggccuccgccucauggacggcaccugggucgccaugcagaccuccgacgagaccaaguggugcccccccgaccagcucgucaacauccacgacuuccgcuccgacgagaucgagcaccucgucgucgaggagcucgucaagaagcgcgaggagugccucgacgcccucgaguccaucaugaccaccaaguccgucuccuuccgccgccucucccaccuccgcaagcucguccccggcuucggcaaggccuacaccaucuucaacaagacccucauggaggccgacgcccacuacaaguccguccgcaccuggaacgagaucauccccuccaagggcugccuccgcgucggcggccgcugccacccccacgucaacggcgucuucuucaacggcaucauccucggccccgacggccacguccucauccccgagaugcaguccucccuccuccagcagcacauggagcuccucgaguccuccgucaucccccucaugcacccccucgccgaccccuccaccgucuucaaggacggcgacgaggccgaggacuucgucgagguccaccuccccgacguccacaagcaggucuccggcgucgaccucggccuccccaacuggggcaaguacauccuccucuccgccggcacccucaucgcccucaugcucaucaucuuccucaugaccugcugccgccgcgucaaccgccccgaguccaccgagcgcucccucggcggcaccggccgcaaggucuccgucaccucccaguccggcaaggucaucuccuccugggaguccuacaaguccggcggcgagacccgccucuga

SEQ ID NO: 127172 - RNA, 1575 nt, Artificial Sequence
  derived and/or modified CDS sequence (opt2) from glycoprotein__RABV__HQ266621.1
auggucccccaggcccuccucuucgucccccuccucggcuucucccucugcuucggcaaguuccccaucuacaccauccccgacaagcucggccccuggucccccaucgacauccaccaccucuccugccccaacaaccucgucgucgaggacgagggcugcaccaaccucuccggcuucuccuacauggagcucaaggucggcuacaucuccgccaucaaggucaacggcuucaccugcaccggcgucgucaccgaggccgagaccuacaccaacuucgucggcuacgucaccaccaccuucaagcgcaagcacuuccgccccauccccgacgccugccgcgccgccuacaacuggaaggucgccggcgacccccgcuacgaggagucccuccacaaccccuaccccgacuaccacuggcuccgcaccgucaagaccaccaaggagucccucgucaucaucucccccuccgucgccgaccucgaccccuacgacaagucccuccacucccgcgucuuccccuccggcaagugcuccggcaucaccgucuccuccaccuacugcuccaccaaccacgacuacaccaucuggaugcccgagaacccccgccucggcaccuccugcgacaucuucgccaacucccgcggcaagcgcgccuccaagggcggcaagaccugcggcuucgucgacgagcgcggccucuacaagucccucaagggcgccugcaagcucaagcucugcggcguccucggccuccgccucauggacggcaccugggucgccaugcagaccuccgacgagaccaaguggugcccccccgaccagcucgucaacaugcacgacuuccgcuccgacgagaucgagcaccucgucgucgaggagcucgucaagaagcgcgaggagugccucgacgcccucgaguccaucaugaccaccaaguccgucuccuuccgccgccucucccaccuccgcaagcucguccccggcuucggcaaggccuacaccaucuucaacaagacccucauggaggccgacgcccacuacaaguccguccgcaccuggaacgagaucauccccuccaagggcugccuccgcgucggcggccgcugccacccccacgucaacggcgucuucuucaacggcaucauccucggccccgacggccacguccucauccccgagaugcaguccucccuccuccagcagcacauggagcuccucgaguccuccgucaucccccucaugcacccccucgccgaccccuccaccgucuucaaggacggcgacgaggccgaggacuucgucgagguccaccuccccgacguccacaagcaggucuccggcgucgaccucggccuccccaacuggggcaaguacguccuccucuccgccggcacccucaucgcccucaugcucaucaucuuccucaugaccugcugccgccgcgucaaccgccccgaguccacccagcgcucccucggcggcaccggccgcaaggucuccgucaccucccaguccggcaaggucaucuccuccugggaguccuacaaguccggcggcgagacccgccucuga

SEQ ID NO: 127173 - RNA, 1575 nt, Artificial Sequence
  derived and/or modified CDS sequence (opt2) from glycoprotein__RABV__HQ266622.1
auggucccccaggcccuccucuucaucccccuccucggcuucucccucugcuucggcaaguuccccaucuacaccauccccgacaagcucggccccuggucccccaucgacauccaccaccucuccugccccaacaaccucgucgucgaggacgagggcugcaccaaccucuccggcuucuccuacauggagcucaaggucggcuacaucuccgccauccgcgucaccggcuucaccugcaccggcgucgucaccgaggccgagaccuacaccaacuucgucggcuacgucaccaccaccuucaagcgcaagcacuuccgccccacccccgacgccugccgcgccgccuacaacuggaagauggccggcgacccccgcuacgaggagucccuccacaaccccuaccccgacuaccacuggcuccgcaccgucaagaccaccaaggagucccucgucaucaucucccccuccgucgccgaccucgaccccuacgacaagucccuccacucccgcgucuuccccuccggcaagugcuccggcaucaccgucuccuccaccuacugcuccaccaaccacgacuacaccaucuggaugcccgagaacccccgccucggcaccuccugcgacaucuucgccaacucccgcggcaagcgcgccuccaagggcggcaagaccugcggcuucgucgacgagcgcggccucuacaagucccucaagggcgccugcaagcucaagcucugcggcguccucggccuccgccucauggacggcaccugggucgccaugcagaccuccgacgagaccaaguggugcccccccgaccagcucgucaacaugcacgacuuccgcuccgacgagaucgagcaccucgucgucgaggagcucgucaagaagcgcgaggagugccucgacgcccucgaguccaucaugaccaccaaguccgucuccuuccgccgccucucccaccuccgcaagcucguccccggcuucggcaaggccuacaccaucuucaacaagacccucauggaggccgacgcccacuacaaguccguccgcaccuggaacgagaucauccccuccaagggcugccuccgcgucggcggccgcugccacccccacgucaacggcgucuucuucaacggcaucauccucggccccgacggccacguccucauccccgagaugcaguccucccuccuccagcagcacauggagcuccucgaguccuccgucaucccccucaugcacccccucgccgaccccuccgccgucuucaaggacggcgacgaggccgaggacuucgucgagguccaccuccccgacguccacaagcaggucuccggcgucgaccucggccuccccaacuggggcaaguacguccuccucuccgccggcacccucgucgcccucaugcucaucaucuuccucaugaccugcugccgccgcgucaaccgccccgaguccacccagugcucccucggcggcaccggccgcaagggcuccgucaccucccaguccggcaaggucaucuccuccugggaguccuacaaguccggcggcgagacccgccucuga

SEQ ID NO: 127174 - RNA, 1575 nt, Artificial Sequence; identical to SEQ ID NO: 127062
  derived and/or modified CDS sequence (opt2) from glycoprotein__RABV__HQ317918.1
